United States Patent Application Publication US 2014/0057251 A1 - sequence listing, part 110

SEQ ID NO: 199912 - DNA, 2120 bp, Cannabis indica
tttttatagtggtatttattatacttacatataattattataaattttttaaaatttttaaataatttactgtttgaagtttttagaatacccgcataataaactagaatattaaaaaattatattttcggtattataaattataactaatattgctatatacgaaaacaaatatttcaacaccaaattttaaatgtataaattgattaaaaaattgtaataaaaaattataattagtatactatatgtatatattgtcttctttataatttactagacattaagcttagctagctaccaccaccaatttctttctttcttttctcttttggaaaaaaataaaagaaagaaataagctgccactgtcactgtggtcattgagattcgagtaaagctattctttatttatttacaaaatatatatatatatttatcaaaatttccaatggttatggaaagaatttgaaaagggttgtttttatattataaatgaatggtaaaaagaacaagagacctatagaaaattaaatccatatatagtagaagtctcattgaatggacaggatggacttgtctttttccaatctctctctctctctatatatatatatgtatacttgttcacacatcattttctttcttataatttatatatatatttatatatatcaatttttgtggtagagcaaagctggtctgttttcagatgatcaatgctacgtacgtacttcttgactttttctgatcataacaatgtgacaatactgcatgcatatgtgaatctcattaattaattaattaattaataattattcaattgttttatatatcttaattttcttcatgcatgcatggtaatatatatatatattatttttttttttatgaaatatcaacttcattaaatcaactttctgaatacaaaatgtctagtatagaaactggaacattagacgcagaaataagacgaccagaaagacaccgtgacatcctagcaacagcatgtattagacggtttgctgatcgtttaacaaaacgaattttaacaaaaggcaaaaaaaacataagtgaaatacaatcttgaaccaaattcccaaaaacataaaaaagaggtgagcggctccgaatagtttggatagcatggtaatattggttaattacttgtacatatacatataatagaggaaattaattattattagagtatatatattgcagatataacttacaaatatatatttctgttacttttgtgaacgttttattaattttattatatatataccaataccactacctatggggtacctaattgcaaactttttgtggtgaaagaaaaataataatgtatattgtgagttgctatgagcctattgattatttcctgtttttaagatgatcgtttctggttctgaaaattctaatttgcatggaggattaggactgaacatcgtacgggtttactgggtttcgagtttgcgggtttcgagttcaaaaaaatgaaaccaaacctgaacccggatagactacgggttggcgggtttcggttggccggattgaccgggttagcgggttgacctggtcaactctttaaaaaaattaattttttattcaaataattatttcatttatttttgtatttattaaattaaatatatatataatataacaattttagggttttttatttttaattatttttattttttaattaatatatataaaatgtaattaaaaattaagtagtcatgaataatcatcatcgtttggagccacaaatgcttctaagaggtaacaaaggagagtacatggtttcaacgttaaagggttgcaaagagcctagacaaactctattctgggagccttattgcattgccacttcgtcataataatatcattatccattggtataaatcgatggcttcactacttaattaattactgataatccattattggctaccttaatccgatatatgtatattgttcttcttaattagctcaatctaaggaaataaaaaaaggagagagagagagagtgtgatgcttcacttttattttcttttgcaatgagtatgatgctttactttgattatgatcaaagaaagaaaagtgatcac

SEQ ID NO: 199913 - DNA, 1698 bp, Cannabis indica
ttaaattcattgaagaacaacccatctcctctctcaccaactctaaagctagagcataaccactgcgtactgtataacactcattggaatcataatgccaacaccaacggtccccataagcatcacttggtaacgagataccaagtattacttctacatccatcggcaagaatacatgatgtaacgctggtaaattccaacaaccattaacagcaatgaactccttaactaaccaatccaccccaggcttaggtgttataggacgaattgttctaggtcgcggcagccaagagtctcgaaaagcctcaatacttgttccgtcccccacaaacatcctcaaccccttacgcagtagctccaacccccatactaaacttgaccacaaatgggaagagctattttctatccttagcctccaagatagacgagttcaggaaatacttatgcttcagaacacaaccaggtcatgaattaggctcttaaagcaatcgccaaacttgcttggccacgattgcttgattaaacaactctaaatctttaaatcctaaccctcccttagacttaggctgacaaacactctcatttcacccacacaatttttctcttatcactgttagttccccaccaaaattgtaatataattgagcgcaagttatcatttgttttagaaaggaagaaacattcaattaagcaaccaaacaaatcattacaatataacagaatcggttgtttcattgttaactctgcttatcatttggctaattccaccttctctgctcctggtccttcgaatcctgctacctataaacgttggtgggcctcggtttggtcctccaatatccctcctaaaattaagcattttgtctggaaagctttcaatcacatccttccttccaatctcaacctcttccatcgtaagtctgccccctccccatactgctctctttgtcattctcatcatgattccaacacccactctctcattcaatgttccagagcaggtaaagtttggaaaaactcatccttttctcagttttattttaataataaaaattgtgatgttaaggaatttatgctcagaggattttattgttttgctaagatcaacttgctatttttttttgggtttgctttgggcaatttagaataaccgaaacagagctatctttagttctaacagtaccactgatttcaacttggagaattctgtcagttgttatttgcaggattacagggacgctcaacattgcatttcttccccttcccccagttcccaccagcctcctacaaggctacaagtccccagtaacatgtatcatcttagtgtggatgcagccctttccccatcttccaacaaacacgggtatggagctgcagtcactgattgtcagggttcagtagttgccactctttcgactccttcaatttcagggctccctctgatttttgctgaagctgaagctctcaacggggcgttgctttagtgtcgtgtagttcgtttgcctctcgctgttattgcttccgactgtcagaattcggttcatcgtcttcagaagttctctccggatcgttctgatctttcgggttatatcgccacgattgtctcctctttgtcttcttttccaggtgcctcagttcattacatcccaaggacaacaaacacaacagcccacgaccttgctcgagcagcccttggaa

SEQ ID NO: 199914 - DNA, 676 bp, Cannabis indica
gtatccagattctagatcagtagtacaacaacaacaacgtatccaattcacacacttggatggaatagaagaaacaaaacgatgatagacaaaatgtcttttttatgatccaaatatgatacaaatagaacttcacaaccataactagagatgaaaataaacttaaaaccaactaaattatattcaccaaatgctaagggtctctttcagaattgatccaaagaccaaagccatttgaggaccttctaacattcacaaccagtagatctttgctgccgccctccaccaacgtcgattgtatcaggaaggtatctaacatcaccaacagaaagaaagaaaaacaaaataaggcaaagttaaccacacaaactcaaggcaaagttattaaatagaaaacgaatatacttcacacaaagtagaatagctatacaatgctatcctcaaagtagacagttcttggttttattgggctgggatgaaatcaaaaagtagttaagcaaacaacttttactattatgactaattttaatccacaatcttattctacattagttaactctctctgttactagatctgagctatctttcttcaaattttcaacagtagattgaatgtaataaagtagacacaaatctcttttttataaactttataagtgatcagaataatgtactt

SEQ ID NO: 199915 - DNA, 767 bp, Cannabis indica
agtaatcaatcaagttgaattctcattctacttttgtactatatttctgccttaggatcttgttttccattttgggtttttaatttttttcctttttgggttggggtatggacattattatattaggtcttgtttggcttaataagtgctaaagttgcaatttttacacgagaggattttttttttctttccgtttttttttttttttgtgaatttgttttagatataattaatttacatgttcactagtcactactactatcaatttggtaagtacccacttcatattttgacttggtatttcaaaattgaatctgacaaagtgacacatgtggggaaattctgtttgggaaaaaataataattaagacttaatatccacttccaacattttatgatgatgctatgctcacattgaattgaaatgacattttctaattatgatgtttggctctactcatccatttcaccttttaattatttcactctctcccttacattttaagcaatgcttggtttctattctctttttctttcttattcatatcaaataaaaatatatttgaccacttttgagttttgataacacacaaaaccctacataaaaaattacaaattttataaatttttataattttttgtgtaaaaatatgattttttattttaaattaaagaaaaaattaagtaaggataactaggtactcaaagtaattatgagggtaatcagatttactgttttttttatatattttatcaactttttttttt

SEQ ID NO: 199916 - DNA, 1199 bp, Cannabis indica
tacgaaggaaaacgttaacgtcgacgacgactactaaactaaagtcgcgttttggttttgggtaggtacaacgtaaggtcgtcgttcggtacggacgaaacgaaaaaaagttaaaattttaaacgttaaacggaaccgaacctactaaacgaaaaaaagtaaaaggttagggtacgaaactaaaggtcggttcgttcgtcgtcgtctttagggttgggggggtaatctgcctgtcttgtggtcatcctagtttgagcgctaaagttgctatggcgtgcatcttgaacaagctgaggaaacgtggtgcttcatcaacaacaaaataatcaaaagtaggtacatgaccagaccttattgcattataataatgttgcatggcgtaataaattttccacatgcaactgccaccatccaagtcttgtataccatctctctgcgaataagcaaagtggaaaaggtggaggaaagatttacgactcgggtaagaggaagaagagatgggtccatatttgttaagaatgttgtaagtgatagattatctctaacgtttttgtaaatctttaagtgcccagtgatgggtggcgtaactgataataagaaaatttctattactaattcttatttaccaaccaatctggcttttttcggttagggataatatcttgcggtctatgaaaatagttgctatacagacccattacagatttttatgctttattgatcttggaaggttattataggcaggtggttgggttattttcagcttggaaaccaaagaaatcggaccagtttctgttgaagcttgtgtaactaaattcattcatattgttgggaaaaagcaaggctcaatttgttgacagtgaatttgcaagtgtgagctcaatcgacattcgacaccttccatgagagcatagtgtgggctcaattaatccatcaatcctatactttgtttcctatttatttttttattcattaattattattttttttttgttatttgttttaagccattagtttgatgttcttgtaaatctagctataaaacgccaatgccagcagtagatgagtcttttctttttctttttttgttgaatggagtccctgtggaagaatgcccaagtgaagccacgtctaaagtttttaaattaaaaaaaaaaagccaattaagcagtataaaacgcatcatataaacctatcat

SEQ ID NO: 199917 - DNA, 1029 bp, Cannabis indica
cgtagcgaggttgatgcctcgccgggtattatttatgcaacccttatgattgtgtcttctgaggtgaaatagtttctcgtcaacgcatgagtccataggttgtacatccttatctcgcttaagactttacagtcagcggttataaatatactctgtcactactacaaaatttactattcacgtcggtcaacgcgactgttcatcgcgttgaccgacgtaaatagtgccatattatatagaatcgtcacttttaaaatgacacaaataatagataatttgtggcggttccatatccttcactaattacaaaaccgacgttaaaagaaaaaaactggaaaaaaaaatatacaagattagcgtcattttggaagccttgcaaacattttctctgtcattttcaaaccgacagtaaagaagttccaagtgaaccaaacgacgcaaatcctcttatggttcacttaccacaaatatctcaccccaaatttcttagactgagcaaatcattcgtcgactctctctgctagtgtgaaccgtagacgattttgaatcatctccgcccctctctccttctctcagattttcgctccgccggcgtaagctcttctgctcacgctcttgtggtctcgatctcccctacctctgtaagtctctctctttccctcttgttttctctccactaatctctttgtaagtcttaataaattttttatttaaatttatatatcatttctttacaatctagaggttatgatttgttcatatttaaattttgaagattgtgttgtttatattattcgagttgcagaagcattgggttatcatatttcttttgaattcctctctttcaggtaaatgatcctctgaaatatcaatgactttctagtttgtgaaattttagaagtttttggtttttttatttctttgattcttgtttacagattgagttttgtttaatttttgttgttgtgttgaatacgtatttttcgattgaactatgaatatgtcaatataattttattattatagtat

SEQ ID NO: 199918 - DNA, 530 bp, Cannabis indica
ttctctaggtcggtggtgagactggataaccgagaaaattaagggtgaaaaaggtaattaattgactagttcaaacgataagttttcttgtgctaatttgctttgaagccaaaacccaatttctttttctcagtatccaaacagaaaatgaagtattggaaagtaacgaacctcgtgcatgttccataaggaagcgtgccaaagagccttgtgagcccatcttgcccaaaactccatacccacctggaattaaagaacacccaatttccaatttaacataaaaaagctgtagaaattttctcaataattgaatgaataagattttcgtaataaatacttaccgcagcaccaacggatagagcaaatgtaccgaacatttcagtcaaaggaatctctctaccctgcccagaaaaatacaaccaattatcagaacactccaatcgaagataatcccacaacttagattaaagagaaagaaagagaaaagtattattattattatacatacctccatttgccagtaaaatcta

SEQ ID NO: 199919 - DNA, 1000 bp, Cannabis indica
tattccatggatctgattcttttgatttaatttattgtgtcttggagtatgagttcttgttcttcgaagaataaatcatagacttgaaaatcaaaagatattgtactgtgttgttttgttcttctatttcttgccttaatattcacgttaagacttagtgagagaatcattcttaggacactaactaaatcttaattgaaattttgtttttgagttgagaaaaaagaaaaatgtgattggaaacctttcggtgcataggtaattggaaatgattctttttttattgtcacttgttttatttacatgtaaagaatggaattgaaattgacatgttttcttgtcttttctacctttttcttgttgtaaagtggagttaaaactgttgtgttttctcatgttttagtttacgtaagaattagggtaatctatggtggttagaacaaaaaaagagctttgattttgacatttttttattagtgcaatcctcttagttaagtatgctttttttgttaaaaagggtttaaggaaaacaactttctaccatatcatctatcaccatgcatagcaatgtgcacttattattattatttattctcttaattgtccactcaaatgaattaggaatatattaattgatctccatccccacacaacaccaagtaaataactaaaataatataagaacatttttatttttctatttgccacttgtgcttatttatttttcttattggtaacatatcccactatctataatatgttccataaacaaagacaaatggaggaaaaaaagcatagaggttttgatggggtttatattggtttttgttgtaaaagacatagcttaattactttgaaattgtatgtcttcaaaattcacttcattccctaaagtcatggagtaagtaggttgtgtatctaaggttgatttatttaacaaccaaaattcaagtgggtagaatgttataggtattggtaggttcaaaattactaaataggg

SEQ ID NO: 199920 - DNA, 1241 bp, Cannabis indica
atatatatatatgtgtatatatgagagaatttgatagtcaatacctcaaattccacttctctcttcttttctaagtcaaccttgttgccagccaaaaacatgatcaaatttggattacctgtttcagtgtaataaatattatatcacataaacttcctgaattaaagtttgagttattactttaattttctcctttgacaatatgtacctcaaaattttttacaagtactctgcatattattattattaagccgaaaggtatgaaaaacatttgattcatattatgaatagtgttgttgaattaactaccttgcttttgtaattcttgcacccattttttggctcttacaaatgaatcctaaaatcaaaacaagtattgacattgattattctcccaattttaagctgcattatatcatatttttcaacaacactatctcaaaaatttgcacaagaattttaatattacattttaacatggatgagttataaattgagattattcaaatcaaatattgcttatgagaacatataaaatgtggaccatggtcaaaatacaagcccatcataagtaaaatcaactaattagaaagaagaaaaaaagtttgttctaagatatatatatatatgtatatatatatattaatttctagagaacttcgaaaaataggcataatataagatgtaagtaaaaaaaaattatttttattgtaactaattataaattattattcttttattataactaaaagctaggtaacatatcacaaaaatgttacacaaacccattttattgaataaattagtgtaaatgttaaacattaataatacagtaccatggttgtgatgtcatatacaacaattgcagcagctgcaccacgatagtacatgggagccaaactgtgatagcgttcttgccctgctgtgtcccatatatcgaattttatagttgcttcatttaatgataacacctgtgtaaagaaggctgctccaattgttgactcctgcatcaattattactaattatatttcttactggataattcttatatactaacattaagaagatggaagattatctatataattgaacctggtaatcattgaactgtcctttgataaatctcaatactaaacttgttttaccagttcccatgtcacctagaacaacctgtactcagttaatgttaaactaagttatgttcaataatctaaacagaacacattatattttcaattaa

SEQ ID NO: 199921 - DNA, 940 bp, Cannabis indica
taataaaataataaaaaaatgtagaggacagtccgtataaaaaaaaatacgttagtttgttaatttaaagaacataaggattgacctgagtaaaacacgatacgaattcgaacatggtacaaatactatgatatctaatggctaaaactaatataaccatcataattatatattatgaatatgtattatatactcaaaacttaaatttgtaagaggagaaaacatggtatagtagatcttgattggttaactaaaattactatgtaatgtaattattttccttacatgtaaatgggaaaaccttaaactaacttcaccactaattctattcacatttgtttgaattatatacaatctttctgatttcaaaaagaatcatattctttttgcccaaaggttcgtttgaccaagaaagtctggcatctacaaagaaaaggtgtacaaaggctagcctccatccaaaggctggcatccatctccaatggccggcctccatctccaatggctggcctcctcttggtaaagttaacaagaatatgagttgtaggatcttggcaaacacatgacctaccagatcctagctggagcacggccggctagacctcaacctgcaggtgcatggctgaccaattttttcctttgcatcgggtctgggatggggtcgggttctgcgttcgagtctgtggctggggcttgagtttgggtctggagtccgatgttcaagtctgagttcgagatctaagtttaggtctagggtctgggtctggaactggagttcgagtccagctccaaattagaagatctatatgtaaacaatcaaattattacctcataattatgtctgactttcggtaataaataaatgatgccaaaaaaagaattaataagaagatttaaccaatcaattattgtattgacttctcaacaggttcttctatat

SEQ ID NO: 199922 - DNA, 1935 bp, Cannabis indica
attatttattaacactatatatactactcttgatctttgaatcactagaatttaattcttaattcttcgtttattattattcccattcatttttattcctttgttcttattattctgcaatgccatgaatggaattcaagactattttttctcgagattttaaattaggaattcatatataatataatttaaatcatatttaaatatatatgtatttatatgttttttaataataataataatttattgaggttaggtagtccttgaataatggccagagagaagtagtgtagtagtatcactttttgtcaaaataatatgacaaagtcatggtcaaaataatttatcattatttcctatctgggaaaaaggtgtgttttaactaataatgcatgtgtaataaataaaaataaacaaataaaataataaaaagaatgatctacacaaatgtagctagagaaattttgtggaaaaaggaattcacactatattaaacaaataaaaaatcaaatatatatatattatatattattaaacaatataataatatatagtatataatgccttgatttgaatgtctctttcaagttatttaattacttttggaattaggtaaaagctcttttgaagaattagatggatcgtgaaattagcatatataaatatataaatatatatatgtatatagcagctaataagctatatatataaaaatatatttagattagatgatcaccatccttttgacaaaagtgcatagaattttttgaattgttaatgtcaaacttcatatagtaggtttcgatttttttggggtgcagctaagctagctatattttttattttgatttgatttgagattttttttttaattaattattgagcgttagtacatattacatgctaaaaatgaaaatgttctcacgtgcaagagaatatatacaaaaaaaaaagaagcaattatgtgtttaagtgaaaaagactatatatattatagaagatatgattacttagtgattgaagaatataattagcaattaaattaatattataaatgataaaagaccataaagttaaaaacctaacatcccacccaaaagaagattaaataaaaaaaattatagtaattaattaaggggtacgtacgtagaaaaatcaaggaatttaaagtagtcgatattgatgaaaagacttctcacatgctttgttttattttacttttcaaaaaaaaaatcttctccgaaatgatcatgtggaaactctaggattttaaaaatgtaatatataaagagagttattaaaagagttaatttcttaattaagatctaatatataactttaaaatataaaaaagcttattcactaatggcactttttatataatattattattcggacgtaagtaatatatttataataatatcaataaaatactctaaaataactagattttttatatatatagcttgcactactacataaatatatgtgtgatttagcattaaataattatataactcaattaatttacaattatggaaaaagattgataatggggacaagtttcgtgcttttgtaccattaatatattttaaacttctacacacaactctttccctttctcatcactcatatttcaaaactacctaactactttgattattatttgtgtctataattttttcttttttctttttgatttcctacgacaacatggcctctgtgatttatacccactttattttattcagtttttaattttttactttttattttttattatttttttaagatatactcatttttatatgatatatcctcattatctattaagttaaataatataaatcatgtgtttaacttaagtcgagggtgaaagtatatgaacaacacactacaaaaataagtatatttcattatttaattaaataaaat

SEQ ID NO: 199923 - DNA, 1891 bp, Cannabis indica
aaaacttttgaagctaacgagttgggtctagtgagtaatctccacccttgcttccctaacattgccaagttaaaatcatgtaagtcacgaaaaccaagtccacctccttttttgttcttgctaagtttgtcccaagccatccaatgtatacccttatgagaattcttcgatgtttgccaccaaaatttggtcatcattctctcgatttctatgcttatctccaatggaagaaggaacacactcattgcatatgttggtaaagattgaagaaccgttttcaccaaaatttccttgcccgcctgagataaaaactttccttcccaaccttgaatacgtctccgcaccttgtccttcaggaatcccaaaacaatggtcttgttacgagacattgtacttggcagtcctaaataaaagctaccttcagccgcctctccaatgttgaggaagttacatacttgttgtctaacaaacggcgttgtattggcactgaagaagatggacaatttagccaagttgatttgttgaccagaagcaagctcaaatttacgcaataattcttgaatacgaccggattcctccaatgtagctttacagtatagataactatcatcagtgaatagcatgtgtgaaacccgaggtgcccccattagccaccttacaaccgtgaatatagccatggttttcatacttccgcaagagagaggatagaccttccgcacataggatgaacaaatacggagagagaggatctccttgacggatccctctggaagggattataggtcccatttcatgacagccatggatgattcgataatttgtcgaggtaacacaagacattaacaagccaatccatcttggagcaaaccccaatttcatcaatatagcttaccaaaaaaggccattccgacccgatcatatgccttgctcatatcgagtttgagcgccatgaattcccgttttccctttccttttacactttaaataatgaaggacttcgaaagagaccatgacgttatccgagatcaatcgaccagtaatgaaggcactttgtaagtccgagacaatagcatccatgaatggtttcatcctattagccatcacttttgttatgactttatataagacattacaaagagctataggccttaaatctttcatcgtatccgggcatttcttcttaggaatcaacaccacgttggccattccacaagccgaatcaagttggccactatcaaaaaaacgctgaacaaaggaaagaacatcttttttaatcacattccaacatttttgataaaaagccggagtcataccatcgggtcctggacttttatccggatgcatttggaaaattgctttgcgaacctcctcctccgaaccggtgtactgaactcctcattagccaaaggagggacgagtctatccacactatcaataacctcagtacaaactgatccagaagccgagaacaaagaagagtaatattcaaccataacctcctttaacccattgtcccagtccacccaaacaccatgttggttcttgagctttgagattgaattattcttcttcctcttgttgaccataaggtgaaaatatttactattgtggtcaccttctttgagccaaaattgtttagccctttgtttccaaaaagtctctctttgatcaagaatagacgaaagttgatttttaacttcatcatatctactaatcgaggcagaatcccttcggtttttcagctgattaagctcactcttgcaactttttattcttttcttgaagcacccagtaatttctttcccccagctactaagattggtagcacataaattcagtttagccataatccccatattactatcccaaccccaacaatcttcaataattt

SEQ ID NO: 199924 - DNA, 836 bp, Cannabis indica
tattatcaatcaaataatatgtatattgatattaggaagccacaactctcatcgaatgaagatgcaaagtaccaaactgcagaactcaaatttttggagagttacgtactaagacgagagagaaaaagagttttaatacgacactaaagattcagatttaaggaaaaaaaaagtctccatagccaaagcaagtttttgactcatatagaatcattcaatacattaatctattcattttagttttccattcatgaatcttcataaaaaccccaacaataaattaagaacactcattttctctttcctaattctttcttctgtgaaatgtagcgtatttttcaaaactaattgtaaaatatcaaaaacaaattcaaaagtaacattaaaaaaaaggatgttaatatatcaagaacactcgttagaagaagagatcaactaatgcacctttatctatttcggcatttcaaaaaataatttagactaatttttttttcatattcgtttacgttatagttatttaatatatcttacaaaattttgagaaattcacaataatttacatatatatatataaatatatatttatatatacaatctcttggagtgagagtcacatgggcttgcccaaattaaaacaaataaaatctaccacagaaataacaagagaggactatatatataaacacatatataatcttttaggatgagtgttacgtgagtttgcccaattattaaaaaaaacaatatataaaagaaaaaaacggccacttttctatcgattcaaaatatttcaaaaattttaaatacatattcaggaaagtatgaacacttctgca

SEQ ID NO: 199925 - DNA, 761 bp, Cannabis indica
ttatgactacatatataatataattataaaagcactctttttgtaaaaaaaaatataaaaataagcaatctttttggctcatttacaatatgaatgtttttgcaaaatgtacgatatcaataaaaaagaattacagcaaaaaataaaaataaagtaaataataatagtagaaaaaaaaaagaaaaatattgaccgaattggggaatgtcaatccccactcttgaatgtttcttgttaaatccgttaacaaattagaccaagacagagagccaaactttaatatacgtttagaatttttgggtttttctatggtaagcagcatgtcactatattaaagctatagttcgttaggtaatatacatatatggtctttaacataaaaagagccactaatgattatttgcaatgcttagaattgaagtatcattagaagttatttagacagcagtacatttcataactaattaattagctattaaatcaatcttatagatcctaaagtcataatgtaacgaaatgtttaacagatcaattaagacattaattatctaaataacactcaaaatgttttaacaccacattaatgtcgatctactacaagaacaacataaatgagaatgctttaaaaagttgttaatgacattgacatagttttggcatcttttaacatatactcagagaaaaaaatgttaaataataatgcttgaaaatgagatctttactatcttctttctttcgtttttattttattattattttgt

SEQ ID NO: 199926 - DNA, 933 bp, Cannabis indica
ttggcagtaatacattaacacttgtggaccactaaatttcaggcaccaacgtttttactgtacattttgctgttttgttcgaatacctcaatttcagtgctttaatatatgagatcatcttcaaggaatgggtgtaaattttgtgttgaatttagaaaaaaaaaatgaattaataatattatatttagtttaaattttataattatgctctaagtaaaataaatataaaaaagtaaacaaaaataatatatttttattaaaagtatataaataaaaatatataaagttattaattacagtttcaaaaaaataaataaaaaaattatatttattattgcgtaaaatttgctttatgttatatttcgttcaaatttagtataatttttaacatgtataattttattttagaccactaatttgtaatttagttatatttttacaaaattcccttatttaattatatatatataaaaaagaaaaatgtatgttacgtacggtcattaggctttatttaggaagtttcggcaattggaggagttaggtcaagtattgatatgggacacgtgttgataaactgtacgtccattacttgaaaacgaacaaagtcacgtactaatttctagcttaacacactttaaaacaccagctccccaacataatttatttgtaccatttatttccagtcatattttccttttttgaaaaaaaatattatctacaaattcaaatttagattattatctgtagtacgtaatatataaaaccctagctacaactagatgtgaaataatatatatgtgtgaatgcattatattattggtccatattagagtataatatatcaaacagaaataaagtaaacaaattcgatagctcatgattttcacaaaaaagcgagacaagacgtacgtaaaattaaagtaaatgcaaacg

SEQ ID NO: 199927 - DNA, 3031 bp, Cannabis indica
tgatagtagcaatgaaaaaagtgactagaaaattctctctgctacgagaaaattctgtctaggtagctagctaagtaagaaagaagagcccggacatggaatgggattatgaaacggagaaaaggttgtcatttatagaagacggggaagggtaatattgtcatttcaggtgttttggggatttgccttaattattaattatttatttattttgatgtaaatagtgacggagtaggcatgttgttgtgtggtgcgggacccatgacgggcgattaattttgagtgtcgttttcgagtgaaggtagagagggcgggacccacacccgtgtagtttttttatttatattatattattttttatggagattttttttttaattttttttttattttagtgttgatgaaatttatgaacaggtcagtctgttttctagtgagaagagtccagatttttttttttctgactatgaagcagtaaggttgtgccacgtcagattttgataatgctatgttttatgacatacttttttaatttaattttaattatgatacttttaaatggagatatttgaaattaattatgtaattagtgtgtaattctcatttttctcattttatttatatcacaattttagtaaagagtaaaatctaccatttcatttactcatattccattgatgaacctaaataatgttagacatgggatataaataatgcgtgtgattcggaaagtattgttggattaattgccttttattgactcaagctctacaagggtttcttcttcttctctaagcttcctctcccatgctctcttcgaaagagccttcatagatgtcttgctcttgaagccttgcctgcctcctccatggatattctcttggaacaaactcgagagatgactgccttcgacaaagatagtttagaaattaaagattcatagcaaacaaagtggacaaactctatctaattgggagattgtgcatccaaaaaccccattatcgttctctactcaagaacataatttgttgtccatgaaatttgagggaacttgattgggacctcaaaatcaagaagtcgacttccacaaccctctttttgggtttctccttccgtcacggtcaacatctggaacgtattattggtcgcatgccttgggttctaaattcgggtttcctaatcttagaacgaatgcatggaattcccctaatctaggaaaacaaattggctagatttcttttcacacatcataggatcgtcttcttcgaggccaatacattcagcaatgaagtttgctaatgtctaccctttgattgttgttcgaggctggtaggtgatctcaaactgacctagttcaactgcccacttgaataggtgccctaatgcttctagcttcatcagaacttgcctaaatggttggttagttagtaccttgactgtgtgaacttggaaatatggccttagctttctggaggctaggaccaagcagtaggcttgcttctcgatggagggataccttggcttggcctcaacgagacgcttactgatgtaatagacagggtgttgtatcccttcttcctcacgcactagagtagcactgactgcatgctcggtgattgcccaatagatgtatagttcttcactatctattggtttggatagaatgggaggcttggctagatggagtttgagggcttggaaggcttgctcgcattcatccatccattcaaatcccttgttgcttcctttaagtaaattaaagaaggaaacacacttgtcgattggcttggagacaaatatactaagtacaacaattggtcatgttagggtttgcatgtcttttatccgtgactgtgacttaaggtcttgcaaggccttgatcttttctagattcgcttcaatacctcttgagttgacaatgaatccgagaaattttcctgactagacaccgaaggcatattatagagggttgagcttcatttgatattcctccaagatgttgaagcactcctctagatctttgatgtggtcttcgaaactttttgacttaaccagcatatcgtcgacatagaattccatattatttcaaatttggttatggaacatactgtcgactagtctttgataagtagcacctgcattcacgagtcttaagggtattactttgtagcaataaagcccgatgtcagattggaaactagtatgctcttcatctggtgcgtgcatgctgatttggttgtagccaaaataggcatccatgaatgttaggagtaggggtgagcataaaatccaaaaaatcgaaaaaaccgttcaaaccgacctaccgaacaccattggaactgaaatcgacgaaaccgaaaaactgaaaaaactgctaacggttaaaaccgccattgaatgatcagtttttttttgggtaataaaccgactgaaaaaactgaaaccgaccgttatacatatatatatatattaatttattaagttttttttgcatgtattatgtaataatatataaaaataatatattattttttattaatattaaagttaaagaataaggtaattagttttgaacattaatttgtatgtttgtagttgtaaaatgtagaataatttattaatagaataaactggatcaagtttttttggttaaaaaaaagttcagtgtgggcgatttaaaccgaccaaaccgaggttcaaaacggttggttttaagataggttctagattagtcggtcagttttcagattgcaccaatccagatcgaaagctgaattttggatttttatatagaaaaaaaccgaccaaaccgaccgatgctcagccctagttaggagttcatggtcggctgtcgcgtccaccagttgattcattcgtggtagtgagaaataatctttaaggcatgctttgttgaggtcggtgaagtcgacgtaagttctccactttccattcaacttaggcaccagacctaattcgggtagaaagcttccctgatgaatttgttctcacgtagtctttcaacttcttcctt

SEQ ID NO: 199928 - DNA, 695 bp, Cannabis indica
ttaataataatatagcatttaaaacaaaatttataagaaaaatgtatttggtaataggttttttttcctttatttagggttagatgacttttttttaaataattttttgcaattacttcattactctagaaatgaacgttagtgttttacttctatacattaatataaatatatattttttgaatgaaaggaaaaaatagcagttttttgttcaaaattggcaaaatagcatagttaactattgggttttgtttatttattcatataaaatatcaaaatttaattgatcgatcatatatataaaatatatttatatacaaatatttagaagaaaaaaaatattcatatgagagagaaagaaaccatatatgagagagaaagaaaccatgaacacacataaatgggggataataataaacacatttcactttatttggagaaagtaaagaaggacacaaaacactaagcataaaaactaaatatatctgtatatatataaattatatatatgaccctacacttatatatcccttaatagcaatatataatagtaatacataatatataaatcggttactcgatcgaggtagcatagtcaaatattattaccatgaagtgttgaagacgatcccaccatatataacactgtgctactatttgatcaccgccactatgaccttaagcttatttttcat

SEQ ID NO: 199929 - DNA, 1192 bp, Cannabis indica
atgttattcaaataataaaactacacaatatatctttttgtttttgaacaaatcacttagaaaatgtcattaatttttattcattttttcctaatcgacactataaaccacacatttttatactaacaaaaacttacctcgacaatgtatttttatgaacattttagcatcaattatgataaaaacaaagttggaaattttataacttaattagtacataagattttcttttgagaaaagactagttgagaccttctctatataaaattgtaagaagactatcaattatttaggttagtacttagttagtagcaataattataatttatattcgctttcaaaaaaaaaattgtaatttatattctttttgacctagcttttgttgatcacttaattaatttaaataatagtaataaaaagtaaaccaaatactaaataattaaatcaaataaaacaatcatatcatcaaatttttattttcagaataaagaaagtaacataaaagcaaaaaattgaattattaaatgaaaaatactaaaaagttagaggtgcttatttgcatgtctaatataatttaatatattaatttttataaaatatcattaatcaatccagttcgtaaatagagttgctcatagcattattcgtagctcttacttttatcccgtttgtatttttgccgagagtcacgtttcgactcattttttatctattgtaatagttgaagcattttattaataaagtatccatctccattcaaaaaaaaattgtaaattgctatctttggatggtactcatattataggtacttaatagtaatatttttattatttaaaaatatgctaaacggtaccactgttatctaatactctcatacgaagaattgttaaaagtgtcactcgtgctattaatatcattttcggtatcatatattaggttttatatgacttgaaaaataacttttaaaaattatcgttaattaatcaaacagtactgcctataaaaaaaacactaaccacccacaacaattctcagaattgtaagtcatgtcatattgttgttgatcccatgtaatttcacctaataattttgcacctgtgtattgtgtacaatattaatgctgtgttttttatgtagtatctttggaactttgattagttaatattgtagagatatgagctggccttacaaa

SEQ ID NO: 199930 - DNA, 606 bp, Cannabis indica
acttttgtgacagcccacgtccccatcaatattttaatcaaaagataatgtaataattattaaatattaaaaataatagattataattttttttgaaataatataaataatatttttaaatccattaaaataaaaaaaaaataaagaaccgtcacttttgtgacagcccacgtcccaatcagttaaataaaaaaaaaaacaaaactttgtacaaaaaaggcagtatactgccgtataaaatcaaaaaaatatacatagtaaaaaagaaaaaaataaccgcttaacagtatataggtaataaattggaaaaaatcagtgtatgatgtaaatttctcattctatttcctataagttttgcatctcacgactttctagtaaagtagaaaattttaatataccattgtacctatagaagaatttaattttttaaatttattgattggttgactttattatcccatactataggtaagaaacaagaggtcctactatagattatttctagattattatatatatttaaagagatatttcaataatataaattcacaaatagctagagatataatttattattgaaaagaaaattaaagatataaaaaatta

SEQ ID NO: 199931 - DNA, 917 bp, Cannabis indica
tatcaaagaaatgaaatttcatttatcaacaagagcacaattacaccagagcagcaacagcccactaaaatctacatgagaattctgctcaaaagcctataattacaatttgtcaatttcctatgagttaagctatacagtctattttttatcactctttgaatatcttttacaacatgattaacccagtaactggctttctcaaaaatacacttgttcctattaagccacacattataaacagtggcagcaaataaggcataagtaatatgatctttactgcaacttgcttttgtagatagcatcactaaccaattatcaaagtttagagaccaagctctaaaaccaattcactcaaaaatcgcttcaaccacctgtctagaagtatttttatttttactttgaaatatatatatatttttttacgaaaatacaaataaaaactcagatagcaacaaattaacttaaattgtaattaaaattgatatattaattacaggaacaaccgaaactgaaaatttgaagaaaaaaaaataatatatgggtaattctctttttattattattattatttatttatatatagggcttaatatggatattaagagaccttgatagctttttgttttaaattctacattttttttatttaaaaggctcaatgaatttgatattgctagatgtcatatttttaattttttattttattttagtttattttattgttttgttttgcgatttatctaatatcatatcttaaataatttgggagaatgagtttcttcaaggttctggtttgatggtttttatcggggttgagatcaaagtcacgaatggctttgatttcctttcaaaatcatctcattttcattaatttccttcgtcttgagtgtgtatgtgtcactagatatttcaag

SEQ ID NO: 199932 - DNA, 993 bp, Cannabis indica
atattccattcatttttctttcgcattccttcattgtacatcatttcacattagcttgaactaatcttcttggcttgttcagggagtggtaagacttatactatgcagccactgccacttaaagcatcacaagatatcttaagattaatgcaccaaacatacaggaaccagggttttcagttatttgtaagcttctttgagatatatggagggaagctttttgatctcttaaatgatcgaaagtaagttgtttcagcctgtcagcagaaaacatatccattctatacttattttctgaacaagttttacttttgcagaaagctttgcatgagagaggatggtagacagcaggtttgtattgtgggcttgcaagaatacagggtgactaatgtggagacaattaaggagcttattgagaagggcagcaatacaagaagtacaggtacaactggtgcaaatgaagaatcttcaagatcacatgccatacttcagctttgcatcaagagatcagctgatggcactgaatcaaagcctgctcgagttgtaggcaaactatcctttatagatcttgctggaagtgagcgtggtgcagatactaccgataatgacaaacagacaaggtagagtattattttcttgtagtagtcttctattgcatagacctttacggcttagtctaacctttatagagtaaaggagatgcagtatcaagaggtctttcgtttcaggaagaggaccaaggacatgattaattggtgttcagtttgtttgccttatgtatcaacaacaattattgtgagaacctgcaagtaaatatttttatttatgcagaatggaaggtgctgaaatcaacaaaagcttactggcgctgaaagaatgcattagagctctcgacaatgaccaaggtcacattccatttagaggaagtaagttgactgaagttcttagagactcatttgttggtgattcgcgaactgttatgatatcatgcat

SEQ ID NO: 199933 - DNA, 1168 bp, Cannabis indica
atatatatatatatatttccgtctccatgtctctgttaataaagaaaaaaaaaaaaaaccaaccttggcctcatcaaaatctgagaggaaagagtaccaagaaaatatatatcattgttgaattcaatcaatttagagattactagctaatttcttttttcatttttacattcatatattaaaatgaatcatatatactttttcttgtataaaatataattataagatatatatatatatatatatatatttatgggagcgattatagaataaggtggcgtatagaatgtaaataaaacaatttttattttatttttttatttagttatattttaaagtatttgaatgtcctttcactgaaataatatttttttatcattttagtaaaataattattatattttacaaagaaatgaaagaccatattaatgcacaataagacaaatttaatatttttttataaatttttgatgcattttaaatttgattctatttctattcttattctcgttcctattcttaaataccgaaattgtgcatatggggtaaagtctaattaatatagaacacccttattgttcatatggtgggttacaaatgtattatttttacaattttttatgatggtattaattgtagtcataatgagttatttacaaattttaaaaaaattgaaataatttattgtataattttttttttctttgctataggttccccaaatatataagagcataagtgtttatttggggctagctcaaatagctatatagaatgtattggagtgtgtgtgaggtcataatatcaaacccttaaattaaaaatatatatatatattttgaataaaagtaattcattaaatagcaatatccgctattacaatagactgaacagcagaagaaacattactcttagtaaaaagacgatcataccaaaaacaagcactgcgaattttaattaaaaatatatttcagaagcccatctttaaaaaaaaaaaaaaccaagtgcttactttgttcatttttaaagaatgaaaaacgactatttttatcctaatttgaacactttagattgttttgaaatttatgaaaaataatgtgttgagatcgagatatttctatagctacactaaatacaaccatacaaaataaattaggaagaaaatata

SEQ ID NO: 199934 - DNA, 806 bp, Cannabis indica
atgtacaaattaagggtgggtaccaagcatattggacctacctataaacatatatatcaaatcctttcacaacactttttgctagcgtattatctttttaggtgtttgaaacaaaggcaaaatccactactatatgttttgtggacgatacaataatccaaagtcattacacttctggctagtttttacttttgtcttgtttagatatctgaaaacgacaaatttttcattttaattacaagaattttctaacccattaattaattaaaataaataaactcaattctttaattgttgaaagaaaattcttaatttggtgtatatatataaattataatcatgtccgccatgagactatgaaacatgcttgaattaatcctaacaccaggacccacctaagcctatgctcttgagtttgttttgtatatcatcaatcaattttttttttttgggcatgcagaaacaaatataatttcgattaggaaatcagttaagtgaaattttcaattctgaataaggggtcaaagaagagtctttaagctaaagatatatataattaatatgaataatgaaaatcagtaaatagttctttgtatattatttaatataatatatatgtgtttgaaatataattatcaataatgatacattcttgctagagcagcaatggaccataatgctattgcgaattatgaagcactattatatcaatagatctagcatgaaaaaccaattactatatctatgaagacatgcattgaatatagataaataaaagcaattaattaggcttttttttttttttt

SEQ ID NO: 199935 - DNA, 829 bp, Cannabis indica
taatcaaaggatttactaaaaaaattcacttacctccaaatataaatcataaggcaagaaagactacgtttccctttacttcactaagaagtaatctaataacttaggagtaaaatggtccaaatcataaccccaattaatcctgacaatccaagtgtctaactatttcctgctaattctaagatacatcacctaggtgactctacttggccaaatcatcgcattctactattatcgagcataaatatgaaaaacgtaaattttcatatataacatacacaatacacctagaatttaaataaatctccataagctgagaaaataaaaattaaaggcatatttgtgaaagtaaaccataattatctactaagaggtacataatgaaaaaagattaaataaacccttaaatatctattaatttccataataaaatcaagcagtcattacacacatcttccactccaaagttatgtcgcacgtttctgtgttgaggtggttatagaacccttttagctgatctccaggcatataaattactggtgggatggttcatcttgtgtaaaaatttaaaagtgaaagttccaacactagaagaaattctttactattaccaagtaaagtcaaatcccatgtgaaaaagctagagtaagatcgacttctacaagttggtgaaacaatctaaggtgatctgcccaaccaacaccttaaaatacacccatgacttgcaagactactggttcttcaccattggcttccctctgaaaagaatttgaactcaatcattggactaacattgctggtgattgacaccactttttcttctttcttt

SEQ ID NO: 199936 - DNA, 777 bp, Cannabis indica
taaacactgcaaaaccttaggcaagttagcctgatcatccctcatcaaagctttgatgcctacattgctttcaaagtccataatgaatctattgatgttacaaaagtcattgcaaaaatcacacgaatgagataaagaaggccataaaaaagataaacgctggctggaagattagacctgattacatctagaaccaatggatgaagagacggagctagaaatctatttcaagccagccattctagatggaggtgctctaggtgctagcacatccaaaagatgtaactcttccttccatctattttgtgctccacatctagaagagtaagaaaagattgatcagggaggatttgatccctatttcttagaactcgaccatctcagataccccatgattcattattatgatagggtagatgaaatagtaggaattccaaatcattttctttagccttcccaatgtgttagagtagatcttttcatcttgatgaagtattcaagtttcttccagtacggtagcttcttaggctgagaggatatctcattatttgcttaagggaatcaaaattacaatagtgtcaatggttttatctggagtcttgtttggtttattgttattgattcgcatgcatttatcgttgcttccatgtgtctgacttttgtgttttgcttgcagagaacccccagatcattcaaatagacattctaaacgactttttaaatagcatagaaatccacactgaggaggttagggaagctacgaagcctgccaaagga

SEQ ID NO: 199937 - DNA, 1260 bp, Cannabis indica
atatccccaaatggtatagtcaggttgatgaatattagatgcaaagatggttaggatttaactaacaatatatgggtggaagaaatgttcaatttttcctaagttaaatggccaagaggattaataaagaaagaaacaatatatcattaatcagaagttctgtaagtgatgccttatatgagggatttaataatcttggaaagtttaaatttaatgatcatttctaactttccaaagcagtctcttactcaagagttccctttccaaaataaggctttgccaagtagaagacagagagtgatccttctttgcttctaagaaacttgtatgggtatagtatttaactttaagcaactgggcaatgagggtattaggatttctgtaaactctccaagcttgcttagcaagaatagcttggttaaaatgagttgatctaatcccaacccactaaaaaatttaaaatgacagatgtttgactatatttttcaatgaatttttgagcccttaacaaaagatcccaacatgaattttgtgaaaagggactcaatcttacagcatatgtgttacgtctatattttgagcagcaatatggtgctcacacgtgtaatatagtggtgttatctatattcccggatacctaatatgtggcaatcatggaagggtgccacattggactatttacaattagtatgtaccttccacttattagtatcatggaagaagttatattctgtgagttagtcgaagtttctccatattagcaaggatagaatggactttgggaaccccactattcatccgctattaagaaggatcagagtccttagaagctacaaatattctaggagggtagcaggttagtttgatccagaaaagctatgacctggtggtttcgaaatttatttggttgtatcttgtccagagctcaaggcaaaggttgcatatcttctgacaccatcatatcttgtcccctgtgtcaaaccatgatagtgtgtgtacgtgcctccaaagccccctttttgtcccacggcttgtctaagcaataacttttaaaggtaaaacctttaagcaatatgtgtcctcactcccacaaaattccttatagcagtcatgcaccacacaatgggaaagcttcatatcgaccaacggttagatcatcatgttgtagtatcaacccttgtggcgtgttaagtaagaaatcctaggtgggtaaagggtatgcccttattcacgtgtccctataaatacccttatttttta

SEQ ID NO: 199938 - DNA, 1206 bp, Cannabis indica
agagagagagagattattaactctcaacactttgctgcgtgagtctccctgctggtctgctagtggtagttgcatttaccagtttcgctataaattagattgtccaaaagctcattataatttacacccccaaaatatattatattataaaaaaaaatcttcaattcaaacaaataaaaatttataaattaattaattaataaatagaatgagaaagattaacaaatatatatatatatatatttaatgtagatgcttcagtccctttcactctgtccttacttgtcttcatcgatcatcatctctctatttcacactcaatatttagttgcatgcatggttcttcatttttcttttgtttcttgatgatctcgacactttcattgttttttcattaattttctctttttgggtccttttctctcttccacactttcccactatccaaacaaacaaaacaaattaccaaaatgatgatgaatactatgaaagatgctactttgtctgccacatctgattactttttcgacgacgataatgaatacttcggttccaatgatcatatcaacaacttaccttctggagacgatctttttagtatcctcgacagcttagagcccgattttcctccattggaagaatgtacaaagctccaaagcaaacaaaatcaaacgaagtcatctacaaccaaaaaaagagccctagtttctcaagactcattatcttcagaaaccgaacttgaccttttgccaaacagcaaaaagtcaaaagtttccatgaccgcagccgctgcagctgcggctgaggaggaaaccacagaaggacaagggaataagatgtctcacatagcaattgagagaaaccgcagaaaacaaatgaatgagaatttgtctgttttgcgttctctcatgccttgcttctacgtcaagcgagtgagttacttcactcattaccaataatatatattttttttgatgagaaatgtcttaacacttaacattttctttgtgattttcttttattagggagaccaagcatcaattattggtggagtagtggactacatcaccgagttgcaacaagtgttacagtcattagaggccaaaaaacaaggaaattttacagtgaagtgttgagccctagactggtttcaagtagtccaagaggttcaccaatgattctaagcccaaaaccaccactaagccc

SEQ ID NO: 199939 - DNA, 612 bp, Cannabis indica
tggattgacacgtacattttcataataatttataacataaaatatctatttgtcatacacagtactcaaccctataggccatatttgttgcactggattagtgcttggaattggattaaatagggaattggataatttcatccactccacacaatttgtccctttggcttggactattataatatcccatcaaaaagatgattaaaataaacctcctatttttcttttacattattttataaatagtgtattacaaaaaataatcaaaaaaaaataatcatgagtacttagaaatgatatctattttttaactaatttttacttctaattctttttttactactatttttttataatattcttttaatttttttcaaaacactatgattatttttttaaaaaataactttctattaaatttagtcctataacatgaatccaatccaattctaattaataaaagaacattacatgaacagctacttttaataataaaaaaaattacacttgtatgtttaattttttattttttttacatttttactaaatatttaataaaaacacaaaaaaaaaccaacataaaaataattaaaaaatatcataaaaaataat

SEQ ID NO: 199940 - DNA, 1040 bp, Cannabis indica
cttttctgaatttctttggagtttaatgctggcttaacttctgtcatggtcaaagattctttcccataaagagtggtgtccacaaagtgctcatagctctttggcaatgtgctcagcaacaagattccttgatcctcatcttcgatcttgacacctatgttgctgaggtctaaggttatcttgttaaactcatcaagatgcttcctgagatccttagtttcatccattctcattgtgtacaacttcttctttagatgaagcttattggctagagactttttcaagtatattaaagccaatttctcccataatctcaatgcagtttcttcacttgaaacttccctgagtacttcatctcctaaacttagtagtatggcactgtgtgccttattttgaacttctttaatattcttcttgtcttcttcaagagctgcaagctcttctcgatcaatggcttttaaaattccctgatgcacaaggaaagctttcattttgatactccatagaccaaagttattggtgccattgaatttgtcaactttgaatcatgtggaagtcattgcagatcagttcttgattcttttttgatgtcttgattcaattctttgatgttacccctcgactaagctctgaaaccatttgatgtgcttgattgcttgatcatgtaactcatgcaaaaatcaaaacataaaaccagaacaataaatatttgatcaacaacaaggtaacttcaaaaacacacacagtatacaaaaaccagtaggcaaaacaaataacaagaacaatttgacaagaagaataaagtaaattgaacataagagattacgaggttcgaacagtgtgatgatgaaccacctgtctactcctcgctcagaacagtcccaatggctccaatctttattgagctagaagaaagaattacagttgttgatcaccaatgtgtactgacacaatcactcaagaagcacaacttcaattacaaaacaatctcactagtagcactatcgatcaaacacaaccataggccaatacactactct

SEQ ID NO: 199941 - DNA, 833 bp, Cannabis indica
tcaaataaaatctagcaattaattcattgcatggggtcattttactaatatgttttgtaccgttgtcataacattaccatgtgagttgtgacttatccatttttagtttttcaaacaaatctaataattaattcattgcattgggtcattttaatactaatatctattgcaccattatccatttactctgtatatagggaattgaaattgagtgtaatttaattttaattatggaagtttatatgtttgtttgactatgtaattatactgtaatgatataattgaaactaatacctgagaagtctcaaactctcaattatactcttcaattctcgtagtccccatgaaaatttatagcatatttgggtttgtataatgggaatcgtaatataattaaattatccattacagtgtttgttttgcttttgtaaattttatttttggtaatttaggtgccaaaatatttcttatttatggtgtaatttctttgtgttaataaatcgattttctcacgttaataatgtgtttttaatgttcttttctatgataggaaagaatctttattcagctatccatttttaagtttggaaacttcttgtaagagaagaatttctcttatgaaaagttggctttgtatgaaaactttgaccatgtttatttctctttaatgtgttcaattgtgtcttgataaaatcaaatcaagcacactgtttttggtaggtatcaagcccatgtataggatcagccatctttttggcaaatttccttttctggtctggtttgctgctacaaaacctatctctgatgctgcaaaacatgattttcttttagga

SEQ ID NO: 199942 - DNA, 1240 bp, Cannabis indica
accataggccaatacactactctatcttttctctcttttctctctgttctttcactttgaactagctcaccaaattctgaaaactctatctcacaatacactgtctgcagtaggtaatggctataaatagcctttggttgttgagctcaatactaacactgtctgcagtagttagttaaaaaagttggtgaaattaaaaatatgtttccttacttaaagaccaatcacaacaaaattgaataccacgactctaattaaactatacaaagcaaacaaagatatggtgcgataataaaatatttaattagaagatttatgtaatattggtaggcaatggacatcaatatatatcatatattaatttttaatgatatccttcaattctacattacgcaatgatcttcactatgtattgatataaatttatataaatatatatatatatatatatatatttattgaaggatttggaagcaaatagaagtgagtgccatataatatagatggtctattgtccatattaaattgagattttcacagatgtcgaatttgacaatttttttttacttttttactgggataattacataagatattatttttattaaaaaaaaaattgtatttttatgtttaaataattttgtttttacatctttatggttttttatagaaacaacacaaaaataataagaaaactacacaaaaataataagaaaactacacaaaaataacatcaaaaagaaaaaataacatacagataacaacaaattaacaagagtacaacataaaaagatcgttttttttttcctggtaaattaaattaaaaaatcgtaaaaatatttataattccgtgaaaccgtatttttgtaacttttttgttgtttttgtgtatttgtgaaataatccctcttttttcttatttatgtttagattttttaaatttttttaaaaaatttttggtttttttaatttttattttttcaaaaaattctttaattacaaaaatacatttattgtttatctcatcttccccttttttttaatctcttttaaatgtgatttttattaaataactacatattttttatagtataagaaataaagaaaataagctaattaattatttttttttacttctaaataatattaaaaagtcaatattaaatcaaatttatattttactaataaaaaatattattttgtgttacaacaaccaatgacatttttttttggggaaatt

SEQ ID NO: 199943 - DNA, 1791 bp, Cannabis indica
ttataaaccgagaccaaagagtttgggtagtctttagtgtcaattttttaaaaaaactatcccttgaaccgacaccaaaagtctattttgtagtagtgttcaaatggcttactcccttttttcgtttgaggggagatgttaacacctctgctgtcacttagttgttagttaggtgttagttacagttagttaaacttctttctgttacaactgtttactaacagtttctttcttgtaataaacttgtatataagctttattttttttaatcaatgaaattaagtctttcgcttcctcttttttctctcttcaaaattcaagctcttctttcttttgctttacatgtataagttaaaattaataatctaaactaaaattatttaatattactaatgcagatcgaccaatttttatgtatccattaaattattctgttattttaatactttctgccttcactctcttttccacttgttggttctcacctaactccaccactgaaatccaatcgcactgaccttaacccatcgtcgaacactcgagattacccacaaccctccctcagtctcgtcccaatcccgtcaccatccattttatttttttcctagttcctctaacattattagttcctctagtatcatattagttcctctagcattactggttttatttggacgactactactagtactaggtgttagacaatcttctctacaaggtcttcttctacgtgttgtttgcctgggtatttggtacgatggtagattcaaatttaaagctacaataaggacctttgtctcttggttctctcttacatcatcatttccatcaaaataagtctcacggtctggaccatcactaaactcatcatgaaaggatatttgtgctacatggtcaactgtcgacatgatattgtttaattcaggtgacacatcgactagcaacacctccagatttgtttttggaacttaagtgtcaacctcactatgagtatccttaacagtatttggtggacgactaagatcgacacaaacattcttcttcaccaaagtcatttctagtttcaagtcatactacattttctcaaccaccaactcctcgtacaaaagttcaaccagttgtgagtaggttatgttcttattaatcgcaaatgtcaaatgctctgctccattaaaagcccgatctctaccctcacactcccaaaaaccattatacacaaagaacacgaacacaattgaccctatcatttccagaaaaaatataattaaaaaacaaaaaaaaaaaaatcacatgaaggcaacataattaccgagcatgtgtaatatcaaaaaaaatctaatatcgaacacaatatggctaaatcgtcctcaaataaaaatattttaaaacgatatactatcgtaccaccatcacatgcacaaccattagcctaagacaaggctaactattaggctcctatcgtctaccatcggacaagatcgggacactattcttgactctacacacctaaaaatatcgggattctattgtcctcctatcagacccccattgggacatcactcctaacctctaaattaaaaaacttttggactactatcatactaatatcgaacaccatcgagcttaatttaaataacctagaaattagaaaaacgcaaaaatttcaaacaacaacaattcacataaaaaatcagcaaaaaaaatcaacaacgtacaaatcgaacatctaaataacattgtaaaacaaatatatcaaccaataacaaaaagaaaccaaaaatatatatatat

SEQ ID NO: 199944 - DNA, 556 bp, Cannabis indica
agtttagatttaatctatatatttttgttgagatctttcggcttatggtttatattggattaaaactatttttatcaaattccactttttcttttataactctgatatggaccatgtacttagtagcatgtgttttgaaggttttattaaggttgttcaggaggtgatatctgcagtatgcatgtgtaatttttgtgtatatttctattgctgctttgatgaggctcttatttctgtctgaaattagatattacttttctctgacgccatatgcttcttttaattttttgaaaaactatttccaagatttgtcatttttgaaatcggcgacacaaaatgcaagtaaaaaatatgtatcctactgtatcttgtatgcatccagatagcaatgtttctccgtaaactactttcatcgaccactattattggcctgcattttttccacccttttattgaagcatccaattctataaaaacaaataacaaaatattgtcttttgctgtttttaaattcaaaactgatccatggttatttttttgcagcatgtgcaagaaa

SEQ ID NO: 199945 - DNA, 624 bp, Cannabis indica
aaaaaaaaaaaaaaagaagagcatgatatagaacggtgggaagctttgtaaagggatatagataaatatataaatgaatttcagtccattattatagtgctgatagattgtaaatgtgattcggtgcaatataattcaaactgttgattaagcaaaaagaaaaataaataaatattttgcctctatttgttctatattctatatgtagtatgtttggatattgttacatattaaagattttgttaaaatgcaggaatgatggatgcaatatcaaaggatattttgtatggtctttgttggataattgggagtggtcttctgggtacacatctaggtttggcctatttttcgttgattacgaagacaagctcaagagatatccgaagaaatctgtccaatggttcaccttgtttttaaattaattgataacactaaaattttacaatgaaataaatatgactgcttgaaaaaaaaaaatgtcacataaatacatgtaatattttgtgtaatttgtttgtcaatctacatactatcattatatatttataagcaattttacgttaaaccctttaaaaaatcattatgagaatagagcttatttacagtggcggaaccagcccttag

SEQ ID NO: 199946 - DNA, 894 bp, Cannabis indica
acatacaaaatgaaaaaaaaaaaaaaaaagtgcaccacatatatatacctacccaaaaaaaaaaagcagaaccaaatgtatatttcacacttgaaaatatcagctttagttatgatatttctttcaaaatttcgtcaataggtgtacatttctcttttattttttacaaaattgggcatgacacaaacattgagatatgaatgcagtacattaatgacattgtgaaatctataaatgtgttcgctattgtaaatgaaaaggtaagttatacatataattcctttaattaagttaatatcgtaactaaaatactaatttataatttattaatatataactaatttacattttaattttgcagtttggaaagaagaccaaatacgatgaggacacgtatttattatacaattacaatatcaatggttatcaaagattgacacttattttaaatgtgttcgctaatgtattaactttgtcataatatatataattaaattgtaatttataaatgaactctaaaaaaaaaaaaaaaaaattaatttataaacattaattttattataatataattaaaatgaatttcatttcaaattaactctttattattttaattaattcataattatttttaaaaaaaattaatatattaaaaataataatcaaatttaaataaataaataaaatattgagcccctactacttcaattatatattacataacaaccgaagtcgcaggactacctccacgtgattcgtgatttagagaaccagctccacctatgtcttcggttattttgtaataaccgaagacataagtccctttatgacttcagtattttcagaaacctacaccttcgcctccaacgacttcggtagcgaagataaactagaata

SEQ ID NO: 199947 - DNA, 998 bp, Cannabis indica
cgactcaaagttgaatttgagatgaaggacttaggtccaaccaaaaggatcttgggtactgaaattaagagaaacatacctcataccatctgtttatctcaaggcaattaccttaagaaggtacttgataaacttaacatgattgtctcagaactagttaccaaagacaaatgctgagagaaagcttatggaaagcataccttatgcaaatagactagggagcctcatgtatgttatgatgtgcaccagacctgatctagcacatagcatgagtgttgctagcatatttatttgtgatcttcgagaagaacactagaagcgattgaaatggatatataaatatatcaaaggctcactcaaaactggtttagtatttggcaaagcctgcaacaatattgataatgtaactggttttgttgactttgactatgttagaaatttgaacgttaaaagatcactttctttgtgttcactgtttttgggggttgtgttagttgaaaatccaatctaaaaaaggttgtagctctgtcatctacttaagcagagtacatggttgcaacaaagtagtaaaagaagccatctggttcaaggggttgacaactgacataggaattcactctgaaaatcttattgatggaacgaatattttgcccttttatttctggctcagagtttgcacttattcaagtatataaactaggtggactttgtgagatttatacacttgtacaaattagtcagttatgttagttgggaatagttatttatttttcgagtatattagttggcttatgttatctttatactggtctggatataaagaccatttggttgttcattaaacaggttgagatgagagtgtgagaaaattgttgtaaaaggttgagtttgtttaactcaggtcccttgagaaagtcattttgtaggagcaagactccatttctggtccagaactctgtccctgtaatgtaccaactctgagcttcattttcaatcaa

SEQ ID NO: 199948 - DNA, 599 bp, Cannabis indica
ggggagaccacgtggtagaggtcatggaagaatacattatacaacaaatcaggtaatcttttttaaaatctacgtcaatgtttataaaatatacaagatgagtgtttttaattactttcttattttaggaaaattatcaacctcaagaaagtattgaagaacatactttaaagaatgcagaggagcttaatatacatggagcaccctcggatcttttccagtcacaacctacccaatgaagtttgtggagttgccaaatttagtgtcttttgatttatatgtttgtagtgaaaaatgtaggtttattaggattacatgtttgattagtgcgttggacgctaaaaattagcaagcttacgtgttttggttagtgcttttgacactaaaagttagcaaacttacatgttttggttagtactttaaacactaaaatgtagcagatttatgtgtttttttttaaaggtttatgtagcaggtttatgtgttttgagcaagaatacccaaaaggtaaaaaatatatttggtttttaagttatttttatttatttgtttaaaatatagaaaatatattagctattaaaaaaatttagttaaaatta

SEQ ID NO: 199949 - DNA, 935 bp, Cannabis indica
ctttgtgaacacccctatataaaggtacagtggagtacatataaaaaatacggctaaatagcggcataagtacccaaaattttaagtttgtaagcggcataaacctaatgtttatttttagcggtataagtacccaatgtttgtaaaattgtaattttcctccagttttgtcagtacaaactctgttttgaatatattaaaggaacatttggaagtaactgagactacatgttttatgtctagacccaataatcaagaatctagaccttatatgtggcatgtttaagaaaataatagagcttgtactgacaaaatcagagaaaatttacagttttataaatatttggtacttatgccgctaaaaataaatattgagattataccacttacaaacttaaaactttgagtacttatgccactaaaaataaatattgggattatgccttctttttttttttttccttttctaatgtaatgtttattgtagtcataaactaataagtcatctacaaataatctacataatttactatgtcgtaatcagaactcaaaatgcctattttttatagtgaaaaacaacaataaccctactttacattttttacgtagccgaccgaaacaggaatgtgaagatgcaaaagtaaaggtatatcctaaaaaaaaaaaggttttaatgtaattagtgaacgaaatgtcaaatcgtaccataatcaaatcaattacaccttttaatgttgtgaccttccaagtttggctttatctagtcaatttttcccattttgtgtcaaactttattaccatagaatctccacttttcctagagtttacattgccttgtctgtaacttttatcttagccaatgtaaataaatagcagtgattatgggcacgaaatgaatagtcatgaatgagctaatgtgtttggctactcaagca

SEQ ID NO: 199950 - DNA, 737 bp, Cannabis indica
ttataaaacgacactttatcgtgatactaggtaccataagtgccacatagcaatgctcttgtggatttggaacgttcttttatcatcctcttagtaaaaagcattgctattggacactaatggtgcctatcatctctagatatgtcaccttacaatttgctagcgatattctctaaaagttattatattaaattatatgaaacctcaatacttagttggactaatagcgatattgacacataaggggtgctaggcaccgctgacgtcctttagcatttctccttaataaatggtaaatgacaccaacctatgttctacaataagatcatacgaataagtgatttcttatttaactaatcaaatccataactatctaccattgagtgaattatcctcttgaattattcctttaaaatctcttgagagttgagaagcataccgcaacggaagcttcgcatggaatagattatagatcaacccaattccaagttgagaatcaatgtatagacttgattcaaccaattttgtttgtttttctcatatcttactaacttgtactaataatactttggattcatttgttaaataataataataataatatagtaataaaacatttaattaaaatatgtattagagtgaaaaaaaaataatatgaatattgtacttgatatgataaatgcacatataaacacaattttataaacaatcaatccgttattttaagtttattatat

SEQ ID NO: 199951 - DNA, 1905 bp, Cannabis indica
tcaactttcttactataatatattctactcaaattataatatatgtacaatatatatcttaaaactttaactattttactttggaaaaattatcatcttggggttgagaagaagccaaattataagtatatttatgaataatattaaggtatgtaatttttattttagttattgtgactgaatgtttatatgaatttttttgtgtacattatgaaaatatattaaaggcaattgcattatatatatgtgtgaatcgaatatataaagagcatcattttatatatgtgatgatatagattttaaaacgagatttgagcatgcaatcacaactatgtagatgtctatgcatgggagaattaacagtgacacagagagtttgcaacctttcaattgaaaagaagactaacttaatttttgttaagatatataatttctttccctttcaaatttgagtttactaattattttttgtcgttttgttatctttttatcaaattttgatatatttcttttttttatatgttggtgttgtgattatttttgaagagttttatttttttatttcttttaaatttatatacattgtaaatacaaatatatatatatatatacattattgtattatttatatgtggagaatgataaatatacatattatccttatactttagtgaaatcacttaaacaataatcctctcatctacaacattaagctattcctttcataattttagacatcgatttctatttttttttttttttggaataaccaaataaacaagtatcacatggtccttttaaatgcatcaaactaaaaataaaatagtaaaaaaattatgatctatcattaagaattgagatttccaattttatttgggatattaatataattaagtatacttttaaaactttgagtgttgtaaagtcatgaaagtttttttttcatttgtctatataaacaagaatttttttttttatagtaacaatgtatcatttcataatgttttagtatttataagagtattgcattttgtccaacaaaaacaattatattaaatgtctagcgtttttagaattaggattatatttaaattttggttaaaattgttagtgtttggaaataaaagttttaatgttagatggagaaaatttaaaattagagtttaaatattttgctaaacttgaactcatgaaatcaaaaaattatttggttaaattattcacttttatattgtaggaaataatgcagcccgaaactgcccctacacccaacaccccaacaatcacaaaataggggtaatattgtccttctctctttgtgcggatccaaagagaatattccctctaccaatccgaatatgccccttttcaaaatctgataccctttaattaccctactgccattaatggcaatataaaagcttatttttcttttattgaaaatcctagcaaaccactttttcttctcttcaaagcatagcagccggccctatattcttctccttcctttctcttcttgctgcaactcaacacagccaagacacattattttcttcccttttttcttgctgcaaaacaccccagccgaaaacaccttcttttcttcctatccttcttgctgcaacacagaacagtagggagccgaaccttctccttcttcctcttcttcgagctacagcagtagctttaaatggctgctccttgtatccctttctcacctgcaaaacaaacaccacacaacccgaaaaaccaaagaaaactaatcccgaaaaccagcagaaaaataaaagaaaagaacactatagatttgatttcggagttccccttgaaatcaagagtacatctccgtcaagcttccctcaaagacgcttgattcttcactatccaaatcagtttcgattacaa

SEQ ID NO: 199952 - DNA, 719 bp, Cannabis indica
aaaaattcaaaaaaatattaaaaaatatggcaaacacagcataaggtactcgttacccccttatagtacttggttacccttttcttgtattttttaatttttttctttaattttgtcataaaataatatttttttaaaaaaagaaggcatattttcacacaaaaagtataaaaaaaaccgtaaatttgtaatttcctcaaaattgttggcattttccatcaaaacatacacacactaaatgggaaacttataaaaatattaaaatttaggttaacttttataaaaatattattacacgaatttttttcaaaaacattgtatttttataaaataacagtagaacatagaatagaacaactaaaaataacagtggaacaactaaaaaataaccgtagaacaacagtgaaaacttaacacagtacactgtacaaaacttacacaatatttttgaaaaaaatacaatatttttgagaaaaattccgcttaatagtataaaaataaaaaagttaaaaattttggtgattatttctactaaatacgtgcaaagagtacagaggctaacttctccttctgcttgtttaaggcccataaaagcctcatttttcctaaatgggcccattcaaagcccaaatccaaatacaacacaaccaaagctagggtttcacagctatataaacacacactagggtttttgcccaaatctagagagagagagagag

SEQ ID NO: 199953 - DNA, 1328 bp, Cannabis indica
ctaataaatttggacaactttttgttatgtaataaatttgcatcacaatttgatacactatatagactttttacaaaaagtgaactatattttgtatttgcattacttaatagagtttcatctgggttcctcttgatgctttgttgacagcatcggttgttgaagtagtggcgattcgagtaggactgtattcacgacttgagcttctcttaaatttaattgttaatgtgaaatcaaatgtgctttatgatgttctagctattacctatagtgttcaatgttgttagctttaaacattgttatggaaccgctaatactctagctcataacttagctcaaatggttttatcttttgagagtgctaaagtttggtaacctagtttacctattggtgtatgaactttggttcttttgtttgttaggcaactccctttaatgaaagttttcattatttcaaaaaaaaaaaaaactctccatgtggttcccccctttaatggggttttgaaaaaactacttttaatttaatctttaattaaaactaacctaatttaaagataaaattaaagtctttaattacaaaactaacctattatccaaaatcaaaaatacccactacacacatgccaagtaagattcccaagtcactattatacgtgtcgagaaactattgacacacacaaaaaaaaacaccaatcccaagacaagtttgtttaataagaaaaaagttaaaaaagtaaacataaaagattcgataaacccttccccctagtcacaaacacacataagctagctccaccaatccttagtcatgatcatgcacattatcctcttgataaacaaataaggtactagtctaattcttacccttctttatagtgataaacattccatcaatctataatatgtcacaacaacttaacaaaaaaatttgaaatataaacatatattatatttcaagtgactttgtcaattattggtccaaactctaaaagtattagtttaatacaatgagaaccattggagtagcataggattctaatctttcttcccctcttccacatgtgttttgtcttttattttaaacaatcacaaaggcaaaatatttgaagagagaaccttcttcccattgaactcttcccactatgatcacaatatgagtcctaggtgggtgaggggtcatggttgtgtgggggcattataaggccaaaaaattcttcaagtctaaagaagagattgatgatggttgaaaagaaaaaagaaagaaattcaagaccctttattgctagcaattaatggttataaaagcctaattaataataataataata

SEQ ID NO: 199954 - DNA, 1608 bp, Cannabis indica
tttggttttggttctggttctggctctggctctggttctggctccggttctggctatggttcgggtggggctcacggtggtggatctggctatggttctggaaattcgggtggtggtagtccaggtactatgaatcattcgccagtaggttccagggatggaaataaccatggttgatgttctagaatattataaaactactatatatataatatatatatatatatacaaggggtgttgatgttttattagctatatacatacataatctacttaagcataattagtatgtttagtcctgtggctatgttataaagtttgtactatatattcagatcgtattagaagagcaattagtataaaaataaaagtgtaactgaaccataaaatatagtcttaatcttattatagctagtcaaaatgaccttgactcactcactatacgtcaaaagatataaatccaaatactaaaaaatagaagtttaagactgcagaataaaaccaaatacactttctgtactgcctactggtttagttgctcacaagaatttggaaagtgcataataaagctttgtgtttggaaagtgtttctacagatagttactctgtttttttttcttctttcatttttatctattaattaagaatactaagcaaagaagcaacaaaaaacaaatgctataaactaaaagagacaactattattattagtatgttatcttcataaattaatcagagaataaaaaattaagaaaagaaaatccgattgaaaaactcattgcccatgatggaattgggtggaaaaataattccattctccttaaattatggccatgcagagtcttgcctctcattttttttttaaatcccccttagttaaaacaatcactgaaaatttgagtgactattactttatttaactgattatggctagccgaaatcaatttaattagtgctaaaaatacaaataatagctaaggtatagtctcattgccgaccactggtgcagacactaggggtgttcaaaaaaatttacaaacctgaataacctgtttaaaccaaactaaataaattgacaaaaaagacaacccgtataatctaacgaaaaatttaaaccggctaataaatatattggacaaattgaatattattccaacttgtttaaataattcgaataaactgatttatatatttttactaaaattatttataataaaatatataattatatttaatagtgaactactttacattttaattttataatttagagcgtttaattttaacaatattttcagcacaaattatcaaattcatgtgttcaacactaattaacaatatttataaccaaacatagttataatattccaattaatcatattgttttgaattccgcatactaaatgaccaataaccaaagtttcatatatgaactgcatatttgtaatgaattcacatttttttttaaataaaaataaataaagattaaaataggacacatgatttttgttttgtatgtggtacccaatactcaattatatggagtgtaattattacatcagtaagtattgaataggaatagatatttaatcagtaaggaaggaaacc

SEQ ID NO: 199955 - DNA, 881 bp, Cannabis indica
tagttaggctatttatgatttttgctctcaaattacaacgtatgcattatgatgcctatgaactttttaaaccattacaaaaagttcctgaactattgacagtattattaattattcattctgtcaagttttgtcacatgtaacaaataaaataatgacatgattgcttaaccaattgccacatcagtgtcacgtgtataatttaacattaataaaaataaaattatatgcatttaaaaaaatcaaattaattatacacttggcgttgacatgtcactaatacataacaactaattaagtagtcatgtcatcattttatttaatacgtgtgacaaaacttgataaaatgactaatttacaatactctattaaaagaccatttttaactacttgaatagttcaatttgcacaataataaagagtacaaaattcctaaatatacttttggttattgctttcaaaaatgtatatttatttaaatattagaagacaaaaaaacataggtgtaagccatctttcactataggcctttattataaaacgcgaatctgccacgttcaaaaccacacataacaacataaactcatcaaaaccctttctctttctcactttaaactaacttaccatttttcttttcctattcattttcttgttttccaaacaaaaagaaacaccctacaattttcagttatctgatcaaaacaaaacaccaaaagccaaaaacctctctttctttgcttcacataggaaatttccttcacaaaaaaactagtatggcttatacttcttctgcaccactcccatcaaactcaggtacctataaattttcattatttcttttttactttctatcccaataaataaaaaagaaaattatataa

SEQ ID NO: 199956 - DNA, 525 bp, Cannabis indica
attattaattatgggtgtagatgaaggaggaatattcataccaagtgaagaaagtgttcttcaaaaacatgttgcttttttcgaccgcaatcacgatggcatcgtttatccttgggaaacttttcaaggtttctttttttctttaatgatttttcagtttttgttgttaatattgttttagaaaaataccatgttttagcttttcaaagaaaataaacattgttttgtttaaaattaagaaaaatgtggatttgttatgtttgtgtttgtgataggatttcgagcaattgggtgtggattaactttgtcaaccattgctgcaaattttatcaatagtgggtctcagccagaaaactcgacatgtatgtatctatctctctttttccaattaaattaaaaaaaataaaaaactgaaaaatagagcatatatcctttttttttaatttatttctttatttttattaatttggtatcaagtaatcaagaaatagtagtaatggaaattgtatttttctttaaataaat

SEQ ID NO: 199957 - DNA, 2865 bp, Cannabis indica
aaaaatcataaaaataaaaaaaattcattacaataagaagtaataagttttaaaataatgagttccaaccatacaaaaaaatgactatctataatagagaatgaataaaaaaatatttgctaatttttttcatattattttaattaaaattaatattattttattaaattaattcatatttaataaatttaaattataaaatattattaaaataaataaatattacctaaaataaagagataattggagccaaaaactaaaaaataaaaaagactccctataaaataagattaacttagagattctctaacctaactttttgagtttattttctaaatatgtgtagttaattaaatataattttgttgatgatattttccaaaattatgacttggttattgtacatttctgtgttatccaatcaacatatatctattattactagatagcaaaagtttataattagaaattatattacacgtattttcttattgagaaatataaatatttgttattacacactgaactaattattttcctataggcaataatagaattaatctaacaaaacaccatcatgattaattaagccccccctagatagaagtataacaagagatataaaaagaaattaaaccaataaatttattataaaattataaaatattaaaaaaaaaatgggtaataatatagactttgactttttttattatatttttattaaattattattattttttatttgtaatgaagtgtaattgtaatggggattacattagttttttttaagaatgattattggttttggtatgtaagcatcattacaatactcaatgtaaataagtattacattgtaatattacaaaagttaaaaaggatgaaaaacaaacaatgtaatagacctattcattaccattacgattattattacaatgaaccaaacatcaccttaatagtaatacttgtttatatagtaaaatattagtggtggaacatagtaatacgatggagtctgtcacacagaagtgagtgagagacataagtacacaaataagagtaatttgcagcataaatacttaagtttaacttttagctgtaaataaatacctaaatttaattgttggcagtaataatatctaagttatattttggtaacttccgtaagtacatgactgttaagtgttgagtaaattgtcacgtggcaatgcgtccacgtcaattaaaattaagtatttatttacaactaatagttaaacttacgtatttgtgtcataaattactcttattattattattattattattattattaaaaatatacgtttgggtgcttctacaatatattttttcttaaaataaatgtattgattcatcatttacttgttttagtatccagaataattttttatgtcgatttctttttcatattgtgtacgtactttataattatttaagatattctacaaaattttaaaaaattcggaataattacaatatagaaatcagtgtccaaacagtttatttcacatgcgtataaaataaaatagtcacgcatgcaacacaatctttgataacaataaattaaaattcatgtatattaattttgggtaagtctaccgtgtactctttaaagggatgtttcagtagactctttatctatttcgccattcaaaagagtcttttagtttttttttatacgattgtatacattatagctatttaggaccacccataaatttttaaaaaattctaagtagtttacaacgccgaaaaataagatttatatattttgttgcacacgcgattattttttttatatacatagcaaataactatttaaattttatttttgacacataagatattcaaaaattttctaaaatttcaaataatcttaaaaaactactatgctatcactaaaaaaaaatagactcaaaaattcttcacaatacttaaaaagataacaaatctaccaaaactatccatacataaatttccattaatatttttatgatatgatagattgttctctgcaaatatatatatctttgtttccttggcgtgttgtatatgctctgctgcaacctttatcaggcttatatagctatatatatttatcacctataaatatatatatatatagagatactatcttgtcccatcatgtacttttacggaatatattccgtaatataaggaatacattaggtagattttagggtacgtaataatgagtctcagggtacgttataattctttaacattaattacccttagatccatcccagttctcagattaaatagctctcctataattattactttctttttggagtaaagatatatatcatagatctcttacgtacaagtacacctacttataacatattcagttcttgtttattattttatttactatatcaaaaaaatcagatattctcaatctcaaacaaaaaaataataggtcaatgcttcataattttatgtttattttttttttgaaacaatttttatgtttaatttgaaagtgataaaatgttctaatattatcagacttaaagccctctagtaatttgttttttttttttttatttattgaaaataataattgaaaaaactaactattttcatgcactacaacattttatagtttatattacattcaattatgggcatgacccattaattcttgaaaaatttacataaattattattttttgtaaattttttacactttaatgtgtaattttctttttttaatatttttaaggtatttataaaaataacaaaaaaaaaactatataaaagaaaaataacatccaaataacataaaaaaaaattatacaaataacaaaaaaaatcaac

SEQ ID NO: 199958 - DNA, 826 bp, Cannabis indica
ataatttttttaaaaaataccaatgcaattaaaacatgagaaatgaaaatgatataatagtatcacataagaataagaatgtaaaaaaaagtttttgagatatgtataattataaaatcacaaaagttaataataaaaaaaactattagcatatatatcttttatatttgaagaatagatgaacgattagtgagttagggattttaaaaatatatgatatttatagataaacgattatttgttcaacttagtttcatccaacaaatataagatttgggtactaacgtcacattttctttgttattttgattttattttttttatcactttctctttcttataattagcatgtgatatatttatatataaagaattggttctccaataaaattaaattataatacattaatgtgattgaattggttatcattcaatcaaaatgtgatttttattgatcttaacacgatgtataaatctcttaaaattattaaggtaattatccaaatagttcgttaaagagttgttcaacaaaaaaaaaagtttaatagagacttattactttgtttccctggatcaagagggagagaattcttcaatactcttctacttctattacaattcacacttatcaaaacaaaaagtatatgttaatgaacaaaaaataaaaaaacacatcataagaagtaaaaaatatttatcttagtttaaaatggaaaaacaaaattaataagccgtaaagtcaaaaaaataagaataccatacaccaatataaagcccaaacgatatgtatccatatccaagttaaataacaaaactaaataacaaa

SEQ ID NO: 199959 - DNA, 1405 bp, Cannabis indica
taaaataaggtaaaatatcggggtgttacaatagtagtaactataagtaagatacagtgatgataacgataacataaaaaaaaaataaaagattacccgagttaactaaatttaataaatatttattaatatatttatgacttataatttgaatcaattaaaaatatctaaataatttatatacacttaataactaatatagatttgaatttttttcattgaaactgatagtcttacagtggtgcaagcattacgtagttctcttcctatggtttcatactttgaaagtgttatttctgattgtaagatgatgctaaatgatttgagagatatttctgtcaattttattagacgttctacaaatagtgttaatcacttcttagctcgagcatcctatttagttgttgatcgtgttatcaggagtagtgatgttactccagattttaatcatgtaatcactatggattgcaattaataaagatgctgattttatttcaaaaaaaaaatatagatttgaatttaaataaataatcccttctatttttaatattgtacctaattttaaataatttaagtaaattagacattttaaaatttaagtttttaatttattattttaaatttacaatattttatcattagtaataattcaataaatataaaataaacattaaaatatctaaactaatgcataaaaaatattttaaatcgtcgcacgaaaggtgattacagtacctagtaggggtgttcgcggtgcgagtggtgcggtttttgactattttttcaaaccaacccgcacatgcgatttttcaaatttcccaaaccgtacccgcaccgcgaaattaaaaacccgcaaaaaccgcaccgcaaaaaatagtgcggtgcagtgtggtttttgtggtttatgtgatttggactatcactaaaaaattaaactatcacaaatacaacaaactttgagcaaaacttgtcaaaataacataaggcttgaaaataaatatgaaaaaaaaattaagtgtcaacaatacaataattagtagactttaagttttttttgaaagaatagtagactttaagttgaatattcacatattggacctaaataaatataaaattggtatttttataatatgcggtgcggtgcggtttgaaccgcatattaacaattcaaaaccgcaaaccgcaccgcaccacgcggtttaggaaaatttcaaaccgcgactgcaccgcaaagaatttcaaaccacatttttttttgcagtgtgtgcggtgcgggcagtttgagcggtttgggggtttgatgaacacccctattacgtagttataaatagtaataaggtaaataagtaaaaaaaaaattataaatttaaagttagatgtggagtttttgttggaatttatttta

SEQ ID NO: 199960 - DNA, 2057 bp, Cannabis indica
tttgaaaaataaggaaaaaataagaaagagagaaagagtataaataagagtattcaaatataaccaaacaaataaaaaaatgatacgtaaccctctacttaacctagtcatttttaacaattaaattaaaaataagatgtaaagtgtaaaataccttatattatataagaataaatataggtatatccctatagtaagtgatcaagtggcggaaaaatctggtacgaatacaattatatgatttttgttgctatataaatattttctctgtctatatgtggctagtatggattatatatacttgtacatgcttaatgcaacaaacgaagtacatcctaaatttatggttacacacattattctaattgtagtcatcggcatataatagtggttccacactttttatcataaaaattagtctcaaaattcaaaactaaaaacacctcaaaatataatagtaaaaaatttatgcacctctagagtttagaccatctccaattaatatatatgtaaaaattaaattgtactatatatatggagaattttgaagagaaaaagtgatgttttatcatgctattagggatggtggcacgaatgctttttaagaaaagaaaaatgatgccatgaaaatttatcttttggcctatgtttaatgatgcttaacgatggtttgcgataaaattgtatatcatcaaaattttaatcaaatttcatcacaaaactatcgttaaacatcgtttatcatattattatttttgccaaaaaattgatttttcatgcattaaaccattattatgtataatttttttattagaaaatatgagttttcatgttattattgtcgggtttaagtgataaatttaaatgctaaccaattaagagaatataagcatattttttatgattctaaataatcaaatatgtataaaatcctaactatattatgcaatatgaaacatgttagaattgataaactaaaaaattctaattatatcatgcaacaaaacatgataaaaaaatatgaaacgatcaaccattaacgaaaattatatagattatatagtatatatatacatgcatatatacataaaaaattgaacaaaaattaagacaaaggtatatagatttgctttgatactaactataagtaaattatatataaaacatgaagcatgtatgaacgatatgaaatgcaaaataattaaatcgaacatatatgcaatacgaagaaatgaccgaaatacttccaaccaatgatcatttgaggttcgatcccacttgaatctataaaagaaaaccaaaactagcgttagtgtggatattcaaacttccaagttctctcaaactcttttaatggaattaaagtttttcacagaatgagtagtgaacttgtggacttgtaccttatataggagagatacttcatcaatatttgtctcacattaattgttaaaatattttgataattattttaagaaattaaatcgggtagtaaaatatttggtaaatcaaaattagatcataattataatattttaaattaattattaaatattttttttgccaaaccatgtactgttaatgtaagcgagcaaaacataggttagacgatgagctatctttgttcgaggagattcttgtgctctcctgaatccatgagcgattctaatcactaagccaaaaaaaaattatcaaataattaattatatattttataaatgaaaattaaatatttaacttaccaattataaaatattctaataagaaatacgtttgagtctacattatcaaattaaggctacttgtctaaggatattcaaaataaataaaaaataataactaaccacaatcaaaagtatatttatgaaaaattaatactacaaaaaaaaaaaaaactaaaaaatattctaagtaaaagcttatctttaaaaacctaaaccaaaaagtaaacgggtaaactggatttcgggttcgcgagtttctggttcaaaaaattgtacccggacccgacccgtaaaatggtttgagttcacaagtttcgggctcgcgggtttgcg

SEQ ID NO: 199961 - DNA, 948 bp, Cannabis indica
ctttatcaaacgatatgcaaatcatatagctcaccacctagctaaaatttccgtttcttttgctaattgtacgtacaaggagtatactgcccctgctacgcttttgaatgtaattcaaaatgatatccaataaagtatacatattttattaaaaaaaaaactttctttctattggggccattatatatatacccaagtaatcaatactaatcattcctctcattccttttctagtactaccacactttctaaggtgaagtaattagctttgatagtgaatcaacttcaatttgtttattattatgtgaattgataatcaaggttttgaaagaaaaaaaaacactaaacactactagatgagatcatagcaaccattaaaaaatatataaagataaattattgagattataaatacactctttacatcattagtgtctaaaaaccatgttttaagagattcccaaatatggttcttcaactaatggattatacataattattgtgtctaaaaaccatgtaattaagagttcataataatgacctttaaaaaagaaagcaataatgaccttagaattgaattacttaaaatagccttagaattgaattacttaaaataaccttagaattgaaaatgttcccatttcaattgagtccattgaaaatttatccaaaaaaaaaaaagcatgaaataatctttggtgggggcagcaagagcatgtgttgtgatttgtcatctaatcaagaaattcaaaacattccactacagtcaaaagataagatgccatgacataaaaatatcaaccataaattatcatatatatcaaaaccaatatagaattatattattgaatttttttacaatgcacattttaaaatagatttatctatgtatctttatctatttttacatttgaaataatttcttgttcattatttttagggtttttt

SEQ ID NO: 199962 - DNA, 1176 bp, Cannabis indica
ataaccattctcccaatgtttgtaggatattggcctaggaataagagagatttgtagatattcatttattttatacttttttaattcattattgagaataagatacgagatttgaaagtgaaacaccccgacatgtgggggatcactaacaaaccctaagcctatataaagatggtaataggttagggtgagggggacgaaaaatacttgagataaaaaatccttggcggcttcttaacacctagccccttgagatttccttccttcatctttttcttaagtccttcatactttgtcaacaccaagcctccattactaaatcaccattaacttgcatagttaccaagatcaagagaccaccctcttttcttgctctttttggtttattgttctcaagaaccttacaactaccatccttatcagatttgtgaatacttgatctatcatgagccttgtgttcacaagtctcgatacagattttacctagaaatctatttttgtattttgtccacacactcttgagaacataactctggtctgccagactcaattaataaaaacaaaagtagacgtagtcccattaccatcacgacatgtgagtgaactattataaatccctagtgtctattttatttattgcggttttatttagcctaattaattcattgcagtcctcttattttttacaattttcttagatcagttgacgaaaaactgtatcaacattttatttccttacaaatttttccatctctcttaatttcttttcttcttaccaaacatagtgtaaggttctgaatactaatatcaacactcttttcttttttaaggccgcattcttaatatgaattttctttatttcatggctttaagggaaggagagaaaagtattattaggtcaatgtagggatttgaacacttgcacttgagatactatatatgaatgagaagtaatataaattagagtatttctataagacactaatggtgtctagcactatttagaggtgcgtgtttgttatactcatatttcgagcaataatgaatgagtctagtcacacgacatgtgtataggagaaattaatgaacaaacataaattctactcgctcacaagaggatatgaaattaaatgtatgcctcataatatactaactaaatattagtgtcataacagt

SEQ ID NO: 199963 - DNA, 1298 bp, Cannabis indica
tgaatataaaatgttattttgcccgcaacttcagtgaagagtttagaagaaaaaatagttaatattccattgaatggctttcaaccaggggtgtgcaaaaattcatccaatcaaattacaaccaatcaatccaatctcaaccgatctaatagaatcagatattcaatcataattagatcacattatatgtaaattttaaaaatctaatcggatcagatcgatttttggatgggacatctgatctaatgaataaccgaaccgatccaattatcatctaataatcatgtaattatatttatatatttttaaaatacatttataattttatatttaatatattttatgtatgttggattattaagttttaaattatatttttatttttaatgaaatcaacttaaatggtagttaaaatggattggatggatccaatcaaattcattagaaaatcagttaatgcatctaatggttggaaccgattggatcggatccgatgactggattcgattagattggaacggatgatcaaattcaatatccaataaataattggattaaataggttgggtccaaatttattgaatgtgatccaatgaacacccttacttttaacccataactctaaatttaattgatttacgtgttaatgatagcacgatattttcatatatttattcgattattaatcttttttcatatttgaagtttttattttaaattattcacctttatttttttaactattatcatattatttttatatcttatttagatgttatcatgtatttatgcagtgtgagtgattttaagattgttggagttcgttaaaaaaataaatttctaacaaattagcaagtagatatcttaattttcttttaaaaaaactaaaaagttgatgtcatagtttatttgttctctttttattgcattattaagttttgttaatttttatgttgagtatgtttgatggcattaaaaattagtaattcaattatttaaattattttatttttaaattaatattataacggcttgcgcggtcacattagctagtttaagagaaaaagaacacttttcgtttccctctaataaagatatcaaaatccaacttggaatcttttaactccatgtgaatctatgggtcccgcacagtggaatattaagatatgtgattacgtgaattcaccaagtgattgtgatgtgttggtacccgcagtgagtcaataattgagcagcaaagttaattttttcaaaaagaaaaataaaataattacatttgtaaaataattatattttta

SEQ ID NO: 199964 - DNA, 1338 bp, Cannabis indica
aaaatcaaatgcaacatgacaataaactcaaaggaagtataatcccactatctatgccatcaattactcgagaagcatccttgtacaacataactgttagttcgtcatcggaagaagcttccatcagcttgtcctgaacaacttgttttcctttgcctttaacaaagggtgaagaagcacgaaacaactcgacagatttagtattgatccaagtatgagacggtctagatgaggggctctgaagacaagcaacaatcctgggttcaacactctttcctttttccttagacaaagtgcacgaatcttgctttttgggttcagatggtttgggtcgagggacaactcttgaagaactagaaggataaagaacataagtgtgaatattcggagtcgttgtcgattcgactatatttttttttctgaaatttcagccaccacataagctcttttcaagagctttagagttggaggtgcacaaataaacgggtcgatgtgtttgaaggaaaggtgtttggctgatatatctcgagtaaggaaatagtacttcacaaatcccctcgatcttagtaatttgtttggattcgctcaagtaattatttattggtgagagaagtagaaatactctatgttatagtttcacaagtttgactttaggtcaaagtaaaaattccctttatggggagaaggctccagccaattaagcttcgtgcacaaaatgaacatcgcaactagatatttgactccctttgggctgatctgggtcagtcagatattacaataatcttctatcctcctaaagtatgggtgtaaaggaaggataacacactgttacgaccaagcacaatggttgctcggggccaggatcaatagctaactagttagatcgaggtgcaaaaatgataacttctttaaaaatcccctagcacgaatcttcttcacttgccgctctatgagtgaagaaggcttagatttaaaccaattaattggttttttagctacaacaacaaatttggggattccagacatcactttatgcagaatcgtctagacacagggtctcacagtgtcagggattgtcccctactttgaacttgcaaagtgtgcagatggtgcctctctcttttgattagtggtcgagtcactaccacccccaccataaccagaggtaagaggagcagtggctccactaacaacctgagtcccttgagactcctggatgcactcaactgcaccctcagctcgtggtgcttttcccaccatatcagcataggtggtgttatcatctgtggtgatcattaggttgtgtttaatcttatggttcagtccatccagatactt

SEQ ID NO: 199965 - DNA, 982 bp, Cannabis indica
ctatttccttcaacttttttggaataaccatgactactctaattttaagttcttgctgaattctattgcaaataactttaatagcttgcacatattgaaaccaaggagctttattccgaatcatccatacgtggtaaaccaaaacaggtatagatacactataaacttactttcgaaatttagagattttcgctctatcaatctaacttaggatagatttcaaatctgtgctcaaacatcttcatccaagccactttttaatctcctgtaagcaaatcctgttaaagtgacatttaaagtaaaggtgctccatagtttcagcatgtacattacacaataaataagaatatgtctgacagatattgaatttcgttagtctatcacttgtttaccgtctttgtaaagcaactagccaaagtataaaacgatgctttgggatggaaagtctcaaacttgtttggtatgttgtattatattgtattgtatgagtattatttaatacaatattatgtttggtagtatttataggttgtgtaaagttatgatatatttttaataaactcgacaataaccctgattatgggtcgggtccatgtcccaagtttgggtctgggttctggtttcaagtctgggtttgggtcctggattcggtctgggtctaaggtcagtccgagtttgagtcccaagtctcacgtccaagtttggtcatgaatttgggtcccaagtccgagtccgatccgaggtcggtttgggtttggatcttgggtcccaagtccgggtccgagtttggtcccagctcacttgatgaggactaaaatgtaattttcttaatttattagtgcattgttaacatatttaacgcaatgtacttgaaataagagctatttaaataattgtaaatatgtaatgcaaattattatcagaattaattttatatttttgcatataaggcctttgtaatatgatctatcaaggtaattta

SEQ ID NO: 199966 - DNA, 1044 bp, Cannabis indica
attgttgcttgaaaaaaaaaagagcattttctcaaattatgagtgttcaaagttctaatttcactcaaaggtatagccttttgggatttataattttttaaaatgatgtcagactcactaagagaggaaaataagtgtcactactataaaatgatcatcaaaatcactagcaaaaataacaaaagggagctctagtagtgaaacaaaaagatcccattttccaaaaaagaaaagagatatatcagatcttgtaatatcaaattaaatataaaaaaagaaaaaaactcaacaaacacacacaattgtacataaaacagatatattattaaacaagcatatatagaaacagagtaaagaaacacaaaaattaaaaagaaggataagaatttgaatgtagtacttacaaatcgtccatgaacttggcggagaccatgacactggtgatgagcaagcgatgaacattaaaggagttaatgggcaacaatggctgacactgagtaaaacgatcaagataaacataagcaacgacgaagcaagaagggctacaattggcgtacttgaagatcctctgaaggtaggtgtggatggaaatggtgggtcgggtaaggccatggaagatcgagatcttttgggagtggaatggccgattcaagtcgtttaactcggcaactcgctccagtagagatgagagaaacgttagaactgtgggcatcattagtgagtcttgagtactatccagctctgcctctgccatggatgagaatgagatgaatgaagttatctctgtttgggtagtctttgtattgtgttgttttgtttgaattgaagcttcgttttgtgttttgattgtttctttctaataaataaagactctcttctctggtgctttttatttcttccactgtgtatgtattacgtgtgtgttgtcaaaccttaacatttaagccaacctgtaataactttatttatttattattttaggggaaaaaatatgaattaagggaaattagttagtcaatcattaataataactaggctgcaatg

SEQ ID NO: 199967 - DNA, 2248 bp, Cannabis indica
tatagtcagaaaacgtacaatgtagtttagaacactaatgattgggcttgaattacattattaatatattccccacataaagtcagacatgtctcatatttatttaattctcaatactaatcattataggtttgttagagatgcttttttctcttcgataaatttacatattgtatgccatatataatatatatatacgtacgtacccacacgctgcactttttctttaaagtaattaattataatatataattaattggttagacaaacagagccacatcttatattaatcagagtgtgatgattgaggagactttatacgtctaaagtggaagacacttataaatatacaaatatattttatatatagttataatattaatgttcatgtaaaccagtagtagtgatgatcgaacgcggttccaagctgccttgccaacccaaaaggccacttttgcttgagctagcttgcttccatacatatataccaataaaagccaactaaatgttataatccaatctaaaaaaaaacctacataatataaatatatatatatatatttatatgatcgagtcgagagggtttggtgtacatggaacttactttttttattttatttggttcccggactactttaattttgtttgtgtttttaggtcatgtttataatttggcaccatatataaaataacatataagtaatatagcattgagctaatatatttatcatctttatttaattaatatttcacaaccatgcatatatataaatattattgagtactcttcataggtaatacttcacatgcaattagttagcgatattctttaaaagttattttctttaagttatatgagactcaatacttaattacactaataataatatatgataccgacaataatgttagacaccgttagcaattctcaatattatatattatgtaataagtacatatatacaggcagtaattaaacaattttaggtagtaaggaatagagaagagaaaactacatgtaccatatataaaacctgtaagtagggtatagccgtgggacctaagaacatttgtcttagaatcaatatgggtgaaaccccaattttctccatccgtgttttaagctcttgtcgcgttttgttttgtagtttagtgagttacgtaccgaaatgttatagtatatagtttttatttttattattattattggttaatttattaaaatattatctatatatactttccaattgtttaatttgacagcatggaaaggatatgagctgatgaatatcgtagctagagagttatattatttttgcacaattgatgaggactaatttgatcagctgagctgacttggagagtgaaaacaacttaacgtcttttctctgtgaaagaagcacatgaagatgttgttgtagtagtagttgttgttgtactacagcaaaattattttgtcatgtgggggatgatgttacttttatatatatagaggtatctatatatatatagctagtctagatgtggtgactcttgcgtttacttcgccaagtaaaataatgtgtgtgtacttgaatttaaattaatatatagttgcacttcattatatatgcaatatttctaattcatttctttttgtctgcttatgtatattatatatattattattttgttggtcattattctagcaacagtagtggatgggcatttggttgccaaaggaataagttcaaattcagtgggaagatcccaacaagagttatatattgactattccttattgagttagaatggtggtatatagaatattataaacaaccaaatagggtatactagtaattaacctgaaccatgagagagtgagagatagagagactacaacaaattttacttttactcgactaattattaaatactattgtgactaaagagttcgtagctaaatgtattagctagttacaaaaattataatttgttgtgactaaatatgatgttagttataatatttgttgtgactaaaagtaaattagtaacaacttgtgtctaaatattatgttttagtcacaagtagttttttgttgtgactaaaagtcacattttatcacaaaaaaattatattataactaaaaagttatcactaaaaatattacctattttttttacagtgagacaaagctagtaaacattttttgtcagtgtgtgtgatcactatcatatctatcttcagttaaaaatacaggataacatg

SEQ ID NO: 199968 - DNA, 1009 bp, Cannabis indica
ttttaacaactttaaaagtttagttacaccatttgctacatgttcgaggcaaaaatactaactaacccacaaaaatattgaagcagtaataattaattaagtatttatattataattgaagtaattaaagtacctgcaactccatgttgctagttgaagccaatgctaattggagcgtgtaattcgctggccttattacgttttcaagttgaaatacaatctgccatgtggtgccttcataagtttcgtttcccacatttctacaaaaattacatcatacaagccaaatttagtttctcatatatatgatcaaagaaatatgcatattttcataaataatatatttgtctcatctaaactaaactcaatctcgctacaatttgtgtacctgacgacttgggcaaaaaaccaatccgacttataatcactttcaccaacagtgtaaactaaatcattattaggatataaatccgcataacgatcccacaagccatattgcctaaacctgtgaaaagattgagattagtagttaatcaattgtatatgaagttgttttttcataattaagtgattaattaaaatgtatgtgaacctacttgtccgggtgattgctatataattggttcatgagagttggataagggtcaggtacgtaaaattcggcagcactacgatctggggtaccaatttcccatagtgttggaccatttcttgggggttcatagactaaatttcccaagggaatatgtgattctgcaatgccaaaattacattaattattattattattattattacataagaatgtattttaagtattaactaattaaattttttaattacctggttcaactgtaacaagtatgttatacatataatctccaacaacaccaggaacccatgcatatagactgtagttgccaggtcgaacatttcttatagagaaaaaaccccgtctgtctgttttagtccaaaattgatacccctgaaagtgtaacaatattgaaaa

SEQ ID NO: 199969 - DNA, 1602 bp, Cannabis indica
taaaatgtttatttaagaataattaattaaaaatattttaattaattaggatgcttacgacgatcctacaaaattacaaaaatattcttgcagcaatggatattagttttgtaatttattttttattttttctaagagttgtaaaattagaaatacctaatattttacccagctcatcatcattgtttattatcacttttaaacaaatattaattaatagttgattaatgacatgatcatgcattagtgaatatataacatgccatacataaaaatcacacacatttattttatcatgcatcttctaaaaaaaatgagtaataataatcctttcttttttttaagccatttagcgtcggtttcgtattgaggccaaatttgcgtcaatgcacaattggtgcaaaaaacttgttaaaccgacgctgaaactcaacccctcatttgtgtaattttttttttttaaagatttcatcttttgcgtggtttttcagtttagtgtcaaagtaacaaccgacgcaaattaattattatttgcctcggttaacaaccaaagaaaaaaagcgaggtttgatttttgcatcggtcaacaagtttgaccagatgcattgaccgacgcaaaaatcccttttgtagtagtgaattgtcgtgggagttgatctgtcattctagatttggattggtgatggtgctttggcagagtttggttgttttcggtgggggcttcggctgggtcgaggtggtggtttggggtggggggttgcgactagggaaagtgctaaggggagaagagggcttcaaaggtttttgattggtttcatctggtcattgctcattctattaccgtgaggttatttatttatgtttagttttcattttttatgtctattttatttttttcaataatggtattgcaataccactctgctattatttttatagtaggattaattttatgtatgctgatgacttgtagtcttgtttcctggtggatttttgtgtgcgtttgattggtttggcgctcacgcgtaggtgatatggttaccactttccatattcagatctggcagattctcagattattattagcctcatgttttgtagattgatcatttattatgattgtcttgaacatgattagtagtgctatttccttttatttatgtttgaataatcaggttgttattacccaattattatgggaagatctttgactgatagtcattgatagatgtgatttgtcacatatgttcatccaagttgaaaatctaaaatatattcttcacatttttttgatgctttaccgctagcagctaattagtcttttagttgaaggtgccgttaggattttcttccttattattgtaaacgtcttgattagcctatttttgttgattctgctctatgagatatattataatgcaatagactttgtccgatttaactatttataaaatttatattttttttctaataataaataaataaataaaagttgatgagatggcatattttatgttttaattttttttatatattttattttatcccataatttttgcatatattaaattttatagttgtagggtgtgcataaatcgatcc

SEQ ID NO: 199970 - DNA, 1176 bp, Cannabis indica
gagtcgttttaggagtaggttgttaagcctgaaaaacaggtattctccttcaagaaagagtctaggagaggttaaaagaaggcgcaatcatccggaaacgagacgccgtaactgagaggaggatcaccatctgtcatgggcaaggagaagagatagttgagagaatcctagcttcactacgggtctcatctttagtcaaaggccatgtaagatcgtttcctacacttactatggtggcaagagagacgttttcgtcgtaagattacgagtgagtttgaagttcgccattggcgagctccagagcttcccctgcttccaccaagtgaactctgcatactgggatttgaagacaggatttcgtatcttatgtttttggctatttctgggttgtaataactgttttcaagaggagcttctttgatggcgggtgaagggttttttgagttgcaaaaattgaaacaccccattattgatgctgctgtgcttttcttttttcgttttttgtgaaggagagagatgagatttgaggtagaagaaaagtggattcttgtgtttgaaaagagtctaactttattcgtattcccatttgaaaaaaaattataataaaggataggaaagggaaatgtgggactttcggtggaggaaagaaagagaaatttgatcatgagaggatgacagagtgtctatgatttgtatggcattagaaatttggaggtaggaatagggtggacatagagaaagaaagagcattatatgtgtgtgaaagcaaatggtgtttgatttttgggttttactattcattatgatcttgacttaaatgtgtttttctgtcatgcagcttcgttagagataagcttttatggtacaacattttaacttcttctatggcttatcaagcttccgttcctttttctgtttcaaagagtattattatatagtaaggtccaaatacttaattgaacccctaaaatattagtgaaattaatattaaaagtatacttaattattaattaacctcctccataagtatagtaaaattatatagattatactattactattttattataattgtaataactatacttagtatatatagtaaacttatacatatatatatatatatgatattatgtataggtataatacactactacaaaaaaaaaatgtatggta

SEQ ID NO: 199971 - DNA, 1209 bp, Cannabis indica
aataattttaacataaatcatattataacatataaataccacacacccataatataatttactaatcacatacttgtctatttctctataaacaagttttaattaacttatgcgtataaattacataataatctatattttatcattattctaattaattattaaaaacattatatctaatttgacggtcattacaattagtcatctaaaaccatccaaaatgtaaaattaaacaagagcaagtacttgtgattccaaaacataggtttatatattggcaattagttagcagccagctactaacccgtgacattttaaaaagatttttgccaattcagaacgtcaattgtcctgtttggtcacaaacagaggaatcacataaccatgtctttctgattgtcccttctcaaacaggtggctgtcaaaattaaagctttgctcgggctaatacattggcctcctctgtcgtagcctctgctccaggtgctctataactcagcaaagcctctaaaaacagggtaataatgctgtgattgctgctacatatctagatttggttaaaatagaaatgaatgtttatacaacttaactgtacacccttgtagtttagtaaagctttgagaaagttttggtgaagctgagagtgttatgtttaggccaagagtagaaagacaaagtatttacttaatattgtaatgaattggtagtttttcggttgctgctgtttcttgtaggccgcttgcttgtagttggtagctgctggttttcctcagctcagctgtggttgtactgtacagttttttagaataaaaattcctcttagttacaaaaaaaaaaaaaaaacaaaaaacaagtactttgtagttttttttttttttttttttgtataagtgcaagtactttgagtttgagtcactattttggttacataatcaatctcctctgaaaatggaaacttaataaagaattaaaatgcaactatttattgtaaatagttaggagtgtttatcaaatccaatcaataatattttaattcatagtgcatctgatctgcactaagtgcacatttcattttttggattcaatacaatccgcactataactcaaatccaattcaatccaatctgcaaaagtgcagattgaatcgattattttggattggttactttttaatattaaattatttaatatatatgaaaaaaataaact

SEQ ID NO: 199972 - DNA, 1016 bp, Cannabis indica
tcgtttgctgcttacgaaatttgaaaccatcaccaggcaattactggaacatcaagtcttagcatcattttcatctatgttttgtttatgtgatacataaaaagattgttatttgcatttaagtggtaaaatctatgtttcaggttataattccagctccatattatgtgagctatccagagatggcaaggctggctgacgcaacacctgtgattctgccaacaagattgaggacaattttctgctggacccaaaggttcttgaatcccaaatcactgagaagtcaagactactgattctttgctctccatccaacccaacaggatctgtttacccgaagaaattgcttgaagagattgctaaaattgttgcaaagcatcctaggcttttggtacatcacaatagaccttgaatgattgtaatgaatgtccacacatcacctttccttgtataaattctgaaacatatttggctgtcttctcaggttgtttcagatgaaatatatgaacacataatttataggccggcaactcatacaagctttgcatctctaccaggcatgtgggagaggacacttactgtcaatggcttttctaaggtaacatattatttcattttcgtattggccttgtctttcatgaattcattccatgaaatgaatgcacttagtataattggccaagatataaaacaatggtcttggtcattgtaaaaaaacaacacactcttattgttgttatgaagtttgatttgcggaaaatgatattatgcaggcttttgctatgactggttggcgacttggatatgttgctggtcctaaacattttattacagaatgtgaaaagctacagagtcaggtatatattttgcatgtatttgagtctcattaccttcatgtaaaaaaatgaaaagaggcaaaggtgagttttgtgtgatatgaggaaaatcacaaataattaatattttgtgttcaaaagcttccaaactttctcgtatgagaagttaaggtgttgctt

SEQ ID NO: 199973 - DNA, 894 bp, Cannabis indica
ctttatagtttatttatagttatcgtgaggttgatttctcgttgtttttttcctttttgtctgagtaattttgtaatttcaaaactttacaagtgtctttttataaataaaaatttagaccgtaaaattataaataaaacataaaaatagtatttttttttgaaaattctcctatattttatctttatatattaaaagtggctatgtaacatcaattcttgatttaacgtttttatttctatcttcctgttaaattttaatataatattcttgttatacccatttttcgagacaattaatgaaaaaatcaaattatatattacgtgacatgaataatgattcatgtataaataatgattctcgcaaatacattgtgggacaggtcgaataaacttaggactcaacttatgaggtgacctcatctaaataatgatcacaagatttatgaagagaggtatttctacgttgtcgggatgtcattttgataaaatattcaacatctcgtagtacaaagatcttgtagctgatcgtaatacaatgatcttgaatcacctcgtattatacaacaatgatgaatcacctcgtaatacacagtcaatgatgcatcacctcgtagtatacagtcagtgatgcatcacctcgtattacacaacagtgttgaatcaccttcgtattacacagtcagtgatgcatcacctcgtattacacaacagtgatgaatcaccttgcattacacaatagtgatgcatcacctcgtaatacacagtcaatgatgaatcaccttcgtattacacaatagttatgaatcacctcgtattacacagtagtgatgaatcacctcgtaatacatagacagtgatgaatcacctcttattacacagcagtgatgaatca

SEQ ID NO: 199974 - DNA, 1346 bp, Cannabis indica
gagtgattgaaggaagaaacagagagaagaaaaccagttatgatcttcaactggtttcagagagaatatgaacaacaacaaacgaaacaataaataagtaaagagattaaggtaagagagagcaaacacaaggagattttacaaggttcaccaccagaattggggctacgtccttggtgagctgcttcagagaagaacagtcacaatccactatcaagatcagtaattacatctgtttctgagctccaagacacatgggttgtctggtaactcacaattctgcaaaccaggtatgtacaatctctctctctcaaactttctctttcttttcttctctcaggatcgaaccgatcctctcactttctctctttctctctaattttctttctggtttctttctgtctacacacaagaggaactctatctttctagatctggacctttcatcttgtttctctagatttctgaagaaaaaatatgaagttgtaagtgttctctgattttagtccttctatttataggtgttgtaatagttgaagaagttggttaggaataacgaacagctgtcttgatgttggattgcatatggataggttagttaagattttaactaactgtgtttgaccttattatctgttacaggttgacttatatggggaattaacccaacaaaaataaaacatagtggaactttatcttaatcttccattggttcagcactttgaatggtgaattggttgtactttggactcattgttcgttttgaatctgcatacaactagattctatattttttggctgataattttcacgtaatttttttgaagaaacaagtgatgtttctgtaaaattaatttttaatattacttttatatttttaagataaaattcattattcttttatgcgaaaatattacgtatatatatataaatttatatatatatttataaaaatatcttcgaatcacacatgtgcaattatattatataaatatattaattgtgagacccaacacacttaaaattagcatataaatctaaattaactgtaactataagaataaacataaattatattataacaaaatattttagaataaaattattatttttattaaaataaaaatcaaacattgaagattaaagcaaaatcactgtgtggtaacaaaattaagctatattatattctaatataattagatgcaatgcacctgtgactaagcatatattatatcatatatataatatagggtaaatggcggtaaaacccccaaaattttcatttggtttcacctaactccaaaaactcaaatttgagtggtaaaaatctccaatactcgtattct

SEQ ID NO: 199975 - DNA, 2168 bp, Cannabis indica
ccaacatgacattttaaaagaatatcacaaagccaaattgaaaaatttgtaggtgtacacatcaaaaaattcataattttttttaaaatagatcaaagatctcaacactagaaactaacatacattggccgaaaggtcttaagaaaaggtcaaaggctgagacaacaaattttttaattgatctgataccatattaaaatttagaataaaaatgtgaataattaataatgaccaaaaataaggcaccatggaaaaaagaaaaccatcatttttttagttgatgtaatattattcacatatatgtttaaagtgttatttttaacagccacatcaaaaataaaaaccaatcatactatatttcattaattcatatttttttagaatccttgctaaaaagtaagacaaattttaattactatataagctattaacataaaaaatactccaacttaacaaaatttatacttataaagctgtaatctaatatcattttttttttcttacaaatattaacgtaacattttttaaaaaataaaaaataaaaatcactactcttaaaaaaaactatcatgttaatatttaaataatttggtacacttttgtttgcacacataattatgggtctcacatttatttatgtagtttgtagaaattataaattatcccaatataaaatgttactaaatatgccaataaacacgtgatgatatactatatattactttccccctaattaagatcaatatagaaaactataggcacgttataaccatgtgaagatcatgaaaacaaatgcatgaactttaaataattaattgtcgaataggtatggatcataacaaaataacatggacaaactaatcattaattaataatattgctatatatgattagatttatgagcattttttattaagcacttgtggtgtttagtacttctagacatgttgccttgcaatcggcttgcaatactttgtaaaaattattacattaaactatgtaagatccgatacttaattagaccaatagcgatattaacacataagaattaactagacaccattagtacttttagcatttctcttggatttatatataagattaacattaactacaattaaaaattattaataataattataagtagtgaattaaaagtacttggagatcaaagttggacaaatagtctatacatttgcgacctattagtattacctattatacttttttagtatacaattgtaaaaacttaaaacataatattttttaagagtaatttgcgatataaatatgagagtttaatttttaattgatttaaatttaattttgaacaaaaataatacctaaaattatatgtttagaactttcataagtacatgaccattaaatattagtttaatagccatgtgttagtcaccctaattaattcgagtcattaaatttttattttctttaagaaagtcaaatctactaataaaaaaataacaagtagataataataatatttaacgaccaagtacctacgaaagttctagaaatataacttatatattattaccgtcaaaaattgaacttgggtatttatctgcaaccgatagttaaacttaagtatttacgccacaaattactctaacttttataaaatagattttaaaaaaatgattgaaaatatataaaatatagggggtcggtgctcttacaatgtactcatatctgtttcgattttagttatttttttttttatagttgtgttcgttataattatttaagacatcattcaaaattttaaaatatttaaaataatttacaatatagaaagtattgttcaaaaagtatatttcacacgcatataaaataaaagagtgtgacgtgaaccctatttttggcgtgttaaatttttttgaatttctcaaaattttgtagaaagttttaaacgtctataatgcgtacgaccaaaaaatagagaattttttttttttaaaataccgaaacagataaaggtgcattagatactcatgcacttttaaaaagtacattgtagaaatttcctaaatataatattttagaaaaataaatgttgtttccaaaaaaaaaaattacaccaaaatgagagccgtaacgattctatttaccccaccgtttataaggaagaaattacactctatacc

SEQ ID NO: 199976 - DNA, 1024 bp, Cannabis indica
gtcccaagttttgatttctatgcatgtatatatatctatatatgtttcaaatttaatttcaacttcaaaaaacaaattattaatatttccttctctctttttttcaataaagcaattataattgtttatgttttttttaaaaaaaaattaaaattaaaattaaaaaattggaatcgctttttgcttgtctctccactccatatattaaatttatgaagaaaatgacccattaatatattagtgtataaattttgttttataataaactcaaataatattcgatgcatgccaaaatcatcatatgcttatgatgagcggtgatgacagctattatatatatatcatatatagtacgtaaaaagaaataaattaaacaaaaaaagattaggtagaagattttgttcttctttatcaattatatatatgtatagaagaaaaaaaaaacttgttttagagtaaaatggttgacaagttaatatttcaatgaatttaacaaaaagagtggacgaattatatatttatgaaccatgcatgtacatatttggtatttatgtaaaagcacttttattttttggcagtacaaagataagaaacaagacaagagacgagaatttaggatcttgtaaaaagaaatagggcaaagattaaatggtggtcaagatgaacttgagtcacacattttgaagagaaataactcaaactatatatatacatatatctatgtctatatatgtatatacaatctaataataaattagaattttagctagggttcgtggtgtgtgttgttgattgatgaagcttcatgattgaaaatgtggaggtccccaaatccaaaaattaaaataaaaatttgagtacattttttttttaaaaaaaaaaaagaaagaaagaaatggttgttttatgtgtcccatttagagatatatatatatatatatatatatatacatacggactcataaaggcaattatgaaaatattatagagtgttatttatcaccaggctccagcctagctagtt

SEQ ID NO: 199977 - DNA, 1335 bp, Cannabis indica
tacatttatactagattcttaaagaaaggtcatacatgaaaaatactgcattagcaaatagcggtgaaaaagaggaaactgagaaatgaaaacctgaaagaaaatatataataaaggtaaagaagcaggtcatttggatttgctcaaacacagacctgtccatcaggaagggtatgttgctctgtttgacatgactttccagtcttctcgtatgcaagttcgtcttcagcacagcatgagtattgttccttaatcttctcaatatcagacatgctgatgttaacacctggattggatttccctagttcttgagcaagtaactttgtcaaatccgttcctcctatttcaaaccttttggaggcaatatgatgcacagcaccttcaattactggtgcaatatctggagaataagacacaaaagaatgaaatgatacaattagacatattattctaaaatgttacaaacatcatctgcatcgtttattgcaatttaacaataaatagatcacagaaaaagagtaatagttaaaaaaatggtttgatatacataagaaactgttaaaactctttccaacatcatctgcattgtaacttcattggatcactttaacaataaatagatcacagagaaagtgtaatagataaaaaaaaataaaaataaaaaacagaaaattggtttgatatacattagaatgcaactgttaaaagtctttccaactttaacttattaagttttgatcttgtttgttaacaaggaccgctggttggatattgaggaattggttagccttggggttgaggagttcagaaggttcaacggctgacggatgctcagaggggtggtggggagatttaggatctacttaggtagtcttggcattgttgctaaaagatcactaggttcctcaataacagagaacctttctagttctccctttgaaattactcagtttcatattgtttaatacagctactttcatccaaatcacattctttattttgaaatgctagtttctgatttttcttataaaaaattgctagtttctgatttccatttaggacctatcagacagattacattaaatttcaactttcaagacccaacttcctagaaaaaacagtttttaaacatgtttccaaacgtaactcgcatatataccaaatatattactctatactatcactactgtatatgtatatgtatattgaaactagactccctgcgtaaccctacaatatttaggggccactataataattgctatgcaggtaccgaaaaggggactcgaatccaaaactttgtgggaccaaaccacatgcttggttagaggtatc

SEQ ID NO: 199978 - DNA, 3518 bp, Cannabis indica
agaaaattaggaaatttcataaaaaaggacacgtctaggaggaaggaaaaagcagacgccatcaatcacgactgaaaacgataataatttatttttatttttttagaaataaaaaaaaattggtaaattctcatcaaaaactcgtcttacatatggagaaatagaaaacaaaaatcactcgttcaaagtgattttagactaccgaactaccaagaaatcctagaaaactttctccctcgatttccagctatccaaacagcttttcaaaaacaaaaaatagaaagaaaaaaatcggttttcacagaataagcacgaaatttctctcaaaaagaaaatctatctaatccaggaaaacgaactttctggatcaaaattcaaacaaattattataaataaataaatgagacacttttattgaataaattacataaatcgatagggaagtcaatgtctccttaccgtactgtatggatgaaaggtccgatctcagtctcgatgcagcggagaatctagccggaaaagaattgcatcatcggcatgtcgccgacgccggcgagaaagagagagagtttgttaaggaataaaaagtgagatagagggcaaaacaaggtttttatatataaaattgaaaaaggggattggtggaaaatagaagcgtaacctaattccgataaagaaggaggcgaaattgggggtggattcgaaaccctagattggttgagaaatttggagaaggtaaggtgtggtgtggccaatggtgttctcctactctttttgagcgagcttagtattaaaggctttcaatcaagtgttttcatgtcaaatattataattatatatttttgctaaaagaaatttaaaatgtgatcttttttttccaaaaaaaaaaattaaaattgaaatttataaaatgtagaatagtttattattattttataaatatctaaaaatgattaaaaaaattgaatttatatatatatatatatttttttttctaaaaacaaaaattttttttttttacattgtttaactaatgttattttcacattattgctactttgtattatgttttcaaaagaaaaatataaggaaaaaaattaaaaatacatttgtaaaaaaaaaaaaaagggaaaggtgcaaagttcatttttcaaaagagaagttgggttggttattgaatttaactatttaagtgtaattgaaggtaattattaaatttgcgtgttttcttaattatgtaacatttttgtagtaattaaagaatttcaattttgtttttcaatttttcataactcctaacaaagtgtaaaaattatgttattctcacgtttgactttcttggtgttcgttgtggtagaagtaatccaagttttcttcctctatcttatatattaatctttttattggaatattttgtatattaattactaaataatattaaaattttatgtaataattgctaactagtttgttaaattaaattaggagaatttacatgtaattgtcaacttatatataaaaatattatgtatattaaaatatagtctacgtataaaattatagaattactataataattatatagttatttttgaattatttactatctaaactcttttattaaatttgattaatgaattgattagttagttagaaagttagttaggatgttagctcacagttagttagttggttagtgtgtttgtttctcttgtaatctcagctggtataaataagatgataaacattttgtatcaatttaatttttgatgaatacaattctgttaattcatttctctcttcctttcttattctatttcttttttactctgtttcaagctcattcgagctaatatggtatcagagctagcaagctctttttcctgattctggttctggtttgttgttggtgaatcatggcgcgaggtggaggaactcaagcatgaggaggagttcatactcttgctaatcgtgaatctgaaaataactctaatgactcaaacatgttctctgttcttggagagaattctcgatccactaatgttaataatgatctttcgaatccatactttctttccaatggtgtcaatccaagtattgttcttgttccgaaaattctcaaaggcattgagaattatagtacttggagaagagcaatgatgattgctcaaaacaagattaattttgtcaatgaaaagcttcctcagcctgatgaggatttcgaagactatgatagctagtgtagatgcaatagcactgtcatttcctggatacttcatgctatctctgatgagatcgcaaatagcataatgtatcttgacaatgctgctaaaatctggatagagctacatgagagattcaatgagaaaaatgttcctcgaatctttgaagcttaaaaaaactatgcagagtcttactcaaggatcgaactctattactacctactatacttgattgaaggctttgtgggatcagatcagagaatatagaccacaacctgtttgtacttgtggtgcaatgagaattattcaagaatatcaggaagaagatcgattgttggaattcttagttggtttgaatgattcatacaactttgttagatttcaaatcttgatgcgtgatcctcttccaagtgtgaataaggcttatgttgctgtggttcaagaagtgaggcaaggaggattaagtagtagatttaacaaatcatctgacttagataaatctacatcgagcaatgttggatagtttgctggagctgttcaaccttttcgatcaaagtacaattgtactcactgtgacatgaatggacacttgattgaaatatgttacaaactcaatggatatcccctggtcacaaacttcatggaagatttcccaatcgcgatgccaatggacctccaaaaaagtctgatggtgtgaatttctctggtactgatgaaggaaaatcagaggaaatgccattggaaagagacctagtttctagcctgtccaatgtgcaatgtcagaagcttatggcattacttgctaagaaaaccagtgagacaagcaacaacagtgctcccagtacctctaatgaacaacctgcggtttctaatttttctggtaaaaattcttttgttcctaaagatagttggatcatagatacgagggctacacacatcatgtgtgccctgatatttccttgtttaaaactactcatactgatcctaatctaaaaaatgtcctcttacctaatgctttgcatactaaaatatcttgccttggaataattgttttaacacctaatctaattcttgaaaatgtcctttatgtgcctagtttcaagtgcaatttgttatatgttaattctctaacagctacaactgattgcactttctcattttctcatgaaaattgtgtcatccaggacactttgaagaccaaggtgattgggatgggtaagaaaattagcaacttgtattacttgcattgtaatcagatcagtaataagtaaagtgtttctgttttttcttccattt

SEQ ID NO: 199979 - DNA, 1096 bp, Cannabis indica
ttttgaacttatggagtctgtttcaaaattttattttatggtagaagcgtactgaattgaagtggtaattcaatgctcatatgaagaaaaccattgcttgctagcttcctaattagaacactggcctgttgagtgttgaattcatgttgtgttgtcattagattgggcttttccacgaattttcagattggtgtttgatttgacttgaggccatcataattatttaacagtttgccaaaccattgaagtaggcttcaggaatgaagttttgtgtgttttttatattattccagtctctggcttgggcttgctaattatttgtaccatttctctacgaatttctgacttgttgtgtttattacataaaggttagagcttccaggtggtgaactctctggatgtcatgcatgctgtaaagggtggttgggttgggcaaacatttgccctagctagaagcaatgagtctgaagggagaaagtcccgaattaggctttccaagaaagagaggaaggcgatggtcgagtcctttataaagaagtaattgctattttgttatgctatgctgcaccaaatggttatttgtttcaagttttttatttttttcacgtttgcaagttgtcatattagcacactgtctttcctttatggtgattgactttggaagaggatccttgctgtgtgttaaatctgatcactttgtttattcatagtatattgtttatcacattctaggctcttaaacgtcgtcggcttatttggaaatatctgttactccaaaccttacatcaagatcttgctatgtttttgtgtagtttatctcatttgatgtcttaccagcaatcaataaacttcattcaggctgtttaaaagtcctatttcagaagtacaattgcaatgctctgcactggttcaatgacgtgaataggaaatatattagtattactcttcattggataaagtatgcgtggtctgatttgaaattttgcttaatggttgtatcagtgtgtggtgctgttcacatattctagatttgagaagcctaaaaataccttaattatctagaatcaattatttatttaaagggaagtagctaact

SEQ ID NO: 199980 - DNA, 1373 bp, Cannabis indica
aatattacatcattgcttgttgcttgttgcattcttcatgccttttctccctccaaataagatataaacaatgtcaattagataagtttctaaaatttatactttaatataagtaaacttattggaaatctgctgatctgattttatatacataatgggtaacaggtatttacagtaattaaaagaaaaaaatggtcaacttgaaaggaacatatgactcattctaatattttttgtctttcttcatggaaaaatatattaatatttattatataaagatgtcttattatattaaatatgtaaaatatgtttttgattgaattcagtgttatattaactagtgttgtaagtatggattgggttttttttttatacattacgaatccgacatgagtttggaaagtacgagtacgattaggtacaaaaaaatacaagttttggcatgatacggtacgatattacaaattggcacaacacagcacgagaagtacgaaaggcacggcacgtaaacacgaatagactaacccaaaaagcacgacacacaacaagtctaaaaagcacagcacgccatattaaaaaaccttatagtttattacttataataataagatgaattcatcaattataaataagttaaaataataataaaacttaaatataatactgaatattataattctataattaacatatgaaaaataaagattatagattaatttatttatagggtgtgatataaaaatttaagtatttatagataaatattaataattttttttgggtttttttctagttttaaccaaaaaaagtaacaatattaaaaaaatatgattatcagctgaccaaataaacaagagattttttctattatagactaaaaatagatgaaatttacatttatgaccccaaaaaaggaaataaacaaaaatggaaattaaaaagttgttaattacaaaaatgccggctgagaaaacggaaagggaaactccatcttcttcgtgaccagccgaccaaccttcgtgacccagccgtccaaccccaacaacccaatctcaaccatttttcttccaaaaaccagcaaaatcaaattcaattcaaaatgtagaactcctaggaaaccagctgaatcccgaaaatccaaaaatcaaaaaacgaaaaggaaaaaaaaaaaaccaaaggaaacctaccattgatgtacaaaaaaactacaaaacaaacaatcaattgaaaaaagaaatacgcgatcagaggagaagaaccgagtagaaggagagctggaaatcaaagaaactcaacccactgattgaatcagaggagaatgaagtaacgaaatttttaattagacgtagaaaaaattttaaagttgtagtatg

SEQ ID NO: 199981 - DNA, 1338 bp, Cannabis indica
ctctctctctccctctctcacttctacacgcccctagcagtatagaagagactaaatctgtcacatctcacccacttgagattcgccctttgattcttactatggtaatcttaagagagccactatcgaatccctaactctttaaatctgagtggtattatctctaatatcaatacaaccaaaagtatgtcactacgcgctatttacgggacttgaatctctataaaatatttcatctttttcatttacttgttcttattgtgtacacgtggtgatatccctcataaatatgcctctgttgtcggtttgccaaatcaaagagtagtattgtttaccgagtttttggaagccgaataattttagagcttaagaaagtaatgaaggaataaataatgcaataatgaacaagatatttttacgtggttcaggcgttaactatccttagtctaccagtccattttattaggctctattgccggtgatcctttacacaaatgcaaaacaatggacctttttcctattccactgtgttcctcttgaagaagaggaagctaagtaggaatattctacagttagtagtggggtcacaggaatttgttttcttgatgaagaatggatctccaatctctaggtcgaggttcaaagaacaggtcccaatccttctcatgtgctttccttggagtattaataggccaattccattacatgggctaccttggatggatcttcatagggatgaactcccaccgttggattggtttgtggcacattttccatatggtctttaccgatgttagattgtactggctgtaccggcgaggctttggatgcacataacctcagggccactctcatttgaatttccctcgtccatcgccgtcagatttcttatcacagtacacaaggatgcgcatgctctgcatggtagcatggcatgggagacaacctctaacatcgtacaggaagaaaggcacggttagtgggcccgtagcctggcaatcacgggctgaactttcgcgggtcaaaggcgtaccctagaccgatgcatccctatggaaggtccatattcctcatgggagaaaagagtcccatcctctagaatggagagaaatgttagctcgcggacatctctctcatgcatatctctatcttcagctctcaatgaatgcaccaaaaagtttaccaagtttttcggaaaccgaataattttagagcttaagaaagtaatgaatgtgtaaatatgcaataatgaacaaatgatttttacatggttcaggcattaaccatccttagtccagtagtccattttattaggttctttggtcggtgattttttat

SEQ ID NO: 199982 - DNA, 1139 bp, Cannabis indica
ttttttcctacatttttctttcctcacaaaaatccaactaccgtaaggaatttttaaaagcaaatccagtaataacaagtagttcaaggcaatgaaaactgggatcattgcaaagtagcacgataaaataccagccatgactaaatcttcgtacacaacttacaattcgatagacaacttgagaagaagaatataaaaaaagcgaaaattataattgaaaaaccagaataaccatacccagacaagaaacgtgaaagtaacatattcaccgtgtgcattaatttttaatttttttccaaatggccataagagaaatggaaagagaaataaataagtcatttattgctgtagtcctctcatttgctatttaaagaccaaactcattcaattccaaacacttaccaaaaataaataaacagatagtacatagaaagaattaaaaacaagttataaataattacctgattcaaatgggtaggatttaacaataaaaatatcgtgatttttctatatctgatgatgaattgacgagctgagctgagctgagcaaatcgcgaagacctaaatgtaaattccaatgatcatcagaagtcaattaaaaaaaacaaattaaatatacatatatttttgagattagaccctcaatatctgtgccgtcaagaactgaacaatgacagagaaaatttcattgatagatccaattgaaaagaaaccctagaaaacgtaattgaaggagaaaagagtgaaaattgtgatatgggtcgagatcggaacctcaatctacgaaagaaaataaggagaatcggaagcttaaggatttcaacgcatctcagcctttaggactgacactgtgattgagattcttcatgagagaaagtgaatcgtattattggaagaaagagaagagatgtggagagagagaaagagatgaaaggtataagattaggagataataatggaaaatccaatgcgaaaatggcacaatatgaggtattatagcctaaatttaaggaagaagagtacacataccttaattctcctccatctcaccatcccttttgctttctcaacttgcctccttagtttctttctcttacttccttctcctatcacttttataattattattatttaattat

SEQ ID NO: 199983 - DNA, 1378 bp, Cannabis indica
catctagactgctattagcctatgacatactacataatagttattcatgccacattttggctgctgatgttcgtcataaactagcagtagtgaatcataaatgtctcatgttctggcatgttggttctatattttgctcattctctgtgtggatgatattcttttatactcaaacctgtaaaaagcttaactttcagtcattagagtaatttgttgtttgaagtgttttaactcttgaatcttggatgctctgtatgaacagattgttaaagaagatgaagaaccagcagaatttctcgcaatgttgagtctgctgtagcgcatgcagtaatgcaggagtttcaaccaagttcttattcctttagtttggctcttttcgaccctcgacttactttctagacatcaacattggtttatagatagccaaaaccagcaaggtattaactatgaattcaaattagttggagtatttgtctacttccctttttcgggtttttgttggtcgtaaagaaaagtacaacgctaaccaaagtagaaaagttgtcacttgcattggacactgcctactagtattgttcttgaaaaaagcttgtagatttgatatattttatattttccttgtgttgtgttcttattgcctatttttcttctggacatgttcgatgcagggggtagctaaccaagtagctctaatcaactggctgtacaatgctgtagcctgtgtaacacacctctttcttaacttaaaaatcattgtcctctggaccaactttgtatattcactcattctagaagtaaatcttgaaaatttcttttttgtttttttattagtaaaattatttgcggctaaattctctcaacaatcactctacttgcacttaaccctctaagctgaaattttaatagtaaaaccttttagattactgaactggtagcaaatttaaagtactattcatcttgcactgttaactgccaatatagattgtatacttttgtatatgtgtcatatctatattggtattaaatataaaaattattttaaatttataatattttttatttttataattttatttaattttaaaataaattttgaaaattatttttaaataataatattaagtgtactaatataaacttatcatgtataatatatatatatatatgcagtccatagtgatatttaattagatgatacctaatttattatcagtttggaggattttactttgagtttgttgtttagaggattaaatgtaagtgaaatggcaattggaaaatttaagtccctaaaaactcattattttttcttttctaaacacggctgaaattctcgaatgttaagctaaggtaccaaaggattaaaggaaaaactttc

SEQ ID NO: 199984 - DNA, 651 bp, Cannabis indica
tttctcttctattgaggttggtcggtatctttaaacttctttggctgcttcatggagggagtcttctttggctcctcgatagcgattcctttgtcattatctttacaaacacctgaagttccagcatccttcagatcagccttcttaggtgcatttgttgttggaagggcttgtacgtcaggaactgtcttagttaatgcagtcattatagcctccatttttgtcatcgtgccaagtaatatctcgttgaactgatcttgctgagataacctcttttcagtaaattgaagttgtcgtgccatgatgaccacggggtccgactcgtcaggctgacttttctccccagcattgttcttagcggctttgtactgagggttgtcttcatgcatatcctccgggacgtcgtcagtgttaacttcgacatcctcagaactactttctcctgattctgcatccttaatgatgggatcgtctagatgttgatcctcgtctcaacaacttttctagcagctagtcacctcttgggatcactcgtatctcttactttggcaccaggaccggtgaaatggagattatatttggttctagtgagggccatgatttctcggacgtaatttgctagtggtctcattgcttcctttagctctcaat

SEQ ID NO: 199985 - DNA, 1234 bp, Cannabis indica
  modified_base (66)..(66): a, c, t, g, unknown or other
gttcactctctactcgacttttatcactatattattgaacaattaattctcatgatatttaccttntactactactccctccataaccataagagttagagtagttggcaactaacctagcttaagcttttttggtatttttaaatataggaaaagaattgttaaaaggcatcacactgtgtttatcatttttctcagtgtcatactgctagtgtaattaagtatcgagtctcatataacttaagaaataacttttaatgaatatcgcttataactaattgtaaagtgctacctataaaaagtattgtacactgctaatgcttaataacaatgctctaaaaaaatacacatttgtaataataattaataagagaattagagaataaataagttaaatttattccagatcaatttcttttacttattacacataagtctctttatatttttgtagagagtatttttcaggtttttgctaaaatttttagttaaatttgaaaaaaataattggcaaaaggaaagtacaagttaaatgttgatgctacaataaatcttaaggcaaccaaaattggattgcaatgattgattatgcaattcccttaaatactgaattcaactgtggctgaagctatagtattcaagccttatatgaaattgtgttttgccataaaaatatgaataggtggaatttaattaaaaaagggtagtgaataaaatacattcttcatcttcatctttagctctcacataattaataggcatttagaatggtaaagactaaaaaagagaaaatatagaatggtaatattctaaatttgtaatgtgtaactagaactttcctgattgattagtgcaagttatacatttatatatatatatatatataaataaaggtaattttatttcaaaaatatttattattaaaaaaattcaaacaaataatatactggaaaatagtatattccttttgaacttgcacccaatttttctaaattaatgttagagcactctcaatagatgagctaaaatagttcaatctttaaattatagagaaaaaattacaaaattaagcttccaacaagtgaggtaaactttagctattttacatattttttttaacttaatgaatagtgcttagctaaatatagagataactattgattgagctaaacatattttaatattattttatttaactaatctacatatgcgtgtaatattatatgaattacta

SEQ ID NO: 199986 - DNA, 656 bp, Cannabis indica
taacgctaatctctcaaaagaggcaattgagtttgttgctaataagcaacacaaaactgcacaacttaaaaagttttgcaacatcagcttgtctactagtgttagttattattcaagatatggcttaattcaactctatagtattggttcctattaaaaccggtacttattaggaatgtttaagcccattttctggtagtggagtctcatatacgataatgcaatcattgatgttgaaagtgttcactatatgaaatgtggtcacttttgtaatgagtgaaacttgccctcaatttgtgaaaagctaagtgtgagtagaaacttgtaagtttcttttgattctttgggttgtgggataagcaggataggttgtggacacaagccttctactcagatttgtgtgcattgattgattgggcattgtctttcatcaaaatgactctgtctaactaccccaaccccactaaaaagtgtgataaccagcaaccccctcctctttggcattctcatcctatagtttgcatcaactatgatgcctccctttcccaaactagtgttggttttggtcttgacattgctcctcataactatgttggtcatgtgcttcgtgttgaagttatctactgccctgagcgcactacagtggagattgttga

SEQ ID NO: 199987 - DNA, 628 bp, Cannabis indica
aggtctttatgtgaaagaactgggatctaatctttatttgttccaattctaccatgagtttgatattaactgggtcattgatggcagtctttggacattcaatagacttcctcttatatttggacgcgttccatcgggtggaaatccgaaggctgtgatgttgaataaattggatcttttggttcaaccttttggcctttgattaggctttatgtttgattctgttctcaatagtattttgaattatataggaaagtttgtggagattgattcaaaaaataagtctgggatatggtggaagtatttgcgtgtttgggtgacgataaacattgatgaacttttgaaaagaagaatgaggatgaggcaaacaagcggggagtggttttgagcagactttaaatacaaatttgttcctaccttctgttttgtatgttgtgttatcagacattctgagaatttttgtcacaaggtgtttgacacaccacctgaagatattgtcaaacctcatgggagagggatgcaggctcaactgataaggaggaattatttgttacactctcaatatttatggggggaagaagattaataattccatggtggtccgactatgtcaggtggctatgggggt

SEQ ID NO: 199988 - DNA, 609 bp, Cannabis indica
actaccaaagatgctaaactgagttttaacattttacgagttcaaaaggaaatccgggttgaaaatccaatccagtagctctaggggtttattaaattggattatcttactatggatactgatagataatagtcctcttccagagtccggacaaatctcctagtgtcaattttcaattaagctagtgtcaattttcaattaagctactatttcatagtgtaacactttcttatttttcaaaatcaccttgtcctcaaagtgataaaactagaaaaataaacacaaataaaaaattaatttcagccaaatatgcttttagcccaaatgaagcttcctttaagaagaaattacactacatacctttttgatctttttgatgtctttaatttttactctctttcaaaatctattatgttttacattttttttttttcaatcattttactaattttacccctatcacttcatgataatttttattctttttctaattaaaattttgtcacaacttttttcacaaacctacacatccatttacaaagaataaaaatctattatgtttgaaattatgtcttagttacgttgagtgagaataatttaggtacaata

SEQ ID NO: 199989 - DNA, 1106 bp, Cannabis indica
gtcttgcgattgactagcgatactttttaaaagttattatattaaactatacaggacccgatacttatttaaatcaatagcgatattaacacatatgaaggtgctagataccactggtaccttctaacatttctctatacatgtagataactatataaacttgaacatgcacactaaaatagattttagcatgtaacattggtttaaccattccttattagattatcactcttggaactacaattgtcaagatagttttgataagcatatgaaacaaaccccaaatagttaaaaccatagccatatctttgatcccatccatcttttcatggaagaaaaacactgccataatttgccataattgggacaataggtgaacccaaaacacttatgacattagagaagagtgaagagactactagaagtagacccactactccaatgaagtaaacttgtcatgttatagtgatccataataatgtcatgacatatgaaactttatttcttccctctaacaaattacattaaatactgtcaatatatcaatgtcttcattgaacctctacaaatagaaatatgatatcttatatgggatttttttagagttcaacaaaagaaaatcgctaaaaggcactatttatatttaacatctttctcgatgttatattattattagtttaattaaatatggagtcttatataatttaaaaaataaattttagagaatatcgctaaccaattatatgacgctatgtataactaatgcccaataataatactcctggtaaaaaacaattacttgtgtttagtgattgataatggtagttgaagactagcattaatatatattaatttattttccaaaactgataaaaagtcacttttaaaaaagtaatacattttgatataaaatgagaaaaagaaataggtgcattgctcaaaaaaaaaccaatggtctctacaaaacaattatatgagcatacatagaaacattaggacaaaaaatattacatactaaagagagattttagcttgggtaacaaaaatacaatcttttattttattaagtactattctctccttttcttttacatgtagatcttaga

SEQ ID NO: 199990 - DNA, 1533 bp, Cannabis indica
aggttacttttaaggcctgttttgcatttacaaggttagtgctttaccttttaatgataacattttataagaaatatttttgtttacttataaggcacatagttcactatacactgattgaacaagaattgggcaatgaaaaatttaaagggtgtcgtttattttaataaggtgtgccatttaaagcacgttgtttacgtaataagtttacctaatttaaaacatattgtttacttaatataaaatatgttgcttacctaatataagatatattgcttacataataatgtatgccgtttactttattttaaaatagttgtttttgttctttagttaaggtacgaagtttacctaatttaaggcatgttgtttacctaataagatatgttgtttactcacgttgtttacctaataatatatctcgtttactttattttagagtagtaatttttatttaccctatttaaggcacataatttacataacaaagtacgttgtctacttaatttttatttaccctatacttatcaaaattaccctatttaagatatgttgcttgtctaatttaaaattaaaagtttttaaaactcttttcaataaagaaagagggaaaaaaaactattaattaaagggttttttttacttattaaataaatgaattaaggagggttgtaatatagttgaagcaaataattattgatactaaaagaaattaatgagaaagatgaaaatttaaaacaaatattaatagtaattttcataagtatagtgttataacataaactacttttgtgatttagtatatctacgagttgcattatttttttaactaatataaatcgtaagttatggttaatcttgttattcttgtcttttaatacttaatttattggaaaatatatgcataaataaatggttagtattgtaatttcttatcttgtaatgcttaatttataatttatgctacttttctttgtgatttatcatttgtttaacatgtgcatattaacacctcatactattcatataaactctcatcaagcaagggtttcattttcaattttaaactaaaattgacaatgttaaaagaattatcttaggagttaggataattttaggtatggctttttcccaatattcattcctgtcttctgattgtgcacacagtaaagcctgacaattaacatagtttccattcaaaacttttgtccccaattgggtacgggatgttttttactaaaaggaactattacaagcctcatatagaaaaaaaaaattaaaccagaaattatataagctatgaaaatacagcgtatcaacacaaagtattcttcttaagtttcttcttttttgaggtaaagttgcttggaccaatttctatagacattcttttggttctgcaaagcataaaaataagtaaatagaatgagcgaagaattctatatatcaacttaaactgcaattgaaaatcaatactcaaaagtataaaacaacacagtttataaagcagcataccttgttaaaagttcttct

SEQ ID NO: 199991 - DNA, 848 bp, Cannabis indica
agaaactcttattacaactagcgttacaacccgaaattatggttcttcatacatattatgtttaattcttgcagtttctataatatttaattagaaacttaaatatgttatcaaagaaagagacatgattttcatatatatttgtccctttggctgccataaaaaaatgtcaagccttttttattttattcattcgctatatgagttggttttatgtttagaatatttataatttcaatgtaaatttaaaattttattttattgatattataagataaaaaaaatgattattataaaaatatatcaataattaaaaaatattcttttcaaaaaaaaataattaaaaaatattaatattcaaataatatattacaataatatcaattaataaccttttttcagttattattattttttaaaagttttcattcaattattaagttattaaataatatatgcaatttaaatttaaatataataattttttaattaaataaaaataaagattttattcttattttttactttacttttcaaatttatgaatttaattattatatatgtatgtatattgaagatcataacaatttttaaaaatataattttttatatataattttaaaaaattataaataatcgcacgcgaagcgcggcctatttcttattttcatataagactgctcatccgatactatacgtacttttttggtcaaacaacatccaatttgtgctaagtgcgaattctaaattttagatccaattcaatccgcatagcagtttaaatccaatccaattcaatctgcaataatgcggatttgatcgcttattttttttaatattaaaattat

SEQ ID NO: 199992 - DNA, 727 bp, Cannabis indica
atacttcgaatcaagcaagtctctagaatcttttttctgtgcttgtttctgctggaaaaaatttgaccgaacacgtataacaagggcttactgaggcccattccttcttgcactagaggccacctaaattatgaacaaataaggttatgactaccaaaataaataagatcaattccccagtgaaagttagcgccaaaagatttaggtgacgtttggttgaaggtaatgaagtgaaatagaatgaaaggaaatcatttttattccaattttttgtttgtttgcattttaaagtattagaatatcatttcaatggaatacactttctataattttggtggaatgactattctattttgaaatagaaagaaaagattattacaatgtaatatcagaaaaaatttaataattttattatcaatatttttattaaattttattctgttctagtactattttcattcctattcccattttatttttatattttcattcttcctaattaaatgttacttaaatttatatataatatctttttttagtagctctcctcttatattttaagtaatttttggtcaactttactatcaattatatatccattaaaactatatagaatagcttttttaaacggtaaaaaagtagtataataatatataaataatatataaatgctaccaattcattttttagtacaatgtggtattacaatcaattaataagtaagaca

SEQ ID NO: 199993 - DNA, 526 bp, Cannabis indica
gtgagtatttccttaaaaaaaagttgcctcgtataattaatcaaatcagcttttcaaatttagtcacaaaatcattttggagaaaacgtaaaagaagaatgataaaactaaaaaagaaatttaaataatggtaataaattatggatatttatttatttttagaccaaaataacactttttttttcacactatatttttttattttatttttaaattgttagattttttttataatggatttgattttataatgatgttttacaccatgtataaaataaaataaattgattttgccttaaaaaaaataataaataaaaaaataaaggaaatgtattttgaatgaaagcccagcccaaataaaatttccaatgaaaagaaaagaagagaagaaaagatgaagtggagaaaatatcttctttcatttctccaaaaaaaaaaaaagcaactgaaatggcgattctctttaccgcgacaggttttgtccatggctccaaaatcaaccaccacgcattgccactccctaact

SEQ ID NO: 199994 - DNA, 503 bp, Cannabis indica
tccttggtttctgcagtgtcatatgtcgcagacaaatgtctagcaacattatcacgggcatatgggaaaagaacatcactgacaaatgatattggagtagtggttccctcaatatcaagaacaatgcaccgctgcataaaataaaacaatattaagtcaaaccaaagacaaatatcttcactgtagtcctaacttaagtgaatataaaatcaataaattgaagcatatactaaatgcttagaattaaagaaaaatgacaatacagctgtctccaaaacagaaacagaaacgtaagaatgcataaccacaatgataacaaaaaatgttatcttactcgcgatggttctaagtcattgttcgaacctgcagtccctgccttgacagaaatgtttctgttcccaccacttcctttcccgtgatttggggaagaccattctaggcccatctggtgaagtttgattgcagcatcaaacagatagtgatagcattcagcctgaaagcac

SEQ ID NO: 199995 - DNA, 1108 bp, Cannabis indica
acaatcacctagtatatataaaactagtatgcctttattttatgtgttagtaatttgtaaaatttatattagaccagataattattactaaatcataataccaaataatttaaactcacgcagaattcaaaagagacaaccacccaaaaccaaatcaagtaaattgaaaattttaaaaacgaggaagaattcttccagcaagggatcttcttagagctaacccattattttttcttttcaaaatagtagataaatactactttaatttgattaaatctatatataaaaaaatacactccactattatttacatttaaataaatctattaatactttaattttattataaataaataaattacaaattgcgcctcacgacacctgccaaagttcttcatatattgtccaaccaaatattcaatataattataatatttaaattattatctattcgaagattttgagatcaatcaacagcaaactcattaattatttatggaataggtcaaccttaattcaggaccgtccaaaattaattaacatattagtcatattttgatttaaaaataattgataaacaggaccgtccaaaattaataaaaccacatatattccataattaaaactatatatactgtaaaatattcaaaatttttataaaaatttacttatattcttaaataattagtgttagctaagaaaaaaaaaaaactaaaaatcttcttgaatactaaaataaacaagaaatgtatcgaaacaatttaaagggggtgtaagttatttctgataattaattaagtataccttttaacaattatctttatatatatacatattaataaaataatagtctatatatgctatgccatggtgttttgcacgcagtatagcaattctcatatacatatacaataatagtaatataataaattcatagtcaaacaacttgagggtataatacaagtatatataaacatcatgttacgaaatgtgatacgtacacaaaaaaactaaactagctaagaataattatgaactgtaaatagtagtagtaagtgtgggtacaacatgtggttttggctaagtattgtgatatgttcattaaagc

SEQ ID NO: 199996 - DNA, 1384 bp, Cannabis indica
gcacgcagtatagcaattctcatttacttatacaataatattaatataataaaatcatagtcaaacaacttgaggtataatacaagtatatataaacatcatgttacaaaatgtgatacgtacacaaaaaactaactagctaagaataattatgactagtagtagtagtggtacaacatggttggtttggctaagtattgtgatatgttcattaacactaacacaatacaactcctcctgtgttgctgtgtttttgagcatcgattgcggtggctcacagaccataaaaacaacaaactccataacttgggtgccagatgatgactacatccgcaccggcgtctccagagagaccaaattcggaagcttagatggatccgttctcacaacatctttaagatctttcccaacactcgacaagaactgctacaccatcaacctcggcgaagatgatcacgaagatcgacgaattttggtgcgtgcaacatttttctatggagattacgatgggatggactctcctcccacttttgacatctacttcgatggaaatttttgggctacggttaacatgtctctaaattcaaatctgcatgtgggttatgaggtgatgtattttcccaagtctaagatgactaatatatgtcttgttcgaacgtattcagatcagaatcctttcataaatacgcttgcaatccgaagcttagatgcgactatgtacagccgtgttgacccaaagtatgcaatgcttatggtgcagagatatacttattcgggatcaaatactgatgctataaggtacgtaccttatcatttcctatattaattattaacattatcatatgcattatatattttttagatctctctctttattagagcactcacaattataatatcttaataaagttaaaagctaagaaaaaaaatagtttacattaaaattgagcttaatgtaattttaaacccttagttattatatctcattccaaattgtaagaaatttttctctgcatttaacttataaatagtaaagtggtacgtaagacatattatattgttttcttcctctctttcattccattaattatttatttttttttattattcttctttacttattttcattatttttctttattttaattaataaatatataaagataatatttaaatgtatagtataatgtaaatatgtaaggtaaaagtaaaaataaataaatttagtaaattatttaaagaataaaataagaagacttatatatagatgagtggtagtgaagttttttgctagctcactgtaaaggtatttctaatttcagaaaattatatttcaatttttatttgatttgaatttatattatagttataattgttagtctag

SEQ ID NO: 199997 - DNA, 370 bp, Cannabis indica
aaaaaaataaaaaaaataaaaacaacagtatatagggtaattctttttactcattacaatatctttcataatttgtgtgtccaaaaacttatattgaaacacattttttattaacttatttttttataggaatattttttatagttatactattaaatttataaattttttatttttttttggaatagtattaatattcacaataaatttttgatatttcaatttacaatacatgtttaaaaattttcaatttttccaatactataaacttttgagaataagaacgaagagaaaagaaaaagtaattgaaatgaattttaatgattgatgaatttgagcaaaagtgctctataaatacaagttgaacagg

SEQ ID NO: 199998 - DNA, 1218 bp, Cannabis indica
aaaccgatattacaaacgataagggtgataaataccattattacaacaaagaaaaaaaccaaaaaaaaaatgaaaaataacacctaacaagccgtaattattattgagaaattatgtaaaagtaattaaaactaaaaaacattaatagtttgctaattaaatgtataataaaaatatgtagttgtataaaaaacaaatagactagtctatatttatgaaaatgaataagtaaactaaaatttaatacgaattactaaacttacaattggatcggcctaagtattttaggagctttatgcaaaattttaaaattggactcttttaaaaagaaaagattgtgtacattaaaactacaattctattactaacatttttttaagattcatttataaattttcaattataagttttttattatgtgtatataatagggaaaaaaagaagaaaaaataggccttttctttcaaaaaaaataataaaaaataggggccttgtgcaatggcccaagctgcccaatgcttgggtcggccctgagacctaccctataacattgcactacacgactcaactcatattttttcatatatcagacacactaccacccatatttggttcaataggttttttaaaatataagttgagcaacactgtaaacgtcaaaactttcttgagaaaaactaacttcgaattaaatgaagtttctattcttctaaaggagaatccttgactagttttaggctctaatattaattcgttgttatgaaatgggtctcttctcgaggccgaacttaagttaaaacaggctaggctcatatctagagtccatctaacccaaaaactcaaaaatgttttattttttaagaaatacacataattttttttaaaataagatcccacattttttttagtgtcttcaatgaccaatagattcaaatgaggtctaagttaaagattgattgactaaagtattgggaattattttattttctctctttattttcatgtaattaccttttaaatttgtaggatctaattcaaagagaaagttttctaatgattttcatgtaattattaccttttaatgtgatttctaccttagctagttttgcttcattttgttgatgactattattttagcaacaacccatttaattaaagagattattacttcttaattattaaaagttaattattaaaactaacatgtaaattaaagta

SEQ ID NO: 199999 - DNA, 999 bp, Cannabis indica
tcaagaccagcctcagtgcaaacaaaacattgtttacatgtcttattttttattttttttgagatagatttcgtgtcataaatttaattaattggggattaatttccctcatcaaaaagaaataaaataaaaaaatgtgggcatttcagcaacaaatgataaaaagaacattaaacagataaaactttattagtcgatcggtctattcagaatatttccttttgtttattaaagaacaccatgttataaagtacatgtaaaatgagacatagaaatagctagatgaaacaataataaggacaattcccctaataaaaacagacaataacaaatctagagacttgtttttgttcctaatgcaaacctaaattaaagtactaattaaaatttactacaatccataatctcctactacatttttcccccaacaaagcaaatgaataaaatcatacacaatccaaaaccaaacttgtttcctccactcataatagcagcagacttgttcgctttaggtgcattattctctggcgaatggcgcctatttccggcactgggtgaaggattaacagctggacttggagcaggttcatcatgacgagatccattattatacggcggcggcgatggtgacgacggaggacttctaacagttgaaggagccggggaaggtggtggcgatgccggtatcgtgggtgctggcgacggaggatttgttttaggacaatcatggacggtaatggcgatcttctggccgagattgcagtagttggacaaattacaaatgaagtaaagtacaccttgctgtgtcaggggaacgattgctggtccttcgtaatatatcttgattgggctccatgaggtgcagctctcatactcttgtcttgtcacttggatcacgttgtaacgccccgtttcgaaatcaaaagctgtaaagacaaaatatttgaatatacatatataatgtatgtattggaattatgtatcactttatattaaatt

SEQ ID NO: 200000 - DNA, 1239 bp, Cannabis indica
aaacatgcttagttaatttatgaatcacaacattaaagttatgacttacatctgcatcattagtggaagaactggtggaagcttgattcgccttagctttgcctttatctagtttcttcttgtctccatagccaagggaaatccgtggatgaagaaacatttgtctaccaaatggcctagttttctacatttaaaacaagaagcgcgtgacttcttgtttcttggagaattggtaaagtatcgaacagaggaggaaagaggggaattatcagaggatccaagagtgtgttggcgttcttcttgaatgatcatagcaaagactcttgacaaatttggaataggctcattgagcaagatctgagcacaaacggatgcgtatgactcatataaaccagtcaagaattgtagaacttgattctggttggaatagtcaaggaaatgtttcattgcaccacaagtacatgttgtattgggttgaaactctttcaactcatcctatagggatttcaatttggtgaagtaagaaatgacagaatgatcaccttgttgcaatctagtaagatgagtttgcaattgaaagattcgagggccattttcctcattaaatatttcagctagatcttaccccacaagcaagatcaaagtacatgatgctttgagcgatttcagacgaaaccgagttaactatcccactcaatagtgtcaaaagttttttgaaggtcaagcttaatcatgctactagccttgtattccctaactagatcttggcatattataatgtaatgtcctataaatctccttttgatgaatccccctgattttgagatactaaaccaggcaggatttccttgattctagaagacaatatcttagttgcaattttataaacaacattacactaagcaattggtctaaaatccttaatagtattaggatattttgttttaggcactatagttaaaacagtggcatttatttccttgtgtattttacctgtttctaaaaaatatgtaatagcacagtacagatcctcccccaaaaactctcagttatcttgaaaagagaagcttgaaaatccatcagggctaggggctttatttccaagaattccaaataaggcttgcctcacctcctccttagtaaatttctttgttagcaaataagcttgagtttgagataggacatagcctctgttgattattttagttgacactctcctccttccttccatctgagacc

SEQ ID NO: 200001 - DNA, 510 bp, Cannabis indica
aaatagttaattataattaaataattctaaaaaaaagaatgtctactatttaattaattattttaagaaaatagttaattataattaattaaatctaaaaaaggaaagtctacctattagtaacctgctattacaggttaaagaaaaatgtaaccatatggttacaataaaaatgtaaccattgaatagtcacccatatatatatataaagagtattttgaaagaggctatgtggcatcatatatgatcgatcttttctattctttattttctccatttttttatttattaaaattttttattcatttatttaaataaattattaaatcattcgttaatagaataattgagtactaaaaaaaaaattatctaatatacaatcaaaatcacaaaccgacattgtaaattacaattaattaattatatgcattgtaaacaaaatattctaatataatgcgtcataaaatttcccaaaatatcatttatgaaatataaataattatgaaaaac

SEQ ID NO: 200002 - DNA, 837 bp, Cannabis indica
caccttgatctgaactctcttcagataaaatcagaccattgattctcctttagctcctgaagatccaaaagatctgcaaacaaaaccaagaaacaaagaaattgatatgccttagcacagcagaattaatccaaacaaaaacactatcgaagaagcagagttagttagaaaattggtacttcgtgattatattactaactactctactaataacgaacttaacaactcagcaaccaacaagcgacaattgtccaaagtttttatgccaactaaagctgacctgtcaagtgaaaataataacaaactatattaagctaaacgaaccagatgagactagccagcatatagatgaccagaaacacataatttgccacaaaaacaactcggatcttacaagatcaactagcatagttattttgttttcttgcttaggtcgacacttttggaattattatattatatgtatcttttgattcttttgtaagtaaataacgagatcatgactttgtatatattaaaagaagttatttttgagaaattttttaattattacaaagtttatttcaaatatacttttaaaataaaatttctttgattagcgaagttagtatagtaattagaaatcaagtaacatgtctaaaatactaaagtgtgagatgaaaataagtttgatttttttttaacatacatgataataagaaaatattcaaaaatttattgttgaagaatttttttagaaaattttaataaaaaatgatactgcaacacaaacattgctatgactttttttttagtaaaaacgtaattccatacgtattttttaaaggaaaaaagttg

SEQ ID NO: 200003 - DNA, 546 bp, Cannabis indica
attattattataacatccacacatttgatttgatagatgtttaaacatgagtaatactagtgtagacaaggtaccccataccaaaatgccttttcacatttgctcttttctttaccaattgacactttgcttaatgggtatgacatatcccaaaatttcaataattgactaatcaaattgtccatacaactttatttacaccaactttttctttactactcatagtactctttgttttatatagttggacataagtatatgtttggtttaattgatcactagacttttcactaaaatttggtaaccttgtaggagagcacaattttcaacctctaatttttatgaccttaaatattttttcctagtatttatttcaactttttcttgcttccctttttcttcattgattttgtttttgttttttgttattggactcaatgggttgaattgatcactcacttctcactcaaatttgattccttaaatattaaagttaattaggtgtcttgaatagttcaaaaatttccttaaaaaagaaaaaaaaaa

SEQ ID NO: 200004 - DNA, 1336 bp, Cannabis indica
tctaatagggtttcagctaatttgttcatctcatttcggcacattaccatcacattgctacaagtaggaacaagaaaagccgttaatattatataatacaaaatgtgatggaaaatcactctatttgttacacaaaagtatcatttttgccactaaccgtaagcatatttatgttttcggcacttataattttatatgacgctatgcattatagttataatagatattctgtttcattttagaaaattcgaaataatttatggtgtcgaaaaaaaattaaaaaattcaattacatgtgtataaaataaaaaataaaataagtgataatttgaatgtagtttctataggtgacaaaaataaataaatactcttacaataaaggtaaaagtgatgtccctaataggcggaaaagtttaatttttggcggtaataatatctaagttatatttttaaaactacgtaagtacctgactattaaatgtcaaatcattatccacatgtcattttcttattggtatatttaaactattttttttaaaaaaataaaaatttaatgatgaggaccaattaaggattgccacatggctaacacttaatagtcatatacctacaaaagttcagaaatataacttaagtataattatcgcaaaaaattaaacttaaatatttatttacaactgaaagttaaacttaagtatttatatctcaaattactaaaaaaaaaaatcttatttatagggctagcaacttttaatattttcttgtggacaccattaaattattaataataataacagtaataaataaaaaaaagaaatatgttaagggccaaacgctacaagatgatatgctattattggtgtaatttcatatagagttttatatattttaatttaacgtcaatcactacaaaaaatcttacttttagtcacaacaaattttgtgactaaaagtgaaaaaattgtgacaaattataaatcataattcatatgttgtgactaaaaggtccgtggctgaaagtattagtcacaaaaattacaatttgttgtgaccaaatgtatttttagtcacaatacttgttttgactaaaactaaattagtgacaacttgtaactaaatacaatgttagtaatattttgttgactaaaagtcaaatttagtcacaaaaaaaattatgttgtgactaaaaaattgttactaaaagtattttttgtagcgaatttatcttaatactccacatcggtatagtgttactaatgctcttaaaacaaacccacaagcacaataataattgtccccttggattaaagtattattttagggctcgtttggaacg

SEQ ID NO: 200005 - DNA, 698 bp, Cannabis indica
ttttaatgaagcacaagtttttcctaaaaaaaaatgtaactttaggtatttaatttattagaagaaaaaacatgtgatataaaattgtatgaaacttaaacatcatatatttatgccgtaaataccttatatttgataggatttaacaaaaaaaaaatagtgacggaaataatttttgtggaacttaaaaattgtaaaaagtatttgagtttgaatttgttttaagggctgcacatggggtggtgactccataggatctttgatctgataaacgagttttgggacttgaattgaagcctagcctgcaactgcaaaggttgtttaccaatttgtttgtttggttccccaaaccaattctgacccattttattaatttatttggtcttcaatccaattttaattttaagttgtttcatcaaataccagtgatccaaatgagtgacatagtaagtagtaatgaatgaatactgatgataatattgattttgaaactttcaatgggtcaaatatagcggtgttgtatgtcacaacgttaaacttatcaaatatggctcccattattcaccaatcatcaatcttatcaccatcatcatactttccaacacaactgcacctccttatattaagagaaatattaaaagacatcagtagtattatcatatttttatgtgtcaataatatcgctattggttcaacta

SEQ ID NO: 200006 - DNA, 1034 bp, Cannabis indica
ggtggctgagcaccaatgaatatttagagagatacagagaaaaataaaacataaaaacatattggagacgcagaaaagatgcacaaagtacattgctagccttaccattgatcttaataaagaaatataattacaaacatcttttgctaatttacaaattaaatgtttatcgcccttggctggatgttagatagaggtatgaatcgctgagccggccggcagtgcagagaacatgattgaaacactgcaagcacacaacacatcaaattttcgcttttaaaggtgctttatcctgtatacaaattctttctgcgctgagagaacccctgaaaaactaacaaccattttctttttcttgttcttttttttttttttgaaaacactaaacaaccaattcctaaaagtcataatacagcaaatctatttgttcattcagtagatcaatttacaatctcaacctatgatataatactctataaatatatcatgaaatcatttaagacaaacatttacataactaaatgtctaatcactgagtaattagattcaataaggtagaaaaaatattcaagaacttacaataagccgttgttgaactggacagaaacgatacttaagaaccacccatctgccactgcattttacaacgcaagacaaacgaacaaaatagtcaaaaccgagagcatctgttttcctcaaacaatatatagttgcaagtactgttaagcatatcaaaatcatagctttttttgttctatatcaatgtcaagatcttacttaagataacaatataacagagttggaaagtactaaggaccttcagagctaaaacattagacatattagtgcaagaagtaataaaacctttaacactggttcccctttgttactgtttaaagcttgctttgcaagactctgctgctgtgcacgtgcagctcttcctgctgcagatttttcaaactgctcctgcctgaagttatgattttaagaaaattaaaggtaaaaattcgtaaaataaataaaatagaataaca

SEQ ID NO: 200007 - DNA, 1164 bp, Cannabis indica
aagagaggatagagggtgcctttgtgtgttaacattttcattaggtctttaggcatcaaaatatatcagctctaatatttatacttcataaatttttgggcatcagaacatattaggaggagctttgatatttatactttgtacatttttggggtcaacacttcaaatgtacacttagtaaattttagggtccatacttactcccatgggtgagaagagacacactttgctgaaggggaattctcatgggcagggagtgacactcgtccttagaagacagatgaggagcaactcccttgggcgaggagagatgcctgccacatggcccatccatattttgagcagaattcgctgaatattactctgatttggatgaaataagatgttttggaaatctaagaaagaaaactacaacttttatgttttgtattgaattcatttatgactttaaatataggtatttattggacaacatctaatattttgtaggtctatccaaattcgatcccattatatattggatgttagattttaccatatgatctaatctgattaattttagtcatccaattatatattggatgtttgattagatcggttctatccattgaatgtatttcataaatattgattattttaatttggattctcccaatattttagacctagtatttttggatcggattatgtccatataatattttaagtccagtatgtatttccttgcactgaattcatccaattcaagaaaaaaaaaagtaaaattttaatgttaattttcatatatacataaaaattttacgtataacaatataaaatataattactcatccaaattaaatgaaaatattaattagtctgattggatgttggatgtattagatttttagacacccatccaccatccgatgtgatccaattagatattttaaaataacatccaatatggtttgatcacaattggatatctcatatttgatggtgggttgtaaatggattggtcagttctcattggattggatcgatttattcgcacccatgcctaattccaccaataagtcatgcctcataacttgaggtgtcaatcacttcctatttctgccaataagtgtcaaaggcgcttaaaatgacataaattgtgtaattagcctccaaatatcattg

SEQ ID NO: 200008 - DNA, 607 bp, Cannabis indica
tgaccacattacaaatatcaaaagcatacacaaacttaacacacttatgtggcaagtgatcttaactaatcattttcatttaagatagatccctctcactttttaaaattggcttgccacataatcgtgcgtccagtttatatgaaatttatgtgtgcacatatcattactcttacaagtataatattgcacgcctgtttggtatatatattgaactaattacaaaagcaaaccaacaaatcaatgacaatttggtcattcatgaaaaatttaaaaagaaaatgtacccaaccgcactagccaaaaaaccatgtaccacacaaaaggaaaataagctgattccaaataccattcactcatgcaccatcttcacataataatgcaaaattaacttattcctaaaaacatgatgtagttgcttaatttgcaaacattattctgacaccaaccatatctaaagattgaccagcataagttctttccctccttttcttctcaaaataaagtaaataccttttcaggcattcacccacaagagaaaccttcatttaggaagtttctttaacaatgatagcaagtcaagcataaacaacaattgttgaagcta

SEQ ID NO: 200009 - DNA, 508 bp, Cannabis indica
ttattattttttataattttaaactcgtttttaaatatttaactaattatttaaataataaattaaaaattaatgatatggactaatgaactgacatgtgaatactgacctcgtacttaacaactactacttacgaaaattctactaacgaaaaatatttttattgctaaaaatacgactacttatttaataatgaacataaaatttaaatatttataccacaaattactttaaataaaataaattcttcactaaagtacaggcactattactactcaatataaagctaataaggtagatgagatcatgaattggctatgatccagtttttttgtttattgtttttgtcatggtctagttcaactacttcacattcataacgattcgatttcaggaggaatactctactgagtctagctgtagtccttatccaacatcaatggaaaaaggaaagtactgtataattatatcccttaaatctaggactatatatatatatatatatata

SEQ ID NO: 200010 - DNA, 1531 bp, Cannabis indica
gaaggccttttaaaagcttatgaagccgttgcccaagttagagcagaggttgacaagctctcacaacaggttttattaccaccattaatatttatattatattagtcttatctttgttgttaatgatgttaatggtgacaaatttgttaggttatgactcttgagacaatgatgcgtagtggtaccaaacttgcagataaggagtttgttgttttgatagagttgcttatgatgcagctccttaaattagacactattcaggctgatggagaagccagagcccagagacgaattgaggtcagtgatagttaaacgaattaagttttgttaatttgtatgcttaattttgctctgaaaaatcagtgtgtttctaaagagtaaaaagggtatgttaaggaggccaaagttggagaagtacagagattagtttactataaataatgtaatggaagtacaatcaatttagattagatccctcctcactaagacttcgattgtcatttgtatcttattttgaggaaacaaagaaagtaagtagaactgtattagtgggaccaaataatcatttcatatattcatattgtgtggtgtatagatgggaatccaatgaccctctaaccagtacaagacaatttatctgacattggtacaaaacaagttaggaaagttcaaacttcaagaaaccaaagtttttttttttaccatattttatttatttacttttttttttcttttctaatttcttcatatgtataggttcgacgagtacagagttttgtggatacacttgacaatcttaaggcaagaaactcaaatttctcaggtaacaacactaaaaatgcagcagtgtcagtgagtacaaaatgggagacttttgagtcagggcttggaagcctaagtgctccatcaccaccaatgcaatcttctaccaaaataactcagcactgggaaatatttgactaataataaagagtgtgagaactttgtgtaaagttttgaaatgttgcatcttatcaatataattttgtaaaacttgatgagaagctggtttttttgtagatgcagagaaaaaggatgaatcaaaattttaagtatactgtatatagatatgatttatttgttgtatgtgttgtgtttataatatttgatggttgaaacttgacatgatgtatgttcagttttctttggccttcttcccattatttttgttattttattttataaaactcacaatctctaataaatgagtgaacatgagaagacaatagaattgattaactttcaaactattgtgaattgtgatatattgtgaaacccattcagctgcaaaatacgttgtagtcttgatggttaggatattcggctctacatctacgatgatatatgtttatttaacaatgagaaatgtttccaacacataaatagataatagatatcatcatattattgttatcaaaaaaaaaatatatatcatcatattattggtgtaatttaatgttgcgggccacatatattataaaaaaaatcacaa

SEQ ID NO: 200011 - DNA, 572 bp, Cannabis indica
acaataaattgtcctaacttatgatccatatacagtcccaaaaaaaaaatacaataaattaatgtcttaacctataatcctacgtacacaatattatatgttatcagcacagtatatgttcagacttctccttaaaccccaactaagctatggtgaatggtgattgagtgttagaatttaggatatagtgaatgaggtttatatctcaaaactaattggtatgagaaactaattggttatggaaagagtagtccattaatctatttcttttatatattttattattttctcacaatctaaaactctttaaaaaccgaaaaaatatattagagattaaatataaatgcacttttgattgaaggtagagaaagataaatgttttgactttaaaataaaataaaaatataataaatataatgtatatgtaaagaaaatttgaatggtgattatttaataagatgacacgtagacaattattttttgtctgtatatacagacggatttttcaagctccacccaagcaaattccaaaaatatatgtagtgtgcataatatatagataaatgtttggc

SEQ ID NO: 200012 - DNA, 959 bp, Cannabis indica
tcactctcccaactccccaaccttctccaactcttctcaatcatagatggctcttctcaagccagagacatggaagaaaccatcaaagattgtagaattaaacccattgagagtgagatcaagtcttgcgctacctctctggagtccatggttgaatttgttcacagtatccttggttctgaggttaatttcaatcttctatcaaccacccatccaacaatgtctaccgctcttacacaaaactacactatcttagaagttcctaaagaggttttagcccctaaggtggtggtttgtcatcctgtgccttatccttacgcaattttcctttgccaccactttgggacagagactaaggtttttcaagcatcgttaggtggcaagaatggaaataatgtagaagcagttgccatttgccacatggacacttctcactgggatcctactttcatcttatttcaactactcagagtcaagccaggtgtcacctccccaatatgccattttctcccaacaaatcaccttgtttggataccatcaccactagtagcgacaacataaatgtagtttcttagtcagtggtttgaataataattattcgtgtataacttgtaatgcactctactcatcatattatttttacttggtttatgaagtatgtaatgtgaaggcatcacaccattttatgaaagtggtatttaattgttataataaatatatatcattttcactatatcatcctctaaattctaaaattataataataataaaattgaactttttgacataacatacataagcgtaaggggaaataaatcatctaatgatcgaaatcattggaacagaaaagtagacttaagaactctagcaaacttgactaggagttagaaaaagtaattgatccttataagtccaataataaggatcatatttttttttcttatgtaaattaatattaa

SEQ ID NO: 200013 - DNA, 2061 bp, Cannabis indica
cggaatgtatattctcttataggctgtggctaaatctgttagaggaatttgaattatcctgggtaccatcttgtgttgttcctctaatgatagtgagtaagctaatacgaagcaaacgtaaagtaattagggaggacagttgtaatggttactgtttgggcagtttgttagaagaataatagaatttttgaaggaaatgagagttttgtaaaggacttatgggacattttaaagttttggacagcatcatgggtttttaagacaacctcttgaggaattttctttcttaattttatgtagagaatggaaaactgagttgtagtttcgatttatgtgttgcttgttttgtgtttatgctaaaattttgttaccacggttttcctccgccacaagtgaaggtcatcaatatacttgagtggggtcagtctaatataagtggccctttcaaaaaaaaaaaaaaaaagaaaaagaaaaaacctcacatcaacttagtcatttcgaagataaaatttctgtcttaatatcacagaacacgtacaatacctctcagaaccaatatgaatggtacccatatgctgaggacctgcagcaggataacctaacttgcaacacttaaactggggcagtttatccactgctacatttatttttgtagttgcctgttttggccaattacaaccacataatcaatcattaggtaattaaccaaaaaaaaaagtatgtcatatgagaagtgatacatggaattcgtaaatttgttccataattccttaaaagactaacgccaaatacccttaaactattttttttaaaacgtcagataaaaacacaataatgtatccaattttatcccaaaagcaatcctgttatttctcctcccataaagttttttgcagcaaaagcatttgtcaactaaaaagtacagtactgctgggataccctgcttaacaaaatacatattcatttctcacgttattctttcaacaataggaactggtaaagtcaccagactaaggttaatggtggtttcaacagtccattctattgtccgcatcatatgttgtttatgataattttcatgaatagactttacagcatataaggctatgttcatggatggaatgctacataattactaaaacctgctgagtagcaaattaagtgagaggtgatgccagactaagaaggtagtaaattctaaatgaaaagataagcagtctaaagggatcttacagagctgtagtcagagtaactaatagcacggataaaatcatcaggaagaacttgatttggagtcaactcctgttttagaaaataaaaataattaataaaaaaaactgttgctgaaatccatcaaacgcaaaactaagaagttgaaggtactgccatgcccatgttttcattattttatagagcatcacctattcttacacggtgtaaataattataaaaaagaatattcatgttaatatattaccttgaaagttctgtgcggcgttgcatttgataaaacaattgaagagcgcactgatgtaccatcagccaataaaatctaataaaatttgtcatcaagatgcttagttaattttatcaaagcttaaatattgcacttcactgaagcaaccacaagacacttaccccatttgctctgccggagtcatcaactaagagttgtttaacctgaagaacaaatttgaattaaaaaaaaaaaaagctgataagataagagaaaacaccaactaatacaaatatttagatgcttgtggcatcttaccatggcgtaaaaatctggcatgaccaggataggattttcaagctacattttgtttatctactagagagtttttggttgtgtcaggaaacgaattgttggatattgacacaaccaaataaaatagcaggattgcaatcattaagaaaaaaagagcttatttttccctttctcgtaaagaaaaaaaaataagttttactattgagtatgcatcttgctcttcttcacaagtaagaagacaaacaagatggtgagctattctccaaagatatacctccgcattggttatt

SEQ ID NO: 200014 - DNA, 2130 bp, Cannabis indica
ataaacatatcgtttataacataatttacaattagtcactaaattcttaaacaaaaaccctagaacttaaaataaaactaatatttacgtggctcgccacgtaactctcttctagtatatatatatatttatatatattatattaagaatgtgtctttgatacataataaatgctaattttaattatggatattgctattaagttttataggttcctaagagtactactggatcacattttataattaattagttttatttaataataattattaaattaaattaggtgagactgagactagatactagattttattaataaggatataacaccttaatgatacattttagtatttttctttaattacaattttgttatttatcattaatgagattttgatatacatatagttttttttaattataatatatattattaatagagttttattaaaaaattttaattaattaataatcattattaaaatgattattttaatttttttttctaccttgaaatagtttgcttatactaaaaattagttttcttatatcatatatcaaatgaaacaaatactaaaaattgtgtctaatttgatccaaaatatatactatataataatattgtgccatggcacacaaacaggaacggacacactatttaattaaatatttttcatttaattaaataattatactacaaatttgtaaaaaaaaactcccacaaattaaataaacttattaaaaataattataattttaatttaaagtacacataaatatattttataataattaagcctccacaagacgaaattcatgagttactgacatcaaagatcattataaattattattattattattattattattattattataacacacatacataaatgtgcagagaaattttggaaatttattcattagaattggcaaagctagctaaagatataatctcccaaatagaaaaggttctaggaatagaaaacatggaaatttccaagttatttgaagatggaatgcaatcaatcaacatgatcaattaccctccatgcccacaaccagagaaagttataggtgtcaaaccacattctgacactgtggccctcaccattctcctttcaagccaaccaagtagaaggcctccaagttaagaaagatggcaagtgggtacttgtaaagcctcttccaaatgctttcattgtcaatgtaggagatatctaagaggtaataagctaataactctaataaccactattaatgatcattacctcgctatataaaatatcttatttttagtcatagtataaaacttgtcactaattataaatcatcattcatatgttgtatctataaggttcctggctaaaggttaatcacaaaaattataatttcttttgattaaatgtatttttagtcacaatatattgtgactaaaattaaattagtgataacttgtatcaaaatagtatattttagtcacaacaagtagcttttttgttatgactaaaatcacatttagtcacaaaaaaattatgttgtgactaaaacattgtcactaaaggtagcttctttagtagtgttgatgatacagtattttgttatttcaataaataatatgtttggtgtgattaaatttaactgaaaaaaaagaccggtgcatgtgtaatgtctcacattactcatgtatgaaagatttatgaagtaatatatctttcaaaatatattattaaaatctcactttttctattttatctcaaaattttacattatactatacattaactttttttataatatataacgttaaaacttttggtttttttcttcttcttcttcaaattttaatatattttattcattcaaaaatataatgttaatatttgttcatattttgacaaaaaaaaaaatatttacacatattctcgtattaaaagataattaaaatctaaaataataataaaatatatttataacaataaatagtattttataaatatagaacttgaatattaaatttcaaacaaactttaaaataaagaatatgaatttagaatatctgatgtaacatattctaagtaatcaatttttcaaatgttttaaagtcttaatggtatgatattg

SEQ ID NO: 200015 - DNA, 2082 bp, Cannabis indica
agagagtaccaaaactaaggggaaaagactgttaattacgtaacaaaatcttcacagctattgaatattttaagcatcatacgtcaagcaaatccccaggtatcaaaatgcctttgctgatatggtagcaaagttagcaacatatctagagatagaaaaataaggattagtgcccatcacacatctatccattccaaggacagaaacattggaggtaatggtaattgatcattcaacttcctggatggcccaaatcaagatgtacatggaatctggtacacttcaaaatgacagagcaacttcacagatgatttaatattaagccccaaggtatgtgctcatggatggaaggctatatagaagaggattgttaatgccatactcgatatgtatagatggaactgagataagcaatgccatgcacaaaataaatgaaggatttagtggagatcatacatctcgacccagtttgtccaagaagattatttgtcaaggatacttttggcccaccatgaagaaatattgtattaaatatgttcagaaatatgagcaatgtcagtgttatttgaaaaatcctagagatatgccaatatagataaccctaaacagttcgtggccttttgctatttgggaaatcattttagtaggatcacttcaaactgaaaaggaggattcaaaatctctatcgtcgttgttgactacttcaccaagtgggtggaagatgagcctacgaacacggtaacatcaaagaaggacttggattttgtcatcaaaaatattatttgttgttatggtttctacacaaaattgagtttaataacggaaaaatatttgaaagtgatcacctcaataaattttatgtcaagcacaaaattaacaaaagttttttagttgtggctagaccacaagcaattggacaagtgtaagccataaacaagatcctgaacaacgttgaagaagaagcttcaatcttctaaagcacactgtccaaaagagcttctaagggttctctgggcatacagaataatagaaagaacctcaacatgacagactccatattcaatggtttgtgggtgaaaagtagtgatcctagtagaaaccatagtatctgcccacaggagggaaatttatgacgtaactcaaaattatacatgactctaggaatattttgacctaattgaagtactttcagagtaatcagaagttcaactcaagatgtaccaaggaaaagccgctaagcattttaattccaagttgaaaaatcgaaagtttgaacttggtgatttggatatgagaggagtatttctagcctctcgggagccaggagtgggactccttggaaaaatctaggaagggccatatgaaatttaagataaaataggtgatgacacatacctcctaaaaatatttgatggctcacaaattccaagagcatggaactcggaccacctgcgccgatactatctataaactggggttggtcgcttccttttcttttatctgcattttattctatgatttatttcaaggtatgctttagggtaggaaccttttaaataaaaacaaaagaaatttttctgccatattataattttccatgtaagtcttgtaataagtgaccatgactccatactcttaatctcttgggggtagcatatctgatatttctccaaaaattattaacattaagtatgggagtagaaagtactgcctaaaatcggagcctcaaggaacaagaagtaaacaactaccttaccatattttccaagttaataagtttactaagtccattcagattgtccaaaagaagttcaagcttcaatacagattaacctgggttaattaaaactaaaaatccaggcttaaaaataaattaattactaaactttttcttaaaagaaaattatcaatttcaatggtttaggccgttggaattatgtaccatggaattataaaatagttgtgagaagtaaaataatgtctaagcataaagttgaaatcttatggttcgggtctttggaaccacaacctcagggaatgttgaagcaaaactaacttagaaaaattaaatacattcgatgc

SEQ ID NO: 200016 - DNA, 1119 bp, Cannabis indica
aggcataaaaatgtcaatatcttagcaaatacaaaagtatgaattcagggaagttcaggaacattagccaaaccaaattaacatcaagccagattaaagtcaaattcagtctttaaaagtgatatctctaaatgcaggatactagaaaacgaagagattaccgtatgatttcagcatgccattggggcaatataggagcagggcacactataagagtggcaccactagctacaggagagtcagtagcttgtatcagttctgaacaagaaggacatgtatactccccgtctctttcaactattgtggttgcattcttctttctcttgttagcagaagatctctcttgatttccttgtccatcagaaactcctctggattttacatttttacctctacacgaataaccaacgcagtctccatgttgccatgcatcacatacatcacactgtacccatattcctttatatctccaattttcacttacagctccacatacacactccacacgctccttcttcaatcttctaagacacctggtagcttgcaattcagtatcaagtaagaggctgtcttcagatgctccactgcgatgagcaaagatgcaagctagcaattcaacagttttccccaaacccatctcatctacagtagtggccagggaaaaaaatggtcaaggcagttggataactatcaatctattttagtgctgatatttctgagcatttacaacaaaaacctttcagctcaatcattaaaccaaagcgaagattgttgacaaagccaacaattttgaagaatagtaaaacagcaacttaataaaaaaaaaggcatagaagaacttccatagatcagtggtgtcaatttagtcagtattgttattctggcttgtcttgtgtccaaattatttgttgatgttgctatacaatgaatgtcaacacacagcacatgtcgagtggctagcatgacattggagtgatatataaaaggagtatggagttctagaaatatttactaaaattcttcccttatacctacaaaaatccattttgagagtcatactagtaaaactacagcaatatctaatttcttaccaagcggaaatcttaacataatactgca

SEQ ID NO: 200017 - DNA, 1285 bp, Cannabis indica
tccatccaatgctatggaattccaatgtgagaaactcttttttatatgacataagcaatagattggtaaaattgggtaggaactctgaattttcaaaagcattggagggaattgccatatttgatgatttggatagaaagatcttgcttataccaattataacttatagttatgaattttcgaaaacattgaagacaatgggaggaacacttcaaagctacgatcttcgttcgaaaaggcttttgctaacgatagacgagagcaaaaatatttcacaagagcaactcgaaaataatttggcgaattacggttacgatcactttcgcgaatggaattttatagacttgttgcaatctctaggaactttgacttgcatcaatattgaaggaaatattattgaggtatgtatgtcccttaatttaattattaagcaatattgttgttagagcactcacaatagctaatgtaaaataatatttttaaaaaatatatatttaaaaactaaacaaaaaatattttacattttacattattagatgttgtaaactattattttattttaaatcttttatttaaaaatttactattttttactctatgtttatagaataataatacttattgctctaaacatattttattaattattttagtaatttgtaaaatgataaattttaactaaacactacaaattaaaagtaaaaaaattaagactaattataaatcatcattcctattgtgagtaaaaaatttgtagctaaatacaaaaattacaattttgttgtgactaaatgtatttttaatcacaatatttattgtaactaaaactaaattagtagtaacttgtatccatatactatgttttagtcacaagtagtttttttattgtaactaaatgttatatttagtcacaaaaatttatgttctgattaaaaaaattgttgctaaaagtagctatttttatagtaaaagtattctgaagatataaagtatataaattgttagagcactcacaacaattaatgtaaaatagtatttttttaaaaatatatatatttaaataaccaaactaaaaatattttacgttagatgttgtacactgttattttattttaaatcttttatttaaaatttactattttttactctgttagtaataatatttattactctaaacatgttgtattaattattttaatatttttatttcaaaaaaaatattttagtatattgttaaatgataagttttaagtaaacactacagaaaattttacttttagtcaca

SEQ ID NO: 200018 - DNA, 2134 bp, Cannabis indica
ataataataataatttaattttagtttagtttacgtaatttaataacagttaatttaaaaagaaaaaagaagaagaagacagaaaaataacagtagtaacccaaagctagctcgttcgaaccgtacgtatggcttctcgcaatcgtatcattctcaagcaaggaagatcaaacgacactttcaagacgtcgtttagcgagctgaaaccgatcgtccatgttctcagaaaaggttcatctcctcacatgaaactcttctccaggaattaattagccctaaatcacaacggccgtacagtcttcatcgacgagaatcgtttctacgaacaactccatccgactcttacgatgttcaatacacgacgaaaacgagcgagatcggagatctgatcgccacggcgagggatcagatcaagaacgagtgccgtccggttcagaatttactcttctccgattgtaaattagggctaaacgaattgcctagccacgtgtacgaaatcgattgggatgttatcatcgttggtgggcctagaggtgattgggccggatccagcccattttgaacgtagcaaaaaagggggaacgctaaaacacacgtgtgttggttcgctcttggtcattattacgtggttgagaaaatggaagacaaagacaaattaatcatttgaataaaacgtcgtcgttttcttagttgttcttgtattttagctttactaattactacatgtcctttagatttgtttaatacctacctgctgcttcattgtaacacttatttaattaaattttatttttattatttacaatatatatttgtaggtactattgaatgaaatgaaataagaaagaagaaaagaaaagaaaagaaaagaaaaactaatgaaatgtttagtactattgaattgtgtttgtcacttacagatttataaacaatacctccttgattttgtaacatatggttaatacttatatagtataaaccattgattaattgaggtaggtagatgatatgatgatgaaatatgataaaatattaaccaagttctatgagaataagaatattaatattttacttattttaactaaagagtataatgcagttaaagtctctttctacctaattattggtggaacgatgaagcttctacctactattatattcaccattggaccactattgtaccccatcgtactatatacaaaaaactcacaaaaaatgcaattttcactaaactcgattttttaccaaaaaataaacaaaaaaaatataagaagaaatcacatatcgtttgcctattcgttcaatagtggtagtcgcaagtcgtgggtcgttggtcatgcactagagagagccaaagagaggaaaggtcatggtcacacaacaaagagaactagagagagaagggagagtcatgggcggtggtcaccgaaattcgacagtggttttagtggtggagtttggtgagaaccaaaaaaaaggaaagagaaaacgagctggtaggaaaaagagaaagactgagaaaatttaggtagattttttttttcaaataagagacgtaatttggaatatacaataaaatatacctatactaccaatattgagcaacgatttaacttcttatatttaacctacaataataatatgaataaaaaaaatcaaattcccctaattattatattcacatgtttgttgaatggtgcccaaaagcaattttcattcttttgcgccccaagtccaattaatacgacacagaattaactaaaacgacaatatgaatgtttgatcacataatgtcccacttaaaaatctccatgaattgctttataaaaacataaataagaatgccatgaacaatttcttttgtttaatctaatttagtattaagttacaaattatgtttggttacagacatttaaaggcatagaataacaacttagcacaattacataaatagataattacataatgcactatttttcttggtattctataaaaaacaaaaaaaaattaatataaaagtaataaaaaataacaacaaattaataagagtacaatataaaaatacattaaaagatcgtctttttttttaaattaaaattgtaaaaatgtttgaaattctgtacgtacaaccata

SEQ ID NO: 200019 - DNA, 1240 bp, Cannabis indica
aataaattatttatttattatattttacaatttatttttattatattaaattaattttttaatatatatataaatataattggattggatcgacttttaattggattttgaaattgacatccaataaccgatccaatccaattagaatccaacttttagtatccaatccaatccaattgtaattggatatccaaatttttgtaattagattggattggatcggttcggtttaattgaattggattggatgatgcccacccgtaaatataatcatgcatatatatatatattaattatagctgtaaaaaatataaaagcacatacaagttggtagtacttaacaattaattttcactcaagccagtctcttattatttattaattgaattaattttctccattctcttatcttcttcatctactagccaatacttaaatactcaactctgctttcagcaaaaaacagtatacgaacgaacagctttaataaaagttatagagtagaatatatatatctctgtcttagaatgaaaatcgtatatatggaatggaagcaattataaaaatgcgaatattatactaaagcaaaacatcacaactactacttaagagatcgaagtgaccatcgccaatctttttaatcaatatttttagctcagaaagaatcaatccagctggtggatcgatcatcatgaagctggacatgtatatcctgcaactttcatcagataatctttttatttttcttcttaatgtgattctaattccattctctccactctttcctgctaattcagatgccatctgcactactatattaattcttatctatggtcaaactctctttatgcatttgccaagagtaaagggtataatcgtcatttttctacaccgattctcatatacattacatatatatcaaccaaaatattcaaaataatacaaaacaatattcttgaaaggggtatctgatttttttacaaattataattatactcaagaaaattcggttttattatttcttggcatcaataatgtttcatttattacaaaatcaaatatatgtatatatattcttgtagtactatatatgcacattattttaacttttccttagctacaggcttctataatatagctagaatatcgtagcatatcatttcatgttaacctctcgtgcatatataaaatatatgtcagtagtcaactaacattattattcgatatatatatatatata

SEQ ID NO: 200020 - DNA, 537 bp, Cannabis indica
tttataacacaacacgatctatactttttatgacatggggtacaatatggtccatattttgaaaatctaaaaaaatataagttgggtcagtacgacacacatgtatttacagctctactcaaatcctattcctctcagtctgttcttgattattatgtaaaattgcatagttgtaagtattaatttggtaaataatttataattaagttatttatttttatggctttaataataaaaatacttacattgaaaatatttaatatactgtaattttgtgtgacaagaaaaaaaaaatagctctaaatttatgggcccaagttccatcttcttctaattaagctcatgtccgaatactcttgattgctcaattaattttttattttcgagtaacaaaagcaatcaaatttagtgacccatgtccttctcagtagttgggctttctttacatcaagcctaaaggaagcccaatttctcatcacagcttatccaaggttgaattggcccaattgtataaattgagatgcaaaatactttaaa

SEQ ID NO: 200021 - DNA, 1652 bp, Cannabis indica
tatttaattaaaaattataattatctttttttagcataattatttattttattattattattattttgatgataattaataagtaaaatatattaaaaaaattaatttaatatgaaaaccaaaaacaaaaagaaaagaaactaaaagtgaaattaatgtcttgtatttaggcacgacttggtcgaaattgtgttttgctactgcaatgcgaagtttgctattgtaattagtcttgtttttatgaccttattttaagtgtaatcttgtctctatgacatgattttaagtactgttttagttttttttgtgtaacatgatttcttttttgttgtggtttttctttgttctttaatgacttgccatcaaattctcattagtagttgagaataacaagttctccaagaccagggcgagccctgaaacaaagtgggccacaggattttttttttgggcccttatgttagaaaaaatgtggtgtttttcaaaatcagtaaaaaaaaattttgggcccctgggctgggtgggccctaggcataggcctagcccgcttatacccagggccgagcctgtccacgactaaagggttgttaatagtgcaagtatgtaccttgcacaaagtttatggcttaagcgacgagattgaatgaacatgttacaacaatttatactgttgtgtcttctgagtagtgggtgaacggaatataagtgttcttaagattagttttgatcttgcgatttttcatctaattttattttaattttttctcaaatatttaaaaattaggtggttgattatttgactctaggtattaataacaaattagagttctattatagttgcttttagttaattattaataaaatttaaatatataataatacaatttaattatattctttaaatatataaaatttaatctagtttttaatttatttatgaaaaaaataaatttatctaattttattaaataataaaataagtaaataagtttaaatattttaaacaatataactaataaatttgtaaaaaagtataattaattagttggagtaacgcctaattaaattttaaaataaaatttaataattatttaattttgttgatacttttaaatggggataatttcaaaaaattataaaacaatagaaaaaaattacaaaaatatggtatgttgattttttaacatgttataatttgaaatacaatgttggaagtccagaattctaatcccaaattatgtattgtaatgattttagaaatatgagtcccacattaaaaaaaaattaattaatcattttaaatacggtgtccaaaaaattctatttgtgttataaaaactatgcttttaaaagttttttttttttaattttggtaactaaagaaaaagcttaaaatatatatattttcttttttcttacaatttttttttcttccaccaaatttaactttgtcttgaaaaaaaaatggagaaacataatcgtgtaatccttaattcgacaaccccgcccaatatttcttcttcacttttaaaaaaatccaataatattaaaagattgggccttgtataacagagttaacgtttcgtttccaatcaaaaaaaaaaaaaaacaagagttaacggcgtttctacttagaaaaaaaaaaaaaaaga

SEQ ID NO: 200022 - DNA, 722 bp, Cannabis indica
gcttcgatcttcccaataataatatgaagagatcaataaccttattattattattggacgtaattttgttgtggttttaagagaggagttttgacgttataattctcatcatcatcatcaacatcattatgctcttgtggaggtgactcaacatcatattgtttagtattattactattagtactcacttcatcttcatggtttagttgaccccacatcactgtaaagtaccccattccaactatagccgttccaatcacactacaatattatttgaaaatcttttcaattagtacgtacgtatgcaaattaattaatgagaatcttttcaattcataataaatataaaattaataataataccttccgtaacaaagagtagttgcagggaggctagtaccaaaaatagtggcaaaaacaacaccaaagggcttgaacataggcacatatagtggacctttcatcctcatgcaccacagatgaacacaacttcggattatacccataaagcttgcctatataatacgcataattaataagtcaatatgcatgcattcttttatttgcctgaatgtggttggtcaaagtgaaacaagtatatatattataatattattgacttactgttagaacaataaggaggagttcggtgctgttaaggtttagcttccaagcatttaagtctgtttcgaagattagggctgaaagtaaagcagattgga

SEQ ID NO: 200023 - DNA, 726 bp, Cannabis indica
tttatgtcaagatatatatgtattccaaattatgtcatgtatacaatcacctaagctgatacatttgaccattacctaactcatttattgaaagagtttaaacttgactgtgcatgttctttatccctttctttgttcaggttcctcaacgagctgcagctgctgcggctgttgctcgtgcccttgcaggtctgcccccacatcaaagatatagcctatcatcaagctctgaagaactaagctcgatatatggcagcagacctcagagtcaagtggtggcagagctagaagaagacttctatgaagaggtgctgctttcttatattcactatttcatgttggattgattttatttttaatgctgatttggttatttgatgcacatgcacttatcagttgatagccatctttttaaatcaaggagtggtcataagctacaaaatttacttacaatacgagcttatttttcctgtatatatgaatttcagatacactaagtatagcctttactaatttttagaaaccattcccaagtgtccatgcttgttgtttagactattgtgcagtcatagtttaatatcaattttttcttctgtgagtaagttttaattaattttctgagatgcccctttaaatacatacaaacaggaatttgatcccataagccatattttagagaatgttccgtctgaagaaaatgagctagagtactttgagaaacaggta

SEQ ID NO: 200024 - DNA, 908 bp, Cannabis indica
tgatgaccatgagtaaggctcttagtaagacagtctgcgatttgctcactggatggaatgtatctgacctctaactttttctcaatgattttatcacgaacgaagtgtatgtctatctcaatgtgtttggtacgggcatggtacactggattagatgctagtgcactagcacccatattatcgcaccagattatgggtgttgcaggcaagggaaactcgagttcctttagcagactttgaacccaagtcatttctgcagcaacctgggccaaagccctgtactccgactcagtactgatcgtgatacaaccggttgtttccttgaagaccatgaaatcaaggtatcaccaagatacacacatgttcctgccacagatctcctatcatctgggcaacaagcccaatccgcatcagaaaatccagtgagattcagtctgtccgagaacttaatgtgaaggccatggtgaagagttccttaaggtacctgagaatgcgtttggctgcactccaatgtgcagttgttggtgcttttagaaattgactaagcttgttgacagcaaagcttatgtctggccgtgtataggttaggtactgcagcgctccaattatacttctatactcagtcgggttccttaacgaatcaccatcttcaatggacagcacctttcccgtggccatcggagtaggacatgccttgagatttatcatgttcatcttcttcaacagttcttcaatatacttgggttgactgaggtacatcccagtggcatcacgattaacttctatgcccaagaagtagtgcagcttcccaagatccttcaaggcaaattgttgattcagcttgttgatgaaggtctgcataactgccgaattgttccctgttattattatatcatctacatatatta

SEQ ID NO: 200025 - DNA, 2613 bp, Cannabis indica
tttaattttttaaaaatatatatgcaatatctgctaataatagctacaataatataaagaatcttataataaaatttaagttataatttttaaatagaacaattccacttgcaaacttagttattgaaacagcttggttacagttcaagctatctgcaatcatcttccaatgttttttactttcggtgatcattcatgattgccaaaaattgttttcttctttaaataatgttagtctattttttgttgaactatctacaaatcgagtaacacattatttggctagaagctctcgattctattctaatagtagtatttattagaatgcaaaattataattttattatgtaataatcgagtatatatacacaagtgcagtaaccaaaatttgttactccctgaatatataacagactgggtcttctctttataactaactcctaaccaacataactaactatgataaacaatattaatggattctaaaacgtcccctcaagatgagttgtagatattgattttactcatcttagacaaaagaaagttgtgttgagtaagaaatatagtgtttcggtcatgatatctacaatattgtgccgagaagggacatgtatgatcttgattcaatttctagtgacttagtctcgaaccacatggcaatcaatatctatgtgcttggtgcgctcatggaatattgcatttttgaagacatgcaaggcagcttggttgtcgcaatagagagtagatggagttgaatgagagatgtcaaattctaaaagtatattgaagagctagaggagtttgcaggttgtgttagccaaggacctctattcagcttctatagagaattttgacatagtggtttgcttcttggacttccatgatatgagagaattgcctagaaaaatgtaaaaatcagtgatggatctcgccttgtatctggacatgtaccccaatctgcactaataaaggcatggaggtggaaagcattattttgttgaggaacaaaagagtggaagagaaggctttgtccaagtgtttcttttagatattacaagatcctcatagcagccttaatgtggggttgtcgtgggtcactaagaaattgacttagatgattaacaacatatgttatgtcaggccgagttattgttaagtataagagtttgccgatgaggctcctataagaggtgagatctgaaatgggagccccaatatccttactgagagatatattggcatccattgatgttgatataccttttgtgccaaaggagccagatttagttaggatttgtagagtgaaaggcctttgagacacaactacgcctgttttggatctaacaatttccaaactaagaaagaatcgaggatagccaaggtctttaagttagaacttggagtgtaggaaaactttaaatgcagaagcatctgtgttattgttattggcaattattatatcatcgacatacactaagagggccaggaaggcattaggatatgaccttgggaatggtcaatgtgactgttgaaatccaatgctaaggagagtagtacttagattggcaaaccattgcctcgaagactgttttaaaccatataaactcttgtttagtttgcaaattacatttggggcaactccccctcatgcacatatcctttaggaatggacatgtagacttgttcgtttaaatcaccatgtaaaaagttaatttttatgcccatttggtgtagattccaattatttatgttagccagtgcaagaaagagtttaagggtattaaattttgcaactggtgtaaaggtttcaacatagacaatgccatgttgctggtttatatccttttgcaactaaacgaggcttatatctttcaacttcacttttggagttttgtatttaattttgtatacccatttgtttccaataacatggtagccaggtgaaagtgaaactaatgtgtagagtgtcatcaccttggtagagttatgagtgcttccctgagtttgaatatgtgatgtccattgccttgatcgtatttcgagttgagctcctttcacatttcagcagttgtgtccaagaacatgatgttgctcttaatttctagtaaaacagagtggaaaatccatgacattactatctgcttgcaacgaagccagtaattgtggagaggatcatcgaatgtaatgtacgttggaagtttttatcagatagtcatggtgtgaccagagtcaatccaggatgttcatctgagttcaagaaataaggctcggagctgtttttgtgagcaagtcaagtgtgggcgacgacctgttggttgttattgtctccggtaagagcaaaagccggaggaatggttagaggatttgagggagcatctggtatagaagaagagttttttgacaatagagtttgggcggaatttcttaaaccagtaggtcttattctcgccatggatgaaaaataaaggtaatgattttagagagaatcgtaaatgtttgataccatattagaatataaaattatgattttaatatgtaaatgtccgataccctaacttaactaactattttaaagaatggattgtaaaaatatttttgagtataatgcttggg

SEQ ID NO: 200026 - DNA, 1926 bp, Cannabis indica
taaatccctaaaccctagccccctttctttttttggcttgtataggaaagaccatttgtaccaatgtattttgattgcatgttccgaagaaccccactaaaattaggctgccatgttatgaaggctgtttatagtgttcttggggagacataacaattcataatgtaagttagaaattacttgaacaatagatttgattagtatttacttgcttgccaaagagaacatagattttttccagcccctcagcttgttcctaccaacaaaggatggaagatcaaggtacttaccatgattttccaccaccttaatgcctataagatcaaccacttttgcccttgtatcctcaccaactcggcacccaaaacaaacctctgacttgtggaaatttataacttgaccagaagcaatagtatacttgttaagaagcacctgaaaattctcacaagctgctcttgtagcatcaaaaaagattaggctattatccataaaagataagtgagatactacccatttcctcctccctttgaagacagtaatactagtaatctatgaataattctattttggttataaactataaaaatactaattattctattttttaatatttatataaaaaaaaattgcaataaaataaattcacaacatacaaaaatactttattttatatgcgtataaaatataagaatcatgccgctaacacattatttaaactttaattttaaagtgtcatttttttccttaaatttttcaaaatttcacataacatttttgttgattagagattttcagcaaccaattaaataatagaatgagaagagctgtagaagctttaatgcatgtgctttttacgtggttcgggcattaatgagccttagtccacgagtctttgttatttatgagagtattttttatagagaatgttcttggtaaatctctctctctctctctcttctttactcccttcgattccttaattaatcgatcgacccctttttcattttgtctttgggggtatttatagtgatttttgggagaatttctagaaagggattacttgtcttttagtgttagccccttagaggcacaaatttctaacaaatacaaaataggaaatacatgacctatgtcgtaggtatcttagggattaggtgaatataatcttttatcctccttgattgatgtgagttttcataatggagtcgtcactagacttgtcgattgtcgtgtaatcgccgtaaaaagaggctcacaccatctgtcaaatcttcttctggagattctgatacgttttcccccatgcagcattaaatgcgaagtgattgttcgaataatctcttttcctcccggaaatgccttgttacaagtccagcctcccggagagtaaaaacgtgtctcatgctctcctccgggaggcccactccgtgagatgaacttctttgcctatgacttagccaatttttgtgaatggatgttctttgagatctacgtgtcgcatgcagtcgctgtcacgtattttgggaaaaatcggaggcaacaattttaaatagctccaacgactataaaaaaaattattccaatccagaaacaaataaaaatgtatcatcatataattttattacgacataaataaatttaactctcgattgcaaataaatacctaagtttaatttttgacagtaataatacttaaagtataattttaaaatttcacgtgacaattaattgttaagtaaactatcacgtgacaatttttgatttaaaaaaaaatttaaatatatcaataaaaaatgacacgagataatgacttaaaatttaacaactaattatttacaaagttctaaaaaatataacttagccaaaaattaaaattaagtatttattttcaattgaaattaaacataaatatttatatcacaaatt

SEQ ID NO: 200027 - DNA, 523 bp, Cannabis indica
ctaaatcgccttctaacaagttaatatgacaagtcattctctagagtactgaaaaagactcataaacagataacccagaaaaggtaagctgtgtgattttcactttcaaattgcacaacaaatgagatgtatttacacttataattacaatttgagtgtctcaatcattacttttttctaaaatcaattagtgaaaaagggcatttggaaagtagacactaaaaagagggtgactttaaccatcctatttcctttaactttccaccaaaagatgatgagtgatagaaaaagctaaaaataccaattgctaatgaatcttcttcactcacaaaaatgcaatattatactctggcatggtttttaagcaaaccacccccaccagtcatcgagaagaatgaaatccaaaactctaaatttcaaatcggcacaaagtatccaattaaccaactcaaaatacactaaacagtaaaccagaaaaataaatttgataacgaggtaaacaaaaacaacagagtattgaatc

SEQ ID NO: 200028 - DNA, 981 bp, Cannabis indica
attgttttattagttttttttttcatgcaaatacataatattatctcatgtccgtcgaacaatcaccaaattgtacaaacaagctgcactaagagtaagaaggataagaaagagttgatcaatgaaattacatctgcacccttttactaagtttagagagcttccccttcactctagctttcaaagctattttaacactagctttccagacttggaaatgcacgggccaaaaaagagccaaaccaacattgaacttgcttaatcactttcttggtaaaaacacactcaaaaaagaggggagcaccataatcttattgagatgatcacgctttagaagatagttgttgatagcttatcaagagataaaatcacgtttaggaacacttgttccaaacagctttagaatagcaaactttagtagcagagatgaaagaaagataaccttgaatttaccttttctactagcgtcatgaagggcctgaatatcaacggtgtttctaagcttaacaagctttttaaaataccaattatagtccatttttgctataaaatttcagaagtcatgatttttaagtaaatggaattaatcaatttcacggaaaagctatcttttttagtggagtccagcggaagaactagaacatgaaactaagaggggccaatcataaataaatcaaaataagagggggcaaacaattaaattacaaaacattatgtatatacattatataggattattttttagggggtcatgggtgcacatagtttcgtccacagaaaagattattaatcaatacaaaacagaaaagattattaatcaattctatatatttgcttcacggaaacggaaaagattattaatcaatccaaaaaagttcacaaccatttgaggcaaggtaagcacttcatctatttcaaataaccaagggatttgttgggtcccatagacactttttttgaaaaaaaataattacataaaat

SEQ ID NO: 200029 - DNA, 636 bp, Cannabis indica
aaaaaactactcacaaggtcagagtttatctctctagaaatgggaacttcaaatacttaatcttttttttttcataattaccatctcgtaagaaataaaaattcaaacaagacgtaattccattattgtcgtgatacagggagttaactactataaatttattgtgtctatcttataattcttaactactttttcattctcaccaatctagcgagcaggtgtggcttagaagtctagtaaagattttttagtcaacaaaaaagaattcaacaacaatacataatagtacaattcataacagtaaaattacaaaaaagtcaacaaaacgttttaaccttggtacttgcaagactttctgttatgccccttaccaccacgcttgctacaagttcattgaatcacaatcttctcaccattggaaggagttcagtttaacttaattcttccaacctttttcttcttaggtcgccctactggtttctactcatcagacactccaactgtcatgttatttatgtcatcaaaaaattcccaatcattctcatcacaaactggcataattatgccttcttatgtgctcctccaatattctattgtgtaacatggcgagcatcgtgcgtacaggctaatacttca

SEQ ID NO: 200030 - DNA, 1154 bp, Cannabis indica
aaaaaaaaaaacacaatcaaaagagtattgctaccaatgatgcctaaccctttagacagtgccagccacaaatattaaggggggtaatttttttttttttgataaaaattacacttataaaaaatattatttttattataaaaaatattatttttattataaaaaaatataaattttatagagagaagagtagatatatgagaataaatatgaaaatatgcaaagataaaaataaaaaaaaatataaatttatatgggtaaaattataatatgtgatagcaaaactaaaatgaaaaattaattatggggtaaaaatatatatatatatatatgatacatacaaaaaaataaattttaaaaagttgagtggggtcatgctcccccacatgatctcatgttttatgttgctttgcgattggctaacgataatctcttaacattattatgttaaattatataaaatccgatacttagactactggtagcttttagcatttttgcaagcgtaaagaccattagaacttaaaatagtgtaatggaaggatttaataacaactctgtgaatatagcgccggcaaagaactgttagatatttgtatgtcgttaccttgttttgtcagaacgctacgtacggagatggttagtgtggaattataataatgacttggattctttttttttttttttattttaaaatccacctctcatctttattcaagattcaagttagaagccatgcactttcccagaaattacagcatctataattaaccatatatgttataatgttccatggtccaaccattcttgaccaaaatataatttttaaaaactttacactccaattggataaataatataaacatatgatgagtatattggtcaagtcaaaaaatgaagatagcacaccaaactaagcagacccaccaaccatgcaaagttaaaagacacgcacatttgcactagggaaagcatgcagctgatatatagtataaataagagagataattccccatattcgaaatcatcacttctacttactactctaccattcactatataccacaatatatagcccatattggatattatacttcttaagcttatttctaatttcatcgaaacatttcaatatattgccatgtctcctcaac

SEQ ID NO: 200031 - DNA, 1222 bp, Cannabis indica
agtcatatttaaatatattttaactttagggagttctaattataattgtttacaaatacaataaaaggtctaaattaacttttgtaaaaaagatagattctaaattaattattcgtcaaaatacaacatctaaaattgcataaatgttccttactattaagattaaattaccaattgactttctttattgccataagtataaaattaattaatctagttacatatttgaataaaaaaaattaatttttttaaagagttagaccaagttgatcgggtcaacccgccaactcggtcaaaccgaccaatcgaaacctgccaactcgtgacccgctaacccactaacccgccaacccgtgccttattagggttcgggtcggtttcatttttttgaacccgaaacccgcaaatccgaaacccgataaacccgcccgatgttcagccctaaatatgtattttatatttaataaagattagtttatgcaaaataacatgtggacaaattacacgttgctccatggggatgagcttgatgggacgatgaggaatttgatatgttttgaattttttttataaaagagaacacatatatgaagctgacacgtataatagtcatatttatattggagcaatttccataattatatgactcccccaccattcaatgaatcaaatttgtgtggctgttcgatcgggacaaacatcgtttgtccaaaaatcagaaaatgacaccactcgtagttttgtgttacttttgttttatctctcaccgtttgcaataatttttttaattaattttttattttttattaaaaaattaaaaatattttctataaaattgtttttatttttttaattttaattaaaaattaaaattttaaaaaatttaaaaataaaaaaaattatttcacaacagtttttttcataattaatattcttgtcttcgatcttaacttggatcttgagacccgaactctagctccaatcctagactcagaccatcgccccgactccagatctggacctggacctctgacttaaattaaattaaaaatgaaaattataaaacgcacttttattttctacttttaaaattaaaaaaaaactgtagttatagaacatatttttatttttaaaaatacaaattttactttcatttttgttgattaaaaattaaaaaaaaaaagtagttactaaacgcttcctatgttaactgaaaaaaaaa

SEQ ID NO: 200032 - DNA, 585 bp, Cannabis indica
aaagaaagaacaaaggcctaatgaaattgcttctttttttggtgaatgtgcattactgcatattgatgttttcccatatagaccccactgttaaaggtttaatgtgtgcgtcccacaccatgttacctgggcttcaatatattccaacactgatgcccataacatctttcaaccactaatgcctgtcatttttttaggcccatttcagatgtggcccttatcttactcaattaaaagctttaaggtctctcattggtttcttcaatccaagaagaaatatgatcatgaaaacactcaccatttaaatgaatgaatgtaaaaggaaattatgtagctttaattggtagatatgtgagatctactatggttttggtttgtacagtaatttatcaccttcggctctcaggaaccacacatatccctgttttaaaattcaacacctttggccataccagacatgtgaaaatcccaccatttcataattgctttacatatattattattattactaaccccacaacaagatatttgctccttattaagccaccttaccaataaattggtcaagaaagattggtgaaatca

SEQ ID NO: 200033 - DNA, 2434 bp, Cannabis indica
ctctctctctctctctctctctctctctctctctctctctctctctctctctctctctctctctctcttctttcagtcttcctctatcggcttccctgctagcttagtgccgttaatagcaagtctcccacaaccacgagacgaggatcatttctggcttcaacgaccatgaaaactcgaggaagaaccgaatctcccctcccttgagtttttcaactcacgtctctcctcgctcaccaacgaccaggtccggtcctcccagatctgatcgagcaacaagtcgagggctgaaggagggaggaggaagaagaagatgtgggtttgcattttttcgagctacaagcccaaatccgtttttactttttaaattataaccattgttgattttttcggtttgattctttgaagctttgaaatttaagggatttaggaagggaaggaaagggatgttatattaggtgtggtagttgtactgaaattttcaatttttgttatagtggtgtaaggtttaactattgttgaaccatgaaatctttgggtgtctgaagctttaagggtattgaaaaacaagaataagaaggaaagaaaaagaatatgtagatcattaaaaatttaccatgtgtacacataagctatccatcgtgacacttaaaagaggtttttggacggaagtgtaaagagcaaaacataatgtgagtttggtaggttttatcgtcaaaaataaatttatggggtacgtattacaaattataaagtttaggtggttatactgccaatatccttaatataaacaatagtatatttttttttttaagaaaagagttcatatattagaaagaaaagcagttagacctcgcgttcgttacaaaaaaggggttcagggatagagggaatcggaacacaaccgaatctctagcgggtaaacgcccatttagtaacattatggacgacaaaattataaatcctactaatattagagaaaatacaactaacaaaataaggagatgatctaatacaaaatgagacacagttctcaagctcccactgagactcctccctattaagagcgttgataattaccctagaatcactctctattacaataaacttaaaaccttgatgcttcacaacatccaacacattgcagcaagcatctgcttctccacataacgcatcaggaaactccaatttagaagtatgaacccaaatcaccctgccaagatgatcccttgcaacaatagcagtacacatattgtccaaccccactttaacaacacaattcagctttaaacagtcttgagggggagacaatcgccaaactcagaggcgagaagggaataaagaagtatggtgactgcaaaagaagaacgaatactgtcaatacacttaatcacatcaaccagacaattattatgtactttatcgtttagatccgccagatggtgtcaacagttaagaagcataaaggaacacctcatcagcattgatgcccttgtttttaagtctcagatgaatttgaccttgtcccacatccggatgccaatactacatataggaaaaataccccaaggagaggaccgccacaagtgaaaagccacatagaaacagatgttcaatagattcattctctgtcccacaaagggggcaattaacgtcctcaatatgaaatcttttatagatcttagaacaaattgggattgccttggataggatacaccaccacagagtcttcagcctctctgagattttacaattccataactttttccatagcgaaggagtgacctcacaatgaggcgccatatctaaagcttgggcgagataagtcgatttactcgtgaaccgaccattactttccaaagtccaaattcatttatcattgccctggctagacagattgcccctttcaagattgttgaaataatctccttgtcaaaaagattgtttaacttgtggatatttcagccgccattatttaacagaagctcgacaactttgttcaccccattagtggaggagccattagaacgagggaagaaatctttcttatgagcgatccaagggtcctcccaaatattagtatccttcccatccgccaccaacttgcaagctcattttcttaagatagagttggttctaactacatttttctaaaaccacgaatctgaatctttggatgtaaaattaaggaaagactttcctttaaggtatttagcttccaagatccgatagcaaagggattggttgccaatcaagaggttccacccccatttcaccagaaaggcttgattcatttctctagtttttcggaatctaagaccccctaaggacttaaggaagcaaagcttatcccaagcttttaggtgtagaccatgattacccttttcggacccccacaagaaatcacgaactatgacatcaatcttaacaacaa

SEQ ID NO: 200034 - DNA, 1218 bp, Cannabis indica
ccatggaaaataggatttatctagtggcaaccctttctattattcggtacgaccaaagtacttcaggcagttgttcaagccaattacccttagctttttcgtgccttttcttcaaggtgtccttgagagttttattaactacttcgacctagccattatcttgagggcgtgcaacggccgaaaagcttttgatgattccttgctctatgcagaagtctgtaaacagttagcaatcaacttgcttcccactgtctgaaataattttctgaggaagtctgaaccagaatattatatgtttcaccacaaaatctagcactttctttgaagtgattgttgctcgtagaatgattttcacaaaatccctcgtgaacttcagttaacagtcgtgcatcctcttctttagtaacacaccttagcaaaagcacggagaagcctctcatgtacatcactttgtccataattagataccgcactgctttcctttgcattttttgagttttatttctatcacttggtagctaacctgtgttaaggaaggttgtaattggggtcatccagttcagagtattatgtagaatatcgatttcttttatgcaggtaatgctcaggttcttcaagaactggattggtactaggtttgacttatctgtcattgtattgcttgccaaccgtgcaagagcatctgcaattgtatttttctctcttagaatctgcctgatggtgtaccctttgaattttgcgaggaggtcttgtattctacttaggtatgccgttattttttctcccgagccatctactcacctaaaatatgatttacaaccaactgggagtcactataaatttctaagtattcagcatttacttctcacgccaattttaatccaataattagtgcttcattattttggcttcatttacaaagtcccataagtaccatatgtaaattcttcaaaccaagatttattcggtgtcttatgaaatgaacacccagaatccaaattccattcagaatctgaaatctcagaggttatcaacaaggcaatagctaagtcataactgtcactacccactgctgcatctctttcagatcttgaatcacccgtcttatgcctccgcggacacgcccatctgagatgtcctattttcttacagatctagcatttaagattcttctggttatcaaactttgatttaaatcttgattttacttttgaactt

SEQ ID NO: 200035 - DNA, 1369 bp, Cannabis indica
atatctgaataaatattctgccgcctaaatttatatatgaagtaaactaaaaataaaaataaacaatttgattgtgtttaatgaggagaacatattaagtaagctatacctgcatttatttgcggtactagaagtctagaacatggatacaattacaccttatattttgcaccaacattaattatgaaaactatttatactaacaaattagaaacactactattattaataatatttgaaaaatctttattttcttaacattatattataaagtgaaaattaaaaaaaaataaaaaaaaagaattataaagtgaaattgaagcatttttttttatataaaatcattatttttatgaattaaaagggttgaaatttaaaaacagaccccctcctccaccccaagtagaaatatatataatatcttgatatattatgagagggaaaaaatctatttttctgatccacaaaataaatagcacatgtggttctaattctttagtttcccttggtgtaatgaagctagctctagcacttagcactagcactacactattcaaaaatatatagaaaagggtcgagagaatctttgtaatgctctaatatttaagacatttcgtttggtacgtcgtattataccatattgtattgtatagtattatattaaattgtattttacgtagtattttatgtaaaactatacgtggtattaacttttataaacacctaaatatataatattttagtataaattaaaatttaacataatattatataaaaatatgatatacaatcgaattcaatacaatacaatacaatacaatacaatacgacgtaatacgacgttccaaacgagccctatgtatttttcaatcattgtactaactttgctaattaaagaattttacaataaatatataattaagtaaaaattcctaataatcaaaactttactaaaatatccaatatgtccatgagacaaaagacacacattccttttttggccaaaacatttaattttaaatttgaattaaggtaaaaattatttatttattgtcatatatgataaatgcatctttattgtatattgacgttataattcatattttgtaggtttccatattctcggatgtcgcatccaccaatagatcatcgtcaaagggggagcagatagcaacccctcacagatcgccgaataaagggaaatagatatcagctcttcctgctatgtattcggttgaatcacaatcaaatgtcaggatagatcaagtggacaagaatgcaacattcaagccggagatctgggctcaaatacatgtatgtcttcactttttagttgaaagatttatgaggaaagggaagtggagcgttg

SEQ ID NO: 200036 - DNA, 1608 bp, Cannabis indica
ttttcttgttttttttttctttcgcattctcatttgtatgaaaatttagtaatgtatcataacaaaatatgtgtagatgggaattggaggtttgaaattgctaagatttgacaaagaacttatagtgttaccgaccaaaaaaaattgtcaacatgatgttgacttattaattaatcaagtttagtagtttttcgatttacagaaggttgtagatcgaattagagcaaaacattgtatatatagctgcagtgaaaataattacgcatgctaattgatatggatgcttttattattgctatttatatttatatatttcatcatatattatctctgaagttgtttagatgaagagtggtgtaccctatatacttcgctatttacagtatttgctttgtgcatttttagagagttagtcccaaattgctaatatgtggaaataaattgttaccagatgaatgagctacttctcctaaaaagccaattgattttgagatggaaccccattcactatattcccaaattctaacatggtatcaaagcccgttgtgagtccaaagtgccactcgtccaaaaaaatcgtttgtgatccgttgtgagccaaagtgctgcggttcaaaaaaagatactttccctgtctccctttaaccttcatttgggatcttttgaccaatgtgtgccaatttccagtattgagtctttgacctgtttcaaaatctataaatttggcgacgtgtacatccacaaattttccgatatttggccttgtgagattctttcaaatgtcaagttcagtcctgtggtctcttaaaggttgtccgttataccatacactttctaagcccgaacgtgaggaggctgtattagagttagtctcacattgctaatctgtggaaataaattatcacaagatgaataaaatactcctctcattgacaattaattttgagatcaaatctcattcattttattccaaaattacaaacattaatttgtctaataattaatctcccctgaaataactaaataaataaattaatcacgtatgaaatcgatccttacgagatagatagagagatatacacatataatatggacaagattggttttaaagctgctagatcatgattgtatcccatggtaagtaacacatgacccagatccagcctatacaaaggcccaaaggcacagttgatataatattataaattaaacttaaaagcaatatatagctttaattttgtaaattccgatttaattcattccataaaatatgtgacatgtcgtaaaaaaaatacaattagtaaaaaggtaaggagggaccatgtgagacatatacatttatatatgtataaaagagacatacaatttgtttagtgaaaaatgatattatatagggaaacaaaatgaaaaaggtgtggcctcagcatgtgccgtgccggatcattgagctgagctggattagataagttgcttgatctttagacgaatttgaaccacatataatccagctgatcaatggtccgacagggcacatatatatattgatattcacttccatgttagatacataagttgttaatttgtaatgactggattatatacatactt

SEQ ID NO: 200037 - DNA, 961 bp, Cannabis indica
ttctaattctttttaatttctagcttattagaatcgataatataggttagagatagaggtgtttattggaccatattcattgtttttagacctattcaaatttgatccaattatatattgggtgttaaattttatcatccgatccgatctaattaatttcagacatacaattgatctaatatccattagatgttggattgaatcagttttatccattagatgtattttatatatacttattggtttaatttgggcttatccaatattttaggcctagtattttttttagatcggatcggatccatctaatattttaggtccattatgtattggatcggattggatccatccaatctaagaaaaaagaataaaatgttaatgttaattttcttgtatacaaatatattttacgtataacaatataaaatctaattactcatcctattttaatgttaattttactgtgggttaaaacttggttcatgctattttttgtcccaaatttggcacaatttttaatttgagcctaatttggcacacaatttacatcattattggagttaaattttagcaaaatattttaaaaaatatcaatacatcacatttatagctttcgattgaaaatgctcttaaaagactttaatttaagactcccttaaaaaaattataactaagtatattattgtgtgtaaaagatacgtaatttttttttttaaaaaaaaaaatactctctctagactttcggtacttgtgaccgatttcttcccctgctttctagagttttgaggtccgactattgaagcggcttctactcatcatggatcgtgatgaatgggcgactttgaatgattcttttaattgtgatgataatgatgatgatattatcgatggtgatcttgaggcagctttcgttgacgttgaacaagatattgttgattgaaccttagtgagaaagttgatc

SEQ ID NO: 200038 - DNA, 1629 bp, Cannabis indica
taaaaattttaaaaaaatatattgtaatatgtgtttttgaacacagaaattaattaagaggttgtaatagaaagttaacagtaacaatcctttattattttttctattgcaagtatcgtgagttagggagggctgtatggtcccaaaattattttttatttttgaaaaatataaatattttttagaaatttttaaaaatactacgtatttctttcatgagggctaataatatgttttttttttgtcctagagttcacaaattttcaaaaccggctctaccttttactaataattaatgatattttatagtattcatgatggcaaattataaacaaatatattttgagttgacaaataactaaaaactatataaataaatatttacatatttaatttatataaaaatatatatataattctttttttaattgcccccctattatcctatatggctaaattcaatagtgaattatactaacaagtataatatattatgtttctaagtagttaagagtcacttttagcatatttcttcttttgctaacaacatgttcatttgttaatttttgagtttaactacaagaaatttgttttgatgatatgtttaaaggaaaataaatttcattgaatagatgtcttaaccacccaaagataatttcgaaatctacaaactgctaaaatactcttttatcaatgtattaagttcaataatatataatcaacaagcaatttgatgaaaataatcaaaaacagaggaatttgaacttcatcaaatagacaactatggttttatttgaacttgcactcaagatttctaaacaataactcaaataaaattgttcggtttgaccaaactattactactggctgatttcaaatagtttagtccgaaaaattataaaaccactaattgtagattgtatgaacaactttagcaactaaaacattattaaatttttttggttcttttatatacaaattttttagaaatataattttgggtaaaagtgatttaatttacttgtatttttttaatataaataagttttgattttattttttaatttaaataatgtcaaaattaaaactaatcaaagtcccatatacaattataactttatattatttaagctatcaaacataacaaaataactaaattaatttgaattgttatttatttaggttatctacaatgcaggcaagcatccgcgttatgcaagaattatgatgcttatatttttaaaaaaaaaagtcaaatattttgtattgaaaatggtcttatattgctaattgaaaatcattcctagtgtttaatacttaatcaatattataatataattattatttaacaatgccctatattaatgtctaatgttgtggaagttttggtacaataatttttaggatatactatatatcgaggtgactagggaagatttgaagggaggaaaaatatcaatgtaatttaaattataatttttcaaaatttattatgtaattatatcatttatgtgtgttatattcctatatatatcttgagaaacctatatgatactgacatttatgaataaaagtaaaaataaaccaaatagaattgagtgactttttaagctagattagtggtgatca

SEQ ID NO: 200039 - DNA, 1023 bp, Cannabis indica
ttttttttaattagaaccgatttataagttattttttgtctttttttactcattttgttatggaaccggttctgttttaagttatgtatcaatattttggaattgattcccacttgttttctttcttctaattataattggtgtctaagtcatcgtgtgttatttgtttatagtcattttgttgtgtaaccgactctattttaatttatatctttgttgattttttatttagttatttcaaaaaatagtttttgaattagttatttcagattagtttttgatttaattaattcaagaaattagtttttgattaagttatttcgataatcaattatcaacttagttaattcaagtagccggattttgatttatttattggggaattatcccatatactttttttttttcaaacttacggtttgagtttctaaagtggttgcagcgctagttgcaatatgagttttttatacgattttttgttgcaatttaggttgcagcgctagtagcaataggagtttctatgtagaatttcgtaaaaaaacaaaaaaaaaaaaaaaaaactattttgaagtgtaaaaatgaaaaagtcccttatttattttatttaactaatttttgtgtgtaagtgtttattttgcttactttacggaactagttttttgtctcagatttttaactagttaataattataacttgtttctttatattacattttgtgctattgtgcgttatttgttttacttattttgttatagaaccagttcaatttagatttatgcctcagtatttttggaattgattcccacattttttttttgaatttataactggtttgaattattctgtgttatttattttaatcattatgttatataactaattcattttaatttatatctgagtcatctactttctgtgatttttccggcgacatgaacttttttgacgacttttgtgtcgctggtaattttcctaacaatacttattattataaatttaatcaaatttatttattatttttt

SEQ ID NO: 200040 - DNA, 790 bp, Cannabis indica
aaaaaaaataattagaaaatacttagagttgtactttaatcattctctatatgtagagaaggaataaaaatgttttaaaataaagaatatggagcatttgatggaagggttttaatacttttttggtaaaaaatttggaaaaaatttagagaaaataattttttttttttttgaaataaaagtaattcattagatagaaatatccgctattacaatggactgaagagcagaaggaacattgctctcagtaaaaagacgatcataccaaaaacaagcaccgcgagcaacacaatgtgcggctttgttagcagatcgtttagcatgacaaatagaaacatcatttaaagtagaaagaattaattgacactcctgaacaaaccaaagacagatggaagtgcaaccgagctattaatagcttgaacaacagcaatacggtccgtctaaattgacacattggacaggttcttcgtcttcggccaactgagagcctccttgacactcaaaacttcagcaacagccggctgacaaacaccaagatgcaaagaagatcgagcttcaattagcttcccatgacaatctctaatgacgatactcgtaccatattgattcattgcttcataaatcgccccatcagtactgattttcagcatcccagcagcggcttcacccaacaaacactactaccagcaacagtagcctcatacaatagcggttcgaacatgttttcttgagccaacagccaattaaaatgagtagaccttgccacctgaaccacatccgcagcctgaga

SEQ ID NO: 200041 - DNA, 1110 bp, Cannabis indica
gtgttttactggttttttttatttatttttcacttagtttgatggtgcccgattggagcccgatgctaatctgatgggtacttagatctaagatcagggatgattactcgaggggtccgataatctgtctgatggttggtcagctttaaattgggtccgatgttgggtttgatcatttgtctaatattggacctagtgtgtatgaccccattgagaagattttcaaacacctggtaccaatagtaatcgtccagacggaaccagtaatagtaaaggaaccactgattgtagaggtcattcccctgtcgtaagcagctttttgaaccaagccacgtcgtgcagacccgagtagcactctcttagatacttgttcgactccttcgactcttacaatatatccataagacgagtacttcaactcttgggtcgttaccttttcaatcttcttatccttatgttttttcttttctacgaattctttactccaagtttcttttagcatattgaaagaaatctcccccacgagtacttgtagatgaactgaaggtcgtcatccattctaataataaatggcagaacgatggtcttctgctctttcctagtgagaacacccatcacaaacaagaccatccctaacttgtacacattgtcatttttcgtgcaactctcaaagattctgtgcaattgacccaaagagatggatggattcccattgaagtactccactatcaatcggtttgaagtcgtcttctcttcaacttcggactcagtaggtcctgataacaagttcaccttagccactagagcaaactcagctcaactgaattgacatctcttctttgcaatgtaaaagtgaactttgtctgtcttatccgacttgatcttgtgtatgaacaattgatggataagtgcactcgaaaactgtaatggctatctctcaaagaattgcttgaaagggaatttctccttcaccctttccaacaattgtaactctgcaaattttgatttgatcttggagtgatactaaataccacccactaagtgacacgatcagtgtaatatcctgacgctggaagtaaaaggcgtagagctctataagactacaaaaaa

SEQ ID NO: 200042 - DNA, 584 bp, Cannabis indica
aagaattgtctacaagattgatatctgatactcctcctttgaatttaaccttatttctgcacttccaaatctgttcaaaaacacagcccacataagttaaaacctccaatcttgaagtaccagcaagcatcggaactaagatttccagaaaatgagccaaactgttgcaagtgatacgatccaccgagacgggaaagaggcctgcaaaccaaatagccttagcaaaggcacattctttaaacagatgaatcgtgtcttccacatcattcccacaaagataacaaccgaagcttgtgaaagtggcaagtctgtttccagttggcagagcgtcactgatagccttccaaaggattatagataacctgggatggattccaggttcccaaatccacttccatatatcttttcttgagactaaaccgagttctctgatcctccatataagcatccttaacacaaaatcgaccatgctttcttcctttccaaaagactctgtcctgatgggggtagggaattctgttaatggtaagaactcggtcacccaaaacgtctccaaagatttgtctcactaactcctcattcca

SEQ ID NO: 200043 - DNA, 1662 bp, Cannabis indica
tgttagttagggtgttacatgggagctgttagaaaatatccctattgtaaataacgttccaataacaaagactaaaaaaaaccaataactagttactagttatcaaaatttccagcttttctaaataacattccaaagcattctcaaatcattcccactttattttacataatttatatacattgtaaatgctaaaattaaattcccgaaagctatatttgtattataacttttaattttaaaagattaagttgtgtaaccactttttatacacttaaataaataatatgaaaattaaaaaatgaaaataactctacctctcttatattacattttatataaatattaactcacaatcatattatatagtaattattacataaaactcttaataatattatatattctactcataataatatatataatatatcataattttaatcttaaatattatattatttaattaataatataacatgaagatctatgtatagataaattgatgaacacaaaaaatacaaacaagaatacagatccgtatagtgcacttacgaattgaagattctaataattggatgagagagatcttgcagatgtacactggcagtgttcatcaaagataagaaggagaagagagagggtacagcttaatcaaatgcgtcaagggaaactgaagttatttatataatatatatgtatgtatatgtttatgcagatcagcccttgattttgatgtgtatatatgatcgaagctgtactctctctcttctcccgttagtcttgatgattataaaacaaaatcaagaactgcaagttagcacgatctattaatgtatatatatggactatatgtatatatatatataatgtatagattgatgtataataagcttgttatatatagagataaggggaacgactttctgatagaatagtgatcaataatagttcatgtactgatcatgttaagcacacttgggccatatggctgttctaatacgacatataaaggtcaataattcaagcacacaagatggactggtatgcaacttgaaccttctcaagggtccccctccctagcctttcatacatgcatttccattttatcagcttcactatcaaaatatatatatacatatatatatatatttatacatattcaattaatgtgttattcactatctagacacaaaataaaagtactataacaaataccaagaaactgttatatatagtgaaacaatatggatcaactacgggtgtaatttttgtccctatccgttggagcatctatgttcttcgatcatataaaaaatcacaacccaaattatattttgagtaatttatattttgaatatattatgagaatttaatcatcattgtttgatataagtcgcacttgttaaaaatgatttgtcacataatttatgtgtcaagtttttatgtgatttatgtgtgcacatctcattactatatatttaatggaaaaagttttaacggttatatcaaatttacaaccattatgattacatttatttttagttattagatcactattgaataattgtgactaatttaaaaattaaaaataaataaataaataaataaattgtaacgtgataataacctaaaaattatttattttcttataaaatctta

SEQ ID NO: 200044 - DNA, 928 bp, Cannabis indica
ttgctagtttctgtgtgcaacagttcataagtttactcgaggaacatccaaagctgcagttgtcgaaggcgagcatcacacatcgagggaagaacctttacatgcaggcacctccagtacttgaagaaatgaccagatcaaacctaagccaaccgcttttcgaattgatgggtaaaatttccaaggatgttgtccatgcaaccggtacagtaaaaaagaatgacacaaagacctccagtctgagaaaattacgtgttgttttcaaaggagttgatgaagttgcagatatggatacagcaggtggggcataataattttaggtaccagatcagatctaattagaaaccaaaacccataaagacttttaaaggccttatctccctctatgactatggcagtatgaggataaaaaaaatggtggggtaaggttaaattagctttctatatttgtaaagttcagtttcccacagattttctttaattgcatagaactgtaaattgaaccccaagagttcattttgcagttaactttaactggattaaagatacagaattagatcatgaattaccattattggcattttggctgaccctcatattttgttttacttttttttttcattacccttcatttatgccaaagtattctactcccaaatctataaatgcccaaaattaagagtatttttgattcagatgtgatctaaaagcccttgtaaaagttattcttacttcaatgcaaggtgttaatctttaactttgacataattgtattaaagacaggctactgccaagaatccatctttattctttaatcagtgatgagtgttttttgtttatgtttgatcacatacgctcatgtgaggagggctgttcagtgtcacgtgacactcttttggaatatgtattttatttttatatatataaa

SEQ ID NO: 200045 - DNA, 1585 bp, Cannabis indica
aaatttacattgctcacaatgctttttaattgaagatgattaccctgcacttgccactgctacaccaaaccaagtaacatctcaacctcctcctttattttctactctcagttttgctacacctaccttagtgtctcacacaaatgatgtttatgctgaggtaaaccccctggagagcctactagtcatcagtcacaaaatacaacagtcactgcatctacctctcaacatactgctgcaactcctgaacctctcactataccagatactactcatcctacaccaacaccacaaacacaacctccaccaacaatttctgtcacacaatccttaccattatcccctcagtcaccaaacagctctccatctcatcccgaacacataaattcatcctcagctacccatacagctcccctaccctccccactccccattacgaacactcacccaatgcaaacaaggtcaaaaaatcgtgttcacaaacccaaagcctacctctcaaccaaccatcctttaccagatcctttattacccaaagctcccacctctcttaaatagacacttgctgacccaaagtggcataaatcaatggatcatgaaatgcatgccctcactcaaaacaaaacatggacactagttccatatcagccacacatgaccattgttggaaacaaatgggttcacaggatcaaaataaatgcagatggctcccttgacagatttaaatcgagacttgttgcaaagggatactctcaaacacctggtatagactacactgagacattcaatccagttgtcaaaccaacaacagttcgacttcttctcacacttgcagtatccctctaatggccagttcaacaacttgatgtttctaatgcatttcttaatgggacactcaatgaaactgtttacatgcaacaacctcctggctttgtggatcctacaaaacctactcatgatgttttctcctacacaaggccctctatggcctcaaacaccccacgggcatggaacgaaaagcccaaaaaaaaacccggcaaaaaggattttctccttcaaagtctgacaattctctctttgttcatggatctggttctgaactgatctatctattagtttatatcgctgacatactaattacagtacctaatcatgtgctcataaacaagttaataactgatctcaacactgaattttctgtcaaaaatcttggtgctttgcactattttttaggggtcaaagttcacaggaaagcatctggtatgcatctctcttagactaaatatatctttgaactattaacagagcttcacatggatggtgcaaaggttagtccatctccaacaagctttgttcatcaattatctcttatcaatggtgagccattttcagattaaagtctgtatcaaagtacacttggggcacttcaatacttaactttaaaaggcctgacattgtcttcattgtcaacaacttaagtcaattcattcatgctcccaccaccattcactaagaggcatgtaaaagattatttcgatatctcaaaggctctatcaatgaaggacttctcataaagcctgccatt

SEQ ID NO: 200046 - DNA, 2091 bp, Cannabis indica
acaacgtagacgatcaatgaaaaatattagaataaaaaattctttcagatacaaaaacatataagaggtccatcgataacttcttttacgggtgtactgtagaatttttctatattttatatataagtcttaacttagtaatgctatttggtcggagtcttatctgaatttgctaatgtggttgaatactaaacgagattgtaacctgttttacaaggttgatgcagctacatgtgcggcagcaactgtttgtttatttatttttttggtagaaccgaaatatttgtatttttaagtaaaaaatatttatgatttcttaagtgagtaatttaattagggtagggcctaagtaagattagttggagaaaaatctaaagaacatcaacaaatctttaattttatttgtaatatgtaaatgagtattgttggattgtagatgttgatttgtatagcatttactctattttaattaataaaatatatcctttaattaaaaaaaaaattcttttacattattttatgtaaagagagaataataacttaaatagcaatatatataaaaaattatataaagttaacgtggtcatactaaatcttagctactcaagtcaatgatagctagctagcctcctctcttcacatttatttttttaatatcctattttttttttatattttttatttttgctcaattagttgtcataatatataaataaaaaaaaagttcaaactctcacaaacaatccaagattgtgtgtctctctccaatttctaatttcttagaataaaaatgggagaaattgattggtggtgcacatggattattattattattattccttttacaatcacaattatattaatttttcttattaatatttatttacaaaaagaaaattcaaaattggccaaaactaaacacaataaattgccaccaggaagaagaggttggcctttgattggtgatagtttcaattggtataattctgttgcaagttcacaccctcctacttttgtagaacaacaagtcaaaaggtataaaaataaattcttcaattttttatttaattaaaataattttatgatgatttaattatttttttgtgttttgtgtttaggtttgggaaaatattttcgtgtagtttgtttggaaaatgggctgtggtgtcagctgacccgagttttaaccgatttgttatgcaaaacgaagggaagctgttcaaatcgagttaccctaaatcgtttcgggatttggttgggaaaaatggggtgataacggttcaaggagagcaacaaaggaaacttcatggaattgcttctaatatgatgagacttgagaagcttaagtttcattttttggaagatattcaaagggttatggctaaaactcttaatagttttcaacataatcaactcattcttcttcaagatgtttgcagaaaggtaatgcaaaaaatttcttttaaatttttcaaactatatatattttcgattaatttgtaaattagttcaaaataatcgtttgagttcgattttgctcaaaatatttttgtctaaagactttatttacgaatacattactttttttgtgaatattttttccattgtaaattaatttaaaataattgcttgagttcaattttactaaaactatttttgtctaaaaaccttatttacgaatatattactcttttgaggttatgttacatttttttttaaaagaaaaattaataaaaaatcaaaataattgcttgaatttaattttgcttgtaatatatttttccaaactttataaattataaattaatttaaaatagttgcatgtgtttaattttgctcaaaatatttttgcctaaagactttatacacgagtctatgaaaatgtgtagatatacccgatgattattaaactttacgagtttattcatgagataatatttagtaaaaaatacatagtttaaaatagtattaaatattttttttaaggcttcactaaacatttttttttcctcttatgattaattaaaatttattatggagaaattatttatttatgtaatgtatatgatttgatttaggtggctattaatc

SEQ ID NO: 200047 - DNA, 1518 bp, Cannabis indica
gggtacacctgttatgttgatgatacagttccaaataatcataagtggattgtaccaaaagagcaggggccgtgtgtttcagatgatgaagatattcatttcttccatgccaaagcttccaaagcaaacacaaaaaaatttggtagtcccgatccgtgaatgatgaagcagccataaacattatttccctgcaagttagttccatatattttaaaataaaagatgaaaagtgggttagtttccataccttctggacagttgggcacctgaaaatggcatgctctagggactcagtgtgataatgacatcgacagcaatgtggtgaagaaatgatcttccttttgtgcatgttgcagctagtgggaaggatatcatagaaggctctccagatgaaatgtttgatttttggaggaaggttctgtgtccacaactttttccaccagttttggttgataagtgcatcagaaggtgagtgatcatctttatttaacaaggcatgagctttgtggtagccagaattgacagagtagttaccatgtgatgtgtaaggccagtagtaggtatccgagtactgggagggtgagataggaatagactcaatggcttgactaatgtcattggggaaaatggttctgatacggttggtatcccattggtgggacgaggtcatgagatcagatacagtggagcaaccatctgagaggtgtttgagataagagatctttccataaccagggatccaagcatcactaaatatcgaagtatttgtaccattacctattgactttctgagccctgagataagtagctcctttccccaggagatactgacccaaacaaaagaaggtctgcgacctttgctagcctcaagaaaagagttttgcgggaaataacgagcttttagaagagtggctacaagagaatgaggtgcctgaagaatgcgccaagcttgcttagccaacatcgcttgattaaaagccttcattgaacggaatccaagtccaccatggaacttagagcgactgagaaaggaccattttttccaatgaatcttcctgttacattccgatcctccccaccaaaatctagccatcatggattcaagctttgaatggaaggaaacaggtagtttaaaactggacatagcataagaaggaattgcctgcaccacagatttcaaaagaacttctttcccacctctcgagaagtgctttgagttccatttgttcaaatgtgaccatgcacgatctgtaaggtagttaaagatctcttttttagttctcccaaaggtttggggaagccccaggtatttctcgaaagaattccgaaccggaatacccaagatggaggtgatatggtttttggtgttctcatccgtattaggcgaaaagaaagagatgatttattgtaatttaccatctgacccgaagcagaactgtaatcctgcaaaacattcttaatggtgatcgcagagttagacgaagcaggactgaatagcaggctgtcatccgcaaagaa

SEQ ID NO: 200048 - DNA, 844 bp, Cannabis indica
tggtatacagattattaggtttgaaaagggaatttattttgaattaatttcactacaatgagaagatcttagagaaatataattactataactttcgaaatgcttgtacaccatatgatccaagtgtaaaattttataagaacactagtgatggtgtaagataatctaaatatgtgagcatcgttgatagtctttggtgtgccactgattgtgctagacccgacatcaactatatcgtgggattattatccaggtttactagtagacctagtgtagaatattggcatgctattgaaaaggtcatgagatacctcaaaagaaacctaaaccttggattacattatcagaagtttccagctgtcctgaagggtacaatgatgctgatttgaacactttattagatgactctatggcaaccagtgactatatttttagcatatttggtggagttatttcatggaagtctaagaaactgactattttggcttaatctacaatggaatatgaaatgatcacacttgaatgaattttgcaaattgggatctgatcttagcagtttggaggttaaaatcaaagaggaagacaaagtgatttatttgtactactacaaaaatgagtatttacgatggttctgaaaacacttttctagagagccatgacttcaaaaattaagcaagtgttcaaaaccgtcgggaaaaatagggtattcctgacagttttaaattgtccagaggtataggggacaatttttgaatgttccttaaaaaaatttgtgtaattttaaattgggattgctaacgattttaaactttcggtaatttccatgcttaaacttaacgcgttt

SEQ ID NO: 200049 - DNA, 1371 bp, Cannabis indica
ctaccttaagttcctcaagtaagagcatgcacataaatacaccaaatccaagctttttttcttctgaaattttaacttgaaatcacaaaattaaaagggagagagagagaggcggctgaggtttgttagactcaagaaaaatgtaaattttaaaatgaggaaacctgtattttgtggaatataacccttattggccgaaagaccaaaactacccccaaggcacacatatattaccttatacacataaacaaagccaaccatgacattccactcacacacatatatcacatacttcacatgaatcatatatttctcatttaacacataaattatatagttaaaccccgaaaatatattttaggccccgaacccggttcgatccaaaataccaagtggtgactatgtagaaagacacatgtagaaagacagaataaacatactatataataatatagttcataagcacaatataccataacatcacaaatttttaccctgctcgagttaaaacttaccaaaatgcccctgacacaccaatggagtcttaaaatgcaataaactagaataatttcacatattaaattatataataatataattcctcattaatacataatcaatctagttaggattgctaatttggttaataaacctgagtgtattacaaagcatggatgatgggcgatactcaagtgaagctcagttcctatggctcgttgcaaggtcttcccaaacaatgatgtaaattgaggttctgtatgtgaaataatgcttgaagccactctaggtagtaagactatattgtccgcataaagtcaagctagcctagtaagcttgtaaccgtttctgattggaataaaatgagcagacttagtcaaacagtcaacaatcacccaaatgacgtcatgcttcataggtgtcaatggcaatctagtaacaaagtccattatgatattggcccacttcaactctagtgtaggcaaaggttgaagtaaacttgaaggtcgttgatgttgagcaataacctattgacaaactgcattcctagcaacaaatctagctatatcctgcttcatacctttccaccagttttacctcttagagtcctagtgcatcagtggactactatgatctacaataaagttagaactactggcctcgatcgtagtagagtttcaaagatcacaggtatttgaatctcgggctaagttttcctttctttccaaagcctttaatacctttaataggagatatttgatgaaataccatgtctcaaacttggaaatcaacatcccattgttttggatcagcataacttttctgtctactctgagtaacgagcattcgtactctaatcttatcaactgcctc

SEQ ID NO: 200050 - DNA, 1314 bp, Cannabis indica
gtaattaggagtatgaatgtctatatatatgattatttattatatatttacaaaatatgtcatttaaaatacgatatttttttaggggctttttcatttttacactttaaagttagtttttttttttttttttgtatttttacagaattttacatagaaacctctattgcaactagcggagcaacctaaatcgcaataaaaaatcgtataacaactcacatagaaattaccggagaaactacattagaaatccaaaccgttaatttttttttattaaaatataaacatatggaagaaaaacacataaaatgtgtcaaaaaatttaagaaaaaatctatgacatggtttagtttcttgcgtggcttggtcagggtctgtagttttgctactacgattgagttttgctattgcgattagtcttgtcttcgtgatatggttttgagtgtcttttgtttaagttattacgattagtcttgtctctgtaatatgattttgttctgttttgtttcgttgttagttcgccgtctttgtttttcgatgactcgctatcaaattattgttagtggttgagaataatacgtctatgcgactgaaggagttcatagtagtgcaattatatactttgcacaatagttgagtgcttaagctaatgggttgaattgacttgctgcaacagttttacagatgtatcttctaatcggtggagaaaaataaatataggcgctcttaagattagttgtgatgctgcaatcttttttatttaattttatttaattttcttttgtcaaaggatctcagaatcagactacaaattagttgacttatttttctaattctaatcttgatcgtttttataataggtgagatatcttaaatgagctacatgccattattttaggtaattgcttatcaataaaattacataaattctttttttttaaaagaaaaaaaataaataaaactacatctactgtgtcaaaaatactaaagaattgcacgaaacaccaaaaaatatatatatttttccgtacagtgcactaataatacagcgtactaataatatagtcttggtactcacaacaaatcaatgaatcattgtcacattcttataaaatataagccatttgaaataaaatttgaaataaaataaaaaaatctcagcatggctaaattacataattagcccgacaattctgcatcaaggatggccatgaagcaagggcacaacgcacaacatagcagccacaacttgatgggcatggcccatggggcttgttgcgctgctgatcgttgaatccagcggtggggctccac

SEQ ID NO: 200051 - DNA, 1236 bp, Cannabis indica
accataaatctctcactaaaagataaaaataaaccttggcaaaaagaccaatttgcccttcacttagccaaaaagtcataaaaccaactaggggtattttggtcaaatctaaaatctcgactaatcccaacattctcaatgtctaactatattgccccgctatactaaaaatagtaagatgtgattctaatagcaaaatgtcgcgttccaatgttactgggcacaaaatatgcaaaaatatgaaattccatatatgacatataaaatgcattctgaattcaaataaatctccgtaaaatgataattcataactaatatgaaagtttcataattaaaacctatttatctagtaatttccaaattaaagctaaggggtgtttacataggattaatcctaaatatcactttcacataatcacataatttgcatttcaattacaaataagcatatagagcctgaaacgagctttcaaacgatatcaagaacgtccaaatagagtccctagtcaaaagttatggcaaaaataaaaaatcttatttctctgggaaatagggtcacacgcgacgagcaaggctatggcctcgacggcaacgaccaggttgcccacgcctcggtgagcccagtcatggccgcggtgagggccctagaaacccccaaaattgccatttttccaaacttcaaatttttatctaaaattcataccaaacctaactaaatcatgcacaacctcaaatttaataccacatcatctcaacttaactttgggaccaaaaagagaaccccaacaagaaaaaaataagaaatttgaacccaacactaagcatgaatcacaaatcacactattatataaaattcataagcttgaattcaaaagttttcaaacctataaagaaaatccagaaactcaaagcccaacccagaatttaaacaataagaatcaatcctaaaatcacacaacacaatctaaatgcaactatataatcccaatagctaaaatatacaaataattaccaatatatgacctcaaattaccaacatgcatcaaaactcacaagaacatcaagaacaccttcaagcattatcaacaagtatttaaattaagaaattaatctagaactaatttaaaataactacctcaaatcctcaaaactcccaagtaatcaagatcacaccaaaaaatcctagcttttcttcaaaattggatgaaattggaagagatgagagagagagagaga

SEQ ID NO: 200052 - DNA, 974 bp, Cannabis indica
aaaaaaaaaactagaaaaacaatctcgacaactataaataaatcacaaaacaactaaaaaataattatttttgttacttaaaatgtatttttgtaaatacaaaaattcaatgagtattaagtaaaattgagtattttataaatttttgcacccattttctttcttgcactattgaagttaccataagtatatacgtagaaaaatagagatatgaaataaatatatatattgaaaattttgggtttatataaatactaatactactacattcattgtccttaataattttctcccaacccaaacagaaacacaattgttatgaagaaatgtatgacaatgagaccaaaatatctcctttgggtctttgctccgattaccaaacatgagtatgacactagagttatgcatttctctacagactgtattaagaatgccccaaaaatcacattgcccagaaaatattatagcctcaactctgatgttgcacggtcaaattggttgattactaagctaagtcgaaatgggaaaatttacgatgcacgtaaggtgtttgatgaaatgcctgagagggatgttataacttggaccacagtgattactgggtatgtcaaatgtgggatgattgatgaggctaggaagttgtttgataggattgatgctaagaaagatgtcatcacttggacagttatgatttgtggttataaaaagatgaaaatggttaaggaagcagaaagattgtttcttgagatgcctgagaagaatgttatatcttgtaatactatgattgaagggtattcaagaaatggtcaggtggatttagctttagatttgtttgagaagatggaggtaaagaatgttgtttcttggaatacgattatcactggtttggcccgagtagataggattgaggatgctttaaggatattcaattcgatgcccgaaaaagatgttatatcatggacaacaatggttgc

SEQ ID NO: 200053 - DNA, 1154 bp, Cannabis indica
ttttttctatgcctaatcatactactgtcttccagaatcgtctcggtttctatatagtgccaaaaaaaataccaaatttgtatttacaatattatatcacatacatatacattgatggaatttaaaactatcaactggtcacctttttacataataacaatatatcataattaatatattataaagtttttaaaattaataactaaattatacatatacggaattatataagaaagttatgtaacaatactaaacttgatgcttaagtttatagagaggaaagcattacttaaatgttgttgtgggacatggtactttttgtaagcttttatattttcaataacagtacttgttaattttaaagcctattattttattgttattgttattttaattcaatcaactacaatctgctacacttttattacttgttcagttcccataaaattaatttatgacaataataatatctgcctttttcaatactaaaataatacacataaacacaaatttatgatatttatataaaaaaaattggggcacgtaactttttttaaaaaatactacaagaaatttctgtgaaatttgacatggtaatgcggtaaaatatatcacaattaacagagaaaattagtaagaacatgtaaacataaaaatcataaaagtaatttgtagtataaatacttaagtttaattttcggttgtaaataaatatttaagtttaatttttttatagtcaatacttaaattatatttttgtaattctgtaagtattcgattgttaaatgttaagtaaattaatacgtgacaatccttgattggtttaagtcatgaattttaattttttttaaaaaaaaaacttaatttaaatataataagaaataacatgtgaataattacttaatatttaatggttaagtaattatagattaattataaaaatataatttatatattattattatcaaaattaacttaagtatttataatataaattacccaaaataataataataataataataaagaaattaagttagtaagagtaaatttccatataataataataataatattttaaaattatagatgctattgtttggtttcaattggcaacatgccttatttgactaaaacgaatcaaatttcaaatt

SEQ ID NO: 200054 - DNA, 929 bp, Cannabis indica
tatgtatttagcatttctctttaaatatatcaaaataattaaagaaatattaaaaaatactaatagtgtttagcatttcatcagtgttatatcgctattagtataattaagtatcaagatttatatgatttaatataaggttaattaactaaactttgacatataccaaattatgcctccgaattttaattactgttaaaaatattccctaaactattgacattgttagatttaagaacttttgttcaatttcattcaattttactacttcgttggttgttatgtactaaattatgttccccagcctttaatgtctatcaaatcatgtccctcgaactttgagatgtatcaaattatgactcttgaaatgttagactttttttattaaaattaaacaaaaattcttaaatccaacaatctcaatagtttaagaaatttttttaatgttcttaaaattttaagaacatgagttgatccatgtcaaagttcaaaaagtaaaaatcctaattaacctaaatacaataaattttaagaattatgacttcattaaaaaaaacttgtataatgtaatatactaaataccactaatattcaataaaaagactcaaatcattaacataagcatttatttatgtcattaaattttgtttaatgactcttatcttaccctctttctcattgagagagatattctacgttctatttaaaaaaaagttgactaatagtggccattataaaaaggtgaaagtagccaattttttattttttaattttattttaaaaataatattaagccaaatgaaaaatagacagaaaagaacataccaaacttattagccaacagatttttttcatttctcaacgtataattattaattacatatataaattacaaactcaatgaaatcctaacttttattaattaaaaa

SEQ ID NO: 200055 - DNA, 1722 bp, Cannabis indica
gtatcatatacaacaagtacatccaagtgaaggctccataaatgcagaccttgagttttcgaattcaagtacagaagctccaacaaatgagaatacctttgtcaacattggccctacaacgtgattactaaggcaaaggctggcattttcaagcacaaaacttatctcagacatgctaagtggcagccaatacttgaaccaaggaatgtgattgaagctcttcagtagaagggatggaatagagccatgtatgatgaggtcatagctcttagaagaacaaaacttggattttgattccaagatcaaaagccaacaatcaaatttgatgtaaatgggtgcacaaaatcataagaaatgcagatggatccttccaaattaaggtataaatcaaggttagtagccaagggctttcatgagagaggaagattagattatggagaaacttttagtccagttgtcaaagcctctacagtcagaattgtcttgagtattgttgcctcaaaaaacttggatattagaaaacttgacataaacaatgccttcttgaatgggcatcttgaagaagatgtatatacatgtgtcaaccagaaggctttgaagaccccacaaagcctgatcatgtgtgcaagttactcaagtccttatatggactcaaataggctctaagagcctggtttgacaaattaaaaggcactctgctaaaatgaaattttagaatctctaaagctgatacacccttgttcttctacatcagcaatgacatcgtcatcattattttgatctatggtgatgacattatagtcacaggaacaacaatgaaaatctggacaggtttattggaaaacttaaaaggttttttactttcaaagatcttgggcactttatttctttcttggtatattgatgttgctagaactaaaactggtctttatctcactcaaactaaatacattgaagatctgtcggagaagaacaatttacagcatctgaaaccatgtcccactcctatagctactggtaaatctttgtctctctctgatggcaagctaatggaaaatccaaccacctacaaaagtcttattggagctttacagtatttgaatcacaccagacctgacatcagcttgaagttaactctctaagtcagtctcttaaagctccaacaacttcacattggagtgcagctaaaagaatcttaagatacctcaaaggtaccagcactcaaggcccacatatcagctgcagtggcagattcaatcttactggctactctgatgcatattaggccaacaatgttgatgacagaagatctgttggtggatactgtgtctatcttggagagtcacttatgtcctggtcctctaagaaacaagcagttgtatcaagatacagcacaaagtctaaatacagagcacttgctcatgttagtgttgaaataacctagattgagtccttgctaaaagaaatcaagtttcctcttcctgtttttccaagcacctgttgtgataatatgagtgcaagtgctttggcctcaaatccagtttatcatgctcgcactaagcacatagaaattgacatacttttttgagagacaaggttttgaacaagacattggaagtcagatctatctcttcagcaaatcaaatagcagattgcatgacaaagtctctctctctctctcattcaaggttcttgtttaaggggtggtgttaagaaagttaa

SEQ ID NO: 200056 - DNA, 782 bp, Cannabis indica
tggatgatcaccaattttgagtttgtccctgaaatcagagaacctttgactcgaaattgctttggtgaagccatatgcaatttgatcaaaaaaaaaacatgatacattggttacaaaacttttcctaccatgtcatctttcattctttctttcttttctttttcctttttacatttttttatacacaagcatgacatttacaataaaagagaaattttaaggaggtaaatattgctgaagacagtgtttaacttttgaaaagttacaggctttgaaaatgcatttgctgtcatctgcatcttcatcttttgagttagttggtttgatttcagttgggaaaaaacatatgcatgaatataagggatatattgtttctctcacaatatatataattaatagagaactcttgaactgaaggaaagggctgttgatttgggagagttggagttggagttgtatccaatccattgttgcccctcttagttgatagctctgtgatacttttcaatatgcatgaagatcttattttatttatattccgaactttagtttgagttttagtaaatccattactcatgtgtttaaatgtatgaaaaatgttctgtttatcagctattctatttggagcatcaattccaattttgtaccaggtaagcagactccacttttttcttgttcttcatttgtcttacaataactttggttgtagatgtaaattcttattctgctagagttctgttctctcatgtcctttgattgacacatctgtgaattacattagc

SEQ ID NO: 200057 - DNA, 932 bp, Cannabis indica
cggagcaaggttcaaatcccagcggaggtaacgattaattccttactgcaaccagatggaaattggaaagaaaatgaagttagaagctggttccacaatgatgatataccctgggtgcttggcattaaacctgctataaatcggtcggattggattacatggagtccatcccctaatggtgtctactcggttgcaagtggatacaaacttcgcttccaaaatccgaatgtagcagaatgttctaacaaatcacaaattaaatcttggtggaaattcatttggggttctcatctcactccgaaaataaagaatttcatatggcgggtgtttaatcattggattcccacaaaattggagcttgcaaagcaaggtatggttattgatactcactgtgaactgtgcactttccagaatgaagacatatgtcatgctctatggcactgcccgaaggtccaaaacatctggaagttgtttggtttccccaaactcataccactgaatctcacaaaagctgctaatgtgctttggtggctgcatgaacaccttcctaatgaggaatttttcaagttcatgggattgacttggttggtttggcaaagaaggaataactttgtcttccaacacaaaattctagatgaaaagatttggacatcttgggctattgatctcatctctactcacttggagccgcaccaaaaaaccagtaaaaatcctgctatgaaactaaattctgcttggattcctcctcaacagaactacttcctcatcaatacagatgcatctttaattgctggacaacaaggttgtggtcttagtgctgtgataagagacccgaaaggtggtttagtggttgctgcaacttccttcatacctggctgcctatcgattctgcttgctgaagctaatgctgtccacttaggcattcagctagc

SEQ ID NO: 200058 - DNA, 1079 bp, Cannabis indica
ttgggagttcaagcctccacaaaatgatttatcttcaggaacacatgctaaacaaccccaaatagatagtttattaaatttctaagttcaataaaaaataataacctttgaaaatactttccaatttttatccagaaggtcaactgtgaagacaattagaatatttttaattaccatcttatattttatcattatattcccatataagaagattcaatatccttttcaagatcatctgcatgtctaaaaataatcaaaagacacattttgaaccaaagattcaaatcagtatacgaaaaattaaatatacctgtggattggcataaaaatcatgaaaagaatccgactgtttctcagctttggtggattcaaaacgataaaaagcgaaatgggttggcgtattattaacaatatttacagctgggattttcagatttggagcagacgcatctgaaaatggatgtctttgatggaaagaataagacgaagaactccggttgatcttggccaaaaaacctagctttgaaacgaaatggttgacaacatttagtgattttctagtccaaacagccatgtaagaagaacaaaacgaccacaaatctcagaatgaaaagaaaagaagggggatttaggatgggtttgaagagaaagagaggtgggtgagaaagtagggaagtagtgcagtggtagttggagtaaatcctatcttaaatgcgaaacaagaagaagaaaaaatggcgtgaaaggagagaagagtagactgaagagaatgggatttgccattttgggttattatgtgtatttagattggttttgttgtctgtatggaatggattagagcgccaaatcagaattgcatttacacgtgtaacagatttgacttcaacaacgtacccctcaaacgttgaattcggccctatccgagaatatatgggcttaaggcaaatttaattttaaagcctaaaaaacatatatataaaaaaaaatagaataagagtgttatgggattcgaaccatgacattgtataatacatacaccttaactaactaagctaggactatttattgtttaaaataca

SEQ ID NO: 200059 - DNA, 934 bp, Cannabis indica
aaatgataataaagaaaaatatagagaacctaatgtatgatataatataaatatagtaaagtaaaataaaaatattaaatttagtgagatatcttaaaaattagaatagaaaagttgatagttgtgcaactttgttatttaacaaaaaatttaataaactcaagagatcagtccatttcttttccttttacattgtatagaataatccaaaattaggtccttaatgatagattataaattgaaatttgatatgtactaagatcaaggtagttcttccaagtccaagttgaaatttctcaacccaaagttaataattttctcttattttgctagtacattcatatgcatagataaaccatggtaccaagaagaaagaaaaatatacatatggattagataaatagatatttctatttaatatatatagataaacatatatatagataaacatatttatatatatatatccacttcttcaaatatgtggcgactgcagtatctatttgctttcaaaataatatgctttacaaaatatggtaaagcttctccctataaaaaagaccatctttaacaaatatgtgtagtgtttaagtatggaatgataaggtgtgaatttcattttcatgtataaagcttctcctgtttaccagagtttcacttggcagtggcgcatggcagaacccatctaaccaagtgcgagttttcccgcttatgcctagaccgccaagcctgttgcattaacaaatggatttcagatcaaaatgtcaaaaaaaattgtccttaacatttcctcgaaatcaacattttcgatcatcaaagacatccaagatatagttcaattttagcagataacaaccaagtgaaatattcaataaattaaacattataggacagatacattggttattactttttttcattgttgtttatagaa

SEQ ID NO: 200060 - DNA, 1102 bp, Cannabis indica
gagacgagagagaaaaagttgttattattctttattgatctgaactgaaaattgattacatcattgaagccttaaataagcaatgagataaaaataacaaaacaagaaaaggaaataactaaaataactaactagctgaaaaggagcctaacgaaaaccgattttaacaagtagttgtttatttgtagttgatgaattgagttatgcgtgttaagagtataactacgtagaaacggtttataactaacacattttttaattgtcataaaacagtttagttagttaaaagggtagtttagtcattgtctgtttggttgtaaattcaaaactacataaaggctgtaattcacctttaccaatctaatgagaatcaattgtttattttctattatgtccattttgtttctttacatgatatcagagctcggatctaattctcatttgttgtcttctctctcgttaatcatcttagcgaattcaccaaccatctcattagccataagcctacaacaaccatcgaactcctcaactccatcatttacaccagttatcttctctcacaaactggatacaaagctggatcatggaaattatcttctatggaggcctcaagttctttccgccattagaggccacaagctccgatagtacatttctagttccgccactccatcgctgcaatttctattcaaaaatgaccgtgaatcagaaaaaatgaatcccactttcgttgattgaagtcaacaagtatcaaattctttactcttggttactctcgtcaatggccaaaaaattcttactcgtgttctgagctgcaaaacatcctcaaggttgcagtctattcttgaacctaatttgtatcacagattaaggccaagattgatcaatatgcaatagcgttacaaaatctcaagaaaggttctcttactctcaatgaatatctcctcaggattcgttcactcattgataaactcagctttattggtcacaccacctccacccaaggaacatatagctacaattttttgttggattgccttcacccgactatgcaacgtttgttatctctgtcactcacgtgttgaacttcttggagtctgcc

SEQ ID NO: 200061 - DNA, 579 bp, Cannabis indica
atccaattgaagcaactagtcaatctaaaaaaaaatgtctcaatgtaaagaaaaatatgttgatgacaattctattaatgaggttcaagaggaagatccagaagatgaagatcttgaagatgatgggaaagaaaaagatgaagatgattattattatgagtcagatcccgttgtcattcaaatggccaaggaacacgctgagacaaagctgaaattggcagcacaagaagacttctcccaccgaaagcaagcaacattgacttgactggaggctagactttcatcagagaatgtggctcttgataaattgttcctcaggataataacaccacgaaaggagtgaaccctaaagatcctggaacttctgatcccaacaaggacaaagaaaaatgtgtcatgggggatcctccaagaaagactgctccaactactccaagaaaaaaaaaacaaacactgccagccaacctttaaggaaaaagaaggtagccaatactccagggaaagactatcctactgatccgagaggcagagttgtccagaaagataggcctaatactaagtacaaatagaattgtataa

SEQ ID NO: 200062 - DNA, 619 bp, Cannabis indica
aaaaataataaatccaaaatatattaaatcgtcaatgcaaactcaaattactaagctgaatcatcctaaccaacatcaatattctaccaagactaagaaaaccctgagaaattacacgatgggttatgcaccataatttaccagaccctaaaattatatgattggttatctaacaactccaacatcaatttgaagtaaaagaagaacgtgcatgtcagaaataaaagttctgagacgggaatctgaacatcgtgctctgggcgaatcaacggtaccataccacaactagaatgcaatccaggccctgaagccttgaaccaaaagcacaaacctgctcgattaatatgtcgatgtcagtttgaagtccccgtgatggtagcaaaggatctatgttgagatttggttaggtgcacttgggtattcttttgagattggcatcccataacctatcaaattcaatcaaaatctaacttttaacattcaattcaaatgtaattaaatatctaatttttttataattaaattagattagatctgtttaatttcagttgaattagattaaatattgtcggtccctaattgtgagtatagacaacacagtgggctaataattatagtt

SEQ ID NO: 200063 - DNA, 665 bp, Cannabis indica
agatttaatttttcttacaaaattaatgagtgctgtttttcattgttttcacattgttggtacgggaaaataaggttttctcttttcttaaaaatacaaataaaaacttgtaataaaactaattccgtaaaaatgtaaatctgtaaaaatgtagcaaaaatctgattttaagtacattatctaaacttccccacaatgaaattcatttgttttccttcattaatcaaaacaagagctaggaagcttttctattctattaggaaaatacagttctgtttgatttaacggtgtcattttattttaagggttatggtaatttggttcctagggttaactggtaattatagtttcgttagtaatttgtaatttttacaaaatgatgtagttttgtaaaaattccgaattggtcgtaagcttgtaagctttaaagtataaattataatgtcatatttgtgaaacataccatgaaaaaaatatatataaatattatattgatatatataaacatataaaatccatatgatagaatgcttaatgcttgtgaaatttgttcaaaaaaaaaaatgcttctgaaatattctcattctaaattatttacaccgttatgaacgacaaaaatgaaaatatatgacatttgagaggctttggataataataataataat

SEQ ID NO: 200064 - DNA, 1413 bp, Cannabis indica
gatattatcgtaattataaaaattaaaactttcttgaccaacaaattcattcgaaaagaagcttctctttgaatttgaatatgctatattatatatattattataaatttaaaatagtagagaatattagaataaattaagaagaaagataagacctgggtcttcagaatataaatatataatcttttatttattattattaatagtaggatagtatgttaatttcttctaagatattaattataatgattctatccattgattatctaaatttctttgtttgagtaaacatagaaacgtgcttgactaaacaaaagatcttacacagtgaatatagatataaataaataaatatatataatattaataatgtaactacaaatgtggaattatatttgataaacttagtaaaaggtgttaataaaattaaccatatttaactttgaccaaaacgacattttggtagctgaaatgaaacgacaaacactaattgacagtccaacatcaaaacgacagtaaactgatttttaaattttctcaggcttatatataagaatatatgaatccaatcagaataaaatctcaaaaaatatatatgacatttgaaaataataatgtgtaaacctttttatgcattaaaattcatgtatttgaaatattttgcagctaaatttgactatatatagtatagttatattgtagctagatacgttaaagaaaacctaaatatatcatctactaataagttttttttttaaaaaaattaaataaataggaggggcacgactaccaaaatgaaattgttactataaattttttttacttatcatcattcttatattcttatattctgattagaaaatttatagctgaaagtattataaaaattataatttattgtgattaaatgtatttttagttacaataattattataattaaattaaattagtgataatttttatttaaatactatattttagtcacaaataatttttattgtaaataaaagttacattttaattataaatcaaacttttataaccatattaagtggatcgagattgaatatatatatcatcagcaaccaatgtataaaactttaataatataagaaatttctatagatcccttaaaatattattttggtagctagttaatttttagaattacttgtaaatttttaaaaaactttaattaattataataccgataataaagtttaaacagttgcgtactatacgtataagaaaaagtagtacgatcataaaaaaaaaaaaaaatagactacaaaattctcgtgagtctcgaaacaaataaagaatttactaaacaaacctataaggagtatactgtaatattatatatgtgatataataatatgaagaaataaacaacataatatatatatata

SEQ ID NO: 200065 - DNA, 1045 bp, Cannabis indica
tcagcttgaaaacaattcttaatacgaacagatacagaaaatgtaaataattttgtcataacattttagatcggattataattaaattttattttgacaaaaatcaattcagggtcctatttataccattttaaaaaatacagggtccattttgttatttaacaaaacagagagtccaattgataacttttgcaaaatacagggtccaaaatgatatttactcaaattagtataatcttttatggtttgacaaaatagttagtcatttaactatgcaattacaagggtataaaaatttgagtgtaattgcacctctcaactaccttaagaaaacctcatatagcaaaaaaaaaaaactaaccttcaaaaaccatgtaactatatgcaattgagtaattacctcaactacactcatacatttgcaaggtggctttctaaacacaccttcagaaaattgaattttggtgattattttaaaaaatgaaatacagaaattaatgatattaaagttttttatttgttcagctaagcttgaaattacctcatattaatagattcctaaataacatcgtgatactctttttctaagagaacaaaaactaacaatatattattggtccccttaataattagttgtgtagttgcagaataattttgttcttatctgacaatacatttattcagccaattcacaaacactgttcgtacagttttaacttttccttatgattcaactaatactgtagtaatcaaattctatgatccacaagttgtttgtgagtctgtgacgaaatctgaagccacaaataaaatgaagtggactaatctggctagctagtatatcgttttccaagtctcactcattgtcagcaaaaccgttggcaaaattctcaccagtgatctattctatacccaactgagacttaagtaactactttttctcttgcatttcaaactaaccaacccaacccatcacagcacaccttgtcctcaggggatgaactaatgtgctggctattactcatacaactatttattttctttt

SEQ ID NO: 200066 - DNA, 788 bp, Cannabis indica
ttttgaaaggtattatcgccatttggattgacaatctaaattcctaattgggtttcgttactgattttctgattctgtggcttctggttagaccttaaattgtttacattttgtacagagttaagcttccatccggagctaagaagattttgccaagtggatgcagagctatgattggtcaggttgccggtggaggcaggaccgagaagccaatgttgaaggccggaaatgcgtaccacaagttcagagtgaagaggaatagctggcctaaggttcgtggtgttgctatgaaccctgtggagcatcctcatggtggtggtaaccaccagcacattggtcacgccagtacaattgcaagagacgctgcacctgggcaaaaggtcggtctcattgctgccaggaggactggtcgtctccgaggacaagctgccgccgctgcttccaaagccgactagggctttttcgaaggttttgttgttgttgttgttgttgttgttgtgtgggcactttttactaatcaatactagagtgtcttttgttattagtcttcttaggaatgaagttcagtttctggaatagagataccatttagcattatcataatctatttgtgtttcttttttgttttgctgaaacttttttgccttaaatgtaataaaactttgtatcgaatggttgagtttagtgggcatgcttgccagttttgggtacactcagcaatgctgtactctattgtctgatgatgtttataggaactttgagtgaaccatacgaatatgttttagatt

SEQ ID NO: 200067 - DNA, 1796 bp, Cannabis indica
aggctagtatggctagtttttagttttgtaaggccagtatggctagttttaattttgtaaggtcagtatgactaattttagttttgtaaggctaacatgactaccgttggttttgtaaagttattatatggctagttttaattttgtaaggtcagtttggtctaataataacgcattaaatgtagtgtagtcaccgtcagcaatagagatgaaaatagataagttctagtatttacattagagaattctatgtgactatttatataaaacttcatattttatttgtaagggaaattttattttttattaaatatttgttatgtattatttttttctctttatttaatttgttggtgttctacaagtggatcgaaagtgacaactttcagttttgaggttttttttttttgtatattatagttttattgtctagttttcttggggtatctccgcatgcctttaggatagacaatgaactgttatagatggaagaaatcctcctttgttattttaacctgcatcggttttccttcaaaaaaaaatatataatactatacaatacaataaagtataatacggcgtaccaaacgaaccataaaagtaaataagttaaagtctctaaaacaagtgaagatgctcatttatatattataaggaaaaaaatacattattgaacaacataacaatatatgtaaaatgagtcaaaaatctttaaagcaagtgatatgatgtacgcacgtagtagctactagctcataatcttataatagaatataggtagtttgataaatgctttttttctcaatagataaatgttattttggtgtaattaaatttatcatatcaaataaaaaaaatgataatacacatatttataaatctatagttgggcaacatccaaaataataaaattatacaccaaattaattaattaaattctatccaatattataaaaagttttaaattttaattggattagattggttattggatgacacttttaaatcaaattaaaaaccgatttaatctaattatatataatatatattaaacaatttattatatttatttatatataatacaacaatattaattaaatttcatgtttacgttgtttgttaatttttctatagaacttgattaaaagaataccttataaaaaaacttaaaacttactttagtttacgtgtttaagtgcatccaatctttagaggatttgttttatttgaaaataatgtgtataagaatatagtaatgagattctcatgtatttctgtatatatattggatgaaaagttatatgtgcatgcatgcattgcataaaatacgtgcaaggcaatatgtgtatgtaaatcatgtataataataagtccactgtacgtgtaatcacacaatctatatataaaatgtacaataattctatatctgaattttcaaaagaaaaaaaccgattctagaagtcaaaaaattgtataattagattatgagccgtgaaaaaccagctaattaagttagcaagatgattttaaagattccatataaatttatagggatatcattttgtcccgtgatgtatttttacggaatgtattttgtgatacattagatgggtcttaaggtacattaaatgagtgtcagggtacgtttctatttttaaccctaattacctctagattaatttcagccgtcagatcaaataacttccttatctaacggtcgacttacaatccgtaaaagtacaataacaggataaaatcatatcccaaattttatatatatatatatatactagaag

SEQ ID NO: 200068 - DNA, 1746 bp, Cannabis indica
gtaccttaaaccttaatttttttttatatagttatgacttattatattttattttttaataaaaggaaccaaacatattaaaaacataaaatattatttaataacataaagaagaaaaaaaaaagaaatttggtgtaatagtgtaaatttttcatacattatgttattattacgtgcattgcacttatactagggtcgtctcaaatattttagaggtcttgttttaatttaaaaaagtaagcccttaacaaaaaaaaattataatttgtaaataatatttttaaatattatcatattacgaaagcatattttacatatttaagtacccaaaaactcaaacaattttattaaaattgttattatttctaatacaacttcaatctaatattaaatattttgggaaaaaaaattaaaatgcattttttttatttagcatgacacgttagtagaaggttgggttaagaaaaattctaaaaagtcatattgggcctttttaatttttggccttgtgcattagcacttcttgtacgtgtaaatgacttggcacttaattgtattttttattttttatttttgttatgtgtatttttaatattttataaattaaggtaaactatttaattttataaatatttaaagttttaaaagtttaggaaaataaatatataatttaaaaatattaaaattaaatatactctcaatattaaaactaacaatacaaaaataataatgttataaataatatataaatatttatatatatttaaactaatctaaaattagtgatcaattaactaaaaataaataatattgttatttatatatatttaatttaatctaaaacaaatgaaattaatatttgtatatatttataaaactaaccctgctaataccgttaaatttcacgaaatattcttatgttcttaaaatattttgttaaaccaataaaaactgttagatatccacattttatatataaatatattttttcgttcatgttttttgattccttgtatgtgtatcttgactttttttattttattaaaggctcaatcttctagcaaagttgttggagattgttgccgtattgatttggttcaaaatgatgttcgtgacattgttgtttttgagaacacttcaatcttagttactgaaaaaaggacagaaagaaaggggttgttttaaagtctccctttatggaactaggatctgttgaagctaatttagattcaatatctaattctcctgatggttctcttttaaaattgtgaaatatgttcctagattatgtctattggatgataatattgggaaaactgttgaccaaattttgaaggctaattttgatgtttggttaaggtatggtttgagatcgaagaaattaacataattgtttattttttattagtttcttctctaattttattatttttagagtcattgtatctaaatatatacatatgtattttcttgtttccagcaaaacaataaattgttgtaaatcttttacatttttatccctgaaatttttacatttttatatatatatacattatatatatgcattgtcttgttccagcaaaacaactgaagagcaatgataagatttctccttcatttcgttttggtgttgataaagtcgataacaagatgtgtttcacaagcttagttatcgtggtaattttttgacttcttcagtaagtgtttttcttacagttgtttgcttatttatattacttttatttt

SEQ ID NO: 200069 - DNA, 1101 bp, Cannabis indica
cgcatgatagtataaagttgttcaagtgagcgattaggtctgtagtcccatcgtactgtgaaacatgtgggcttttgaatccctgtggaaactcagatttaagatgtcaagatgaaatggctcgggctcttcatctgagtcgtaaccaggtaattttccatgttctccatcctaatactttcaacttatcctctagttcaatcattagaaattggatggggtttacttgttgttgatttacattttgattgagttgatggcgcaaataaggtgcattttggtttagccacttgcgaagatcaggttgtcttcgattcagatgctcgcgaagatcaggctaccttcgctcataattatttacagatcttgtcttagaataactctcaaattggtagcttcgcgtattgctcatgcttttttggtcatcatgataacatcgagttctacttccttctcgtgtatgtttgcttgactgactatgccctgagaccttgattgtcctgagcttgaacttgcttcatcttgtagtggccttctcctctgaaagagatcagatacatgtcccctgttcaagtacgtgtatgcattgccccaatccactcgtgatggtctttgaggatatcttagaggaagcccacttgaccttggttgatttctagggtttctctcattattgtgagggattccgtagttccctagttgaggctgtctcgctccctcattcctacgagatgcttctggcacatcgttttgttcattcccctagttattaactccatgggatgtttgtggaacatctcgtcgatgttcctgatttcttgtgttatttggatttgtttgattatccatggggacatcccttgtattcctaggttattcttcttgaggattagatggattctcttgattcgcttcctgcgttctggttagggagcctcgaggtcttccttgttgtctcctcactatagggtctggttgattttgtggaactgttccctgcaccgtcttggctgctacagcctctctttccaacttatcgtttcgtcggttagatttggctgaatgttatcgaagttgcctgttttccaattccactaatgg

SEQ ID NO: 200070 - DNA, 666 bp, Cannabis indica
agaatagtctggagtgttcgggtcttcagaacagtttaggctcacttttaatagtcgctagacaatgacttttgctgtacaagtatttttgtaaacctatataatttttaaaatagtatcccgaattatgtattagtatatatttatcaagtttaaatttatttaagaaaattttaatttataacgtttttcagtaaacattttgattagcgaagaagtgcacagtaattaataaaatactagctagtgggtgtattgagtgggtttgtagaactaaaaacattgttgcccatgtgtttactaaatgtgagcttagtaatactagtaatggtgttcttaatttttgagaagtgagtctgcatatgtttatcagtatcttctctcagcaaataataataataaataaatatgttagagtgaagggaaaaactccttcggcctactaatcagccatattaagactaattaagcagcaaaataaaattatatttatcatgaaataaaattatacatacatagtacacatgtcactcttttactcttgtttaatatactttgtgacataatctgcacacatcacatttatatgtatataatattgataatatatatgcatagatatgtgtatgtacaaatatatattgttatcgcaaagatttaaatttt

SEQ ID NO: 200071 - DNA, 970 bp, Cannabis indica
acttatcattggaggtcatgagcacaagttattggatccaggtcttgcacagttaaggatgagtttaataactttagttcatgggctgattttttggaatcttgatagtcaggcccactttcttaatttttctatcccaatagggcctggacctttcaccaaagggcatgttcaatttaaacaaaactcatttcttcctaggccaacaagaatgtccgattatacatatggggacgctatgaaaatatttttcccttactatcttgtatactctgtttattggccatcaacccttcattttagttcctttcctgttgacaattgtcatgccatggacggtagggaaccactctacttcatgttggagatgatgttttcatttatgttattggaaaagttctctcccatcatattaaatgagttaaactctcaacctttgattgggttcactaaattttacttctgtcatacaaagaaatcctgttgtaaattcttaaccttgagagatgctatgggatacttgtatgggaatgtgccaaccaattacttggtgttttcgggaatatttaaaagggctagggaattgcaacatgattcaatcaaactttcaacccaggataagaactctatcctcacaacaatgattgctgaattttttctctcttttgcatctcattcctgggatgggtgggagcgaaaacaccaactagatgaattatacatcgaagttgctttattgaagcacagctatcaatctttggtgggtaatctttctctttcattcttggggcctcattgtttctgggtatttgaccgaggcaagaaaatgaatcctgaacataatcagattttggcaaactcagtttttggtccttttcttctcgactggctttcaggagcaccctttgcagccaccacagcgactgtcctttcactttttctgcacacgaagggcgacactatcaattta

SEQ ID NO: 200072 - DNA, 645 bp, Cannabis indica
tactaaatcatacgtttggattcaaaaaatttcattcaattctatttgattttacattaaatttaacgtgacgattatttacatactaaatcaggggcaaacccatatgaaggcgagacgagacaatcgtctcttaaaaaaattggaaaaaaaatgtatatacaatttagttaattacgagatatatttgtaataaaaaagatatttatagacataatattagttttagtgtaatgattaaattagattacatatacaatagaggccaatggttcaattccataaagagcattttgtccttcctcactttaaatcgtaagcccaccactatactaaattgtagctctaaattttcatctatgtcacacatccagtcttaataattttttttaaaaaattaataatttaaaagttcataagcacaaaaaaattataattgtcctaaaaataatattataatagaatctaaattattcaaaaataataatatatatttttcaaacaattttttgtaatatacaattactaaaataataatatattttttttagtaaatagcaacataagaacccaaaatgttaagtttgtaagcgtcataaatataatggttatttttagcggtataagtagcaaatatttgtaaaa

SEQ ID NO: 200073 - DNA, 1307 bp, Cannabis indica
aaagatttaaacttgcctgtttgctttatttgttgatttagttcgaatgttcttaaggaacccattagctcatcaactttcagtttttttttttaaaatcatgagcttcctcaattgctagtaatttagtgtcaaacatatctagaagcacatgacatatttttcgaaccaaaatagattaatcgagctttactcccaaggaaaaaatttattagcaacatcagataatctttcataaaatttagataaaatttactttcttacatacttaattcatcaaatctagttgcaacatggtaaaattagatttatttaaatgaacgataccttcaaattgagtttgaagaatttttcatgccacatttgtaaattcgcaagatgatataaattttataaagctatcaccaataccaataaaaatttcatgtaaatccctattattagatcctgataatttttcatcttcagtagaccaattaagttgtggctttaccttaaatgaccttcgtcaatccttttccagggtgaagaccaactcgaaagtatagccctccaagtctgttcatcttgtgacttaatgaatgccctcatcctaaccttctagtatgaataattcaaaatattcaatagtagaggtcatgatatggaacttccttctgcaaagaaagacatctcacacaaaaataaattaaaaagaaataatctcaagatctcactaagagtttagtaacttgctctgataccaattgaaattttttattttatgattaccaacttattatttaattcaataattaattaaaagcataatgataaagttggtactgaaatagatattctttagctaaagaccaaggttttgtaactacaaaccagaaaaccattaaagaactaaactgttgaaaataaaaatacacaacactggttgcccagtcgcccctttgggactgctatggccggtcagcccctcacagcagcatccaaggccagccagccacatgcaatatgcctcatggccagccagcctgtaaagtgccaaaaagatgaatagagcttaaagtacatcttaccaaagaaagacccgaagaccaataaattagagcttgtttggctcaccatcgccaaactccttcagaacctcatccatgaaggggagagctctctcaatgcgcctgttggctgcctcaacagccttctgctcagtatctaacccaactcctctgataggcctccaagtaccttggcccacatgtcgtatccaggctgcccagcaggtgcagaccctggcggagggggatgcagtgata

SEQ ID NO: 200074 - DNA, 764 bp, Cannabis indica
atatgatatagatcccaaagaataattatcttttatgacaaaaaagaaaagaaaaaacattgggcataagcagaatcatatagcagcaaatgtgcttactgtcaagccgtacctggcaatggcatgacacaagcacaaggcaaatatctcaccaaatctaaaataaacacagagattagtgggtataattaggcgaaaaatgagtgaggatcgtacaaataaaattaagaaagtactcacccatgcgagcttgagatcgagatgagagtttgagagcttgagatcgaaatgagagttttagagattgagttttagagatcgtacaagtaaatgttctaattttttttttattttgaaagtgctggtaacatttactttaaagaaaaactaatatttttgttagaaagtgttataaattaatgtaatttaatagcattgttgttgtagttttttctttttgacaaaaacttataaataaagaagtttaaatatatgttaaaccccaccaaaatttcacacaacaacaaaaaaatgagtttgaagatctaaataacatatacatttgcatgggagtaattttttttggtagtttcataagtaataaaggtaattttggtattaataatagagcccataaatattcttatttttattaggaattatttcacaaaaacataaaaacaacaaaaaaaaataacaaaaaataacgttttacggaattttaaatatttttacgatttttttattttatttacataaaatac

SEQ ID NO: 200075 - DNA, 1676 bp, Cannabis indica
agagagagagagagtaattagtcagagagaaaaacttggaaagaatgagagaagatcacgaacagaaatggctgaagatcatgttgtcatgaaaggttgagtggctctaagtttgagtgttgaagagccatttctgtcattgattgttcttggtgtttgtgtattgtaattggtgtttgtaacttgttgattcttagtggagaaactccttgggggagagctggaatatgactctaattgagatccaaatcaagataatttttttgtgttttctctcttacttttctggttttttatcagttttgatttctggtttgattgttaacatgtttgctgattgtttgatcattattcttgtttgagtttgtgttgtttaatcataacaggcggatattttgacaccctttaacttctttttttataaaacttgtggaaaaaataacctctaaaaagttattttatagtagtgtaagaactttgggtgtacttggggttttagggaataactgatactgttcttccatgattgagtgttgtgagtttaaaagctcactgttattggtgattgtacaagttcaaattgctcatactggattcaaaatgacgatgctcaattggagtatggtcaaggatcaaatagatctctagggttgtgtgtcaaattctaagtatgtatatttattgtgattttaaaaattgtcattctaatataactgtgttttctagtatggtgttgtaatgttttttcagtttcggtacctctagtgacaactattaataatggaaaagtattttttcaatgtgatggggtactatttgaagacgttatagctttattgtcaaaaatttctatggacagttttgtctcatgtggctcgagataagatttatgtagctcatggtttggcaaaacatgcccttcggttagacgataagctatcctggtttgaggaggttcaaccgccgattatagtttgctgcattgttaatcatgtgtgactcagttcaccaacgtaaaaaaaaaaaaaaactaaatctctaggatcggaaccaagataaaaatctagtgttctctttatatttttcttattctgtgttaatgtttattttgtgttttacttgttgaattgtctattgtgttattaaatgaatgttggtgttgcaaactaatttcaacatatcttgagcctacaacttacaagaaggctgccaagtttcctcactggcagcttcaaatgagtgattaattcttggctttgcagaaaatcaagactttgggtttcatatctctattctctatcaccacatgctaaaacccttgactcaaatggattttttggaattaagaaattgtggtcttgtatgtggcaatccaatatccctacttaagcttaaacattttatttggagaactggtgtccttcttgtgtcaattgacttaagcaaaaggaaaataattccatccccactctgcctatgtgtggttccaatgaggaaattttgacctatgccatggtgagttgctctctgctatatgtacgacctctctaacatcttgtttatgttaataatcctcatattcctcgtaatgaaaaagtaaaaaatattaattgtggcggctaagcgtccacgaacaccattgaggatctaatctcacattaacacaaatatatata

SEQ ID NO: 200076 - DNA, 1305 bp, Cannabis indica
agttgaaaaagaagagattcaatagaatttctgccctcatgtataaaatgagtagtgatatatgccaaaatcgtgggcataaaactcagtataggatatatgagcttctttaaaaaaataattttgcttttcatatgctattgttttgttaaatgcataaataaaattcacttttcaaattttaaattacatgtcgaaacataatacttttggatgtatttttcaaatacatttgactatactatatacatgcaaatgaattagttcttgaaatttggactttggaggtttattagttatataaatgccaaacagaaaacttgggattaacgtgaaacattattatatatcatacagaaatgaccagttgttttccctaccatataagaattaataatgaacacggtcaactcatcttaacactagtacaaaataaagaattgtttatctaaacacatgaaagaaagaaccaaacaaagactaagacaaaaaatacaaactaatagaaagaatattaatcaatcaattaggtagaaaaagaatatcaatcaacaaggaatctgttcggtgaaccatgtaatgatgttgaaaggaagtttcatcaaagacaccgccagattagccactccaacgcaacatatgcaacatgggcacaagcaacttaatatagtcctgccaaatttcaatttaaaaatgcataattaatacatatataatgtaggattgtatatacatttggttacctaactacatctatataatttcatcaaaaaaaaaaaatttaaaagacttacataaatgtggtaacactcattaaatcacataaagaaatgttatcagataatgcatgtttatattttctatcattcagaggattaatttggtctcttaactctatttgactccaataaaaggaatgcttatatatagtctcaaacctaattcataaaaggggaaaatatctgttccacaatagatcataattctaagttgaaaaaaaattatatttatgattttcttacgatcatagcttttgataaagaaacgaaagtaataagtaatttaaatgagaatcaagataatctaaagactgtctcctaatgtataaattgaaagactatatagagtagccaaaattgatgaattaaacatttgaattacgaagtagagaacatacccaagaatccagattattgcacccaaaactgataaaaccagggccaccaatgcaaatggcagtccaattaaaaaacccaaaggtctgcaatctcccattgtctctgtttcttctttctcggaaaaaac

SEQ ID NO: 200077 - DNA, 3044 bp, Cannabis indica
ctccagcttatcattgcaacatccagaataatgtcactacaacccccttccaaaatcgcaaaaaccagctgctgaattcctgaaataaaccaggaaaaaaacgctgcagcagagagattccagcaactttgagcaagtctgcactcaacaaggatgtgaaaaatcgtttcattctcaacattacaaaatggacaaattaaatccatatatacgtgctttgtactaagctgaactttagtgggaaggcaacccgaacatgccctccacaagaagtgatgaacttttggaggaacttctaacttccataatttcttccagcagttttcctcatccaaatgtaaccaactgctagcagccgattgcaagaactggtatgcactcttgaccgtataaagacctgagtgttccatgtaccaataccatgaatcctctacagttgtgttacttaattgaatactcaaaatcaagtttttgtccctctccacaaacatatcatcaagaatctccatgtcccaagatttctcacccaccaccatcagactagaaacagttgtatcaactaagcttgggtgatccgagacaatgaaaggattactatccataggcaaccacagatcaaggagaacattaacagttgaaccattaccaatcgaacgccttgcacccattctaaccagatcttgagcttcccaaatactacgccaaataaagcttggattttgtccgagttcagcttgtaagaaagagccatttgggtaataccaagccttataaattctttccaccaacatatcttttttagtgagcagccgccaaccttgttttcccaaaaaagatagattgtaatcacgaaggtttcgaaatcctaacccaccaacatgtttatgttgacaaagacgcttccaactaaaccaactcacacccttacttgatgagtttgattgagctttccaccaaaactttgccatcataccctcaagactagcacaaatctccttggtcaacaagaacacactcatagcatagcttggaagagcttgggcaactgacttgatcaaaacttccttacccgctttagacaagaatctagtctcccagctaaaaatacgcttcctcattttctccttgagaaacccaaggatagcattctttttcctacccatgatacaaggtaggcccaaatataaactatcctcattagcctcggctaatcccattagagtacaaacttgaagccgaacctcatcactagtattcttgctcaaaaagactgaggacttgttaaaattcaccttttggccagaccccaactcataaatttgtaaaagctgcatcactctttaagcttcccgaccattagccttgcaatacacatagctatcatctgcgaaaagcatatgagaaactcttggagcaccacgagcaactttacacccagttagccattgatgcctttcatactttttcaagagagccgaaaaaccctcggcacatataagaaaaagataaggagatagagggtctccttggcgcaagcctctaccaggacaaattggacccatagtatgaccaccatgtgtgacattgtaggtaacggtagagacacagaacataatccactccaccacccttctgtcaaaccccattcgaatcaagagtgactcaataaaagcccactccacccggtcgtatgccttgctcatatcaagtttgactgccatatagccttccttcccaatcctttttcgtttcaagtagtgcattatttcgaaagataccatcacattatcagaaatcgatcttcccagaataaacgcactttgattatcaaaaataacattgggcaacactcctttcaaacgattagccaacaccttagatatgatcttatataacacattgcataatctctttttgaattcaagtatttattagaattaaactcaacctatttattacaacaaattatatttttttataattattattatcaaaggaaagaattacatagccaaaatgattaacacaaggactcaacacaaattgtaaattgctatccaaaaaaattattctaagctttctcttagattgcttgattgtagtttagaaatttacaagtcctgaattgttttattttttgatagattaaataagcatacaaacatagtatttatttaattaccaaaatcttaaaaataatcaagtcaagcaaatcttagttattttcttgaagaaatttagaaacctaaggatagtcacaacctctttaaaacgtaagtcaattttggtcattaattaacgttttatgtaacatatttcttaggtctaaataatatgtcaccaacacttttacctatctctaaaaattatagttggaaatctccatttcattctaaacttttttagtaatcttatttattcctaataaataaaaaaaacatctgaattttcaaaattgtttttatatactttttggttaaatgataaattgtgttgatgagagatagtaataaacttattttgtcccacattaattgaatcataaattttaccatgttttctcactatataaatagagaaaaaatcttatcatatttcaaaaataatgctatacttaaaataaataatatataattatataatatactgattgtgatgctttttcctatatagaacaaattcaagaatgcactatcttctcgattttccgattcatttatttcattgagtattataattctaattaaagttgtatattcgaaccgggttttttggtacggtacgaaatcgacacgaaaaaatataagcttagacctagcatgaaacgaataaatatgagcccaatcacgacacgaaaaatatgagcttgaatatggcatgacacagaaagcatgaaaactacacgaaaatacaaatttcttagtacaagacacgatatgtaagtacgaaataaaacataaagtaaaattcataaaataaatttttatttaataattcatttactctttcgtataaaaatagtttatttaaatattttaagatta

SEQ ID NO: 200078 - DNA, 1898 bp, Cannabis indica
tgatcttttaaaataacaaccaattagaaataagatatctaaaataaaataattaaaaaagttagaattattttttaaaattaattacacacataatactgacataacaatagtctaaactactacatcatcattctatttgccacatgtaacaaaatttacagaaaaatcactttacgacattatgaatagtttaaataccatttttaacaaactgaaaaattcaagaggcacattcatatatgtcataaatcagagtaaaagtcctaaataaccttaaaagattacttgaatgtgaaaaaatactattcataatgtaaaattttgaacaattttacatttgatggagccattttttttttttgacacatcttcatattttacattttgatgagctattatagctctctgagtgctctaaagttctaacaagtgcctataagttctcactaatatgagatgaagctaagttagatactgaaaaattgactcagcccactcatctcgtaaatcattgatttcctctgctgtatatggagtggtcctcttcatctagttaaaataaaaatatttaataaattagaatacatattcaaattataaaaattagttcaaatttacatatctaaacaatacattgtatacctcccgtctcaagtattgttttggtagcggcttggaaatcaattccttagcaaacttcataatatagtaaccacactcggtaggtctagtttggtttggacactattaattaattttagaacatataaatgagaagtttagattatataaaatctgacgtttataataaaaactttaataagattttattaaaagttgttttacttactttcggaacacaaagtttagaattgtcagtatctgctttacagaggtatgaatgatacttatcaaaagccctgcagaaaataatattaagttaattataagtgtttcaaatgaaaatgcatgcgaattaattaacaaatattttgtataacttacataatgattatatccctgatctcttcacggaaactgtgaattcattggatactaaaaaagccactgaatgagtgtgtggcgtggattaagaccaacatccagtgagtgctgcaataatcaaacaatcttgtgttaggcaaatattgttatttaaaaaaaatgtacatcaaatttaggttacttacttaatttaccaagggcaaattagaattgtgtttctaggctcatttgcaggatcgcttgaagagattgtcagcacgtacttcatctgttccagcagttgtagatattaaagcaggatgcataaagcagcgtataaatggtttaaaccatttgtatggacttgttcatcgagcatcctacaaattaaatagttagtaaactaatttaattcaaattacccaaaaaaaaaaaaagaaaaagaaaaagtttgcatgttctaaccacatatacaattgtatctcattctctccaagcatatcataattgcacaagttttcgatatcatatttcattaatcgaactacgtttgggaatccaaaaactcgtttttgactcggaatttctaccacccgaccatcggtccaccgggtcatcaactttttcaaacaattcaaagttggtgtcaatggcactgtaataggctcctgtgttagttgcgttacttgctcccttgtgagtcttgattctcgtggctgttgagttgaaggggaaaattggtctcgctgtagcttctcacacaaaacaaatttctttggccatgcaacctcataaccattacctgaccaaccaaggtgtagcctttttctgtaaccgctttaggtaaaatagcatccttttgatgcacacatcaatcctcacacgacaatatctaggattcgatttaacag

SEQ ID NO: 200079 - DNA, 868 bp, Cannabis indica
gtattcatatgtaacatgcatgtgtagatcagttattagtcttcttttatttgagtatttttcatttgctttcgattaattaatgcatacatgcagatccaatatatccattatattccgtattgtcaattaattatatatatattattaatctttgactatattatacagttaatcatatgatattcatcattaattaattgatattggagactgtactagaactatatataggtaaatgaaaaataaaataagtttttttattatgtgttactgaactgaccatgtaacaaataaattatactaaattcttaaggcatgctaaaatttttcgaaaggtgttattctcttatatagcaaggtaagtatagtatatatatagcttgatttctaattatgattgtttgattaaaaccaaaactaataaagtatgcttgataagaccaacaaatatgaatgagacaaatatggtttgatcattcatatttgtgttttttttactctataaacaactcgcacccactactacaattttcaaaccatcccatcaagatattctgtcttatatatatgtttcacaaaagttgaaaaaaatgatttatccaatcatatcatatgtatatatataatatgtgcctatacataattgttttaaaggtgcacgttttttttaaaaaaaaattaaattacatttattatgtttttgttattattattcaaaaaaattatattttgtttaagaatttcaaagcatatctgcactttttaaaaggattgtattgaagcatttctatttgttttagtactctagagaatttgttgtagttttgcttgaaatgtataagtttatttaaaatattttgtaaaa

SEQ ID NO: 200080 - DNA, 1694 bp, Cannabis indica
gtgattttgatattgtataatttaaggattttttttcttcgtttttttaggattttattgatatttgttcgaatgtgtttttgatattgtattctttaggtttttttttttaatattataggattgtatactgtatactataattttttgcatctgattaagtttattgattatatatttggtgattaatatacttttgtttgccattaatattcatgctaatttataagttgtgatttttataaaatcttttgtgtatatatattatgaatttttatttgatcggatattatttttgatagtgtatacttttaggatttttttattttttttatttttaaaaaataagtttatatattatagggctattatatatgtatttttatatgattagggtatttatatatatatatatattttacatgtcaatgtttttatttttagtaggaagatgatttaaatgatgttgaagttgttggtgtggaaaataaagatagagttgaaagtgttggattagatgacatattcaaactacacatattacactttatttttacttgtaagctatatattttattatttactgatcaattttcaatattttttttttctatgaacattttatttgtaaaccactattattggtttactgatttattgtgtttattgtggttttaaattttaatattttaggtattgaaagataatactctaagttttgatattaatgagttatataacaagtcaacctgaattattccaggaatgatataaagtttataagatataagagaaaacatgtcgaggatgattatgcattgtttaaggatgatatttaaaaaaacaaaaataaactaatggtaggctaaatgaaatggttatctaaaatatttactatagacaactctataaaaaaataaaaataattttttttaaatatgctgaaataaactaataggtttattagtatatatgatgataggctatataaaaaggctattgttatgtaaatacaaatattatagttcatttttgtctgtttattatggtagtgattggtaggctataggatggtaggttcatgttttaagcttttagttgtgggttattatttgaagtaataagaaaaacgacagagatgaagcattgatgatgataatgaagattttgtaataatctatcacaatgagaaatgtaaagttgcattttgtttcatatttttgatcacctttatgtgtcgactatttggttaatttgtcacttcgtggtcgaagttgtaatttctaatttacgattgaagcttttatcggttttaatggagtttttccgatgaaattttggatcgatttttttgaagtgttgactgaattgttcttttatttagctacaatttcgtctctaatttgttaggtattgttggagtttgaggtacgattttagttacgaactcatgatcgattttatgttgtttgtggatgaagtttttttttaatcattaatgaattttttttggtggaaaatagttttcgatttgtgatttattattttacaagaagtaaatttataagtttttattttggtttgtgtttcatgcactaattcaaagtcttgatgttgtaattaatggagaagatagtatgttcctaatgtgaagtggctgatttttatttttgattacgataagtaattttttt

SEQ ID NO: 200081 - DNA, 1846 bp, Cannabis indica
ttaatctaaaaagataaaatatcactatataaatgtgtatatattcaaattctttaattatggattcatatctctcaagattttggaatatacttgatatatatatatgatatatatatagatatatatattcagttcaaattaatatttttccatctgtatgaaaattatgattgaaaatggaaatatgtatattattttggtacttaattaggtgtaagtaagcatattcctaaacatgttggatattttctccctaaggtgcagtcatttcgatgaaaaccctatttgccctaacacttgtacatcaagatttgttatataatatatataaatatatatatattgtatataatatacatatatactgggccgacttaaacagtttgagagctttgggtgaaaaattgaattaattgacattttattaaaaaaaacttcataaattctaatatagataaaaaaatttgaatcatatgtattgagaccaaaagaatatattattttttataagtacatatttataaaaatatatatgttttgtattatgaacatttatatatgtattcattattaaaaaaaaatatttattatgttaaatatataaagggataataaaaaaaaatcttgtgcaatagtccaagctccctaatgcttgggccgaccatgtatacagggaccccgacccactggtactaatagcccccactaataaaaaaattattttttaaaaaattaaatgtaatttttttaatttgataattatagaccaaaatagtagaaaagcccccataaaattaaataaatttagtaaaagtaaatctaatataagtataaatattttcttaatgatgaataagccaccacacaaaataaatattctagatttgtaataaatttaaaatatttattataatttatatgcatgttaattatttttaattctcggtccataattgtaataatcatttcttagcttatattaatagtaaaatcctaatcctataagtcacattataataaattatagtacatattttaaatttattacatattctaccataaaaacaaaagaattacaacacataaaattgccatcatttcagacttagagatgaaaattgggtaggtaataagtaggtaatgcacctcccaatcccatcccccgtttctcatttatgccctccattaccgcccccgcccagcttaattcccgatgggttaggggtagggaatctccaatgggtacgtatgggtacccattaagattaaaacaataataataataagaagaaaagaatgtaatgtaattcaaaatgaaaataataaacaagatattcactttaaagtaaagaaacattctacttattaaaatttacacagtaaattaagaagattaatagtcgactttataagtatatatagtcaataattttaatttgtaataattagaaaattatatagaaagtttagaaactatatatcttagtcgaatatggggtgggtagtaccatccccaaccctacccaaaacccgctttgggtatataaaattgcactctactcccgtcccattacccattaagacaagtaattctcgccccatttagggtgggtacctatgggtattcattcccacgggtcaaatttccatatgctatttcttataaagtatagaattataatttagaatttttgcgtggaattaagtattgtcgaggaactgaaagaaattttcttataaaaggttatattttaaaagttttgggtgggagagaggagagtatatatagtcgggaaactagagggaaatttcttataaaagggagaattatattttagggttt

SEQ ID NO: 200082 - DNA, 1728 bp, Cannabis indica
caaaaggctgtggagtgatctgagggagccacgtgtgcagctttatttaatgccaacttctttcattaatttaaaagatatgtggcagctgtatgtaaaaggaagggtttataaagtgggccaagataaatgggttaataaaagaactgggccatcatctttgctgggccgagaatccaatggggaaaagagcaaaagtgagttgagcctcctggggccaaattgcttggtgggccaatgctttaaagggccggacagaagctccacacagcccgtgagattggaagaggtgagaaggatattgggccactttatttatcatcacgtggggccctactctttggtactggatcaaggacattggattaaaaacattaaatccaacaaagtgtttgaaggcattctcaagccagtcagaccgaagagaagagaggaatttttcagtgcaactattaattactgggaggagttcaattcctgtggcagccttaattcaaactcagtaatgcgagaatcggaaaaaattactcttgaggaagaagttgtcagtgaaaagaagatgaaagtatatatcaggaggaaacaagattgccttaacggcaatggtggagagcttgagagcttagcgggggatatccatttggaggagaaggaacaggttgaggatccacaattggaagatatcaatgatttcagttcagatgacgacaattcagaagaagaaaaaggctattgtacagatgaagaagaagaagaaaaatatgaagacattttaggtaacatcaaggagctttggcaagaggctggaagttccaaaaaagatttgatgtccagtgagcaagttgatgagccagctggggtggaagaaaccgaactagagaagagagattttgttgctacctgatatcgacctcgttaattctatggaagaaatgggtatgcaattaatactaaatgagaatgaagagaaacagaagattcggagtctcaagggtggaaggaagagtaatagagaactcaaaaaattggcttttaatataaattatgaaaaaggtcaaaaaaaagaggggcctccaaaaagatcattatgagaattttaacctggaatgttagaggaagtggagacaagatgaagaggaaggcaatcaaagctacaattagtaaggtgaatccggatatggtgatattacaagaagttaagaaggaatccgtggacaggtggtacattggcagtatttggaggtctcgtttcaaagcctggattttgattccagctattggaagatcagggggtacgttgttagtatgggatactagaagcattaaagtattggactctatggtcggtggattctccattttagttctaatagaagcagaaggaaaaaggccatggtggttctctggggtatacggtccatgttcctatagagaaaggttagagttctgggacgagatggctggattaagtgcaatttgtggagatgcgtggtgctcaggaggggactttaatgtggttaggagggtacaagagaaactaaatagcaattcttggaccaagagtatgaagatgtttgatcaacttgtgcgagaattgaagcttatggatccaaagctaaataatggaaaatacacgtggtcgaactttcgaaataaacctatttgttgtaggctggacagattcttatttaccaacaattggagcaacttgttcacttttgtgcaaca

SEQ ID NO: 200083 - DNA, 588 bp, Cannabis indica
catttttattgtatcaataaaataaacacatcacattccatatatttaagaccagaaaacaagtgcaaaatcaagaactgtccaatttaaagcagttctaaacacagtcaaatcttcaaatctaactttcattaatttttttatggggtggggaaaaatatagcaatagtgctttttccatgtaaaaggcgttatcaccatctcatcatttatataatagaatcccataatcaacaaatactttcatataattcttcaaagatagaataacacaaccatgaagataaaacaaactttaagtaaaacttcagatggaaacttacggcaaaaaatcccctgctccattccctgcatcaacaacaatgtggaacccttccaatggcttctctgagattagaaaaatgcagagtaagtaactaatatggtctcacctcaaaggagctgctgctactagtgaattagagagaacaaatttgtactggagatagaataagaatgcagtatagtacagtgcacgtaactcgggagaactatattgaaatatctcttaactcaacaaatggagctgaaatagctcattatcagaca

SEQ ID NO: 200084 - DNA, 743 bp, Cannabis indica
gccaatttggctcgagtgatttcaccaaccaaattataaaatctacatatttttgtaatagaacctctatttctttctcactttctcacttgctatgtgaaacatatatattatatatacaattaaataatgaattagttaatgaaatacttgagaagatgcataaaactcactctcaatgaaaaagggtctcaaatcttcttgacacataaattgtagaggaaaacacacaagatgaccctttatacattccaatctttcaattgaatctattaacttcacttttccatcctcatcataaatttctaccttttcaagagctattcccatatcaattgtagtgtgaccaagtttttctttccaatgaccaatgcattgtctaaaagcagctctgcaattatgtggaaattaattaaatgataattaatggtgaagagaaaaatagaaattctaaatgtgtatatatgtactaccttgaatgtataagatcattgggaacgcaagaaaacacttcttggtaaatggttgaattcttctgtataacataaataatgttcaaattagttggcaaaaaaaaaaaaactaaatagaaattatgaacaagcagattgtatgcttaaatccattttagaaattattaagaagagcactcaatacttataaccaactatcctctattatttatcactattaaaaaaagagcactcaatactattaatctctgttttttgttctttgtccat

SEQ ID NO: 200085 - DNA, 1172 bp, Cannabis indica
aaaaaaatacaaatttggcactaacaaaaaatatatatcgattacaagcgttaatttctactatgcgcccatctttaaattagtctttcagctatacattatgtcctttccccagaaattaaatcgtttaaaatagaaatcattgcttccgagtcttcaatattcaaattaatggaaaataatattacaaggacaagaaaagaaatagtttcccactctaaaatcagttctttactaagttttctcagaacccacatcaaaatcttagcctctattttgatatgggaaatgaaatcacagtgaataatttccaattccaacattcaaggaaacaatctaaatcgtacatgaaaagagagagagagttaccggtggccacagaattagaagctgagagagagatgtaaaagatggtggagctgcgcgtcgtctgagaggaaatagaagctagggttttggtttttaaacttccagcagacccgaactttcttctatcactaataatcccttaatttgttttcatttgtatttttgtccctcttcctaaaacatctaacatttgggtcctctatttttttcaatatggataataaggaagattttaaaagtaaagaaataaaaaaaaaaaaaaaaaaaaaaaaagactatattatactgcaaaaatgttaatttctattctattctttaaaatactttacaaaaattttaatttttttattttgcctttgtattacattatataacaacttttcatattttcttcatatcatttcatattatattttcaagagatattagcggctaaaccacttgaactttacggtttgtaacacttaactacaaaaatcgaatttttggcagctaaactacctaaaccctagttctgttttgctctgcacacctccgtccaaaaattacagttaagtgtcatggtagactgtccatgtgtacatatgtgtacacatgaaaaaaatttagtggtccacataattttagttattaaatattatgaaaagcacaactgtcactttggtgacctggcgtatgagaaaagtcgacgtccgcgaacacccatgagtaggggtgagcaacggtcggtttggtcggttttttacacaaaaaaaatccaaaattcgcttttcggttttaatggttctaatccgaaaaccgac

SEQ ID NO: 200086 - DNA, 599 bp, Cannabis indica
aaattgaaaaaaatattccaacacgtattttcggacataaaattgactaagaggttgtaataggagattaaccgtaacactcctcaagttgtcaaacatctaaatgaagatttcatgctataaaaatgggtacatatataagaattaagaacaacaatattaagtgttcatgttaggaaatctcactataatattaactgaggtcatgctgagatagtataggaggaagtgtgtgaattgcaataagatttggatcgaatgtgtttaataaaattgtattaaattgcatgtccactcttaataattattttttttaaaaaaagaccaaataattattatttaatccaaatatggattttttacataaaaactaagtcaattaaatgttatttattcctatttttcaaattaggaggccatgagagatattatgttgtttttagtttattcttgttaataggtataggtccaaccaatgatatcgattgagatattttatatatttgtatgttgattttcactcaaaacattttaaaatactagactaattaataaataagctaagaagcattgtatgatttttttttaggaaaaaaaaa

SEQ ID NO: 200087 - DNA, 926 bp, Cannabis indica
attattattattatcatcaaattttaaggttttttaacgtgtcgtgtctttcgagctttgtcgtgttgtgttgtgttgtgtcgtgtttaagcacatattttcggtgtcatgtcgtgccaatttatagcattgtgttttttgtgtctaaacccatattgtatgttacaaaatgtattttgtcttttttacaatccttctaaatttagagggaataaattttgaaggtttgaagagaaaatgtctccctcttgtaaaataagtgatttagtctctccttctattactctctctccacccctctccatccacccatctccccctactaccaaacatagtgtaaggttgagttgggttgtgatcaattattgtgatataactaaattagataataacgatatattctttcatctaataataagtcaaggtttattagtctcatgtaataaatacatccgatcatatttactacatttatgttctcgaaagaacataatacttgcttgtataaacttgtcgtggattagctacttagtgtaaatcaagtgcagtgactaaacttaggactttaaataaatgtttaattatataatcacaaatattttttattgtgatttacgttacagcaattattattatttatatgttcaaatttaatattatatatataacataaaattagacacaatgtgatttaccaagtcaaaataaatttatattttttttattgatgataaaattattacaaagtattaaagttttaattagcgaataaaactttaacactctcttcattttgaaaattcaatctttattttctagggctgtacatcggtcggtttagtcggtttatactacatattttctaactcaacgtaaagttcggtttgtaaaattatgcatacagcctacccaattaaaaaaaaaaa

SEQ ID NO: 200088 - DNA, 1551 bp, Cannabis indica
tgtaaagttattatatggctaatgttatttagtaaggtcagtttggtctaataataacacatcaaatgtagtgtattcaccgttagcaatggagatgaaaatagataagttctagtatttacttcagagaattctatgtgactatttttataaaatttcatattttaatttattttattttatttgtaagggaaatttcatattttattaaacatttatcatgtattaatttttctctttttttttctttgtaggtgttctattagtggggcagaagtgacaactctcagttttgatgtttttctgatattaaggttttattgtctagttctcctgggtatctctacatgcccttaggttaaacaatgaatggtttagacagaagaaaatcctcttcgggttgcgtaattttattacttttgttattttaacctgtatcggtttcccttaaaaaaaataataaaattttatagacaggttaatagaataagttatttaaaaagtgattagctgctaacattaatattgtgctaatataatataatatttttcggttttaaaaattaaaagtgcttattgcttttaaactatttcatttgcaggttcttttttcagttttccaggcagaagcagttgcgttactagtagatttgcgttgagctcaagatgtgggacttcccgtggagagggttttttttgattcactttctttagtctcaactttggagggtcagacaatacatttgcatgatctgggggttttcttttctgatattaaagttttattgtctaattttcctagggcatctctctctcatgtacaacaactttattgttgaggttcatagattggctaagcatgcctttaggatagacaatgaactttcttggatgaaagaaacctccccaccttttgcgtaacttttgttacccttgttattttaacctttatcggttataccccaacaaaaaaaattgtaatacatgtataaacatcatatttactcaaaaataattctattatgatatagtattaatgcttgtttattgctattattgttacattgatatttttttttagtattttgattttttttttctagtgtatctctatttagttattaacttcttaattagaatataatttgttttgtcccaaatgtattcttgaataaaagttttactgtatatataggaggacctggatttagtcccgcaacgaacgaaagcggaagttgttccacttaaataattttagccgttaaactcttctattaaaattcaagcattgtttttttttttttttctctctcttttttaagaaacaatcattgttttcatagctacctacagtaggataaatatataatttaaccaaaggaggaggttttaatggttatattttttttgtaaccatcatggttatatttttttaagccattggattactattaaatggttgtaattaatttagaaattaaataaaaataaataataaataacttgtaacctgaaagtaacttgataatttattttcttataaaactttaa

SEQ ID NO: 200089 - DNA, 1755 bp, Cannabis indica
cattttcaatcatacattgactagaatcgttttgatcctcatttcatgttagacgatttacgggacctcttaatactttaaccgcagagggatataagtattttattactatagttgatgattgcttcagatatacttggattcacctcattaaacaaaatctgatgctcaaattgtatcccacagttcataaaattgattaaaaaccagtttaatattattgttaaggctcttaggtcaaataatgccaaagagactacagtttaatgaatttcttaatgaactagggatcatacactaccactcttgtgtccaaagaccacaacagaattctgttgtggaaagaaaacaccagcacttactcaatgctgctagagccctcttatttcaatcttacatacctttggtttattggggagagtgtgttgctactgcaacatacttgattaatagagcaccaacacctaatctaaagaacaaaataccttttgatattcttcacaataaaccactaacatatgagcatctaaaggcattcggctgtctagcatatgcatctacattgagtcaaaatatcaaagttctctcctaggtcagcaccatgcatttttttgggatatcctacagggatgaaagcttataaactccttgacttgaacactaataaagtgtttcattataaggatgtttacttttatgaacatattttccttatgtgagtgttggcagtgttcctcatggttatgagaattttttctctgccactcctattgacagatctgagtctactcctaattcttcatccatgcttttaaatccacttatcaaagtcctgaacctgttccctctattccacataccagaacagggagacaaatcaccaagccatcatatctgaatgattatcattgttttttggctactcatccttctgttttctcttcacaagattctatgcttacttctcaccctttatctaaggttgttggttatcacaggttgtctcctaatttcaaagcaactgttcttactatttctagcctttttgagcctgaatttttcagtcaagctcatggcatacctgagtgggacaatgctatggacaatgaaattgatggtcttgaaaagaatcatacctcgattgttgtttctttatctgaagatcaacatgccatttggtgcaaatgggtgtataagatcaaactcaatgctgatggaagtgttgaaaggtttaaagcaaggcttgttgcaaaaggctacaatcagtaagagggtgtggattatactaacacttttgcactagttaccaaattggttactgtcaagttagttttggctttggctgccatgaaaggatggcatttacattaacttgatgtaaataatgccttcctatatggtgacctacatgaagaagtgtatatgtctctacctcaagggtatagacctaagggggagttgccaccaaattcagtttgcaagttgcaaaagtcactatatggacttaagcaagtctcaagacaatgctttgctaagttctctagtgttcttattgatgaaggattccaccactctgctacagatcactccctattcattaagcaatttgatggaggtttcatcttcctcttagtatatgttgatgatgtcattctagctagcaatgatctgcaacaacttgaggcattgaaaatcagattgaatgacagattcaagctaaaggacttggggaaacttcaagtttttttttttttt

SEQ ID NO: 200090 - DNA, 787 bp, Cannabis indica
taattcatggtacttgaagctatgtataactcttttttttaaatatcaaacaaaggattaacattttgaagtgaatacaaattacaagatgattacaaaactttgtcttaattattagaatttgcatgtatagttatgtatattaaattctaactatccatttgaattgataaaaagaaaaggaggaatttatcatttttatgatttttttttcgtaaaatttatatataaaaaattaaaaaatatgagaaaacaatttaagaataaccagttattttatttatactaagccctgtattaaactcgtaattttttcttttaaaaaaatcattataattttcagtcgagagaattccccaactatttttgtggcatttaacggctaagcccgtcttttattaatatctacaaacaattgcaaaaattgagtcagctatttccaacaataacctaccaaaattattttcctaatattaatataggtatagctagttaattaaattaattagtgtggggaggagatctaattatatcaccaacttactgacccaataaaatttgtttcgactcagactaaacttgtgataggtgaggtagttcagtaaatttgtagctatagttgtgtcctgaaattctttaatgtaataaatcgttagtttaggactataataagtctataattgaatgtctaaataaatagtgtccttcaactatccgcatgtgtgaggcagattgttcgttaggtcaaatttagtttgaggttcttctccaaaaaaaaaaaaaaaaa

SEQ ID NO: 200091 - DNA, 888 bp, Cannabis indica
aagttatatatggtctactaagttaagaaaaactagttgtaatatataacttttgaattttgttttgttgagtgtaatgtggttaaatatatggccttttttaggaaacatataaaaatagttgaaagcaaaccacatatttatttatctatggccttttctttatataaatataatacaaataatacatacgatgataaccaaataaaattctctgtttttgtttttggctttttgctaccaaaaacatccatgtaaaaccctagattagagaagaagatgtatatatatatatatatgagtatgaatgggtccatataccaaacccaagcccccgctgactttttttctttatttttcaagtttcaggaagattgacaagtgagaacacttaaccgtagattgcggcaaataaatataataataattattattattattattatatatattaaaatacgcgtgattttatataaatatttagttaaattatttatttatttaaggtagtgagtgagttagaatattggtggcactgcacatgatgagtcaaagtcaacaaacaattttattagcctaaataaaaaaataaataaaattgtggaaagctaaaaacgcgtatttaagagaaatggacaaaaaggggttttggattgggagagaaagagaggacaaatcagcctaggcttgcgtgcacgtctctacttttgtttaatttttactcaaaagataaaaagccaaaaacttattagggtttttgaggttctgctttttggggcatcatagcatgattgcatgggaatgggaggtaataacaatatattatatatatacctctttctctctctagtttcataaatatttttaagaatcatgaatcttttggac

SEQ ID NO: 200092 - DNA, 1467 bp, Cannabis indica
gatgggcaagcagttgttgacaaaataataattagatagtaatttttaaaaattaattaagtattacaaatttagttttagaaggggtggaagtctaaattttagtaaaaaaaatataattttattgtaaatattatagttaaatggtttacatagttaaaaatattataatagggacttaaataaaaaaattatttataaatattaattgctaaaaatggtcttattaaatactaaaattaaaattaattattttagaaaaattgttaattatgattcatttacttctagaaaatgaatttttacctattggtaacttgttattacagatacaaaaaaatataaccatcatggatacaataaaaatgtactattaagtagtcacctttatatatatttatttttttaaatggtgaattttaaacattcttcacttctttagtattctaattaatcatattatttttatggttactttaaattactttttcctatttttgaattttttctacaaaatatatattgttttttttaaaaaaataagtaaataatattttgaaccctgttttacaaaagttattgttcaaacttctactttattaaatgacaaatcagacgctatatttttttaaatagtacactcaactcaattttatcaaaataaacttaataataacctaactttaaggtgtctatgaccatattgattatatatatttttttgcatatgtttgttctgatagttgattttaaattagtaaaataaaaaaaaatgataaaaattaaactcaagatactatttcgtgctatttgagaatgtttagaatctaatttgttatttagcaaaatagaaagtttaattaaaaaataatatttttttaaaaaataaacttatattttttgtaaactttgctaagaaaaaaaaaaccatagaaaatgaaagcttataagaaagcttcttttttttattagcaaaatgatcaacttcagaatgaaatagaaaagtaaattaataaaaccacatcaaattcaaacacgtatagtctcactgaaataggcagctccactaaatttcaaagctcctaattagaaatggacacttcaaatgtttgtactcgtttgtttcgttgagataaaaagaattattattattattattttgaggggatatgacctattattattatgtaataagatttaatttaatatttccatgattaatctaggcactttctttggccaaaacaaaagcacctaggctattattatgagttgatggaggcagattaaattcttatatgataattattaaattcttatattattaattaatcaaaaggacatatgactaaaaccaacactatacacatgctcacgcatggttaaaaagattacgttttcaacataaatatattattatttttctatatattttatgtatggcatattaatatgatatatatatat

SEQ ID NO: 200093 - DNA, 1025 bp, Cannabis indica
atacatacatatattctcaattatattatggttactttaaaaagaaaaaaagtacttacataatttatccttaatttgataatgtagaaacttcataattatgactaatccttaaaaaagtaatagcattattttcaatcaagtagtgaaagaagggttattagtgaataatatgatgtgatttgtggatttgtgggtcaccaatttgttgtagcattgtggagaaaaaggctgctaataatgttgtattattagtgtagttgtttgttgttggaatgtgttaatacatgtcatatatgtcccaacccaactttccctttttttgttatataaaagtttatattttgagaagtgtctcccaaatcacaatgactgaataaattatctatttgtgattatggtgggaaatcatggaatggttggtaatgttaatttacttatcagtgcatgtgctttatgttagtgactccttgtcctttgatgatatctacactcaattgtatgtggatgtggtgtcaattgtcaaatatctaagtaaacttagaaaatatctgttcaaaaatttgaggtgaagacaataaatgctatctctagctataaaatacctgcatatttgatggacaaaagagtaaatgatccaattaatagagtacttaaactacaaatcaatgactcaaacatactagcagagataccttgatcatatattaacggccataaactaataaactagaagttgaagataattacagtattgattaaataaaaatgtagttgatcatttcctttaataccttatttacacaaagtttaacaaatgagtaatgatatagggatactcacaaattgtatttacaagatattggttaaaatgacaaggtaccaatagagttcaaattaatcacatatattacaattacaggaaattaagctgcagccacaagatgtaaatttcctcttcttcttcttatgttggagtgtcgaggtctaagcacatcttacatcaatttttattttattatttt

SEQ ID NO: 200094 - DNA, 509 bp, Cannabis indica
tttttttttttgaaagagaattatataactatatacatgataaacttaaagctcaaagagcttagctgtcaattacctaacaattttattctatttaggaagagcttagtctaacctaacttaatttttattttttgttgatttgaaatcaaggaatgaaatttcttagaataaaaaccacatattttggatcctcattaactcacatataatgtaatgtcacatcatcctatttgctattaatgcaaataataaaatgtgccatttaaattttaaacataggccaaaaaaaggaacaaaataataaaaaaaaattaaaattaaggatgttaacctagcttaattattatgtccattgaattttctactctttttctttttaggtttttagtatactttaagttttattgcaattcagcccctgattttttttgttggcaataaaatcctttagttttttttttttttttttgcaattaagttcttttaactattttttcacaagtttt

SEQ ID NO: 200095 - DNA, 602 bp, Cannabis indica
tatgtgacttggaatccttgaaagacacactgtaatcgttcaaaaatagtgaagatcaagccaatcatcttaggaacagctcgggaacgtaactcaaattttgggtgaacctcgggaaaatttctagggctttcttttcttttctttgtacttttgtgttttcgtgtttggatctattactaaaaaactgggttttagaggcatttttttagctgatttataaaaaagaaaaactaaagcacccaaaaaatatctttgggttcccaactatagaaaattgatatttaattgcggttatattataaaaattgtatcgatagagtgtacctatttttatagctatggtttttttttctttagttgttgtggctgagcaaaagaaatgagggttaacatcctatgtcgtcggttattagtaaataaccgacaacatatagagtgttaaaatcttgatttctttgcattcacttcttcatcttcattttttatgagaacaaaaccagacgagccacgaaaccctcaccggcatccaccacccatacaacccccatttctttattttccaccattttcactcaatttttttctaaatcttttatttt

SEQ ID NO: 200096 - DNA, 804 bp, Cannabis indica
ggttttcaaggggatgttcgtaaacaagaagacgcaaaaagaattatggattcaacttttgagcaatttggtaggattgacatacttgtgaacgctgcagctggaaactttcttgttttatcagaggatttatctcctaatggatttcgaacaggtttagtaccgatattaattatatagttaattaatatgtttagggacaggttaaaaaaatgaacacataaacttgaataacaaattaaacattactattaagtattagtggtacctataattacttaaaggcatggtcgcctaaaggatgggagcttaggtcccaaatctcgcaattttagaggtattaaaaaaattaaaattaatatacatatgtatgcatattaatattaataatacatataaaaaaaacggtagtatattaatatttaatttaaaaaacaaaacaaaaaaaaaatcaaatgataatgcaataatttaaatatttgtattaaagttttttttttttaaaaaaaaattaaagttttttctgtattattaataataaataaaaagtacatttcttttaaatttataccactgttagcatactttaaaaaaggaataattacataaagcatcatttttataaaaaattacattttcatgtttacataatttttttttatatatatatttttacgatattccataaaacaacatgaaaagaaaaaaaaaactcaaaaaagtaatatgaaaataacatcaaaactacaacaaaaaataacatacaagataacaaaaaatcaaacaacaaattaacaagagtac

SEQ ID NO: 200097 - DNA, 602 bp, Cannabis indica
tcccaccagtatttgagtggcataagtgctaagctaaacgtttatctctacaatgtgtctgtatctcttctatgccattttaagctaatgtgtgaggacgtgaatgatgaaagttaaattcattggcaatggccacatcttgtaaagctagatatttccctcctcaatctgtcttaaggcctttgatttttccttaaattgtgtctcaacaaacactttaaattgtaaaaaagcttcacttgcttctgccttggtttttaattaataaacccaagtgaatcaagtacaatcatcaacaaaatgtatgtaaaatttaaatctattttcagacataattggtgaggatccccatagattactatccataagatcaagaatattttttgctttgctgttggaattttaaaagaaagaagcatgtaatttaccaaactaacaagcatcacaaaaatggttcatttcatttttggtaaatttaacttaaagaagaactaaaacttagactcaggacttgggtaagtaggatgaccgagtctcctactgccactacatcaccttttgaaattcaaaacttaataatcacttctagactaattactact

SEQ ID NO: 200098 - DNA, 926 bp, Cannabis indica
aaattaatattaggtgaattacatactgggagataacccaatgaagatgagttacatggtaggatttggtgggaagtatccaacacaagttcaccataggagtgcctccattccatgggacgggcaccgttacacatgtgaggatggacacaaatggctaaactctaaggacccgaaccctaatattttggtcggggcaatggtggccggaccagaccaaaccgacgagttcttagaccaaagggacaagccatggttcacccaacccactatttcaagcaatgctggcttggttgctgctctcattgctctccatgaccctcctcttacttcaacccattcctctagccctaacatgggattagacattttaggtctttttaaaaatatcaaattataattatttaattacatagttaatgagaaaaaatatgttatttttaactttagatatcatgaaatgaaggaaatttattattgattaaaattttacattgtagtcttccaaaataaataaacggataacatgtaatttttggttattcgatcagtagagaaaagagtacaataatattctctcttcttttcaattgaatttctatacatggtgcatgtatatatgctttatatataagtatatataacaaaaaacttttgtttttttttctttgtgctatacattaattagctaggtagacttgagtcgatccactccatgcgctctctgaaaaaataagtaacaatattgtaaaaactaaataatatcgaaaagaactgtaaatttattattatttaaaacatatatatataggagtaatttattgtataaatatttgactctcaattgtatttaaatttaatttttaacggtaataagttatattttgaaactctgtagatacataaccgttaaatgttaagtcatt

SEQ ID NO: 200099 - DNA, 995 bp, Cannabis indica
tttcttgcaaatccatgcagttctgttgatccaccattcccaaacttcagaagcatgagtgcaataaaaatccatcagcaagtttataatggatactgaattaaatcaattgcaagtaaagtaaatgatacctgagggaaacagataggaattcctcccctcattgctttcggggccttgaagatcgcctacaaaggattaagtacaagctagagaataagtaaattgagcaaccaaactcacctcaaccatcaaaccatataagagtacgtttagttatgacatggattagatcatgtaccattagtgaaaaaaataataataataattacagctaaaaatctggtatcagaaaccaagcaagtatgccaaattcattgtttaaaataaacaagaaaaatcatgaacagaatatggaccaaacaaattgatcagtcaactaaaggatacattccaaccacataatatgtcaactataattatatggtctatctcaatcattgcaaagcaaaattgtactttttctttttaccttactactagtgaaaagaagttcttccccatggtcattcctccatgaagtgacctgtcctccgtacaagcttacctatgttatcaacagagattcattaatgtcaaatctcatagatatataactaaacaaaacataacatgttatataaaggggaagtccctctttaaaatgaggtttagattcttcaattttgaagaccatgttacatagagatgttcttttcaggcaacaaaaaaaaaaaaagattcatacccttgctgaagctccatgtgggctccgaagcacaacttgatcgattccattccagtcttttgtcatctcagtagccgccttattatcccatactgctgctgctggatgacccatttggaaaataggtagaaaaatcttttccttaactctcgacaaagacctttcaaataacaagcaaaattaaaatgggactacaagccatatttac

SEQ ID NO: 200100 - DNA, 922 bp, Cannabis indica
tattaaaatatatcaataataatgatatatcacatcttataatacttgccaccttaaaatgtgtttagcctttctcaattatacaatgtcttatcatattataaaaacaatgctcttatgtaattggtgtgacaccacaatcatcaaacaaccaatgatttaaaatcaaaaataggaagtacttgaaaagttagaaaagttaatgaaatttagagtccgtttggctgtgttttcagtttttaaaattgtacttttaaaaatgagaatagaaaacagtttttgtcattttaaaaatttaatggtgtttggtacaaattttttaaaattatttttaaatttttttgactaaaaaaaatcaatattttaacaccataccatgacatgaacccatccgggttcgggttcgggtatgattccgagtctagatctgagtacgtgaacaaaaatataaatataatatgttagacaaaaaaaattatttttaaaaattgaaaacaacattttaatgtttttgttttctagtttttcaaaactccattttaaaaaaactgttttaaatttttttgccaaatattagtttttaaaaattattttcagttttaaataacagaaaacagtttttaagtcatgaagccaaacaacctcttagtttccttaaaaatgaaactaatttgatttttcaacttaaacctaatagaaatggaatttatggtgtttaattaacacctcttaagtcttaagcaatgctaatgggaatgctataaagaatacttggtaacatagatatatttttgacatttttactagacacttgcaatttgagtaaaaaataatgtctaagtattgatgttgtttttgtgttacttttatgtagttatttttgttgtttttatagagtattggaaaatgtaaaaaaaaaaaa

SEQ ID NO: 200101 - DNA, 1159 bp, Cannabis indica
agagatttaaagacttgatcagattgtctcgtcaccatagaattgaaaagtagatgttagtccataatttttacaatgggctgggcagtactactcgcactctcattgatgctacaactggtggggcattcatgagaaagagtgccaatgaagcctatgaggtcttagaagagatggccatgaacaattagcagtggcctagtgaaagcagaaatttgaagaaagtggctagtatgcatgaagttgatgcaatcactaaactgacaactcaagtagaagccttgaccaagataatgactgctcaagttcaacaaggccaagtgatttgtgagctatgtggagggccacattcctatgatagttttcaggttgatgtaaataatttgccaatggattgagctgaagctattgggaactatcctcagaaccaaaattataatcaacagaatcgtcagcaacaaggtctttcaataaagatacatgcagcaacgatcccaacaatcacagcagccccaacaatctctatatcacactcaacaagaacaaagtttgggtggaagttctattgttcagtctgatcttttactccaattcatggctaaagctaggtattccattagaaccttggagtctcaaatggggtagttggctgctcaaatggccaaccacactcaaggtaattttcctagtactatgaaggtaagcctaaaataaaatagtaaggcaataacttttagaagtgggaagaattataaagaaccaagtgagaacaagaagattgaagaaaaggagagggataaataggtacagacaaaagaggataagaagcaagatgaagagcatcttgcttatgatctgtctagtaaagaaattacacaactaataagcactgagcatcacatcaaaattctctatcctcaaaggctccgcaagaatatactggataagcagttcacaaaatttcttgaggttttcaagaaactatatatcaatattccttttgcagagtccttggagaaaatgcctagctatgttaagtgcatgaaggacatcttgtctaagaagagaaagatggaggatttcgaaaacagtgccattaacagaagaatgtagtgcagtacttcaaaagaagcttactccaatacatatgggctttaaa

SEQ ID NO: 200102 - DNA, 892 bp, Cannabis indica
agctgggatgaaaagaaaattaccatggatatggttttgaatagtgaaagcctgtattttttttttttttttgaatcaaattggaattttattaattcactaaatctgtaatgcaatagggacatcccttttattgaaaactaaatcagaaaaagaacatgacgctcttgtaaagttatgggcgactatattagccgaccgtttaatgaaaaacaaaagaacattgttaagcaaaagaagaagcttatgacaatcatgtatgactaccccaagagctgacaccaaggaaactttgctacgaattgcttgaatgatcaacaaacaattagattcaagttccaccgaatgatagtcagattcaaacttctttttttttttgatggtatgaaaaagactaacttgttaagatgtgggacctttattgcaaaaagtgagctagatttagcatctttgatacagtcttagcttcagtattcctgataggtagtgcaatattataaatatatatacatattttggtaaaaaaatactagtgtgacgtatactaaatttgttttaaaatataatattatgccaaatttaacttataattaatatatttttttttatttttattattatcatttagtattaattaatttaatacatttttttaattgtaatattgtcattattttttaaaaagtatatttaatttatttattatcattaatgataattatttttttatgtgatttttttttttttgagaaaacttgaatactttacttaagaaaagaaaagagtacaaagtgtttgggctaaaatggaaggtaaaaaaccattccaaaaatatttattgtttaattttaaatctgctctaacataactatgagctattttgttatactct

SEQ ID NO: 200103 - DNA, 1136 bp, Cannabis indica
gaacttatgtacaataataacattactatgtcgacataacataccaaaataccaaaatatttaacatctcacgctctcaaatgtttcattttaaagaagtacaaaaataatgaatatatcattgaataaaaacagaatgattcacagcctaaaaaacaaataaattaagcatcccaaagtcaataagaaaagttgtttaatcacacaacttgttcattcatccaaagaacatatacctctaatctatgtgcagctatattggtcgggcaacgaacataaattagggatactgttgaaaatttggacaataaacttatcaaatcatctaacaaaaatccaagaacattaaaaaaatattaccttttattaaaagcagatacaactaataggcaatcagtttcaactatatgagcaataaaatctaaggataaaatccagttcaataccatcacaagagcaacacactccgtttgaaccactgaaaagtaacctaatattgatttagttgcttaggatactaataacacacaaacttgttattttctataaaaatattcactttaagataaaattatttcatatatattttgattacctattttgattaactactttaaatctacgggttttatattttattgttgtattttttaagatacatttatatactttttctttttatgttacctttaaatataattataaaaacttactatataacatatactagaaaaattgatgaaaatattaacgtactaatctatattatatattttgtaaccttcaagtttttatttcagaaactaattttcaaacaatttaatacttgcattgagaaaatttttcaaacacaaattaaaagtgtttgaccaacctaataggtgaatataaacctcaatataatctattttaagaacataacattgttggaataaaattatatccatacactcatcaacaataaagtattgtagaaagaaagtaaaaacatgttgtaggcaaaggtctcatgtcttactcttcttactcaagccaatatgtcacttcaaattttagtgagaagcctttgtgtttgcaattagggttacacattctcccaaaggggatggggcttcgtgaggattcctcatctaaat

SEQ ID NO: 200104 - DNA, 912 bp, Cannabis indica
cgcggtttttgtgtaggagttgagaagccagagccattgtttgcctgtaaaaagcttgtggaagtagctgcatcgcgaggctctttcgatgatattagtgtaatgctaattcaattagggtgttacatatgattccatagttcattaatagaagacaaccagcctaacactctgatgttgttctgtttttactgttatgctgatgttggtaataagctgcaggctaagtaagatagggatgataatgttggtggttaattatatgtagtgattattcatttgtaaatggttttaaatttaacttagttttgggcaattttagctccctttagttagctaagggactaaagattgagacgtagtcagatcactgattgtattctttattctttgattaatttattcttaaccattcttttctatacaaaaattgtattattgttattgttattcttctgaatctcgtaaagaatataagactaactcaaacaggcacattatattaattctctacttctatggaagatgtgataaaagcacttgctcggtctcaattgaccaacttctaataatttcgattaatcttggcaactgaatctttgtttatttcattattaacacatttgttaccaaacaattttattatctctttttcctcatatgttgaccatttatttatatcatctgttgctgacaaaaacaatggaaagagaatccagaacatgtaatatttgaggtttttgactttatagatgatgctttcaaaaagcttttgactaggtcagcaattttctatgaaccggactttgtttttgtttttattaattgtgattaaacgacttgaccggtcctaaataaaacgatagcggcctgttagggtcaagttaattatgttaattttattttaatttt

SEQ ID NO: 200105 - DNA, 1481 bp, Cannabis indica
ttggatgaaacagggatctccattaacgaaaaacaagctctgataccatgtgaagattcagtcaagaagaaaaggcaatcgagagaaagagagaacagaagatgaaatggaaaatgcagtctgttttattgaatcaaaaagtacagtacaaggtctttttatacaacaaacataacaaactcaaatatcaacaagaatcagttatgatcctaacagaacaccaactaaattatcactaatagaattaactaactcattggacagttgatactccttgacatctgaggacatttcgaatacattaaatttttaattaagcatttttaccgacatgaatatatcaagacaatatatatttatatatatatatatatatattcggtgatgtatttaatttgggatcctttgttaagcgagagttcaatagtcacttttattataaattgttttcgtattcatgttactatgttacgtgattaaactgcttaaaatataagtatattataattactaatatttaatataattattattaaattaaattaggtaggatttgatatataattacaatagttatctttagagattagatatgtgcttttaaatatttctcatataaaatacatgttgttttgaatgaaaatgtagtatccacagcaatcacgtaggtagccgaaaattgatctaggtacattgagcatagaaagcgttgaatttatatatataaatggatcgtggacatgttaagaccatttcttggacgacaattaagagagatcaaagcaaaatgacgatggtccagctatagtacacttatactatctcctccctcctctactggacgaatcctaaatgtacggccgtctgagttcagtaaaggtcaattttcttcattcaaatacctatacccttatcaaaaaaaaaaaaaaaaaatacctttatctttttctaatttatgttcaataaactagttcattgttgcttaataataagttgaactgctctttaagtagtaggccatatgtacagaaaataaaaaagagaattaatatttattccaattttttgagttgttgtctaagtatatattatcatttcaatgaatagtttagaaccaatatgaagtcaaactctagttactctgcaaaacaaactaatgagaaacttaatttatacttgacgatattgaaaattaataatgtagtcaaaattgcaaaactggcatcgtgtaataatctataatcatttgatagtggctgctctctctggtattaacgatcaccacaaagaaataactaaaagagtaatcaacaactaaaagtagtttactagtaaaacaaaaatcaacatttgtgtcatgactaagaacttatataattattaatatttggcacaagatgaatagtttttgtaattattatattttataatagtgaatatatatgagtaacaataatatataaatatataaaataggtaat

SEQ ID NO: 200106 - DNA, 1342 bp, Cannabis indica
ctcttcttcttcttctttaaattcttgcatcttcacacacctcacaacaacttgggtttaatttgatccatgaaagcaaagtaagaaaaggctatataactttttagtttttacccacagacaaacctatttcttttcacctataaagttctttccttttggggttcccataccccttttcatatactaacctcagcagaatcttcaaatcttgtcagccttactattactttataacagaatacacaatgatcataaagctattttcatcactagtaatcttcttgaatctattgcatgtatcaaattggctttatagtttatttttattataattatgttgccaccttaattaatgatatatagactgaaaatttaccaatgaccagtcactataacaacctctgatattattataattgtgcctctatttattagccatgagaccctagataattcatacactttactaatcaaatcccttcaatttaattttaataccttttcttttagcaatattgccaccacagttgatgttttgagaataattattgatagttttgtgaataattattaaattaaaatatgtgatgagagaataatatactataattaacttttagttcatttaatttgtccaaatgatttgatttttcttcatatataatttaaagagtgtagagtgcaactatagtttgtccatatagatatcataagtttttttcttctatattgcatgttgtatataaaatatccacacccgaacaaatttttattatataaaaaatgaagctggctggggctgaggtaaggcgaatcaggtcctaggcacacccaacttaagggttcaaaaaaatatatacgttagtagtttttaaaaatattacatatattttaaataaagggtctaataatttttattttttaaggtgcacccaatctaggttcggccttgatctgaagttaaaattgatcaaactaagcacttttccccttgtgctaaatattaaaatgaaaagccaaatcgattaactgtctatgcatggctgtacctgtaataaaaaaacagttgaatagataacacaaaaaaagagatttattatttttcaaaaaaaaaggataaataaaagcatatgaaaatttattatatttcagtcacttgtcgcatgatatttgatattctctgactatctcactaatgaggactttataatgtatatatagaattatatgcgtatatatgatattcattttaagaaaatatacatcacctggacaaaagtgaatttatattaaaataatagagtcacactacaaacgaaaaaaatcaaaaacacaaaaa

SEQ ID NO: 200107 - DNA, 1743 bp, Cannabis indica
aatggctaataaagcaggggaggttattcaagtccagaattcagatgtatcaagaatggtggcagatgggttctttcgatttcgggtatggatgtcaattactaaactagtgtgtcctggtttacccttgccgtactcaggaaagaaaatatggattgctttcaaataatgatgaattgcaatttatgtgctttaaatgtgggagaattgagcatggttttaaagatagcaacaaaaaaccaatcaagattactatggatgagaatgaagaggtagctgcgtatggagtttggttgaaggcggataatgggtgtagatatggatttcagaaaaagacttggcacggagcaatatgatcttcaaggagaacctgtgaatcagaaaatcaatggattggagaatgtacactaaagtctccaacccatttggaccagttggagaaaacgatgggggttgaacaaatgataaccgagctagaaatccaacagaataggatcagaatgataagggggcaaagagcaataaccaagaacatagctcaggtcatagagagccgaggggataaggaaacagtgcaagaggatggaggcaaagccaaacgaagactggtggaggacttggaaggggtaggatatggaaagctgaaaaaaaaaccaacacttctctgtacaacgagatgcaggaaaaaggcctttacgacatcccaatctcttatgcagaagaagcttaattcttgagcgaagcaaaggcttttgtggtaggcagtggctcaaaggacgtagctaataaagaaaatagaaggaaggtttcagtgaagaaggattcaaaggcaaaaaaggggaagatagagggtaaggtggctggagcttttcaggaaggagattcggtagcaacacaaatcacgaaagaggcgcaccctgaagttcagggtcgcctacaaccatgaatctcttactttggaacgtccaaggattggggaacccttggacggtctgttccttacattccgttgtgagtagttacaatcctaaggtggtcttcatttcggaatcgagactgaataaggctcatgctgaaactttgcgagttaaacttggttttagtgggtgttttgtggttgaagctcgggggaagagtggcgctctcatcttgttatggtcaatggatgttgagactcaagttctttccttttctcccttccatattgattcattcattagaatggaggaggggaaatggtggagatttacgggtttctatggtgatctggatcctactcaaaaaattcattcatggaagctcttgaaaagactaagtaggatgtatttagggtcgtgggctgtgggaggtgatttcaatgaaattttaagccaaaaagagaaaatgggaggctcctctaaactgagctatctaattaataacttcaggaaggctcttgactcatgtcaactaagggatgtgggttttgagggaagtgaatatacttggtgcaatggagaaaacagaaccttattttttaacggcttcatcgggtttgtggcaactcggattggtttgaaatattttcccacgcaatcgtaaaatgtcttgatcgtattaactcggaccattgccctctcatccttatggaaaaggacccctctctaagatgcaacacacgccaagatggatatctagattccatttttgtagagtgcttgggcagatgatgaagagtgtaatgagattgtacagtcagtttgg

SEQ ID NO: 200108 - DNA, 568 bp, Cannabis indica
atattactaattaatagtaaaataccacttataaaaagaattaaatactaaccaatacaaattttagtggtggctaacaaatttttctaatattatttttctaaattatataatacttaattacactaaccaattttttctctttatttatttatatatttattcagacaccaaattcattctctaaagccatctctctctctctttccctaatcttcaatctctcattctctctttctcttcgggtcttgtaaacacagataatcatcaactcaaacgacgaggccatctgcatctccatttccggttctgctcttacctttttcttgggtatgtattgttgttgtatgcttactttatatagaaacacataatatagaatgtttttttgttgttgatctgtgattgtttggttggatcttgttgtttattagggctctgcagatggcgtccaaaaggatcttgaaggaactcaaggatttgcagaaggatcctcccacttcttgtagtgctggtatatcatctttacctttatttatctgtctatgtatgtttatatatatatata

SEQ ID NO: 200109 - DNA, 1099 bp, Cannabis indica
aattagtaactacatccaatctccaaaaaatcccaattatttcgaattttctctttttggaataaaatttttacggaatccccacgactacaatctaattttctctccaaaataggatcacaattcgagtctaacatagaagtacaaaggctccatttggagagttaaatgccggagcccgacatgacgtagtgggctcgaacataggtccatgtttcaagcccaataattctgagccctataggagagatgatggagggcacaagtggcttatatatggccgagtgtgattaaatgactacatgcattatacatatggcaaaagaggatccaaatttttaatttctagccattaatacatgtgaattcccactagcatgtatatagatattcaaatttcaaaaaataagagagaaaggaattagtagggtacataaatctttcaagctcttatactatagttttctgatagtaatttgatagaataaatataactagatagcttagggaacaatatcctatatttatataagcgatgttttctatcaaaatctttgaaacaattcatttttaaaatcttttggtaattaatcaaataataaaattagataacataaatgaaattggtaacaaaaataatgttgaccattattaaaatattttgtcagtgaaccaaatattaactataacattaagtcaattataatcaaataaatatattaattataatataatcaaataataataccgattgtatattttaatattctccaacttggtcgatatttgaattaatgtatatcacttaagctcaacaattatccttgttaaataataattatatgaatcatgacaatagatttttttttttttatgacgagtattatcttctatgtattacaatatatttaatgatcattatgtatatttaaatgatacccctataacaaataataaacctccaactaatttgtacaaaaaatattaatattctccataaatacaaaaaatatcctcctcatttgattatctctctctgtctctcgctcttcctcgctctctctttccaacatcccaccaaactgttggaatttatttt

SEQ ID NO: 200110 - DNA, 1484 bp, Cannabis indica
agcaaagagagaacacaaaattcagagaaaacgtaaaaacaaggttaataaatatgagaagattgaaactcaccagatttgaaagtaaaggaaacgaaaccctaggtagctctggaagaaagtaacagaaagagagagaaagagagcgagagacttatgaagagagagaaagaataagaattgaattgaattgatttgaagtttcagaatgaagagagagaaagtgtagtagtgagagggaagagccagaattttacgaaacaataataataatgagtgataaaacgtcatcgttttggagttggaacccatacaaattttacgtaattttaacgtcagaggaaaaaaatttggcaagtggacctaccacttattgccatgtgtcacacgtcttttttggcctttttggcaaatttcacgaaacctctccccagtcccgctctctttaataataattttaatttttaagaaatttttattgaataattgtacaatacaccatttaccaattatttttatttattttagtatttaaaatatttttttaatagttatgtgtgttataattattttaaatattctgtaaaattataaaaaaatattttaaaaattagaatgctgaaaataaaacataacaaacatgaatattttaaacagtgtgttgcatacgtgaatattttattttacacacgtgtaaaatagaacattatttttcatattgtaaattattctaaatttcttaaattttataagatattttaaaaaatcataacaaacatgaatatgaaaaacaaaatagattaagaaattcttttgaatgccgaaacaagtcaaaagtactttttttttaaaggggacgcatagtaaaagcacccatttttatttattattattagaaaattcttagatgcaccttctttaaaaatttttgtaatattttgaaaaatacgataaaatttaacacgctgaaaataatgtttaaaaaatttattacatacgtaattttttattttatacgcgtattttctaaattataaattattccaaaaaataatagcatcccaaaaaaaatatatatgtatattttagttacgatatatatatataacaaaatatatatttatttagattaagaatttaaagcacaccgaaagtttttttatttttttattttttttataaaataatttacgctcttctcattttaaattttgattccccattaaactcattgtatgggttacaattgtaaaaggatctaaaattatttattatccacgtggaggaaatagacaataatgtctcaaaaaagtcaaacggcgccgttttcaatggcatttttgtgcttggctgttgggtaatgtaagctacgacgtcgttttgggtttgtaagtttacgtttgtttgtaaatggcggagtgaatcgcggtaaaatcacacgtgtaaatttgtcaattggtcagaaatataataattatgcaatt

SEQ ID NO: 200111 - DNA, 504 bp, Cannabis indica
gagaagaaaaatggaggagagaaagaagatgaaatagtgttacatgaaagttgtatagtggcttatagtaaactgtttagattgtctagcttagtaaacatgaaatatcattggctaaaagattatcaatgaaatgaatcagaattaggagtcactacataaaatatatatatatatttatatataataaatatacgtaaatgagaatggtatatcttttgatgtattttgtggtgttcccatttatgtgggatggagaagaggaaagataaaagggtgagttgtgagaggagtaattttgaaaaagaaagaataacatattttaaagataatacataatgtggaatgttttcacctctaagtatagaaactcaaatttcttacttttgatgttacctgaacacttagttgtttgtgtagcgtttcgggttgcttctaaggccttctttatgcaagggttactacattaaaatcttcatggaggcgaaattaaaaaccattttt

SEQ ID NO: 200112 - DNA, 865 bp, Cannabis indica
attgttgattgtgaggcaacatagcattggcattatgaagatcctgcattcattgttttgttaaaaatggtagaatgctcaaaataaggttttctttatcctatctagacaggtgaaagaattaataagagagttatgtcaaaaaagaatagagttaattggggcaaatttgtatattatttcctttttgtattgccaaaacaacttttgtggccataattaagaaaaaaaaaaaagaaattaggagttaaaaaaaaaaaagcaaaaataataagtaagccacccgaatcccttgccacatttcccactctacatcaagactaacactaattaggagttaattagttgaatcatgtataattttagaaggtatcgtattaaatttcttatttttcttggcaaattatttggtgaataccttacccttaaattttttctctaactattgtttttaaaacaagtcatgtgatttcattaagcataatcagctaccaaaattgctcccgaccttaacagggacaaatcccccattagtaacacaaccaataagtagactgagccaactagttggtggtttctctttcgaatcgtttgacaaaacaaatagaaacattcgaaagaatctaacaagacaattggtttctacaaaaacttgcacaatcacaagacaatcggtttctacaaaaacttgagtaaattagtactgttgtaacgagtccaaatggtgagtgtgtaactttatccagctaaggagctctttcaagccaatggcctctacaacatgaggctcaactcgccccaaatgattactctatagtagcttctaataacatgttgacatgatcttaaactattagtatgccac

SEQ ID NO: 200113 - DNA, 1373 bp, Cannabis indica
gcctctccactttgtcttgctggaaaacgagaaggtcctagtgtagtctaccacatcctcctgcatctgtggccaatagtacccatgctttaaaagggcatgtgtcctatgctacccctgatgacccgcctacaacgtgtcatcacactcactcatcaatgtcctcctcagatcgccggcttttggaataaacaaacggccacccttagcccacaagagatcatcctctacccaaaattgagttgtctttgcttttcttgcaagagtcatgatgttctttgcgactgggtccgtcttcaagttctccttgatgcgttccttgattggtgtacccatccagctagctgacatactcgctaacacctttagagtcgccaactctactttacggctaagggcatcagctgtctgattgagacgacctgccttgtgcacgaagtagaagttaaattctgtcaagaattcttgtcatcaagcttgcttgggggttagttttggctgcgtgaggactaacagtagtattatctgtctttaccgcaaacatcgattccaacaagtaatggcttttacgcctgtagacaatgaataactgttaggagttctttctcctatgctatataccgcttttctgctttagagagcttatggctctcaaatgccacggggtggccctcctgtatgagcacccatcccaaagcgtaatctgacgcgttcgtttgtacttcaaaagacttgcatacatttggtagggctaatacaggattttcaatcatgatttctttcaaactttgaaacacttcttcgcacttatcagaccacgcccacacaacaccatttttcaagaactctatcaagagtgtcgctcttctcaaatagccctccatgattcgtctatagtaattggctagactaagaaaaaagcgtaattgtttcacattggttggggtcgttcactcttggattgcccgtaccttctccaaatccacgcggatcctcccgcgttccacgacatgacccatgaacttgatactttcttgagcgaatgaacacttctcttgcttcacatacaactcttcttttctcaacttctggaacaccgcagtcaagtgttctcgatgttcttctgaagtggcgctgtagaccatgatatcatctaagtacaccaccatgaaattatctaagttagttagaaagaaagcaactaaaccagtcttaactatattaacaaacactaactaacagtctaggtacacttaacacttacatttatatcaaacttattttttccatttactttgtcttgatcattgaaaagttcatactgaagtattattgatcgcaaaaggaagacacatcaatttctctctctctct

SEQ ID NO: 200114 - DNA, 503 bp, Cannabis indica
atgggccctcatttacaactaataaaccggcccacggcccacggcccacccttccaagggccccaattacagattgttaactacactcaactactgttcgttctatgactttggacttattacataggttagaaaatcttaaagtccacaaatatctaatttagcatttttatggtcaaaaaaataatattcaatctttcttctttttttttttttcagatttatcctcatatataaaaaatattggtagatttgtgttttgctttatgaacgagcacatgtcactacacatcggcttagtttatcgggttttgagttttcaggttcaggtttttgggttttgagtttgtgctttataggtactgaacccgcccatgtgagggaccaagtttttgggtgtcaggctcgagtgggtcgggtgcaggttgggacaggtctgggtgggttgagattggatttcgggttgggctcggccttttgttttgaaaaatatcacttttttc

SEQ ID NO: 200115 - DNA, 1462 bp, Cannabis indica
gtgtagtgtttaaattttaattgatatgttttaagaaaaaaaaaaaaaaaaacaattttagttatataaactaaaaatcccaatttaatataataacataaatttatatacctaattaagagattaagtcaataagtggagcataggataaggatattctttaccaataacaaatgtgttatctggtgtcgattgatttggttattgttttgttccatgatgtccaaaagggtatccaaaacgtcatcgtttttaacagagtcggaagattcccttagcttcaacctttggttgatcattccttccataagtagcaatattctgctaaagataatcttcatgcgacgccttataccaaaagggtcaatcttcttaagcaaagggaaatagtcactcaagtttggcgtaccagcctccttcattagatcccaagtaatatccttgaaatctctagctaattcagattctgaatcagccaaatccacagaaaaaatggtgtttgacaacaaactaagtgtcgaagtgaaagcggcactgccaatatcgatagcttcaacactcaaactactctgttccactttttcaaaaagctctttcactttcctccgcctgagttcttggtttgtatccaaaactttgattgcaaacaattgagtgttacagatctttcgaaggtttctccacaggttagagactggaatccatggaaggccaacgttttcatgaccgtgaacatagagcgcatccggaatagttcggttggacaagtagtggtcgtgtgtttgaaggacttctttggccatcgccgatgaagaaaccacgatggttgtgacttgaccaagcttgaggctcattaaggggccatggagcttggcaagctcatacaacgacttgtgaggtttgtcaccgagttggtggaggtttccgatgactggtaatggttttggacccggcggaaggtgatcggaactgggtttggatctcatgaaagattggagggctcggatgactgcccatgtgaggatcagatagagaatactactccaccacaattccatcgatatatctatctgtgttattttttctttttcttcctcctataaccattaattaattactatttgttagtcatgtgtttggttggataaaaatttggcctcacttggttattattattgactatttcactttacgtgtggaactggaaaagttaaatagggaaaattcatttaaagctaattaggaattttgctctaactttgacatgtattaaattatgttcttgaatttttaaggtcagaactattgagattattggatttaacgacttttattcaattttaataaaatatggtctaaaatggatgaaagtagaggagcatgatttagtacatttcaaaattcgagagacataatttggtatgtatattaaagtctacagagcatagtttagcacataaac

SEQ ID NO: 200116 - DNA, 1165 bp, Cannabis indica
tgaaataccagccaccacaaaactgtgatgatctctaatcattccatcaaatctaaatttgctttcctcttcaaatataaatattcacattgaaattatcaatatctattttaaatcatagtcatttaaaaataaaaaataataataaaatccattatatatcaagaaaaaataacatatttacaaaaaatataatagtgcacttaaaaaatattttttatattgatcaaagtttaaaaagttatttactacaacaatagagtttcataataattttagcattatttagggttggaaccaaaatctagatccttttacaataaaaggaaagtcctttacagggaaatcttctaatggccttattagtaaggtattaattgtgaattttttgttgcttaataccataaatatgaaatgttaaacacttagttcccttagtccagcttaaagaccacgctcagttaggtggtaagtgaggaagagctgacttatttagtcttgatgtgactagtggcaaaccgattaaaataagagtttagagattaaataaaataatagaaaatagagatagagatttatacgtagtttgtagtccacgagtcaatcatacttggcgaaatcaccttgatgtattacaatggagttcctacaagcttaaaaaccctaacttctggttatagtgtttacacaatgaatttctagccatttgcatgagagtataaatgtagtgtttataggctaggatttgagttcgggtatacccgtgacacgctagggtttacatgtaaacctggcccactaatggggtaagtatatataatattttgacattgggcccacggatagaggttggcccatggggcaaagttggtcaatatgcctagggaccacgtgatatttgacagatggcttgcgtgcgtcgctactgtgtacaatagtgttacaatcatgaccgtcaggcaaaaattagtttttcttttggtggtgcgcacactcttaggctcagacataaagaacaatcccctgattatgtggaattcggtgtgagagggttaccacgtcatctagactaggtcttcgtggctcctcttggaatgcacttctaaatgtatcccagatgctcatccaaagggtcttagttgctccttcttgtaagggcaggatg

SEQ ID NO: 200117 - DNA, 859 bp, Cannabis indica
tctctctctctcaacaaaggagaataagaaaagaaactgttcaagattattaattgggtgggtgcaggctaatattagtttgaatctgctttttgtactgatataggaaggaagtaagatataataaaaagcagaaaatatgcaatcgaacagttctgattcgtcgcaaccacaacagcaacaggagcagaatcaacggccgcagcagcagcagcagcaacaacaaccacatcctcagcagcacccgcaatggatggcgatgcagtacccagcggcggctatggtaatgcagcaccagatgatgccacctcagcattactcgccgtcgccgcagcactacatggcgtaccaccagtatcagcagcaccacccacaccaacagctgccgggatctggcggcagtgagaataagactatttgggtcggagatttgcaccattggatggatgaaaattacctccataactgctttgcctcaactggggaggtaatataatttttactttttttttagtgttttctttgaaatagttattatattaaggatgtgtgctagtgattattgttaggtgtatatttacagaagtaaaatccgccttttgactgcttatttgtttgtcgcatattttatttttccttatacgaacaattgtaatatatatatctatatatatatatttatatatatatatatttgctgaaaaaaaaatcaatattttagtttaccatataaaaataatgatttgttcataatttcaaaatgtcagggagctagcgccatagctagctatcaattgaaacgtgtgagtttagagtttgatttagggtgaaatgtgatgagggaatgtaacagacatat

SEQ ID NO: 200118 - DNA, 923 bp, Cannabis indica
atacatgggtctagctagccattgcagtccatagaggggactgagcgaccagaactgactgtttaatattggcattgttttgctttgttttcaggccttgatgaagttgagtttgtctcgtgacgactctagatggtcttcaaatgctttccaggagcatatgaaggtcttggaggcatctattgctgcaaaagacaaagctaatgccgatttggaggtcattctagcagacaagcaaagattagtatctagattgaagattatgttgagtgccaggaacaccgagaacacaaaccaagttgctctcatttctgggttacagaatgatcttaaggaacacaagaagaagttacaggaggctcttaattgctagtaggtcattaaggaatattacctttatttgtcctctgaacttacttatgagttctgcctgcacaaccctaaagctgagcttttatacatgggaatttcggcctttgtggattgagcactagcccgtgggagggcattttccgagagccagatggagacggaccagatcgtgacttatcgagagaggtcatcatcaagtacccttgatgacgtgttggccgacctaccagtggaggaggtggccggccaagatgttgcccatcaggccagcaaacatagtgatgatcggaccggcctggactctgcagatcttgacttggcggctctagattggctcctactacccccctacacacatgtagatagaatttttattggtattcaccattatgttggtattgtatagactgtgttttcatgttctacattgcctatggtactcactttgcgttccttgttaaattgtatgtcctatgtggcctggatcctttttagaagactattttcatgtcctgtgtggcttgaggctttttaagaacattactttattt

SEQ ID NO: 200119 - DNA, 1866 bp, Cannabis indica
aaaaaaaaaaaaaatcaaaaagtcggccagaaagcattttcttaaattgggcatgtgatatataaatgagaatataagacacaatcagatttattacactagcttgcttttccaagtttaagataatgttagaaattttgataataaatagtaataagttattatataataatgatattattatgactttcatgcatgcggcatatatgcaatttataaaatgtctccatcacaataattattttctggatttagtattaagtattccacaccaaacccaaccattgttgctttctgctttttttaaagataacaaaaagattattaatccattaataataggtcacaaagtctaattacaattgaagataatgctccaacagcaaaatcaacccaatttatacttaccaaccaaacctaatagataacttatactaatttcatcaatttcaattttcaagtcaaaagtagtttattatgtattactaaaattaatataggattcagtatatacattcaccatatagtttcttgaaaattattttgtaggatgcttttggtaggagaggcatcttcgttttcatcataaataacgtgtgtatatatatagtaataacatggaatatatgaaaggatatgttattttttttggtattttaaattatttgtattttttaaaatttttagataaaagatgtgtaattacaacacacatagctataaaaaacattgagaaaaaaaactacgatatgcattttcagaagtaaatattgagaaacatgttaaaatagaattaaccctacgtagcgatctatcagtatatattagaagtattttcttaacaaattttgtaattaacaaacatatatacaataattttttcatttaaatattggttaataaaaaaatattagttaataattatttttgaactttgaataatttcaatttttctttcctgaatgtatttgttaagaattaattaagtggttgacaaagtagaatgaggctggtgtgtaataaaaataaaatgcaatgtgatctcatctaaaaatgaaaaataattcatacatcttaaatcgtatagtatatcgtattacattgtatagtattatattaaattatattttatgcaatatttttatgtaaaattatatatggtattaatttttatagtcacctaaatagataatattttagtataaattaaagtttaacatagtattatataaaaatatgattcataatccaatttaatataatacaatataatctaatacaacgtaccaaacgaaccctaaaagaattacacaaagtaaatctttatacttttttaataaaaaaataaaataaaattaagtgaatattaattattaaatcatgtcacaacacaaaattagaaaaaaaaaaggtaaaaattaattaagccggccctagctttgactctttaatctgttttttatatgagaaatgctaaaaaataatatctaacaataattaatttacatgatccactaacaatttatataccatgatactagctaggcaccaataccttatagcaatattttttttttaatatattcatttgctctaaattagatgaagcagttggcttttaagattgctctttttgagccaacttgcaggcaaataaaataaaaactgatcgaatacttgcatgcataacatatctttctttttgaatgattacaatagaaaaatttagctcaatatatatatgaaacactttttaatgggtattacccatgaatgattactaaacaaatttaactataaatataattttaaaatatcaaaccatcgaattttgatttaataacgaataatgaaatcacaaatttg

SEQ ID NO: 200120 - DNA, 1377 bp, Cannabis indica
tatatattcttacttgagttgtgctaacgttcctaattgacagactttaattttctatatatatatataaaaaaaaatggagaaaattacggtaaaaatctatatgtaattcactttgctgtgctaaaattcttatgtagatattttttggtgacaaaatttttttattgagtttaatttgttgcacttaaattaggcgcattacacatttgatgcaatattaatccctgagttaattttaaatgaaggaataatattgtgacaaaatgattacataaaaattttcactgttaaaatttatattggaatttaagtgcaccaaaatgactatataatataggaatttttgctaccaaaaaacaaacttacatgaattttaaagtgtaacaaagtaaactactaaataattccaaaaaaaattataacaatttttaactctaatcatatcaaagcaagtactcctaaatttttttcaaaaatatcatatctaatttaacactgttcaaaaatatcatatctaatttaacactgtttaaagcttcagtaggactaggagcaagttttggtgttggcaattagagctaatcaattttttttatttatttttttctaaaagaaaaagaaaaagttggcattattgtgccactgtcagtcaattgttatttcacaaaattctcattctcttacatccacatcactcattaatattgagaccaccctatatttgacaaacttatgtagcacctcccattgttaatggtcttatgtgaatttatttatttatttatttattaaaaaatactactatgaattacaataaataccatctttttgaagtgtaggatcattggcatccccaccatacaagtcccctatatattatcacttataaaagttaagaaaaagattgattgcattgtatcctaatatggctatatttatttgttgtgatttaacacttcagctgccttgcattatgtggcttgcaatttacaaaccaaagaagttcagcccgtcttggttgataaactgggtaagtaaaaaaacttaaaagccacaaggctctctaatcatgatttaactctatataataaaataataaataggaactgaaaaatgtatgtgatataacccaaccaaccatgattttcagatatgcatcacattgggagttcttctaatgattctatcacccattggaggcatggcaaccatcgttaaacaagctaaggactacaagttttactcttaggaaaaattatatatgtaccaaagagaataaataaggctcttctgtttgttgtgtcacgtgccctattatgctgaacttgaatgtaatgttgcatagtgcatatatacattctataatcaaactta

SEQ ID NO: 200121 - DNA, 1770 bp, Cannabis indica
tgaattctacgaccaacaacaaaactaagaacttctcgatgttcccttggatctaattgaggaaaagtttggaggaatgtccaatcttttgatcccaagttacacatgaattgagcaactctagttaggatgtcaaaagctagagaaggcctgtctttactcactttagcatgaaaagggatatatagctcgaacagatgacccaaaggtccttttggagttgttttggtctgctccttgaatactcttttttgtgccttttgtaggagatgttgaaggagcaatgcaatgaatgggagtaagaagggaaagagtgtctttttggcaggaggaggagtagtcgagtttgagttggcttgtttccttggttgttttttacccttatggatattgagggagggcttaggatggaggcggtaaaatcatcattgtccatttctacaaaatcataaataatgtgtatgctgttgctatctatataatttggaagaatagaaatagaaatatatttgattgagtttttacctcagccagaaatatgagtcttgaaattaggaaggttgctcaatctaaaattttgagtataaatctttataatcagtgtaaaaagtcatgcaaataattaagttattcctatttaatgaactatcaaagaaataatctaatggcggatgaagtcgattatctatatgtatgaattttatataataagcagatcgatttaattgacatgtaaataaatatttaacgtaaattagtaggatgaatgctacttcggtagagaatccctaactggtttttaatggcacgagttagtttctttgatgtaactttagggttgcagttacatcgtaatgacagagatcccttccagcaaactttgctaaaaagggttttccctatggatgcccttcaatcaacagtactacaccaggcttgattggaaactgagtggccactgatgagactaatggtctcctctcagccactgtcacgacgtgatctcgcgatgtcggtcttcgatcagcttcgtgatgcagttaaaagttaggggaagtagccgtcggtaatggatctggtcctcacattagcatcgacaccggagtcatgagctggatagggtcgttatatcttacgacccttcatgagttagtcttcgtaactgcatcgagtcttagcttctttgcctggccccaacacctcttgtacctcattgtgtctgcatagttatgccttaatgaacgatagggagcatgagcttgaggatgccaacaactggccatccctccagggagttggctggccatatctgagcttttaggggcggacgtgagtacaatgagtgttttaagaccatacgcattcattttctacaccttctttgagcagtcgagcgtgtaagccttcggtcttaacaatacccctgaccaagaccctcctgacctttggccagaccttgaaaggcagtaagatggccttccttctcttgcacaggcctttctttttacaggcatgtgccggtgaccaccatgcatgtttctttctctttctacagctctcaatgaaagcaccaaaatatttatcgaggtttttacgaaactaaatatctttagagcttaacaaagtaacaatgatataaataacagaataacaaacaagatattttgacgtggttcaggcactaactatccttagtccacaagtctattttattaggctcatcgaccagtaatcgtttgtacaagtagagatacgatggactgaaaactc

SEQ ID NO: 200122 - DNA, 631 bp, Cannabis indica
cttatcgaaccacttgagctcttttactcttttccttttaacttactcaactacggcttgaattccagaccacttgcacacacttactgaaccattggagctcttttattctttttcttttaacttactcgactactggagcttgaattccagaccacttgcacacactactcaaccgctggagctctattacgttttttttttaacttgtcaaattaaaatcctctttgatttgaacttctaattgcctaggtatgtgaattcttataagactactgtgaggtatctcacttgattttcttctcttccctttatttttctgtttcctctctttctaagataatatgtttttctatatcttcctgttcactgtcattacaaaagtttctaatggaatgaaacaaaattacaacataattcacttgccaaagcaatcaagtctagaaaaaaataggagctaaccttccatgttttgagacctggccgtcgaacaagttgaggaagttcattagagacatccaatagttcgacagactctccacatttgcgcaaaatctgaataaagaaatccatggttgtcagttcaaaaaagtataatttcctggatttcttagcttttaatgctcataat

SEQ ID NO: 200123 - DNA, 1004 bp, Cannabis indica
tgcagtacagttttaaaacaaaataaaataataaaaaaaaaaaatagtttggaatatatagtaacaaaacaaataataaaaaaaaaaataatttgtttaaatatggccactaaagttttaaaaaaaaataataaaaaaagatataatttttaattatgtaaataattaaatttaattataatatttattaaaaaaatactttttatttaccacatataaaattagagataaagagaaaacgtaaatatagactcatcatataattttctggattcggaattctttttcataagttgaccgcgattcgtttctgttaggaaatagacatgtaatattaagatgagaacacagacaattgtataattgaaataatcaaaataacatgtatatttcttgctacgttgacacaaaagaatattttagagactactactaaatattcacgctaattttagtagaaaaagtaattaaattatttatttttctttttcaacttctaatttttggtgatactttttcaatatttaccccataatcattaattattttcgaacaatttcaactgctgatcgttttttcttaactttttgtgcgcctatgccactacatattaggaatctatagtaatttattttttttcttccatttccaactctggtatataaagtatatgtgtatttaaatcataggtagtagtggtcaaaatttatcactattgtattaatcattctactttttagtctacgttaatgtaaataccaagtcaaaacgcataattgaaaaggttgagtttggtaataaagtgggtctacgataattaattaatcgccggctgccgattaattaaggtttggtaacattgttaaaattatagcatattttgaaaagggataaaatctactattattaataatactccatgattggtacgaaactaacattaattcgtaagttgttgatgatgtgatcgtaaatttgtattaaacgagcattgctattagcta

SEQ ID NO: 200124 - DNA, 2135 bp, Cannabis indica
cattgcacgtactaagctccctgctcaactactaaggcacaaagagctccttagctaccaaatcacctcaaggacctgattggcacgaactactaagggacccaattggctccccatgtgtgcccatgatgatccgagcctgctaaatgcaaaagacacgtgctcttagagctattctaagaatatagtcaaaaaatgataattgaagatatatttattttttgaatgattattttattattattttgtattttaaacctaacccgactatagttacgggaaggtggacctatggttaagggattttaaatcctagataaaaatgtatataaggggagtaaaattattataaagggaccctgaatttgatactcacgaaatcattctcttgagctttcactctctaactctaacaactcacttgaagaatgagctcttggagaacataactctggagaactatcctcaagcattgagatcaataatactccaagtggactgacctattaccgccgaaagagggtgaaccactataaaattctcgtattcgtctttgttgaatttacttttacaaaccagtttactctgattaattattgcttgtcttcatcttatttgtttacgatcttcttagatctgctgacgaaaaaccgcatcaacactaatattttgggttgaaaaaataactgcatacaaaaaaaattgaagaataaggtaccaatatatatataatgatggatgatttttaaatactgatatatataaatatatttatatactgatgttatgtaaaagttgatttcattttttcaatatcaaaagatatattgttaaagaagattcagtacaccatccttcatttgtaactaatttcacttgatcaaatgaaaaatcaggtatggactattaattcagttactatttgcacaaaatagtaactcgatcaacaagactttaaaattttaaaagcaaaacaaaatcaataattcactagtaaaattttagagaaataatttttaaatataataatattaattatatataagtttatcaatattagattattaatttttttaaaaaatatttaaaaatattaaataagttaattttaaataatattaacatatatatatattcgattttaaaataataatatcaactattcatgaaaaatattacataatataatatatattatatgaccatatactttttatatgtgttgaaagattataagcatatatatttcattaaatttattggtttagttatatgtttatatacaattaggtaagtatttaggtttagttatatatttttatataagtaaggtatgtttatagataattaggtgaatgttacaaaaaaaaaaaaaataaataaataaatagttgatcgggtcaacctgttgactcgcccaacctaaacctgccagcccgtgacacataattgggcgtcggatttattctttcacgcgaaacttgtgaacccaaaattcgatcaacctgcccgctgcttagtcctagtatgtacacatgtgattttgtttgattaaaaaaattgttaaaaaaggaaaaaaaaaatggctgctttatatatatatcatgtgtatgtatacattaatgagcttgttctttttcgtctttaagttaataggctttgtttttttatttttttatttttatatttttttttattaaaaaataaatatgtttaaaaaaatatatattagaatgtgtcataaaaattatattatgtttataagaatgtgttagaatgtgtaatttagagcatttggttaaactaaaatttgtgtataaatgagaaaaagtatataaatctgagttgtatagatagtagcattaaagaaagcctcaaaagtagatttaatcttgtaaaaaaagaaagttgtctagcataaataaaattgtttttaaaattgtaaaaaaattgtaagagcactcacaacaaatgaggtataataactaaaaggtaaaataaaaatagctaagagtttaaaattgagctccatcaaatgctttaaactcttattatacatatttccaaattccaaaaaactattctctacatatatctcaatgaatagtggacaggtaaatatattttatattttt

SEQ ID NO: 200125 - DNA, 1290 bp, Cannabis indica
taatacaatctaaggggagtaagttattaccacactaatggggtcgaacctcttcaaaatttggtgttctttattacttattggcttttgctctattttaattatattctaatcgcttaataattgactcactgtcattgactaaaagcgagatcaacataatatatattatatgatcataattttatgtattgaaagttaaaatatatacaaatatttgattgaatatgttagataattaggtgtgtagaaaaaaaaaagattgatcgagtgaatccgttgacccgtccaacccgaatccgccaactcaaaatctaccaactcgtaacacgtgaacgagcaaattcgggttcatttttttcttcacccgaaaccgccaatcaaaacccgcctaatattcagctataaatttgagggtatattaagaaagccggttaccaataaacacatttttagaaattagatcatcatattcgatatattctctgtatattaataaaaatatgtgtggtataaatacacatatctcaatttaatacaattttgtcgttataaccccttcatatatattacccatttggcataatttccttccacacataacacatacataaattgcgtctaatcctcgaaagaaattttaatggaaatctttgtacgttttacattatatgcatgacatggcacaaagtgacaacagtatttaattgtgaacaataagtaagagaaaaggacaggaagatgaaggcattgaaaatggcaaggtacaacaaataaagaattagtaatattgccacccaattccctctgttagatgagtcataaagactgcatgttaatttctcttacacataaatccatcatattatatcctcacactcactacttctaccactcctaaactctttattcattctctaaatacccttttgcctatattacaaacccttctattcactttttcttcataatataataaagtgttattgttacatctactctctttccaaaaccctaccaaataacaatgaacatgaaaggcatgaccaagaagaaaatggggggatttatgtgccactctcctgccgcaaccgccgtctgtatgactcccgattcgcgctcagctatcgtgcccggccggagacttgttccggccgaccgttatgttatcaaccctactactaataataataatagtagggatcatcacaatgggagattattcaccactgccaagtactctagacttgttcatcatcaacaggatcatcattctcatagaaatttgat

SEQ ID NO: 200126 - DNA, 521 bp, Cannabis indica
aaaattcaatctacatgtgtgcatgggcaacaagaactgaatttggagccgccaagttgagatgtgtagagtccaggctggccccatcaccactatgctagctggcttggtgggcaacatcctagtcggccacctcctccactagtgggttaaccaacacctcttcacgggtacctaatgatgacttctctcgataagcagcggtctggttcatctccatccggttctcaagcaacgccctcccacgggctagtgttttctctacgaaggccaaaatgcccatgtatgacaactcagcttcggggttgagcaggcggaactcgtaaataagtttagaggacaaatcaaattaatactccttaatggcctattggccatcaagagcctcttgtaacttctttttgtgcttctcaagatctgtctaatactcggagatgagaccagcttggttgatattctcgttgttcctggcatacagcatagtctcctttcctgatatcattcttaacttctctgctaga

SEQ ID NO: 200127 - DNA, 1526 bp, Cannabis indica
  modified_base (1486)..(1486): a, c, t, g, unknown or other
gaacattaattagttatggttgctagaattggttatttctgttaaatagtttagtgagctgtcataacaaactcttttctcgctttgttgctgtaattgtgtatatatacacatctcttgtaatcatatcattttcatgattgaataacagactttctttcttgagtttctttctctccttctttgttattctaccttatcaataaaatagttatatgagataagtaatatagtgtgacaaatcaattttgtcaatttatctatctatctatttatttatatatctatatctcttttatattaaacgtgtctatttaacggaaagttaactgttaaaactattatcaagcgttaaattaattaattatttattttctaaaaaaaattaattttaaatatctaaatttaatttatttattcaaatataactcatataattatttaaaagtaccaacaaaattatataattaattatatatctgtatatatatctgtctatattctatatatatgagcaagtgatattacatcctaaaatctctttaattaattttatttattatgtctttaattctcttgtatttttagtcttttgttttgtttgaataatttcctagcttttaagtatatacatgtataataactatatacctcatgtttagggttttaaaattaattaattaagtttcttatttagggtttcttataatatatatagattggttgaagcattaaattatgatctaaagtgctagtaaataacaattatgtgtgacttttagtgaaatatgctaaacttttttaacatgcttctaaaccatccagaggtactttgttcatttccaatacctcgactaaacctgacatactcaatgtctatctatattgtgccgctactactaaaatactaaaacgcgattctaatggtcgaacgccgtgttcctatgttgctgggcacaaaacacgcaaaaacataaaattttatgtatggcataaataatacttcctgaattcaaataaatctccatataatcataaattataaataaaaatttagtttcataattaagtcctaattatctactaattctaaattaaaactaagcggtctttacaactacaatgttctaagatgtaaatatccactagaaccattggttagctttcaggaacaacttgaagaacacaaataatacaactaagctaaacctaagcatattaggattaagatctatcgacctaagatcagccagtgatattaacatagaaagatataacggtaagtttatgatatcttatccaagatcaatatcggtcccaatccaatgtatactccatacatctgatactggtaaactttacctaatgccctggaaaggacataacacttatccaaggtgtaaaatataccttactcgccgtacttatcatgctagtctaaatctactgaactgacaaatcatgggaattaaaacttttgaaactntaaatagcatgattatatttctactttgctgacgatacta

SEQ ID NO: 200128 - DNA, 395 bp, Cannabis indica
ctaatcacactctgcaatttaaccaaatatttctttatttactttatagtgtacaaaataatgtaaaattggtgttatactttttctaaatataataccaattactagaaaagtttatatgagtttgtaaataaaggtgtatgctcattattatgttatgtgataatcagtgtttgtatattgttttttttttctcattttctaccccataattaattgtctcctttatcattcctctttatacatcttacagcatcactaataaaagttgtcacaaaaaagtgattgttattagtgagtccaagagatatggagtgaaagggagaaaataattttgtattttaatgattgacattgataccaaaattaagcatagataccaacctaattaacat

SEQ ID NO: 200129 - DNA, 769 bp, Cannabis indica
ttattaaattttgaaatatatttgtatcatacatattagatttttaaatttttatcttttacatatattaattgtatatataatatataaatatgtggcgattggatttaatcaggtacttttatataatagcatattttaattttctaatatagtccaatctgtacaagtacggatattcgcactttgtgaattaatttggattgaatcgtgcgtattagatcttttatgaatactcctacatctcaggtcacatataaaagaatcggtaggagttaaaaagtacactaaggtagtgtttggttggatgtaatgaaatagaatagaaaggaagcaatttttattctattcttttgtttggttgcatattaaagtattgaaatgtcattctaatggaatgacctttgcaccattttagtagaaagactattccattttgaaatagaaagaaaaaccatttcaatacataatgagaaaaatttaataatttttttatgcattttaatattattcatttacattcctattcttattctcattctcattcctattcctacgttttcattactcccaactaaacgccactgacttacccaataatattttgtactcaaatgaaatatcatgaataaaaaaacataaaatttattttattttctggaatgttattttgtctgaatcattacttcataatagatagaataaacaaaaataaagagatactgttaataatacatgcttacaacaactcatacataattacatatca

SEQ ID NO: 200130 - DNA, 1865 bp, Cannabis indica
agagattgagatagaagggagatccatctccactcgagagatttcactactacaaaagtgtgttttcccatcggtttataactgtcatttatactatttcccaacagttcctaaaaccgttggctatgtgggtgtcataaaaatgcagaactttaaaagacagtttataactgttgggaaaagtcactttaaatgacggtttacaaatgttggaaaaaatcactttaatgactatttataactgttggcaaaaatattgtgtagattaaattgaattacttttttatacatattttttaatattaaatatatataataatattaattttcatcaaaaaaataaataatattaattaaaataaatgaaattaacatatattttcatatttcacaatatacatgcattgagatacaattcagaaaaatatactacaaattcaaaataaattgtatttgaaaaataaataataaatatctatattacaaccaaaagtgaaattgtttaaagaaaacctaagtgaaatttattttcagcttccaggccaaaaatgatctccctctttctcgtgccttctaatctcgaactcctaaggctccctataatgagtcaatgatctaacatcagcaacaggaggatgccctgtgatcagtaaatgaaacaaattaaccacaagtaattgaaaacagtccacatatatgcacaatgtctttatgtttgaattgacgtgggactaccagtagcttcaacccatagactctttttctatctaattctaatgtaaggcatataattcagtttacgataatatttttttaataaaatctattccagcatcttcttccacctatagatttattttccaatcaataatcatatcttttttaaaacaagaacaacagatagaaagaaagaaaccattaaaattgtatattatgaacaaaaggctaaagaaaaacgtactccaataatcaatcaatgaatggtaatttattattattagcctggctacaatgttgcctatgaacacatgtgttagaagaatgacctgttgaaatggagcaaatttcagctaccaactgggttttgaaatcctttgcagctccatccttcacaatacagtcttgagaaatgagaagagagggagggaacaggttgtttgcttcgacacaagtccgagctccccctgcattcagaagtcatcaagttcaatcaaaatttcattgatttcattcttaaatctagagtgaatcatccaaactcttcgaagaatgcatttaaaggtcacccaataaagctcccctttttttgtgaaagccatacataacaaataacacaccaaaatctaattgccgagaagaccatttcccatttctattatatcaagaatgtctagttacccattcaaaataacactttacacaatacagtaattaaccttaaaacatgaaacccttacctttagacgtttgattttgagctctttgtcgtcctccgatgactggagagtcggagccaaagagagagatgtagtagcagcagcaatagtactagtacatttggagtcggtggcattggatgagctgatccattcttcgaatccatcttcgctcattgcaagctgttcaagggaggcggcaggttgtttgttaggagagggaaagagatttttagggttttttattttatataataataataagaataataaaataaaatatatgagtaggagagtgaaataataataataacaatgataataagtctttattttttacattctaacaaaatctttctcaacatttaataactgttgggaatactaactattcccaagagttataaactgtggaaaatatttagtatt

SEQ ID NO: 200131 - DNA, 1004 bp, Cannabis indica
agacaaggtttccacattccgcaaattagctttaacaaaaagcatactatcatctgcatacatcaggtgagacaccgtgggaccattcctcgacattctatacccctcaatcaatcccaacctctccttctccaggttgagacgagaaagaatctcagagcaaagaataaacaaataaggcgagagggggtccccctgccttaggcaacgctgaggagtaaaaatcttggttaaacccccatttaacagcacttggaagctaaccgaagagatgcaatacataatcaattttctcaccgactcactaaagccaaaggcttttaaaacttcattcacgaaattccactccagtctgtcataggccttggacatatcacatttcacccccatgaacgcctcccttcctttcttaatccccatatcatggacaatttcactagaaattatagaattctccgctatccagcgacccttcacaaaagccgattggaaagggctaattatcttctccaaaacaggacgaattctattagccaggatcttcgcaataatcctgtagctcacattacataagctgatgggccggtaatcatcaaacttactggcattgcttcttttcggaatcaagacaatgaatgtccgactgatcgccttagtaaacttcccgtttctaaaaaattcctgcacaaaattgaccagatccctccccacagtatcccagtcatccgtataaaatttagctgggaacccatccgaacctggggatttcagttgaggcattccactcacaactttacgaatttcttctgaagacgggatcgtcacaaatgactcattctcactatcagtaacacacggagccaccagagacagtaaattctcgtcgattagaggagatgacgactgaaatatccccataaattattgcgaaagaaatcagcaataagtctttgatcttctatccagtgatccccgtcctccgaaactgcccaaatgaaattcct

SEQ ID NO: 200132 - DNA, 1432 bp, Cannabis indica
acaacgataatcgtcttgagaaaacaacacatcgtcctaacaaagaatctatgggatctcaaaaacccaacacatctcaaagagccaagtgcacatacacacaaatacaatttttataaccttatccataaattcaataccatgagcagcattaacaaagtggcacatataccaacataattaaaagttattaattttaacaaaccaaccacacagtaaaaaaattacacatattattacataacacaccaaaaaaaaaaaaaaacctagtgatatatctaatttcatatatgtgatatcaaaacccaacctggctagctgttttccacttcaacttcatcacattgtcaattttcctcttcatcaactttttctctgaagtagtctcacaaaatcttttcctcatctcgagtttggattcatactcttccatcttattctgcaattctccatacacaccattcaacttctcttgtagctttcccatattattgttgactacatttggtatttcatggtcaagtaatttactcacttggacataaaagaaatctcttgtaacagccttaaaagattcctctataaaacccacatcaaaattcccatacacttttgcaaatcttatgtaacaataccattctcgaagaagatctttagagatgtctatgaccaaagttgcatacatctttttcatgactcgacatataaagaaaaaacatatgctctttagtgatgaagaagatgttgaattatgtccaatatctccataattgtgaagtatatgtttcataacacacacgaaatttagagggattgaataattaccttcaacatcaacaatcttgagcaatagatcacttgattttatgtccaaatgatttttttccctaaaaaaggatttgaactcatggtaaataaaggagatgtactcattctctgtaaaacttgaaatttgtagaagctcatcaatgttctcatcattaaggactagaggtgtagtgtctatactttgcatcttatttgtcaaattcttattacgaaccttcagccaaaaaaaatgatttttgaaacatttttcctcacgttcagttagagtgtgaattaagtcttgaaaagtgaaaatagagtcttctttctttttttatttccaccagttgattttgtatttctcctgagaatttccaagcatcgtctcccactatctttaacttcacatctctaagatctccctttagtacatttatgatctgtcatgttcaagccatatatatgtaataacttatggtcagttagattaaggaattactttttttttttaatttttttatctattaataaaaaatacattcaaacaaaaaatctaatccgtgggttgtctaatctacacttcatatataaaagtaaagatatatctacaaaaaaatataaaaat

SEQ ID NO: 200133 - DNA, 1666 bp, Cannabis indica
acaaccaaacgtgtatttacttcaaacagttgagttttttttaccttgcatattgcaataagattatcaagcgtgtcgttgattaatttgagagctgtagaaaccttcctttgcctcggcgatatgtccttccatatcgggatctcccagaatggaataggcgagatacttcgatcctctgcttctctcaagacagtataaacagcctgacaaacaaacaaacaaacaaacatgtgaaagtgttcgatatgatgatgctaaaacaagatcaaacacagaggggaacaatgatacctcaactatcccggtatcattagtcaaagaatcgaaatcataattaaagagtgccttgccgatgatatccaatgtcaaacgagaaaagagcgattccatctcaacatcttccccgtcatttgcagcagcatctagcttctgacaaagtttatctgtagcttgtccaaagagattgatcatagctgctacatactacaggtagagttcaaagagaaaacctatgtcaaattacaaacaatttgttaaggtaaaaaaaagttgttgtgaactcaatacgagcatgggaaaagaacgatgatcgtgatcatgccattacaacaacaaaaatatttatttccaacttagagaccctccaaccacaagcaaaatacttaaagaaactcaaaggaatcaaattgatgacatcaagaaccagcttgcgagacatgagagtattccacctcaatcgctggccggtagtatgcagtttaaacgaaaatgagagcacaatctccaacaagatccataacattatattgagctgtatattgacatgatgaaaacaaacttttcctaataacaaatgaattgttatgttattgctatctattggagagaaaggagcatgacatttcagagtgagaagcgaaattttctgattttagtaaatttttgctataactgagtcttctgttcttgtgtttgcattaaggctacatatctcatacaatgaagtcaagaaagctcgaccttcctggttatcgaaacttttctttggaagaagagcttgaggaggctacaaacaactttgatacatctacttgagatcagtcatgtcatattgagcttatttcgaaactgagggcatcgaaatttggtcagtgctcttggagattgctttgaatgctacttggacatgtaactttgatacaccccaatatgattattacagtaaagagagtgatgattattgataattctacgaaattcgagagtcctagtttctctcaaagagccaaggcttaatacaaacaattcaatctctaagactttccaaaactaaaattcctaatgcccacgcttagcataggcataccgaattgggggtctatcaaacttctctaactaagcatcttcatgtctctcaagaaaaggcaaacactaaaccatccttaatgaaaactcacatgaatagggaatggaaaaaaactgacattgaatagagattatgataactgaacactcagtagtttaataccttgagatgcaatgcaggaacaatagtacgccgacgaacacgccatatttctccatcagctgggataagtcctttccccattacaaactctaagatttcggctaaaataccctgcaaaggaagtctaatatgagc

SEQ ID NO: 200134 - DNA, 1661 bp, Cannabis indica
acctactggactgtaagcttcttttgttctcattcctttgtccatgtttttttcattttagctcaaagtttgaatctttatttgttttttcaattcacagagtgatgcatatcaagccacagggtgctataatctcttgtgttctggctttattcaaatcaatagtgaaattgcaatgggtgcaagtatatctcctgtgtctggctttagaaattcacaatatgatatcagtatccttgtttggaaggtaaattccaaaacttttttcttttcttaatattattgattattattaaagaattaaattttagtaagtgtggggtgaccacagagtccaaaaagttgatactgccaagaaagagtcatgtgggttggaatcagtaaaaattgtctactctttaaagttagtttctcattggattaaaatacaagaaagatagagattaaaaaccccaaaacctattgttggctaaaatccacatcaagagctattattcttctttctcatatgaaaaaaaaaggaaataaacacatgatgagaatcttttggatcactctttaatcaaaacatcatgtctcaataatcttgtgatatttttttttaccttaatctaggcaacaataaagggtggtaaaaacacaccttttaagataaatttaattacaccaaacacggtatttacccaattaccgaaaccccacatacaacacttacacgagcgatgtaggacaaaatacacacactcaatgattacacttagcgcagctacttagcgcagctaccgagctgcgctaagtgttgactttagagttaaataaatttaattacaccaaatacggtatttatccaattaccaaaaccccatgtacagcgctccgagtcttaatcagtgttttgttgtgtgcctaaaaatgttgactttttttgtttgttttgacttttgaaatgataggatccaaaagaagggcattggtggatgcaatttgggaatgactatgtattgggttattggccatcattcttgttctcatacttagctgatagtgcttccatgattgaatggggaggtgaggttgtgaactcagaaccagatggtcaacacacatcaacacaaatgggaagtggtcattttcctgaagaaggttttggtaaagcaagttactttagaaacattcaagttgtggatgaatcaaacaatctcaaagcacctaaaagcattggtaccttcactgaaaaatcaaactgttatgatgttcaaactggtagtaatggtgattggggtcatttcttttactatggtggtcctggtagaaatcccaattgcccttaaacaaaattaccattttacccttttcttttaccataatgtatcattcaaaaccaacctctcttaagtagttttcttcttcttcctcttttgtatacccttttttttcttcttaacaaccaacatgtgaccccccctttttctgtagttttggcaagttttttgactcttttatttttctttcttttttctctttttactactaaaagattctcttccatgtaagtgggtggtggtggtggtggtggtggtggtggggtgtgaggactagagattatggccaaagtttctgaaaagcttaaaagaaacaggcctttttaatattactatagt

SEQ ID NO: 200135 - DNA, 622 bp, Cannabis indica
gagatgggagagagcttggattgttgaagacggaaccatcgacgacaaagggagtcgaaaccgtcatatctactatgcccaagaatcgccaccaatgaaagcagatcatcggaaagcctcttgcgagaaaagggaaaacaacagtgagaagagtgaagagagagagagagagagatacgtacctatcgtcgtctcttgagcttttgcttaggaggtggtcactgtgagaagtcacatagaggttgaatttggagttgagctgagaattaggagaagtgagtttaagtgagattgagagtgaaaaggaggggaagagcaagataacataagagggaggctgatgtgaagactgatagtattatagttagggttaaattcttttaaggatttattttataagagcggcccattttctctctctccatgtctctccttaatataactatgtaagcgttcgtttataatcgctctctctctctctctaatataactatgttaagcgttggttaatgaaggtcatttgtcgtcagtttataatccacactccattagtgttggttttaaaagaaaactgttattttaaccaacgcgaatgcctatttttctattagtgcccacaaac

SEQ ID NO: 200136 - DNA, 1429 bp, Cannabis indica
ggtttgctttgtaatgtgttcaatacttaggttcaattgaatactatgcttggattgtaaaggtgcttgacaattgaataaagtttcatttgatttaaagctaagtcttatttaattttcattgttcatttctggtttttttttggtttaaatgtctttgattgcttgttatgtttattgctattcttgtttttttggcattgtttttggccaagacttaagggtgttttcaccacaagtattggtcacaaaaattacaatttgttgtgattaaatgtctttttagtaacaatacttattgtgactaaaactaaattagtgacaacttgtatctaaaaactatattttactcaaaagtaattttttgctatgactaaaggtcatatttagtcacaaaaaaattatattatgactaaaaaattatccctaaaagtaattgttttttatagtggctggtggcgagcaggcccttgcgccaacctcatgcgctaccaaggtgaagggtttcatctttcgagaagacttcctgaaagtccttccattcccatacataacctaacattctattataagaaaagttgaacattgcaagtttcgaaggaaataaggacgaagacatgaaaccaacctttcaccaatgatggtaacacctagttacgcaagggggttggcaacatacccactattacaaattgtatttttggtatcgattttaaattgacacttatacttatagtttcggttcatagatgcgacacctatttcacctagacaaaaagttaaatttttagtgcccgttgtaaaaccaacacttattagttttggtattgtttaaaaatcaacacttaaattgtacatatatatatatttccttggtttaatgacacagtaattaataatattatataatattattttgtaagttttagtttttaaatccaaatatattaataatgttgtatattattattttaaaataattaataaatgaaatttaactagcaaaattgtattattttttagtgatcataataactaaaaaataactaatgttaatttatatattcagttagttttgctaaaaatagaatttacataaaataattcttaacacccatagaaaaaagaataatttaaaaacccaaaaaatacatcaaaaattttgaactaaaatattcaatttaatcacaggataaattaatggatattaacattgttaaaaactaaaacccaatttagttcaagcttataaaaaaatcaaagtagttacaaatcattattttagatttcttatgcccgttgaacacctataagcctcaacccacttcaatcacgaactagtatctcgtaaactaccaagcattgtcaaacggctaagatccacacgagcttcaacatggtccgcttgcatgagagagagagagagaga

SEQ ID NO: 200137 - DNA, 1961 bp, Cannabis indica
ctcccaagtaaaggatgcccgataagatccatatccagcagctcacactcatctataacttcttgaaagccatcaacaagccaccctggataagggcgccccccacgtttatctccttgagacaaaacgttattaagatcccccatgagacaccaaggcaacgtagattccttggaaagttgccgtattcttcttcaagtattcgatcttaaacttctttgtggctctccatagaaaccggtaaggcgaaactctggatgtccatccaaattaaaaaccatatctatatgattaatgctataggttaggagtctaccttcatgttggaacttccatatcattgccaagcctccactatgtctgacagcatcaacaacaaaacaagcttcataacccaaactactttttacaaactcaactttttcttttttactaatagtttcacacaaaaaaatcacattgggcttcttttggaacacaatttccttcaagaattgaaccacccgagggttcctaagccccgacaattccaacttaaaaaactcataatccttggcgggtccaatttttggtacccgcctataactcgtttttttgaacaatatcatcttccactcttcctgctactggaccgaagctatcctccattccaatctcaccttcattaacattaaggcccatatcaatttctgcatcattcaaattggtcctaccctcttcaccactcccaatagcaaccaaagtttgggccgaccctataacttgattatgatattggcccacctcagtatttcatcaactcttcttctttttggatccgtaaaaataaacccccccttttcaaagctactttcctttcccgctcccccatttattgatatcccagaattaatgggagacttctttccaccataatccacgcccacaatcccatgatccacgcctacactctcttcattattgctcccataaacctccatatcctccatatcctcaccctaatttttcggagttttgcccaccctggaactgctagctgtcgtcggagaaccactgccagcatccgattgcggaggtatggccatattgtctctgagccatctcgcaccaatctgcttctgggaacgccgatctggagctttcatgaataagccatagggcttaacaaccttgtcaactggttcatcaaatagtcggggacaaaaacgttcattgtgcccgagtataccacaaataaagcaaaaagtgggcactctttcatatttgaagttagcccaaaagtagtcttccttggtgtagtagatcttcattcgtctcttcaatggttttctcgatattaatcaagacacggaccctcaagtactccctccaaatacctgtgtaattcttggggcatgatgaaacaaactttccaatataagcaccacaggccctaagcactcggtctgattgaaaacccaccctgagatcatacacttgtacccagatttccatagtgttcagaggtaccatcttaagattttctcctattttcaatctctgaataatcagaggtattttattaaaagtccatggtgtaccttcaagcaccctattaatatccagttcatgaaaaaattgaaacaagaaacgattaaactctaattctttaataaacatgccttttactggactccagagtgaagccattacatttcaaactgtatcaaaatcgaacgcacgatccgtgagcaatctccccactagacaccatctagcatcaacctcatcctccaaatctgaaatgttatcaaacaatactcctctttcttcttcctcatcaatctgcaagtcatcccaacgtacctctaactcctccgcatctctgcttgacgaagccatatcatacagatcaaacacaccaaaacttctaaccaacgatcaataccaatcaaacaacgttaaaccatgtcaatatagac

SEQ ID NO: 200138 - DNA, 1056 bp, Cannabis indica
ataaataaaattataaatatttaattattaaaattacaaaaggttgtattggtgcattagttatttttaattttaagaaaagaaaaaaagttgtatgagtaaataagataatgatactaatccattaattccttaagaaattcaacatcaatacactactatcttatcagtcactattgaaaaaaaaaacaaaaaaacaaaaacacttttctcatatcacggaggtagccgcagactgcttctatatgtaaagtcaatatatgattaaattgggtagccgccgtggcttgtagccttgtacatataatatagataatatagaaatatatgtattgattttcaatacataccattaccaaataaaccattattgaaaatacatgatactaaacaagtatacattacacacccaaataggaagaagttgaaaccaggagatgagtactttggtttggttggtggtcgatcaaagttaggcattaagtaaagtttgtgtatgatattatttgttatttggtgagcattgatagatacaaccttttattaagtttttagtagattgagtcgctccaataactcttaaaagtagttcccaaatgaatgttgatgtcgatgatcgagtacaacatttaattaatccaaaatatctctaattgatcatccaggtatgaaattggaacaaacttaatgagacttttactccccaaataaaaactcatttcagtcacatattacaaggctgatactaatagtaaaatattcaacactattgacttttgataaagatattttctctcactcactcactcactcactgtaagaagcactactacctcacaagtcattttttttttttgtcaactgaattgcagtgccttgttgataacttggccaagaacataaaaattccttgtgtgaaagcttctctccactttgtagaaaataactgcataaggtcactcacatcaagaactttagctccaattttgatgctggactctgcaattagtagtttctgaaatacccaccaaaagtttgaaaatgtaggggaaaaaa

SEQ ID NO: 200139 - DNA, 859 bp, Cannabis indica
agaagctcgagccaaatccactatgaataatcattaaattataccaatttgagtcgatttcaagtcacggatcgattggtaatcgcttcaagaaaaattaggtaaggttcttgattttttttcttttacattacgaactctctcactatctctaggttctcaatcctcttgaatcacgagtgctagggaccccttttatagaggctcgggtgagatctctaactccttgagttagttttaattatgttgtttgttgtagctcatatttagttgaaaatttattgttgttctattaagaaattaattagttaaagactgatttaagttgtagtggtttggcttataatattagaaactgcgatagtcagtaatcctgtgatccgtaaggaaatatatcgagtaagatgcaatcctacaccgtctgggaaatgtcaagtggaataattttgaaactatgtacgtatgcgactacaaagttgaagagggcttaagtggattgattgatactacttatatcaacaaggtgcatcttattttttagtagcccatcacgaaaaaacggtgacctaggaagttttgtcaagaagcatgcgaatgaggacaaaacacgctggaaacactcgtgttagtttgtactgtcagtcgtcattctaggaagcagccaaaatggcatacttgtgtataaaagccatgattctgtgggtgcaaaggcccaatagaagcttacagagaggacactacaaatggtatcagaactgtgacccagtcggaagtgtggtcgacgaggacgttggatctcgtaagggggtgattgtgtcaatcagtaatcctgtgatccgtaatccataagggaaaatac

SEQ ID NO: 200140 - DNA, 1327 bp, Cannabis indica
aaaaaaaaaaaaaacctgaaaacctatgctaatggcaatgatagctaagactagggagtcaaaaatgatcatttgaaaaatacatggtcaatctgtatagtcacactccactacattattcctttaacatacatgaatgaatactattttaaatcaataataatttagacaaaataatgagcttattaatttatactatttttatcatattatgtattcttgcacccaaactattggataaatactttatataaatatacatattaaaaatgtaatttgtgtgttcaattttcttgattgagtgtttaagtgccatcttaattagtttttactctaattaaaataattagagcactagacaaaccatataaattaaaatattaatttagttttatttattttatttgaaatggttgtttaaccttatttatataaggaggaagaatattgttattggtcaccagtaatttcagcaccttttataggtagcgctttatgattgattaacgatattctttaaaagttattttcttaaattatatatatgggacccgatacattacaccaatagtaatataataccgaggaaggtgttaggcactaataatactttttagcaattcttaagtaggaaacatactattttttttcctttgaaactgcgaaacatactactttgtatgcatgattgtttatgaaaattttaaattatatatttaaaatttttatttttatttaataataattaggtaataaaaatgtattatattttaaagtaatatttttttgacaatatttttaatgatatgagtagttatactttaccaaacttttattttttattgtataaaattaaaaactatatatattgtaaagtccatacttcttggtcctatattttaaatttaataatttgttacaggttttgtatatttttttcttacaaataattccaataaacctacaccacacaatatgtatctccaaaatgaccttatgagttatggcttgccacacaaagagtgtgttttagtgccatctttaattaatgtccactctaattaatttgattagagtagaaaaaccatatcaaaagatttgtttaatattatttattttatttgaaagggttatttttttacaacaatttgaaagggttatttattgttatttaaataattggtgtacgtttatttaataaaataaaaaaaaaaaagtagagtagcgttatttgacatcttgaaatttgtaattgtacctatttagttatttaaattctaaattcggttaatgttactaaaatatcatgtaattaaataaattaaaa

SEQ ID NO: 200141 - DNA, 817 bp, Cannabis indica
acaactgtcaaaaaactgttatagcttccatctattgttgaaattttcaggtgcataagttggcttgtgcacttgataatgtcaacaataaattggagtgggttccaagctataacaattcttcctccttggtgccaagctatataagtggagaagcaccaaccattgaacacattgaggtacaaggttccaatcttatgaaccttgacccttgtttcgagaagcccaacaaacccaacatcttgagttctaataaactgtttgatgagttgttgtctttgctggctgttggctcctcaaatagtttaatttttttttatagtcgtgtatgttatatttaattatttaagacatcgtgtaaattttatttttaaaaaaatagaataatttacaatatagaaaacagtattcaaaaagtctattttacacgcatataaaataaaagagttaagcgtgcaattgactgtttgaacctaatttttaacgtgtaaaatttcttcaaatatctcaaaattttgtatgttatcttaaataactataacgtatacgatcatgaaaaaagttgtactaaatttttttcctgaataccgaaataaataagagtgtattggtatatcccttttaagagaatacgttgtaaaattttcttatatatttatatactagattaatgttatgtgcaaatgcacgtatacttagttatatacttatttcaaaaattaaaaaaaaaactacatctattttgatttttaaatgatataattacaaatataatatataatttaattaaatacaaatatttgttcatatgtatagg

SEQ ID NO: 200142 - DNA, 673 bp, Cannabis indica
aaaaatagacaaaaatcagtctcagtcattttaatcattataattagtaggttgtcacatttaattacctctttattaatggccttgagcgtgcacaagggaacactgagtttagcttcggtgaattcctcaatattgtcgacatgaacagtaactccctgtaattagtcacaactacttgttaagtaaaacatttgtagatagtattctctagactatgccactacaaaatctacattaaataaactttgatgaatatcagataatagtacttctactttgtacctgtataatctcgtctataatttgggaagaacgcataacaacgttttctacgactaagaaaagagagtcctcatcaaaagatttatgatcagaatgcacgtgagtggcaaagatcagatctttgatagtcttatcagacatggtgaagacgctaatgacttcgtcttcgccatcaatgtgctggtgcacattagaaacgaaagagtagctaaacatggtgattgaaatgtctaagctagagttttcttgtaagtcgtttataattttactcagtgggatgatttgcagaagttagagaacgagagaagtaccttcactatatttataaccatttatttggcattttgctttggtagtatttggtacccactgccactgccactgccac

SEQ ID NO: 200143 - DNA, 726 bp, Cannabis indica
aaaaataactattttttttaatttgataatactttaaaaagcccctacaaatgaaattttgtattttataatcaccaacttattatttaattaattaattaattaaatgtgaaataataaaattgatactaaaatagattatttgtagctacagatcaaaattttgtaactacagactagccaacttgtaaagaactaaagtgcagaaaaataaaaatacacaaaaattttataagtggtattagcaatccttacagattatactattgcacagtattacacctaaaaataaagattcattagtaaaaatttcaaaaatataaagtttttgacttatgcataaatagattctctctaattgtatgatgcaagcttgatgtattctccttgacgtatgaacctttctaaacctttaagaactcgaactcccttcgatctgcttgaagtgcacctgcttcctcctgatgcaagacttaacaatcttctcccgaaagtttcgcacttcattcttcttttttgtagacttatttgatgattcaaaacaattacaaagacactaataataaaggtaaagttgaactcactaaactctacacaacaaagactttttcttttttctaaagatattataatttataatgaaatgtgaaagagttaactaaactctagcagcagtacaagtatttatagtcaccatactcacattgattgggcaactaatgcacg

SEQ ID NO: 200144 - DNA, 1068 bp, Cannabis indica
ttattcttttataaatgctcaatactagacagtatttaatgggggcatttagttcacgctatcatattgtatagtattattgtaatataatattatgtttaatattaatttatattaattgtgtaacattatattttgtaaatgaataaaaatatattttaattgtatgatatatttatacaaactctcactctaccctctctccattttgattcttaatctttactctaatgacatatttggtttgttgtaatgaaaatcgtaatgaaatcaaattattcattattatatttgctttgtttttaaaaatgatttaataggattacattataatgataattacattatataatatggaattcctattacattagaaaaattacttaatgagaattacatcacaaaagattaaataaagtaaagctaaaatgactctaataccctttttttttatataaatataaaaattaaaatacaagataattttatcaatttattatttattataatattcattccaataataaaccaaacatcttaatcaatttctattactattcttattctattacattactattactattatattccaccaaaccaaaacatcacctaaacttagactccgaccttgacccaacaccagacctcaaactctaaattctgaccccggttccaatcccacctggatatgtgataatattaattattgtcaaaaatgtataacggccaatatctataatatttattcaactaaatttcgagtaatccaaagttaggtagtgaaattagatttgttaggatggtgtgtataatatgtacttgttttattttctttctccttcattgcttaatacttctcatctttgccgaactagatatagaaagcataggtcctttctttattcttccattccatccctaaacataataattagtttgcttgatttttggttctagaaaattgttaattatttaatttaatctcaacaagttttcgtcaaactttgaaaagaatatggaatatgatcaagtataatcaaagggagacgaaatagatgttacagg

SEQ ID NO: 200145 - DNA, 521 bp, Cannabis indica
ttgaaaagcgatcaactccatacatccataccatctaataaatggtagtggccaattaattaatgaactgaaaaataaaggagaccacaaagattatagaagttaactccccttgacacaacgataatgaaattatgtttacttggagcttttattatcacaaaagctaattgcctaagaagaaaactcgagaaaaaatgaataagtctcctttcactttacaattttaagaaagaaaatgtgaagagatagaagctttaaccttttagagagaatgaggaatgtgtaaaatgaggtaggagagctctccttttatacggaaggaggtccaattaaattacaataaaataataaaaagaattgcacaaaatttgctagaaaattttgcactagcgtgtgagtcaaatttgggctcgaattaaaaataaacatttgcaagggtctgatacacacttaggtattgaaaagagctttcatatgcaacttgaatcacattacttggataaaaattgagtgagtta

SEQ ID NO: 200146 - DNA, 1122 bp, Cannabis indica
gttatggaattatttttcttggatagaatgaaaaaaaattaagcaatttacttttttacataatttgattttggtttcatttgaattagttatgaatttttgaaaattagaaaaatatcaaggtaaggctcaccccacatgcgagtggggacttgagtcttcactcggtctgcacgcgcattaggacaagctttgtccaaagaaccttgacggccccctatctgaaccagccacacgtgcacagaaatacagtgcaggatttgtgtgcggtaaaactcggttgtgcacccctacacacgcgcgcggatggtatgccttgcataccatccgtgccaaatgcaaattttgctattttttcatgatttttcaaaatattaatttcgaattttttgtgaaattttgaatgtagattttatttttcaaatgtcaaatctaattatcaaattgaaattaattatttttttttaattaattctagattatattagattttgaactcgaaaatagataaaaatatatctttttttcttaattggttatcttattttttaaactttgattattttatcttatttttaaatataaggtgagatattttaatcttacattatttaaataattttataacatggccttatttgaaatttaaagtaagatatattttaataaaataatttaaaaaattttgaaaactaaccaaaaaattttaaattaaatttatagattttatttttaaattaattatttaattcaattatttcgaaaataatattttatttttttaaattttcaaaattaatttaattatttaattaatttgatttaaataaatcctatatcgaactatctaatttgttgcatgtgtgtgttttatatatattgtttattatcaaaacttgttttataaaatctattattgtttgatctaaattgttatggttaacttgttgacagatccaatgatctgatgttaactgtagtccaattgtcaataatttaaataaataatttgtaacaggtaaattttgtaatcttctttcatctgtgtataaacctagtaacatgataggatccatccaaagcagtgtgtgcttgtgcttatatgtttactttgggcctaga

SEQ ID NO: 200147 - DNA, 858 bp, Cannabis indica
agaaatgcaactatatttggtggacttggtgaggatgacgattataagctatagtaagaagacttttctaagtcgaggtatttctctactttattgaaagccattaattttgattgattggagagagagagagagaaatggacatggaaagcacgcgttgccggtgtggggaggtgcagtcgtatggggcggtgggtccgatatcgagtttgctgaaaagcctgagccatggccttgcgctgttttttggtcccacctcgatacacaaccttatcaacacatacaatttattttattttattttattattattttaaataaaaaaatcattatcgtatatactgaggtggaaatattaattcgaattaatgtctgtttttgagtgatcacagactagctaatatatttttcatcaccatcatcatcccaacccaacgctagccgagtctcaatacattttatggaaattgatgaaataatttttaattatcaaatttaaaatatatatttaatttttttagtatatatataatataccccaagcaatgaatgggtaggtccctgattaccgattgtcatcataataaacagatttaattcaatttttttttttacgaatctccccaaagaatattcgaaattgatcaagaagttaatatactaacagtgttgaacagtacatatataatagggaaaattgtaatccaaatcagttatattttgtttaattagttatgtaaaatagctatacctctcagtctgagcaagtgtttcaggatttgaatacataaatcagaatgagaatctgattgctgccataatgtcggtgtgatctaatcaatatataaatatacatat

SEQ ID NO: 200148 - DNA, 1493 bp, Cannabis indica
gccagacactgcccaacatagagttggttggccatgaataattacctgggtagggctggcggaccatggccaattgcctgacccagggctggttttccaaagccagttacccagcctaaggctggccgaccatgggcataccctcacccagagggtgtccgactaggctcttgctaacctagggctgcagcccaaccaagaaggtccactcgaccaagccccaacagcatcagatccttctatgcaagcatagttggaccaaataaaggacatgataaagggcttagctggcccaaaaccatcagaccttgaattagataggtcaagaggctttccattcttggtatacattaatgccttttccttgcctaagtttatgatgccgacatggaagatgtatattgtaagagaacatcctcttgcacacatcaagtaattcgagatgcaaacagatctccaaaaagcactggtgatgtgtgatgctagatcttctcagtgactctatcagaaacaacccagtaatggcacttcaagctggctccaagaagatccaattcttggaatgaattttccctagaattctacacataattctcgtcctcgaggtagataccatcacagctggaagaccttgttgaggtgaaacaaagacaaggcgaaccattgaaggattatattcataggtttatggttgaggccaccaaggtcaaaggcctaacagataacagccataatggggggcatccttccattgagtgacttctggaaagatatctagaggaccttaaccaacaatatgaatgagttcctcaaaggagcagacagcttcataaaactggaggaagtcttcagacaagctcagatagagggcaagtcagtaataggtagtcttaggatgttgtacagccccaagacttcccaaacatgcatgccagtacaagcagtgccagccaaccctccagcatcaaaaataccagaggcaaccgcaataacaatagttctggccagaacagtggcgaaaaaggaaagtacaacacttgccttacaccacgaaaccaaaggagaaggaggagaagtacatgtgcttcaccctcctaactgaaaaactggagaccatttacatggctacacaggctactgtcccatacaagaagcctcctcctatcaaaaaggagatgagcaagagggacatgtcaaagttttgctaatttaacaatgatttggaccacgacactaacgagtgtcaaaacttgaagagggagattgaattcttcataaagaaaaaaaatccccacttgcatcattatgtgcagaacgaccaagctcaggcataagctgcccagaatggagaccttatgccaccaccaatgtcaggtcacttagtggtcataattggcagacgccatattacaggcgagaaaagcaatgccagaaatctctaacacaagcctagaagcgacatcttagccgtcgaagaaagaggcttcaagcaa

SEQ ID NO: 200149 - DNA, 957 bp, Cannabis indica
ttaaatgtttttttttaggaaaaatgttttataattaataaattattatttctcacaaatattaaatttaaaatcacgtgtaactaaaaattaaaaatggtgcaaagttatttttgttggaaaatcataccccattcaaaaacattattttcttaaccgattaggattagatttttttttccgtccatttaaaaccatatcattttcttatagtacattaatattttcttaacggattaggattaggttttcttttcatctatataaataataagctttgttaatcaaagtacaaaaactagttaataatacctaagactttagattgctcaaataatttttctaatcatatacaactttataatcatatataatagatatggcgaatactatttacgatatgagtatatatttagattggtcaaatactatttctaataattttgcacataactacccaactgaagaaaataagtacgtaatttttatagtaaatttttgtcatggaatatttcctgctgaacgcattattcaaaatgtgtgggatgtgagcatatttactcaaggattttacaatcttgatcgtgtcaacttcaacagaagtattctattgagaataggtgtgacagactcaactgtactctctacttttacagctgaattagaaacttgtctcgacgctaatcttaacaatcttccggattgtaagtatcttattattactgtttatattgctgctgtcagtactcaagaataagaggaagaagaagaattgataatatataatacaattagggaggcacaagatgccaactggcacttcaactgctgttgctgctaaagatattgttgccaaccctaacactgctacttaatttgtcttgattttattatttaattattatttttttgaaatattgttattagttttattagtttagatgatttagatcacat

SEQ ID NO: 200150 - DNA, 1355 bp, Cannabis indica
tatgacctgttagatagctttccagttattattggcgtatatactttatctttttctggtcagtgtgtatctgtgaaaatatatccttttacaagaatattaatatatactcaagtaaggtatatatccctttacagttgtggcaacatttagacatatcctgattcgtgcattgcttcattttattgatttggaataagtatctttttctttttgaataattatgaataatatttgtatataataatatgctatttttattattataatttacatataactataatgaagatatataaggcgcgtaattttatctttcctctctttaattttcttattttttttaaattttttattagttttaattatttaagatgccattttataattttttttaattatattaatagactaagtaacaggccgcgtttcatgaatggttatttcaatttgttatcacaaaattaatataaatttaataaaacacaataagtaagttgtccaaatatatattatgctattaaaagttaaattgaaataaaatataaaaaaaaagatgttcggaattaagatttttcccatcctattaggagtgggtacctacttagaaataaaacaaagtttatgatagattgtagtaaacaagagcttagattacctcacataatcaaaaacttacattgcatttattagattaggagtattcacggtgcgagcgatgtaaattttggtcatttttaaaaccaaacaatttatgcagtttttacaatttttacaatttttcaaatcttaattgcaccgtaagaccttaaaacgtgaacaccacaccgcaaaatgaggtgtgacacaaaatgaattaggtagtttacactatcaatattataaaacattataaaaaaaattaaaatttaatctaataaaatttcaagaaaaaaatatcttattatttttttttgtcaggatatcttattaaacatttaatgtctttacatatacactaattaagtcactatattaaattatctctaaaaattatataatatctattctatataaaatgtggctatgtaacagaatttttggtttaataatttttttaacgtttcttttttttttttaaataaaaactaacggagagttaatgattgaaaattttcaatcctatttttaattttaaatatactaaaaataaaataatttttttccctacgattgagaacttttaatcattgtaatttttcaatccattcttaaatccaaaaatcttattttttttttctacaattgagaacatcacaatattcttaaacccaaaaattcctttttttttttagagaaattacagtgaaaaattc

SEQ ID NO: 200151 - DNA, 1650 bp, Cannabis indica
tgattttcaaattgagatagaatatgtttcttaattaaatcagtatacatagtcatgtatttaatcatgttgtttaatttaataagcttttaaagttttcttgtgcaagagatatgataatggtcgggaagaaaaattgtcacccaacgacatgttttagctagcgacagttaaccgttaccaaattgatcatgtgtacgtatataaatatttatgatatatatacccaaatccaaacaagagacatattatgatataactggcctgggatttgaatttgatatatttatattatttttgagtggtgttgtttgaaagaagaagtagaagttgggtttaattggtagtagacaagacaggagaatgaagaggaggacaatgcgcacgacaaggactgacctccttccatgtcgtattctctgcagttgttaggagtggagaaggagaaagacagcttcgtacatatataataccctttgggagaaaaatggggtttcttcacagagaatcaaaattaacaaaatatgctcagtacttggaacttgaggccatggttacaaattttcaaccttggagtagcttgatatatatgctgttgtcaaaactaccaacttttgtctaattgaaaatcaattcatggaccaatctattccggtctttgaatttgttttttgtctctatccaactttttttttcttgtgaataagatatttcactcaccgcataaaggaagaaaagacaaactcaaaggattcattataaaggccaaagttgagttgacttcagcactaccacaaaaggccctagaaaccaaatttcccaagtattttttatggcacaaaatttccactaatgtgttcgaatgttctttctaagcattgctataagctactgtgtgtacccagtagtatcctataagataaattacttgtataatctaacaacagattacatatatttaactaaattgaaatatgtaatatgacatagacattatgcaagcaatcacaacaagaccaataaaacattacactgccagaaccaaatgcagaagttggattgaaactttaatccccttagaagtatgatatccattttgagtgattgaataaagaacccaacacatttttaaatttcaggctgcaattgtaacattgacttaaaatgtgaagaaacgtacgtcaaatccagagaaaaatcttaagcttgacaattcaggggctaacgtgtacacaaaatgtaatagagccttttgattaaaatgttaatttaaagatgctgaattcaaattttctcatcgaatgaaaaagctgatataggtatagcacaggaactgctttaaaatccaaggataacactcaaaactcaaattcagattctgtatgatatctacttagtttctctattaattgaaaacataaatttgactactgttcattcaaattattcaactccgaggagacccatctacaccacttcagtctttgaattctcgtcatcatcgctgctgctgctgctcattaaccaccaccggatccatatttcttgcccaaaagaacaacctgcagcttgtcataaccagcaagaacaccagcacccgccactgcacgcaaaatgtttgcaccagcacccttgaagagtgatttggta

SEQ ID NO: 200152 - DNA, 4096 bp, Cannabis indica
ctattcctctagagtattttgactaatgctatggtcgtgtttcgaagaacgtaccttttcctttctattaaggatttgaactggttgttcctcataggaaaaatttgactatagttttaggatttcgtttctcaagacatgagtcgagtttgacacatatttcctccacattgaattatagaacaaattatgcaaaactaataatgctggtggtaaggctagccaatacgctacttgcccgaccttcttgactattggaatggccctatgaacctagggctaaactttcccatcttcctaaaacgctttacacccttcaatggtgagacccgtaggaagacatggtctcctacctaaaattctatgtctctgtgcttaaggttaacaaacttttgtgcgtgctttgctaagcaagcacctgagccttaatcttttctattgcctcattgttccgctgaactaacttaggacccaaatattttctttctccagtctcgtcccaattaatcagggaacaacatttctcaccatacaacatcttataaagagccattcatattgtactctgatagctgttgctgtaagaaaattctatttaagccaaatatttactccatgaatccttaaagtccatgacacaggctcgtaacaaatcttctagtatctgtatcatcctcttaaaccgtccatcagtttgagggtaaaaatttgtattgaattccagctttgtacccatagacctttgtacacttaccaaaaactttgaagtaaacttcggatctctatctgaaataatggattttagagttctatgaagacaaaatatctctttttcatacaactttgcatattggtccactatgtaaattgtctttaccgacagaaagtgtgctaactttgtgaaacaatccactatgacccatagcaaatcttacattcatgtggttctaggtaaatcaaccacaaagtctattgtcacatcctcccacttccactcgagaagtgataaaggttgcagtaaccttgccggcttctaatgttttgtcttaatttgctaacatgttaaacactagaacacgtattccgttacatcttacttcattctacaccacaaataatagggtttcaaattttggtatattttggtggtactcgggtccaatgaataaggtgtagtatgagccttattcaatatctctttcttgagctcacaactgttcatgacacaaactcaattcttatacagtaacattccattgtttgagattgagaattccttaattagcctgaccagctaatacatccactcaaactttgactaactcagaatcttctaaatgtacccatatgattctttctaataaatcggattgaagcgttgggttatgaagtttcccaactacaaattcaatactagttttaacgatatccaaagccaaatgagttgagatcactatggtactaaaaacatgcttgagacctttcttgctcaaagtgccagccaccacattggcttttccaagatgatacaaatctaacagtcattatccttgactagttctaaccactaggggtgttcaaaaaatttacaaaccacccaacccgaataaaccgcccaaaccaaaccgaataaatcgacaaaaaatacaacccgaaataatacaataaaaatctaaactgcccaatgaatatattgggtggtttacaaattattctaaaccgcccaattaaccgcaatcaaaccgatttataaattttttaataaaagtgtataaaatatattacacaaattatatttattagtcaaactattttgtatttaaagtttttggacattttaatattttaacttaaaatctagactttatagttaacaatttttattgcatttggataaagaagttgaagtttaaaatttatataatattattactttttttattattttattcaattatttcatgtttactcaattatatttatgttaaattaaagttatttatttagactatatcatttttttaacttgaaatataaataatttatttttattttttttttaaatcaaattttttgaattagaaactaagaataataattataaaagaaaagtgaagaacggtttggacgggttaacccgaccaaaccgacaaaatcattagacggattaaactttttctaatttttaattgggtgggttacaattaaatatttgcaacctgatatttatattgggttggtaaaaatatattataacccgactaaactaagtaaaaatatattatgaccgacgtacacccctactaaccacctcctttgtctcatattcaaatctttctgagttataaagacgtacttgagactctttgtgtcaatataaatctctcatttttctccatacagataatgccgccgaattttcaaaacaaacacaatagcagcaagtttcaaatcatgcgaaacaacaatatgcacaaatcatgattaacaggctctcatcggtataactaaaagtaggcaaataataagaataacaaaataacatattctcttttattttctagaaaatttggcagcataacgattgtatttgaataaactcaaaaatcataaactacataaatatttatacaaaaatatgtgtggcactcaatgttccaaaacagtcttgaaaaatatacagattaagttttaaatttttttaaataattaacaaatcataaaaattagaatatctctaatattattcagcacatataaaatcacgttcaataatcaagttgagtccctacctctcccaattcgttaaacttttcctagaaagatgatcctaagctctcaagtttcaaactccaattttttagtccagtcttagatagcactcccacctataataataccatgtcaaatagctaaataattatcatcattatattctacatttaaaactgagtctaacgacatataacataaatatatttaaagtttggtgttccaaaacttcacctaaacgatgcacattaactatcagtggcggtagaaattggtgtaccagaaatgtcaccaaaaataaaggtaatatataccaagacgacatcctcttgagtagatcatacccatgccaaccgtttatcaaaatgatacacaatatcgctagaaatttgccagaaaaagagcgagctacaaaatcgttaccaaaaaaattagcagactgggcaaaacggcttaatgtagattgttctcctcgacgagttgagtgtagtggtgaagaagactcgccaaacgaacaccagaggtggccgaaaaacctgttttaaagtttaaacattcaaactttgacttgcgatcccaggctaacgacgacaaaaggggtggtgccacttggtgattgaggtcgtcggtgcctagggatttgaatggtccgacacgtggggttggacagtggccgaagggtggtcgccagagttacaccgacaattatatttgtgggttttccttttgtggtctagagagagagatgttttccttttagtttatcctttttttcttcatttttaactcagtttgaccgagtctttacacccatggttgttataggctcttaattaggtgtaaaatgaattaaataaagtggtttggctgttacacaaaagctaggatcaaaaatcaaacgttcaagatagtttttgtccaacagctacttcaagcaacatgtcgcttggtgtaatttttgcaacaccattttttaagttttataactttcactttgaccaaactaaaaccaaaccttttccaactcatttctcttattaatatctatttccctaataaccatacattttaattccaacaatttatttgtacaataactcttttattacacttgaattgtgataaacaaaaagaattacaaataataacaaatttcacataatttatttactatacatttatttttttttaataattttgagataacttaatatatattatttatataataatattaattaacacatattaatattaaattatagaagtgtatattattgacgaatacggaactttaataaaatgcttttattattattattat

SEQ ID NO: 200153 - DNA, 1696 bp, Cannabis indica
cagtttggtgggcaggtgtggtgcatacaggatgatgagggcaattaggcctgcaagtcgggggctgtgtgaagatgttggaaggacttgtggaggtgactgtacctccacctccaaagttgttgcaagcacttgtttcaggggagtcttttcatggagttaatgctgattctgggggtggcggcgggggtacctactggcactggtagcgacttctctcctgagaatattcgatttttcaaatgctggttcggaatcatctcttggtaaggcctcttcccctgtaaatgcaaatgtgaatggaccccatgatgttcgtgagcttaatataccaaaggtatatgcacatactatatagtagctttctttctcttgtaaaaatagagttacagaagaaaaagaaaatgtgattttctgtagattatcttgtgattcaaggatagttttggtagaagtttctaaccttttaaaacaacaaaatttagtctcttgttctttcattatttttcataatcatagcacactcgagcatagagatggagttaggagggaatagattatctcaaaggttcaaaatatgttaggtatttatcccaacaagattacttaatgacaaagcttagcttctttctctaacaaatcagcttttttttttaggaaaaaaaaagaaaaagaaaacatttgagtcttgtcttttaggtagtaatttgtgtggagctgtaatgattttgagagctagtaagtgcattttgacatttgcttttacatctcctgtaaaggctacttatctgccaatgcctcacacggcctcattttagagctttaagttgatataaaaaaataaaaatacaaagtctagtaaggccaaaatataagctgaaactactattgtcaaaagaatcatagagcacttttctcagtctgatcaattatttatcactttattcatttctcctatttcattgtttctgatatatatatatatatatcaaagtttcatcatgacaatgtttgacattctcttggcatatacataaggctatatacatacatgtattacttcctaatttatacaaaaagattcagctgcatcaaactttttctttttgccctttttgattcatattggcacgtaatataataatggtcatatcttttgtaagatattgtgaatgtggtgccatagttgtaaagcatcgttggattctttatcagacactttctgctggaaaagaaggatcatgtgagtcatgattcattaatatggcccatgattttgtcactgacaatttttgttctgtcatctgtgctaagtgctctgttcagtaaaaatctcccaccattatttttcttgtcttttgggggctcacttaactgttccacttagatcaatcatggatgggtccatgaccttaagttgtagatttttcatctctaattatttatcaatttaataggcccttttttattatttatattgtggtgttgctaatttgtaactattgaacaatatacaatagaataagaagctcattaataatatttgaaattgtacttaaattttatgaaagtttgtatcactattcatcaaatttatatttaggaaaaatagcaaattttttcttgaattaatacttgctctttagttttacttacattttttttgtatattacttttgatttactctcctactca

SEQ ID NO: 200154 - DNA, 921 bp, Cannabis indica
taatatacatgcatatatcctcaaatgatggaagaactgatcatgaatttttttttttttttttttttttttttttttttttattgaataagaatcattgctcacttttaaattcacaatcaccaattacaaccaaataaatacaaaccattacattacaaatcaactcaacttctattaaatctattctttacaaattttagagaaccaatatctgatatcattagtttgaacataatttttaggcataactaatataaaataattctaataagttgtatctctgtacagtgtttaatgtaattgggttcaaaaacctttacatgtgtacaaatatttgattaaaaagtaggtagttgttgttgggaagaggccaggttaacatatttagtgtgtgaagaacatgagtaagagaaattatcactccttcttgtgagaatgtttggtagctatatagctcctccttccatggtaagttaggctcgcgaatggaccactttacgttcatcctttacgcgcctagctagctaacttccctcgccgcctcgggaatgttcatatgtttccaataattatacaatgagcaccacatataattattaaaaaaaaataatattgtacttaaataacttcaaaattaatttgttggctagagaatactgttaatttatttttataaatcttaaagcgctttaaactaaaatgtgttgacatgaaattaaaattaaaagctagaagagaactaaaaacacacattattctatcaagccattacatgatcaaatattgaaaatagtcttaattaagcttacaaattattctatgaagggaagttgataagtgctacatcccctgtcccctgcaaaattcatactcttcataaataagttacctcctaaatatgattaataatacaagtat

SEQ ID NO: 200155 - DNA, 734 bp, Cannabis indica
tacagctaacacaccaccttctcactagactcgcattcgatggaacgtccccaaccttactgggccctctactggtgggttgccaggcccagggttatcgttatgggctagcccatgttatgaaaaggctacgaagatagggctcgaacgaaggcccaacaagtaccacctatttcctttagctggattttcatagaccagcatagcatttatgatttattttatattattataattttatagaaataagcatttatgattatgaattatgattatgcttggaagactatggattgtgtgttgttaaataagttggttttacaatataatcataattttgaaaaatatatgtaatcataattgtccttgctgatttctacgtgtacgagactaattgattttttttttaaaaaaaattagtaattaaaaaattgatttgtggttaaagttgctatttttgtagattaagaatttgttttagtgctaatacctctaccttaaattgtaaaattcgggcagcccgcccgtttttataaaaatctatttttttagaagaaattgtattgtatacttattttattttatttgttttaatttttacttttatttttatattctttaagatatacatacttttatagatgatgttctcattattatactccttaggttaatgtaaaatatgtgctagagttaagtggggagtaagcatatattaggcaatctactcaaaa

SEQ ID NO: 200156 - DNA, 654 bp, Cannabis indica
agtttcgtgaatttgtctttcactcgaacactttcttcgttctgttgcctagccaacaccccatccaagtttttcttctgtcttagatattgatttttgacgagttctaatacaaccttttattacaaatgttttctcaacttctgcgtctgaaaacacataccaaaatatctttttcctttttttttacggcaatattcgttatagttacaacatgatgtaaattttttaaaaatttcgaataatttacagtatcaacaacagagttcgtaatatttcagtttataaaaatgatgttgtaactataatgaagtcgtgaattttttatgttaaaaaaaatatttcaaaaaagattgtaatagaaggttgtaattaacactcttaatcaaactgagtgtgagacagtagtggaatttcgattgatcatcctcaatgataattattctaaatttctcttgtagctctttgtgcgaagatgccagtggagaaaatgttgccttttgctgctctagtagtaagtttactctttagtactcttgttgataaagaagccattagaataattcttagctaacactttcacattcacattccacctacttttcctatatgcttaattttccaggcgggggcctgctgtagagcgttgggagc

SEQ ID NO: 200157 - DNA, 1714 bp, Cannabis indica
aaaattattctgtaaaaagaaaagaaagaatttttttttttttttcaaattggtacactataattcttttgtctatcttcatcatcattattagtgtctgtccttaatgggtgtggcctctccatgtattttgtggtggtctgtttaaaatgtcgtttctctagatgtgagtttttttttttttggtttattttcaagtgcagtttttcactcattaatatgatatttaaactaaaaagttagaaatatatatgtatatatatataagatgatgatcattataatttaaaagagagtattagtgaagtagatcaaaagaaaaaagggaaaaaaattaacccttacacgtaactatatgtgtttataatcagaactttatttatatcttttaccctatagttggatttgattacttgtaactcttgtatatatcagctggtcactttatatttatctctatttcttcctatatatataggaattaattattataatgcttctaaaaccaaagaccaaagacaaaagatagtttgtttcttaagattaggtgcttgattgctatttaaagcatatatatcaagattttgttgtcagcaataatgttgtttatttattcttttttttcttaatttctcaaaagtcagtctctctgtgtgtgaaacaaaatatgacatatcagccttcatcaatatatatcctagctatgtttccatctttgccctttttttttttattttaaaataattttgttaatttttatttcgttatatctatatatagccatgaccatgagccatcaaaattctttatataacatatctttattaaatataaatagattatccaaattatttcattaccatgcatgcttcacattctttcattgtttaatatatataaatatatttatatattaatatggtggcatggaccatgtggtgttgtctttacaaaaaaaattagattaattatcaattagagaagctatactaccatccaaaaagaggttgagatttccatttgttcttagatttgcattttagaatccatgattttcaggaacaaaagatactaaccctttcaatttattttattgattcatcaacattaatttattcccaaaataaattgatataatttatacatgtatgtgtccctttggattaatttacacactacacatttaccttttgttttgattattacaaataatatttatgtcccacgtcttttggtaatatgtagtaactatgctcttaaagcatgcacatgcatacacttttgattttttgtgtcatgagtcatgaccatatatatatatatatatttatagcaaaattaaacgagtgagtagtctcaaaaatattatgactccaaacacgtgcacatctagaatatggtatgattatagataattataacctccaaaatcacaaagaaaaaggaaaggaaaaaaaaagttttgaattctttgtcacgaaaaaagaatcaaatacatgataagagacatatacatacatatattatctatgtttgtgttaacagacaaaattgcttttgctgcgtgcgaccgttgccactcggttttgcttttgtgtctaaatagagaagactttttttttcatactttatttttaaaaatttaattaatagtgcatacatataacataattcagttatattaaaaatgattgttacatttttttaataacta

SEQ ID NO: 200158 - DNA, 984 bp, Cannabis indica
atatatatatatattttttcttagtgtaagggaatctatttgataccttaccaagactattacagataacatctagaaatgaaataataagattataagaccatacatgtattaacaatatataatctacaaaaagtaggtcaggagaattcattgagacatgtactaaattaataaccaactaaacactattgatatatgtatctaaaaactaacaaatgagtagtcgctcaaaacattttcttgttctttttccaaattcaataatattaataataatcccagtcccagcagcagcaacagcagcaacagccaactatttcacttcaattattatccatctgacgtggctcaattaaaatgtaaagaggctttccattaagcctactttcaccctgtcaaaataaattacaatatgaatttgaaattcaccacattttttttaaaaaaaaaagaaaagaaaaaacctacattggtgtcccgcaatcctatgacacaaccgcattcaaccacgtcggccccctggcgttctacaaaataacaaaattgatagtatactgagtgagtggggaagtaatttagaaataataataaatatttagttattttgagtgtcacctaaaagtcgaattgcagcggaaagtgtcccaccagttgctactaaatcatcaattactaaagcacggtcaccagggtttacagcccccacatgcatctctagtttgtcacttccgtactctagaacataatgttctgcaattacagcacctacccaataataattcaaaaattaataattaatcaatttaataaaaagtcacctaataaaacagtaaaaaaattatattatcattcaaattacctggtaactttcttggctttcgtagaggaacaaatttggcaccaatagctaaagcaattgatggaccgaaaatgaagcctctcgcctctattcctacaaaaatatattttattttaataatt

SEQ ID NO: 200159 - DNA, 1346 bp, Cannabis indica
aactcaaggagacggagccgagcattgggtgcctccaatagaaaaatgaagtaaggtaatgtgacgcagcaatcttgaagaaactcgacaatttggtgttggatgggttgcccgagaccatcaggggctcctcattcatggtcatacaaagttatttaatgtccaagctacgccagagttagctgaggctgtgtgaattcgagaagcattaagctggataaaaccagccggttgcagcaggtggtgctcgaaacggactgtttatcggtggtccaagccttaagaagttcaattgttatgatttctacgtttggtcaagtggttaatgaatgtaaggctttgcttaatgacttaagaaatgattcttttattttattcgacgatcagcaaatacggtggctcatgagtttgctcgagcttctgtatctttaattttagtttggagtctgttccaattgttttgttatctgttttggtgacggatattgttatctaataaagtttgattttccattcaaaaaaaaaaaatttgcatgccatatatatctaaatttttattatttccccatatttttataaatatccttttgttttatcattataaaatatttctatattttagtagttgaaaataatgacagtaattcataaaaaaaaaaaattgttatattgtctagttaaatgactaaaagcaaatattgagaaacttttgtataataggaaaaatattggaaataaaaaataattaatggtaaaactctcttatattttaattatatatactaaactatgtgatctttttttttttgtgataatattcccttaactttatttttgtttgtaaatttaagatgtcaattgaatattatagttcaatgctaactggaattacctctgcatatacatgtgtacatgtggtactaaaacatcaaagtcaataaaaatatgtcacgtctacacaagtgtacatagtgacaactcaattactatttaacagttaaatttaactgaccgttcaaatttgtaaataaatgaaattaaagggtattgccacaaaaaaaaaattaggaagtttggtgtctaaaattaaaatataacagtttcactgcgagggaaaaaatgatgaaagtaatgccaacaaaaataaattaggtttttattttttaaaaaactaaatttgcggcatgaatacttaagatttactcccggctgcagataaatgtctatgtttaatttttaacggtaataatacctaagttattttttagtaatttacgtaggtacgtagctattaagtgtcacgtgactattcacgtgatagtccctgattagtttatgtcattaat

SEQ ID NO: 200160 - DNA, 925 bp, Cannabis indica
tgaatgatagctttttaaaaaaatgcttctagctttgttaaaagctatcccaaacgcaccctcactaaatacaacaccaaaacaatttcttttttcctttctattaatcttttacattataaaattaatgttcgtacacttgggataattcatttctttactatattttgtttttcttttaaacattaaatatgtgcctcacaagtcacatggtcaggcaaagcatttcttctctcactcccggccctgttgttgttttgagtcaaatatttgttgctcgcgcacacaagcgtgtcttcaggtacatgccgggctcgtgtcgcttgcacgtggcccgtattctgcatcttaacatcttcttccccaatttgcagggaattattattattttttactctaaataagcaattaaatttctattcaccataaaagtcttatttaattaattataccccaacaagtgatgtaaaatacatatttctctaagatatagagatgatgagagaaaatactactttatgagctcctatattatatatccatttcaaagaatgttattctagctaatctacatttagagaaaactattcatccttcaaatcatattttatttactcatgtgtcctttttagtctttgcttattattttatagtatatttaaaaaatataatgtttaaataatataaatagaagtataaaagaaataatgtatggtgtaatataaaagattgagaaaaaaataaataatataataaaattttaataatgtattttaaagtataaagaataaaagtcattgtaagtgctctttcaagttttttatacataaaaaaataatattggtacatcattatatttgtatgtagtagtaaaataactctactttcaacatatggaaataagccactaaaactaatttagtgg

SEQ ID NO: 200161 - DNA, 522 bp, Cannabis indica
tggctcaagtgatgatgacatcagaagtgctacaaaaacagaatttgataaggatgtagattcatatttcctagttagtttcttaacatttcttaatattcttttaattattatatatttcattgaatgattttgtattttttgtttatttcaaagaatcttttattatggcacgtggtcgtcgcaccactcgatctactgctcggagtcaacaaattgtaccagtcattgatcctcctgctccacctgcacaagttgttcgcactactcgatcaactttacagaatcaacaagttggttgcaccactcgatctatggtaaaaagtcaacaacgtagaaccactgcacaaattaatgtagagagtgaacaccctcatccctccacgcagtctgaaccctccgcacactctcctgtgcagagtgaacaaatcaatgtgatgacccatgtacgcagtgaacaagcaaatgtacagagtaatgatactgaagatgatccatcttaccaaactccatctggtaaat

SEQ ID NO: 200162 - DNA, 1763 bp, Cannabis indica
ggatgattactctagcatttttttccaatagaactgggacttaattggttaagatatatgtgaagctatgttgtcatttccacattctggacatattcttaaaaaaaaatcaacacaatcgtattcacacttaaaaagtgatgtcctaatacagttagtgatttcagacctattgtgtgttacaatgtaatctacaaggctgcaaccaagctgattcgtttaaggctaaaaactattcttcttattttggttgcccagaatcagggaggttttatgtctgatagatttatcacacacaatatctcacaagatctgataagacattatggaaggagatcaactaaagcagggtgtatgattaagcttgatttacagaaagcttatggtacactagactgggacttcttggaagaaattttacaagcttttcaatttcctatgaaatttgtcaagcttgtaatgacatgtgttcgcactcccaaattctctctgatgttcaatggaactcttcatggatattttgaggggaaaaagagactacaccaaggagatcctatgtcaccgttactcttcgtccttggaatggagtacctgccaagaataatgatttgaattggagccaaatcacattttaaatatcatgatagatgcgcggagctcaaacgaaatcacctaatgtttgcagatgatgttatcttattttgtcatggagatttcaaaagcattcattatgtgttacaaggtctgaagcttttctcatgctcatatggtttgcaaccgaatcaatcaaaatcttccatctactgctgtggaatggaagataatgaaattcaacgcatcattgatagctccggattcagcaagaaagaggtacctttcaaatatttaggcattcctattttcgctaaacgtatctctggcaaagaatgcattgttctagctaaaaaaatgacagctagaataagatcatggtgttcaagaaatctatctctaacaggttaggttattttggtaaattcagtgttgatgtccattcactccaattggagtcaaatcatggtctcaccaaagaagacaaaaaggacattgaagccatttgttatgcatatctttgaaagagtcaatacatgcctcttggttctgggccaattgcatgggaaaatgtctgtcaaccgaaggctgcaaggggaataggccttaaaagaatagcagaatggaacattgcattagtgacaaaatatgtttgggcaattgcgaataaagaagacaacttgtggattaaataaattcactatgtctacataaaggggaaagattagtggagttatcaagctccacaacaggcgacctggtactggaaaaaattgatctctgtcaaggatcaaatcagagatagaatgaatgtacaacagttcacaagcacacattacaagatctccaatggctacaaaattgtttgtccccctcaaaagaaagtaaattgaagtcatggagtatgagtagacttaacatccaatgacatagctttgttatgtggactgcaatccaaaacagactcagaacaagggaacgactgaaacatttcagcatcattcctaaagatcactgcttgttctgcaagcagcaaccagagacaatgacttgtttttctctgcaatgcttactgcaaattaaagagtggctggactagagaatggattcaactgatttaaaatcgatactaaggtggatagagcgtgccaaactaagtcgatttaagaaag

SEQ ID NO: 200163 - DNA, 769 bp, Cannabis indica
gtcaaagaatttgtttacatcagattggcaatccaacaaattggtataagtggcctaaagaacgctacaaggtgaaaataaaagcattgcatttactggagcaaaactacttatattgaaaagaactctgtatccatattgaggactatctcgtacctggacaaagattctattagtgtaagggcagatccgctatagtcttgaggtaggtgttcaagctgtaaatagaaacggtgaacaatttacaattatattcttttaaatctaatcagaagctatataatatgaacttataaccattacattaccctcaaatttccaagctcactaagggaatcagtgaaagttttcgtaagaggctttaactcatcatgctgcaaacaatatagaaaacaaacatcaacacgcaatgatagcacggtttaacaaacaccatgagaatgaggattctaaccggaaacgcatggttcatgtagttgtcatatgcatgatagaacctgaaaggagaagaaacaattaaagtcattctgtaacccaattcattagttgcaaatgggagatgttttctcatggcgttatgtgatcaaaatctgaacttttctttgacactatcattaaaacaaggtttcatgaagaagaaaatcaaagcatcaattaacgcaaccaaccatacaccatgaaaaagaaaaagaaaaaaaaagatttttcttttcatgatgaatacccagaacgtagatgaataaaacaaatgagaattaaggtggttgga

SEQ ID NO: 200164 - DNA, 2595 bp, Cannabis indica
ataaaaataaaactatatatgcgtttctccactatttgtttagcttgggaccaaaaacacacctcagatagggcatactcaaacttcttcggtatagaatgacataattcatgaggtatcgaggggcctagtattgaactttcctagaggcgaccctatcttggggtagctctcccttagttaagtaattcacaatgggatccatccaactaagttcttgattggtgattgcactaggctccaagagatactcaatgggaaccacccctagtttctcaacctctttgtttgaagctaactttgtcaggcgatccgcgtgggcattcttttctcttgggatttgctcaattttgtaacccttgaatccctaaagtgattcccttgcggccgtgacgtaagaggccatcctttctctacgagtttggtattctccaagtacttgattaacaattgggagtcgctaaatttttttaccttgggggctcccacaacttttgaaaatctcagccctgctagtaaggcctcatattcggcttcgttattagaggcttgaagtttaaatcgcaggcagtgtgaagccttaacccttctggagatacaataactattctcgctcctgttccattttcgtttgaggcccaatctacatataatttctaggtgggagcgatcacttcaggtgcatgagcagttacctcgattttgttgcattccacgatgaaattttccaaggctttgcctttttattgagatgcacgtgacatactaaatgtcaaactgactgagcttcatggcccattttagcattctccaaaggcttctggtttttgtaagagttgtcaaagcggatggttggtaaagaccttgattgaatgtccttggaaatagggtcgcaacttctgggaagttatcagcagatagaaggccagtttctctatcaaagggtaccaaactcctgcacctatcattctcttgctgacataatagacatgatgttgtacttcctcttcttcctggaccgaggttgcactaactgcattctcagagatgcccaaaataaaggtaaaggtcttctcgcgatactagtttggataaaatcgaaggcttatccatgtgctcctttaactttttgaacgtttcttcgcactcatcggtccactcaaatttttgacttttctttaatatattaaagaatgggatacattgtcaatggatttagagataaaatggctcaaggttgttatttttcccgtcagtgtttgcacattcttgtgtcatgggggaaggcatatctagtaagacttgtattttttgggggttagcttttattcctcgccggctcactatgactcccatagattttttggattttactctgaaagtacatttgttatgattgagcttcatctcgtactctcttactaccccaaagcacttctttaggtcattagaatggttcttagtggtcttggacttgaccaaaatttcatccaagtaaacctccatgttccttcccaacagattcttgaacatccgattgactaaccgttgataagttgctcctacatttttgagcccaaagggcatgaaaaggtaacaatatacccctttgtctgtccggaagctagtgtattcttggccagccacatgcatcttgatatggttgtaaccgaagtaagcatccatgaaagatagcttctcatagtcgaaagtggcatctactagctagtcaattcgaaaaagtgggaagcaatctttaggacacactttgttcaaatctgtgaaatcaatgcacacttgccatgtcgcgttaggttttggtactagtaccggattagctaaccactccatgaataaacatctcggatgaagatattcgacaacatcttgtctagttcttgctgtaaggcttcaaatttaattgggtcaaggggatgccttttttgctgcacaactggcatattcttgtcaatgtttagaacatgagtaatgatgcttggactgataccattcatatcttcgtgagtccatgcaaagatatatgccgactccttgaaggtttccactattttacttcttttgttggaccaatgcctttcccaaagcgaatcacttttgttgaatcctgcacacaaatatggattttttccacttcctccataagttcaagtttagttttttccccactcgaggatctagctcatcatgtacccccactggatttccttctttggtgtgctggaccacaaagatagcttgcttggtggccacgctataacattttattgcttctccctggttcactcgaactactggagtgtgtagggaatttaaggcacaagtgtctaatcgaagttatggctccaaaatttaccaaagtcggttgccccattatgcgttgtaggctggcaagcaatctaccacaacaaaggtacaatacttgaatgtgccttaaggagggtcaaggcacagtgtcatcaaggagtctaattttcctataggaacaagagaattcccatcaaatcatatgagttaggaaccactcggggacaggtcctagttcgtgaggctgatggcaaggaaggcttctttgaa

SEQ ID NO: 200165 - DNA, 874 bp, Cannabis indica
aaaaaatgtgagctgtcatgatttgaccatgagtatcacgaataatcagttacaccaattacaatattataccttaggttaaacactctcatgtctcttatacctccgtacacaattctcgtttaaatttttatattttattttataattaaataacatttctagcaaaaaaaaaataatattacaaaaaatgatatgagattttgattggacataaaaatttttggaagattttggacatataagatctctataatgcttttttgaaagattttggaaaatataaaattaaaatctatataaggctaaatgttttgatatggatatagttttagacttgtgatatggaagtgagaggtttgaaccgtacttaggccacaatttataaggaatttctgcactagatctcttaaagggttgttttttgtagaatttttatttgtttgatatttagaaaaaaaaaattaatccaattttttttatgattgtatacgttgtagctatttaaaatcatttttaaattttttaaaaattttgaatagtataccgtgcttcaaataaagttaaaataattacttatcacacgtgtaagaaaaacaattatatgtgcaataaaatatgcaaatcttattttcagtattgtaaactactcagatattttaaaaaatttacaggtagtcctaaataactataatgtaaatgataataataaaaaatagactaaaaaattctcatatataccaaaagagataggaagtctactaaaacacctctttcgggggtgtgctataaactaaccctattttatatagatttgatttttttttttgacaatgaagcaactttggtttcatttggtaataattttattttt

SEQ ID NO: 200166 - DNA, 557 bp, Cannabis indica
cttcttaccaaagctctttttcaggtttccaatcagtgaaattttctgtttttttggagtttcttgggtaaaagaattgaactttggtgaaatttgatgggtttttttttttgtttaattgagaagtttgttgcaattagggtttgtttttatggggattgaattttgatgttccttttttttttgaattttgtttatggttttgtaagtcttttaatctgttgttatgtcatgttatggaaattagggcttgtggttatgaaattcaactatgtgtttcgatgaattagctgacagattcgttactggggcctataagttaagttgaatgtataattcgttggtggtttcatatgagaatattgtgagaaactttgagaaaaatgattctgataatgagttacaatcatatagggaatgatttagtcttcaatttaagagaattatgattgttttgtggccatggcgacatttcggattgtcaactgttctgtgctttactttgttgctctgtgataatgttactgtttggttggtttggaagggtattattataa

SEQ ID NO: 200167 - DNA, 649 bp, Cannabis indica
attttaacttttagttgtagtttcttcataaattctttaatatactgatttttgactttttaccaaatacctttataacatagtgatttttgaaaaaacaacttttaatttttttcaaagttgtggtaaaaagggccaagcatataataaaatcttatatatatatatatatatattcttttttaattagaaatttataattacaaaatagtaatactttgaagaaaaatatttgccaagagtattttaagatgtgggaaaatttaaactaatgtgcattcaaattaacttaaattcaaatcaagaaacaattaacaataacaatatcaacaaaacacaatttaaaaattgaggaaaaaaaaagtagaacagagaaattaaacaaagcaagaaaattattaaaaaacaacacaaagaattatacaggttcaagttcgatatatcgatgtgatttatctctactttagttctgggacaccactgtaaacttctttatcgattgagcaagaacacaggtacaatacaattgataggattctttgtttggcttctctccaagtgtttatctctctaatactcttacccaagaagcttctccatctacaaaagcttcttcttacaaaacccaaaatccaatctctctctctct

SEQ ID NO: 200168 - DNA, 973 bp, Cannabis indica
gactgggcatctcaagcctcccactattaactgcaataaccttaaacttcctttagtttctagtaatggaaatgagaataatggtgtgcttcaattttaagagtgtcaagtgtaaaaacgtacatatcttccttagtcgatattgatgtgtcatattggagttgtactaattccgttaattaataattacgaattttttaaactcgaagactttagaaataaaaatagtattaattcacatgttatgtgtaatattattgatgtgatgttattagctgtaatatgcttgttagctaatttttaatttctttaaaagtttttatttatgttttttttttggtgaggtgaatttctgtaatagttgattttcaatttaatgaaatttttccgtttcaaaaaaataaaaatggtattgttgagcataatataagtattatgtggatatatgtatgcataaaatattcttgcaataataaccaagactgttgttcgtacaatttattaatctattttaatataataaataaaaataaatgctaataattgtgtcatatagttggatcatcaatgctcaagtctagatgaaatattggtaacatagcttctaaggactttaaatgtgagtatttaagttggatataagtgataagctttaagagttgtaagctataatgtagccaacaacaccgacaattattcattgtcgtcattactcccggcgtcgatacttttttgatagttaaaaggctatcaaatgtaaatagtaacaaccacaataattcataattgttgacaatgtgaaataacaatagttaatattatggcaaaattagtatttatagaaaaagacatatggtcaaaacaaaattagtttaatattatagcacaatattagctggttaaatagctagatctacactaattaattatgaagaatttatattagagaagaggttttatttgtaccccatat

SEQ ID NO: 200169 - DNA, 856 bp, Cannabis indica
cctgaacaaatttgccaaagccacggccgagaggagatccatgatagagagcaagtaccgcaccagacaaaaagcatgtgaaaagtataaatggacccaatgcccatcctaaatttgtaggccagcagacaacatctccaactttgatatccatataagcccaaaaatcagatgaacacctaattggagaaagatgtgtccatggaatagcttttggttctcctgatgaacatgataaataagaaatggaaaccttgttagctgaatgtcagttagcactaaatatgagctttaaagaaatctatttacccgttgttccagatgaaaatagtatattgatcaaagagtcaactggttgatagcatggagagtactttctgccaataaaaggaaaaatgatagcgttaaaaactttaatgtcatctaggatatgttttggtcacatcatgataggattactagaccttatataaggttcacctacactagaagagttgggagatacacaggtcaggggtgagctggcagtaagttattttggagggtattttgggtgccgagtgaagtgaaggccttttagtgccgaaagggagctattgtgtttgttaggcaagaattcagataattctctgcacgatggagagttttctctctctttttgtaagagactttggtgtccttttactgtttcaataaagcttctagaattattcatcaattgctaatgttctattgtttcttttcttctgctgctattttcatgagtaatattctgctgttattgaaacttactggttcagaagcctatcggatcatttaaaagttctgatataaaagtaatgaatctttcatttgc

SEQ ID NO: 200170 - DNA, 2626 bp, Cannabis indica
tgcccagggccggccctgcatgtccttcttattcctttatgtacttgtgtttaatataattttttttttatcatatcaccattcaccattagtgtaattaagtaacgactctcatataacttttagaaaatatcgctaaccaatcgtgttacttataaaaatactatataccaccgatacccaataacaatactcataaatttattatctcaacaaatttttattaaatttttaattatagcacacgcttttactaatcaatgagttttctaaaaaatcataccaaattaaaaattttaattaaacattaaacttttataaatatacaaatatacgaagaaatcgaaatcccattttaaaagtttacaacatcattcaaaatacaattcacaaaagtgtcactccgcgattacaaaatgaaggcccaaggtgtcccaaaaccaaacacttcaagtttaaccatcttgatctgtagaatcatcctcaagctttgggttcactggtgctcaactttctcctttcatttacctatacatgcaaataatgtttgtgagtcaatagactcagtaaaaaaaacataaaacatataatatattatcgacttgtatctaggtgcacgtacacctatttacaagacttcaaatgaatcaagaatgttcctaccagaagtacaacctctactacatgcattaagtactcgtcttgtactagtgttggttaggctgaatcgtacatcgagtaccagtgagtgttatacatatacatattttatactaatattacctcgtttctatattcaagtgtgtcagtcaatgtgaatggaaattcacttgctgaacggaagccctatgtcacaatataaaagaatgttttaatggatttttttatctgttttggtatattatatacataatagttttttagtctaattttttattatcatgtatattgttaatatttagggttacctataaatttttaaatttttttaagtagtttataatgctgaaaataaagtttaaatattttattgcacgtattttttttatacatgtagtaagtaactgcttgaacgtgattttctgtattataaattatcataatttttaaattttttttacaaatagtcataaattatatatataaaaaaaatattattttaaataccaaaataaattatatatatttgtaataattttggtgtgacatattttcgcagccatggaacccaactactactcttgtctttattgaaaaagttcacaaaaaagagaaattaaaaaaaaaaaaagtaaaatggtcaatgagcgaatggtggacaaatagtgttttattgaaagaaaataatagaaaaatggcaaagtatttatttttgatttggttataaagttttttttattattattttgcttgactatttggttaaagttttgatgggagcttttctatttgctcttcataaaataataagcacaatttaatatttaaaaaaaataattttataaaattactcagaatagcttataatacactccattaaaataggtatactaatgcaacccctaactgtttcgtatctaaaccacttgaggctagctcaagtggccataagtgggtgtgtgtgtcttggaggtcctgggttcgagtcccaggtaaaacataattgtaatatataaacgctcaaatcaaaaaaaaaaaaaaaactgtttcgtatctacaagaattttttaatctaatttttttttataatcgtgtacgttagttatttaagaaatcctgcaaaattttgagaaatttagaataatttataatatagaaatcaatgtttaaaccgtttatttcacacgcgtataaaataaaaaagtcacacgtgcaacagactctttgaacactgttttcgacgtattaattttttttgaatttttcaaaattttgtcaaatgtcttaactataatgtatatgatcataaaaaaaaattagactaagtattttttagataccaaaatatataagggtgcatcgatataccaattttaagagctgtattgtagaatttttttattatttttttttttacattattttatattaattttaatattttttttatattgggagaggggattcaaatttgggactttctcaagaagtgtgaatctattaggctatatcaatggccacttttataaattttttttcaatcatgtgttattttttttatttttttaataaaattttatataattttttttttattttttgttattatatttaaaatataattattttcacttaataagtatactttttttttgaaggataataagtatacttttttaaaaatatcaattacgaaaaaaaaattaaaaaaaaaaaactaaatataattaaatatataatttatgtattcttttacttttatagtttaaaataagtatctgaagtgattcttaaataaaaattattaaaatatagttgtatttataaatatttaaaagggatattggcggctaaaccacctgaactttacgttttgtaacacttaaccacaaaaatcgaatttttggcggctaaactacctaaattcccattccgttttgctctgcacacttccgtccaaaaatcg

SEQ ID NO: 200171 - DNA, 696 bp, Cannabis indica
aaaaagaaagaaaataaaaaatactcctatgttatacctctcaataattttcacctaattcctttatatagaatccattcatttagcagtttataaaacaatcatatacaagtttaaaaaatattccaaatggtctctttcctaaagagaacagaaccaggtgagataacatattctacactggtgaagggttgaaagttgagaattcattcaaaatgccaagcctcaacagaccaaataaaacataacaggtaccctatctccagtctctatgaccatcaataaggattaacaggaaagtctaaagtttcaatttctagtcaacatcattaggggtagatagggtacataaccacctgccaatcgagtaaataaacagtaccatatcctttttccacattaaaagattaaacttaaagaacttatgtgttgaagtagtaagacatatagcactaatgtaagttgactaagttaaaagcttaagctgtaaattttaacccacatataacaagttctccacacaagaaaacaaaatactaaatattaagtaaagcaaatttagaagacaaatgaactacagaatttgttggagacaatgctaaaaggcaccttactcaattaacggccaagacaaaacatctttcggtagaccactagccacagagtatacaactagtggctaccaaaatgtcccag

SEQ ID NO: 200172 - DNA, 1295 bp, Cannabis indica
gaaacgaacaaaatttgtttaaaacaacaagtctgaagtcatactccttccacattttgctgttgaataaaatttgttcaaaactgtgaataaaatttagagcaatattttactgttgaatagtgttgaaatttttgaactaattgccactaactgcagaccttcattggttaattagaataattcaattgatatttacacactaattgatgtgattatatgtcaattattaatttatgttgttttcgtctatagtttgatcatatgaaatattatgtgatgtcctttatttgattattttgtttgagaaggagcgaagctgcattccactattgactattttgtttcagatgaagtcttaataaaaaagctatcaaattgtatctaattaatgatgatataaaaacataaacaaacactacttagtgaggttcacattgcagtattagtattagttaatacaatattttgacattgagttgttctaataagttgtgtaaaattatcaattctttacaataaacttgacccgaactccgaccatggcctagactcgaccccggactagacctcgaactcgaaacatgccccggacgccaaactcgaattcgaaacctagacccggactcgaattcggacccgtgtcccgaacccgaggtccaggtagctgttcgagtctgggctcgagtttcaggttcaagtttggcattcggggcatgttctgagttcgaggtttggtccagggtcgagtctgggttcgggtccgggtcggaggtcttgttctggtgttcgggtccaggtcgggggtttgggtgttggtccgggtctggtgttcggggccgggggccggggtccgagtctggggccaggtccagtgttcgggtcgagggttcggggtcggtgtccaggtcaaggtctggactcaaggcctgtgtccgagtatgagtctgggttcagttccatattgtcagggtatgggtccgaggtccaaggctggggtcagggccgggattaaccctagaccttttgtaagcattataaatataaaacctaatacgggtcatttattatgtattaaataatacgactcacattgtattaaaatttatgatcgtaataactaatacaatacaatgttttatttaaacatagtgttatttgttatttgatacaatacaaaccgtattctgtctaccaaacaaactcataatgtgaacaaataaatagttagattttgataagataagtcgagtgatgttttggaagttggtgttttggcaacattgtaaaaaaaa

SEQ ID NO: 200173 - DNA, 744 bp, Cannabis indica
tttttaattgattagatgattagggacgaatgcagctccatcaattaggggctaaatgctaaaaaagaattaagggggactaaaatatattttttttcaaagtaattttattaaaaattaagaaaaaaattgggaggggtccatacctgcagttaataattcatatataaactagtcttcctattaaaattatgggctccgcggatcactctttaaggaacatgatttctccgtctaataaatggagaacgggaaaaggacgtgaattactttttatccctgaatattaaacggagtgagtacagggatcacactccttgccccgacggagactcatttagtattttattttatatttttagccaataataatttataatttataatttatgcgcgtgcccatattttttttagtatattagtatcctaatgaagaatttttaaattgtgttttggagtggtcatatgcatagtgatttcacacttctctcacaaagaggagatctcaagatcaaattccccctccccaatgtaaaaaaaaaaaaaaagttgtattttggataattatttatgtatttatttattttgaaaatgtgttttggataattattagtttattgaataataattaatgtgtaatattttcatttttatgtagtataatatttttatatatttaaatattataaactttaattttttataggggattttccgtcccattctcgatagtgaataagcagg

SEQ ID NO: 200174 - DNA, 1524 bp, Cannabis indica
tcttgagtgaaataaataccacgacttctatttttttcaataaaatcatcacatactaatatttacacttttatatgttaatttggatattatataaaaaatacatgttaaaacagagttataaatacgtgcatattggattggtccgactcgtatattgaaaaacctgtaaaaatacgagtcatgatgcacataccataaaaaatataagttatgttgtgttgtaccaataattttatagggtagccccaactcgtagatgtttgagtcgtgctcgtatgtagtgctttacttgggccaacctgtatttttgtacgagcttgaattcgtactccatgtttttatttttttattacaattaatgagctaaccactaaactatttgtgttttttatagtttcagttacttctatataaattttcaataatagccacactatcatataaaaaaattattagaatttgagttgtgtttatacttcttaagcaagtgtcggtttggtactatgccaaaaagtctacccctacgttaaaataataaaaaactcttcatttcctttaccatttaaaatagcaatttgcttttttcaataatgttactttttccaaaatcaattcaagctcaatgttggatcagtaaaatttacaatatcaatttacttttttctctgaccagagaattaagtgacaaattacttttcactactaagtaaatttcaactcaataagctaaaaaagcaaacaaatatagtttcatggaagagtagcaaacatctgatgtagaataggagatagagttatgggcagtttgtgtctgaaataatatgtaacaacagaattgtcacgtgataactaagttgctcttcatatttcatgacatagctaagcaaatcaaaattaattgtcattttgttcgactgaaaattcaacaagatttgatttctacaaatttagtgaagatttaagaacaattagggacatcttcacgaaagtttgaatggacatcttaacatttattttagtttcccattccaaaatttgtatatagaatttaccctctcactacaattgtcatataatgcaaaaagcaaagttttttttttttttgcagaaattgtcagcatccatgagtggctgtcatcaaagttgcagggaagttaaaacaaattgtaagaaattgtacccttgagatattagtggttgtaactattttcaataacaatatggttcgtttaacacacatactaatttgcaacaatacactcatctaaagatttggacgataaacttataaggtaaggctttcaattaaatcaaagaacaggaagccaaattttaagcacagaaacttatgaatacaaactaatccaaaaagtgaagattaccaaatcaaatggcagttctccaaacctcattgacagtgagtcctgtctgagaatcgtcatcaaggccttacaaaacaagaaagcacattgccaagcttcaacgcatctaaaatgacaacctgcgtcaaaaaactctctg

SEQ ID NO: 200175 - DNA, 697 bp, Cannabis indica
atatatagatatagctgtcttctatataatctctataaaacctattcatcaatgaaaaacgtttgagatagaaagagagatgacatcatcatcattatatttagggcttcaattgagttgctctactcatgagaagtcatctactactactacttcaaaatcacataattataattataacataaatttcaagacctcattttcttctatattcaaggttagttattttttgttatcattatatatatttatacgtataaatccatatatagtgatgatgatgatgatgatgaaaatgaattaattaatttactatattaatatgtatgatattaagcagcctttgtacggagcattagtggaaaaaggtgcaaataatataatgatccgaatagaacatgtaatgaaaaacacttcaatcaaaatattggatgcctttgttgattccatgtttgagattattgatcaaccattgctcccatctcaggtatttatatatttatatatatattcactttagaataattatgtatttatagattaattatataatatatatcttattatatagaaaaactttgagccggttgaggatgagttaggggaggctgttgttatcactaccatccaagggaacattcccaataattttccacagggtgtatacataagaaatggttagtacatatatatatat

SEQ ID NO: 200176 - DNA, 541 bp, Cannabis indica
gctgcaaactcttgtaccttccatttcttagtacctacataacaaaaaaaaaaaaaaatcattttatgtgataaaaaatttcagattaataggaatgacacttaatcggaaggaatttcttttcgaatcgaatcagtctttccaccacaaataaatgtttttgagtcaaaaaaatcatacctaataatgtcttatgagtaagttgttgaagaatgttgaccttattgctaaaaaaataaatcaaattggtcgtgtgcatgaatcatcacattagattttataaggtgaggacttatgtcacatgacatttatttaagtctatattatgattaaaaattccaaaggataaactagtggggaatttgttttttcttttcaatgttttgtgtgtataaatataatataagattccaaaaatggttgactaatacatgcaattgtaatcaaagaaaattttgtacctgaagttgatcaccaagattaataacaaatgaatctgggattggtttaacatcaacccaattcccatctttaatcactt

SEQ ID NO: 200177 - DNA, 635 bp, Cannabis indica
atatacttattgatagcaatccaaaaaaaatataagacaaaatgatcatttttacaaatattcacaaaagataaaatgttaattagaggggaagcttagtttagaagaaaaagaaataagtagtgtacatgtttcaattgcttagtttaaattttttataattaaatatatagtgagggctaattgtgtaattcaattagtgaaagccccaaaaagctattctcacttttacataggttaaagatatgctagggattttattttattttgtttattatttaatataggttggcaaatagaataaatacattgaaatgattttacatagctatgtaacatttagatttgaaatattaaatttttaaaagaaaaataagatattatacacaaaaataaaattctaaaattgctgagaagaaatatacatacggttgaatttaagaaattatttattataatattatatatttaaaaaaataatttggtataattattaatatttatatagagatgaaaaaaggttggaaaccagttcaaaaaatttgagcttaaagttggaaggttcctatattttatatcaacattattttaagagttatttgcggcagaacatccttaagtggttaggtatttgc

SEQ ID NO: 200178 - DNA, 785 bp, Cannabis indica
gttattatttcgactactttgtttagattctcaaaagacgattttgtttttgtttttctgctctgttgacagacacacaaaactacaatcggctttgtcaactatccaatggagaattcaaacacttgttcatctgatgaagagtagtttccgaggccgccttagcttttcgcagcttgttttttaggcgaggcatcatgatttcaagtatgtaaatgaatgaggattgtgtagtgttccgagttaaattttctactagagttttacataattcaagtatgtaaaggcatatattgaattgagatacttgtctgaatatcatactaatttgatgcagtaagaataactgatatttaatagttttgatgtttttaggcaatacaatgtgtagattttataaggggctgtatctttaatttttcgggcaagactgcgatggtgaatgcataacgtagcgcgctattacttaatttttatttatttattttgaaactaggattctcgcctaaccttacaatattttggaaccaaaaaactatagtaagtctcaaatgtaaagaacaccttaaggtttcaagtatcctttaagtgtcatattattattgattcgagtcctacacgtgattaaataaataatatgaaaaattgttaactatttacaaccccgcaaaaggattcgaaatttcagacacattcataagacatcatcatttagaagaagcattcatcttttttcagaagaagccttttagataaattataatcatttggtaaagaaatgaaaa

SEQ ID NO: 200179 - DNA, 1199 bp, Cannabis indica
ctattattgacacttatgtaattattttaaaattaataataattatacttctactcaaaaaaaaaaaaaaaaaaaaaaaaaagagagagagagagagaagacatagacaataccgaaaataaagaatatagaaatgtgcataaaaaattattatattttacagcgtgaaaaagtatgttataaatgtagagaagcattcatatacttttttttaatattttttgcgttctttggtccaaaatagataaaagaatcattatgagtggtctaaataagaagaagagagtagaagtgcatatgcaaaagtaggcgtaggttacaagagaacaaatgatatcatcataatgtagttgaatatcggaaaacacaaaaaacaaattggcaaaacccttgttttccgctgacacaatattcttccagttgacaatttagaacgaaagacaaatgtttctttattgcaatttactacatatacattcttctatgaaattaagctttcataggcatcagcattttactacagtgccacattgatatttctcatcagtggttaggttgttttcattctcaaacaaaatggctgtaataaaatctcagtacaaattaataatacatgtgaagtggatgtatagtagcaatagcaaataaatatgcatagatattcttttgcactactaccagttggacttgaacatcgtggacccctttgatgactcaacaaaactcaaaaagtaatatttataatgttaaagaaagagacttgtgagagcatatgtatggttttcttttctaattttattgatcaatctctcgaattggagatggaggacactcctcagcctctatgaggagatgaggttggtacttggtatatataatatatggtccgtaggtgttatataattctactgtacaattcttcatataatacgaaggatcacttttagggtgcgtttggaaagccacaatgtaattgtatttgtgtgtaattggaggtaattacacaatttggcatttttgtctgaccatgtaattacactgtaactgtgtaattgaaagtaattgaggggttccaattacactctccaattctcatggctcctatgagaattgaatgtaattacactgtataattactaaaaactttccatattaaacgttagctattaaaaaaaaatattattttctcatataattac

SEQ ID NO: 200180 - DNA, 565 bp, Cannabis indica
taatttttattaatataaaataagtggaatataatattaaattacaccagtaatattacactttacatgagtgttaatcactataggtgtcaggggcagacccacattgtagcaagggggcctaaaaaacatcagaaaaaaatatatatgtattttaattagttacaacatatacttataataaaagatgatatttaaagacataatcgtaggtttggtgcaatggttaagctgaattattaaatcctactaacaacactttttttttctttttaatttgacttttgcccatggtttaaaaaaaattacgccctcctcactttaaatctagagtccgccattgataggtgctatttagcatttagcattacatcaatagaaatgcttcatgttaaaagttgtgctaaatttgacataaggtatagcattctatacattgtgccaaatttagtacagaataaatacaatttttttaatgacaattttgccatttattattaatgataagctttaatattttttttattacaatattaccattacattatttttaaatatttatttt

SEQ ID NO: 200181 - DNA, 886 bp, Cannabis indica
agagcaattacatatgtcattgttagagctctctgtttggttgttgttaaaatgtattagcaatgaattatcagcatcgactattagcattgactcgttcatcactaataactttggcgatgacttcgagagaattagcaacaataatgatcattactatagaccttttattgttccagaattactaagggtatctccaatgatagtatttgagagaatgcttgatgagatgaaaagtttaggtgataaaatataaggatgttatataattcgagataaaagaatgttatttttgaaatttggccacataatggcattgatgctatgtttttttttttaaataaaaaattaaaagtggaatatatatataataataatttaataaaaaatgatttatatatataataatgtttgagattataattatagtatttttaaaatgtgttataccattatagtatttttagaagtaagagtgccaaaaataatatggaaaaaataaataaatattatatatttggaggatgtggagatataacacctttaaagattaatgctactattgtaaatgctctaaaatgcagcattggtgcctagcactctcttctgtgtcataccgctattggtgtaattaaatatcgggtttcataaaacttaagaaaataactttcaaggaatatcactaatcaatcgtgaggcgccacctatagaaaatgtccaacactactgatgtccattaacaatgctctttactattgtagtgtaatgatgtatgaatcgttcttgtttcatgttttatttaattggattcttattgagctagaagaatactaccagaaaagtcactacaacaataataggatataggtacgtccaactggggcac

SEQ ID NO: 200182 - DNA, 1199 bp, Cannabis indica
tttttttttttttgagggaaatagttaatagtaactaactttccatataaaaaaaatatttaattttgagtggaactctcaacttccacaaacggtttaataagaattcaatcttcatcgtatttgaaactttaacactcttattaaattgacattatattcaacattattcgaataataccaacaaaattaacttaatatcctcaaacaccctcctaataaaatccatgtcccaactaccattaccaagtttcaaatcaatgagataatatttctagaggtcgaacttatcgaaaattttaaaattattggcctataatgcttaaaaattattcatttctcccaatacttcttagttcacaccaaaaaggcattagacatttaagtgttaacttccaaaatgttgccattaaaaaagtaggcagccctaagaacttcaaaaaatttaccaactatgcctaaacaatacgattttgattttctttgttaacaattatgacatatttacttaagattaatgggaatagattgtatggtattaattctcatttattatattttgaaagtaagaaattagtagcgctggaataaattaggaaaaaaataaaaagaaagattatctcccatttttataagaaatacttttctgtttcctaacttacattatttttattttactttattaattaaaaataagaaaaacaaatatgtcctttaaaaatctataaataaaaaataattttctgttctaacaacaattttgtcaaataaaaaacattccaattacatttcttaattatataaacatgattccaattacagtctaagtttaattttctttggaacacataaaagacaaaggctattgtgaaattaagtaaacataaataaaattttatgcaatagtaattaaaagaaaaatcatttaacaatatctctctcttactctatttttcaaaaattgtacctgaacatccaaatctaagttgataccaacaaaaatctcttcctcatttttagagctattgctctttagaggaatttctggattttcttcttaaaaaataaataaataaacaaagctcatagaagagtgtttgaaattatattcatggtaacacccaatcaaacatgttttatgaacataaaaaaggtaataaaattgctcaaaaatgtttaatgaacaacttaggcttaac

SEQ ID NO: 200183 - DNA, 1094 bp, Cannabis indica
caataccaaacatgctctaaactgctcgtttttgaatcgatcacaatgagttttgttatcgtttgtatctaacctaaatttttttgttcttttccactcaaacaaaaaagaggtactaattgctgattttatagagacaaaacatttttaaatttatatatattatttggaatttttgttcattcatggagaattaattccaccaccccattaataaattatcagtggatctcaaagaactaatcaaattttataattaagagtccccacaaaatcaggttgatctaattggaatattaattgccaaatgatgttggcatgagctatgtgtgtatattattatatgcataattattgaattttttaatcagttcctaaacttggtgttcatttatgttctcagttttccactcattataatacaaaacaaaaacatattaaaaaaggatttttctatcatcaattattacagaagaaaaataaaaggttagatacttagtcacaaatgaacaaagataagctataaattaataaataaataattattaggttcccccaattttgtattggaaaacaacacacacatatatatacatatttttattgaaagtaagtttatgagcaacatcactgtactatcacaagtcattaacttaccatcctattaaataaaatattaaagaaatacagatttgatatgcattgctcaattctttttttatttaatttttttaaaccatttttttgttaaaagtataatagtactatatataattttttttttaattaaataagcaaattttataaaaccaaaacaaaaggtaataaacaaagggtattacgtcccgatcactaaaaaaagagcaaaagtttatatttgcgattagagagccttgaaatctaaatcacaatgaaaagaaactacgaaatataattacttttaatgacaattttttagttacaacataaattttttgtgactaaatgtaacttttggtcacaacaaaaaactacttgtaattaaaacatagtatttaaacacaagttatcactaatttacttttagtcacaataaaaccacatttagtccacaa

SEQ ID NO: 200184 - DNA, 1514 bp, Cannabis indica
atataattaacaccaactaattatattaatcatctgctaattcatacgagacagcttcacctttaaaacatagtctgtcactacacttgatttttgcccctctgttgacgttgcctaccaaacaattaaatccaaaataattattaacaattatattgtaaattattgtaagagaataacattcatctgtttaaaatgaaaaagttaaaaaaaattgaagggcatatttcaccaacatacaaaactattattatatttatatttattacatttaattacaaatatatgttgtaattaatgagtccgcccataactatattacactatttttttaaagtacttttgtaaaatttgagaaaatataattatgtatactataatttaagaaaaatggtgatttaagtaattttgtttaaatgaagttttatttaattaccttcataaagatatcaatgtctggatctggtttgatatttgcttctttctctcttctagacaattcagcaagcatttctgccaattatacataagtatatgtacataagatagctaatcatttttgatagattttgtagtaggttttttttatggaatgatcttgttttagatatgtaaattaattattattttctttgttatcagaaattaattataaatttatttttttatgaaagtgtttattataaggaattattccacaaatacatcaaaataataaaaataattacaaaaataccactatatgaaattttaaatatttttacgatttttatacaatctttttttgttgtactctttttaatttgttgttgattttttgttattgtttttatgttgtttggatgatattttcttgttatttttatgtaatttttttattatttttgtgttgtttctataaaaaattgtaaaagtataaaaaaaaatcttcgaaggtaaaatgtaattttttttattaagaaataatattttatataatattatccctttttataatataaccatagcaaccctcttacaaatttgtgagaaaattcaaatactatataggataaattgcggcataaatacctaatgtttttaattttatacacttaaatacctaatatttatttttggaggcaaaaatacttaatgttacaattctcttgcaccgttactaccacttccattattaacttataaatatggacacgtggagggcccaaatacattatatttatttattttattttaaaatttaatattcttaatataaaaaataaatattacttgttttttaaaaaaataagagagatgcaatattaaattatcatagctgagtgaaccagtgtaatatatggaacatgattatcaaattgaagtgccaatatcatgtaaaattgttatgagaacagattttttttgaaacaagtaatatttagtttctgacattaagaaaatattgagttttaaaataaaataaataaatgtaatgcatttggacactctacgtatccatatttatgagttaa

SEQ ID NO: 200185 - DNA, 1350 bp, Cannabis indica
aattgcgaatgttttaatttgttatgacgacgtcgtttccttgctttaatgattcaaattgcagtattatgtttttctattttttatttttacaaaaaaataatatatatgtatattttatttatgaccagtgtaataacttgagttttttaagggtaaaatttttttaactgtcgtttcacttgtatttaatcttttaagtttaaattttggcagaaaaattctttaaattattgaatttgtaaaaaatttaaggtgtcattcggttaactgttactatatgctgtttatgtgtacacatgacagtttatattggtacacttgatattattattttaaaaatattttcaaaatttaatacaattataagaaatgttataaattttgaaataatttttatatttttaaaataataatagtaggtgtaccaatataaatttgacatatgtacaaaagtgtacatataagtattctatattggcgattaatagtaaaaaaataaatgacgccttaaatttgcaagcggttaagtagtttggagagttttaccgttaaaatttgagcttgtaagattaagtacaagtgaagtaatagttgagagtgtttagctgtaaaaaaactctaataaattttaagtaatatttattattcatcaaattcatttatttttaaaaatgttttattttactgcataaaaaaaaactacatcattattttatttgattttacatatttataattattattctaatttccagtttccactaatgtgaaccaaaaattattaaaatttctctatttgtgcatggaattttttttttaaaaaaaaatccctctttttaattagtgataacatggtgaaattttaggattttttttgggttcgtgtattcaattagattataaatttatttttaattacatatgaatacttctattttaattagtaaataaaagtctccttcaaataaataattgttgagttacactttttttgtaaaaaaaaaatatatatattttttattttttattttttgaaagaaacctaatttacccaagaagaaaaaaaatattaaaaataaaaataaaaataaaaatcattggcttaaaatatatttacttgacttataaattattatttataaaatgaaaaaaaaaaatcctagtacagttatagttgttaatttattatatgtagtcctcttagtacaccaaaatgaatgcaagtcatttagttgtctttttctttttcttttttttatttttaaagttgtatttgcctaagcattatcgaaatattatctcaaaaaaaaaaaaaaaaaactaaagacattatcgaaataaataata

SEQ ID NO: 200186 - DNA, 662 bp, Cannabis indica
aacaaaataaaccatttccatgcgatcaatcagtatttacattttacaagttaaggccgaacaaaattctacacacagcatttctaaattcacaagggcaaaagggagacctgcggatcttttcatgataccaaatcatttctcatcacaaagcggttgaatgtaaaagtgcaattatcttcttctgcagctcgggtttgttcgctccaacaagcttgtcaatttgttcaccatctcggagaaagaagaaagtaggagtggctttaatatcccacgaggagttgaagtcctgcaccgtacaaaatcatgactaaattaaggaaactcatagccaacatttggaattaatgcaacaatcacactatttgaacagataaactaaactataaggtgaagattaagttacaaatatttaagccttttttaactgccacagagatccaaggcaaggcattctacgcaatgagtaattagttgcactcatatagaaaattgaaattcttatacaggaaaagaacaccattcaacatttcatccacgtcgattacaacaaacaaaagagagggatatttctcagataactcgcaatagaatggtgcaatcattttgcatggttcttcacacaacacaaaactctggattttttttaggtttttttttat

SEQ ID NO: 200187 - DNA, 803 bp, Cannabis indica
gcaactagcgactgcaaactactactaaaaacccttaaaccgtaaattaaaaaaaacagttaaaaaaatagtatatatagtaatttctccattactttattaaatatagattaaaaaaaattataaattaaagagaaaaatataaataaaaaaattataaaatatgaggaaaggaatttgtgactttacttttttattacataaaaaatctgataaatatttttaaataaattctatagattagtagattgtatataaattctatattattattgtaacatacaattttttttggttcaattattataataaaagaaattgctacgaataatgagtaagaaaattaaaaaaaataggtatatatggtaatttctctatacttttttaaaagagagattaaagaaattataaattaaagagaaaatataaatagaaaattataaaatatgaggaaaggaatttgtgactttacttttttattacataaaaaatcagataaatatttaaataaattctatagattagtagattgtatataaattctatattattattgtaacatacaatttttttggttcaattattataataaaagagattgctacgaataatgagtaagaaaataggatattagggttaaattattgtatatctcatatattttgtaaaaggtcttcatttgactttagtacatatattaggagatcaattccagtgctaacaaaacatgaaaacccatccaggttgaattttttttcttcattaaattactaagaaattctgtaaatgaaatacaaaaatct

SEQ ID NO: 200188 - DNA, 879 bp, Cannabis indica
tttaaaattggtgaaaaaatcacctgtggccgagaaacaagctaaaagcagccattcttgcacatgtacgaaaggacctccagggtttttggctatgaaaactcagcgtcttgcagggtccagatgcaagcaccttgtgttcgaggtgaggcgtgacctagtttttaaacaaaacttgtctgagatcctcacgcgctttgttttggctcgcacgcttcatggggaaacttcctaaatgaaatcaccccaggtcaaggacacttaaccgtggagttccttcatggcgagctaccaaaagaagatgcttctccctaacataggtaatctcaagcaatccattcatgtccttaaccactatgtagtcacacgcatgcataatctcagaatcattacatacaacgttttcccaaacaatgtgggattgcatagctcctggtcttcccttcgcaaatcacggggctctgattgtcacaacttgactcatgacccctgatagagaatatatccacccacacaattgtcacttttaattcacttagggtttcagacaatactcataaattgttccacttaaactaacactggatcacttttaatcaaaagatttcgttttccaaatcaataagatggatacctccattaactacacatgtcctatattccacttgggaatatcagcaaatttatctcatattgccatttctctaatttatctaccatgtcagatgaactaccactaaataacatacccacacagtccattcagatctttcgatgtccccccattgagtatacaatgtttaataccaatatataggaaaatggaaaatataaaatttcccataaaattagaacttgagtcagtcaaaggactaatat

SEQ ID NO: 200189 - DNA, 982 bp, Cannabis indica
ttaaatgagcaataaaatatttaagccttattttttatactataaattatttaattttttttaaaaaattaacaaatatacaccattataaaaaatataataaccaaacaaattttgaataccgaaataaatatattaataaaaagactagaagtctagagaagtggatgatagactatttttttacgctttaattgtggttgacacgatttggcaagcttaaaatgataaggttcacaataattttctgagtaacgtcatgcattatattgactctatctccatttgttacacatattatagttcttgtttgtttgcctcgttgagggctattgcggctcccttttggtctcctcctccggaagattggatcaaagtcaactgtgatgttaaagttagtgttggttttatgtatgcagtgactctaactagggatcaccttgggacgattttgtaggtggcgttgaacatgctcaactttactggccccttgattgatgaagcagcgacttgcctgttggctttggagggtggtttcgttaaagcatctttttgtggtaatagagagtgactcgaaaatgattatcaagacactaaagggagccttctccactaggggtattgataattatatgcaacaatgtaaattgctctccaaccatttgttaagttgtaatttttattttgtctgaagaacttataactttgcagcccataatatggttaagtggacgtttactaagagtgttattggtttagtcaatttgtcttctattccaaatagtattatcggtaatgactatgaagtctaactgttatgttctagcttttctatctataaacttcttattttcaaaaaataatccaaacttaattttttatataaattaaacaaattacttttgtaattataggcgtagttgtaatattattctcaaagtttgaatgctcattcctaatgttaaaattaaataaaaaaaaa

SEQ ID NO: 200190 - DNA, 948 bp, Cannabis indica
agtctgtctggtcgttgttttctaaattgtgccataagtttattgaaaaatttaaaatttaaataaacaaataaacatgcaacaattgaggatagttggttaaaagatattattcgttttatatttaattaaaaaaataaaataagtaaaccttaattcaaaaattttgggtagttacaaccctacatatctattaaaaaaattaaactaactatcaaaatttatgttatttaaaatatatatattagtaaaataaatttttaataagataaaatggtaaatgattgcatttttctaatcttataattgaaagtaataaaatatatattaaaataaccaaaatttgaaagctgatacttatggtttgaatgttttttttttaaaaaaaatctagattatatttttttaaattgtattattattttaatgtctaataagatcatttcatatatatattaataaataaatacaatatgtaaatatccgaccttataattaaaattaataaaataaactaatcaaattttgaaaataaccataatagaaaatttgtagaaaaaattatttttcaaatttaaagttttctaatatataattaattttaataagtaataaaattaataaaaattaattttaaactaataattagatttaaagttgaaaaataagaatctacaaaaaaatttattgaacaataatctttaaaacttgaaaaaattgaaaaattagaaaaattgacaccatgcaatgcatactgtccgcgcgctagggggagttggaccgaggaaacaccatgcaagaatggtcatatgggcgacatttcttgaacatgcattgtctgaagcatgtttgctcaaacttcaacccacgaaacttgagtttgtgttcccattcgcgcgtgaatgctagggtttcaaccatagcatgtgcggcagccaaatttcaaaa

SEQ ID NO: 200191 - DNA, 974 bp, Cannabis indica
gaaagctgaagaatgtgagttcctagacattgattcagatgaagagagctccagctccgacttgtcgtatatagatacatatatagattaaagatatgagagagatagagatagatcaacatatatcttgatctagaacttaccggaaatctctagagggagttaaggaccgtcgatgaggtgctaggtcgaagatggagggagggtcggaggtgagagcttggagtcgcggctatgtctgaaatagttatgagtttatttttagggaaggaaaaatcctattttctccaaatgcgagtataatttcataaaaaaataaataaattaggaatgactttgttaatcatttaattatttttaaaataaaaaaattattctttttcgagcgcatgaactgcgttggtaaatatgacttttgccactgcagtctgctactgcgctggcaaaactcacttttacgagcatacttttgcgctggtaaaaagtatgaaagggaggatgtttacatgattgctatactagcgcaaatatgagttgcgctggtaaaaataggtgtttctaacataaatgtgtgctggtaaaactttgacctttttaccagcgcagtttgcgaaatatggtggtaaaagtgacttttgctagcgtagttggttactgcactgacaaaagtgatatttcttgtagtgtttctcatcggtcctcaaatcgagttttttttagaactgttgctaataaaagtgagtgttcaaagttgacgcctatagttgagaataactattgattttaaattgtcgttgagaatacccgtcggtttaaataatcgtcggctatactttagcctacgattaaaaacgatcggctattctcccttatattaaaacctctctctctcagctctcgacgaccacacatagcaacctcctcccttacccctctctctctctctctctctctctctctctctctctctctct

SEQ ID NO: 200192 - DNA, 1422 bp, Cannabis indica
caagtaataacgggcaatgatctaaagctgtgattttaggattagtgagcttcgctagattaaattgttgataccattgagaacacaccaaagcacgatccaggaggacttctatccatgcatcagtacctctcccacgctcccaagtaaatggatatcctaacaagtcaagatcaatgagatcacactcagcaagaacatcattaaacccatccagtatcaattgaggataaccgttacctcccctcttatcaagatgactagtgacattattcaaatctccaatgacacaccacgggagagtagattctaacttcagagttcgcaacaagtcccaagtcctataacataaactcctattaggctctccataaaggccagtcaatctccaagaagaagaagcagcttcggatatctccatgtcaatataattgaaagagtagccaagtaactgagcatcagagtcattactagaactctggcatcaaccgaaaacaaaccatcaaatcccaacttaacacgaagtctttcaagtttctctttactagaaaaactttcaaaaagaaaagaaaattgggtttcacaaattgaagctttttcttggatcgggtcggggccccgacccgatggggcagtcccggccgaacacaatcgggtcgctaatcgagtcttttccccgccctgccccgccccagttaaatttttttcgggtcggagctaacccgatttgataattaaaaaaaaatcaaatttttactaaaaccctaaatccttaaacaagatttcttcactgtctcgataattcaaagaagcccccaaccccgactccctcgtctccttcctcaaacaagatttcttcactgtctcgaatttctggcaaactactcgcaacggtaattcttctattttttcttttgttttttttttttgtttttcatttggttttctagaattttaatggagaaggatgctctctttacttagttgtggttttgcttggggggcaaaagtgtattaatggaagagggaaggagatgtagaaataagtactgtgtgtgtgtgtgagagagagagatatattttatatataatttatattgtaattggaaaagcagtggtgggagtcgtggagatagtaatggtaaagttttggttattttgggcaaacattaatatgtgtttatatgtatagggtatttaatcagcgtcccttaaagcacaacgaaacctctgtgtctttctcctcaaagcagcgtcccttgaacagtaagttattcttcttcacttctttttctttatattgtgtgaatggtaatttgaattagcatgcttttacaagaatattgttgtgggtgtttttgcttcatattcattctcctctttttgtctgcaaattttttgggttgtaaaattgtttcaaag

SEQ ID NO: 200193 - DNA, 668 bp, Cannabis indica
cagtagccactccctcacctccactagcaacaccaactgaaaaaccagacacaaccacacctcgactcccacaactgcctcccaacatcgccatctgaaactcatccaacgaagaagctgccaaaagctcaagcacatccaacctcgactgtgtcttcccaaacataaccaaatttctatcaaaccaaatccaccaccacaccattgctaataaagcaaaatcctcacgcaaaatcttatggaaaagcataagaaatatctcggctaaaggctcaatttaaagctttgacaataaattccaacacttgaggcgacaccacaccgggattaatgtgctacaaaaaactaaagcatgctctgaagtttcctcaacctctccacatctctcgcacaccgcatgaacttgtatcttcgacttaatgagttatgttgccacaagaatagcttggttatacattcgctagatgaaaatcttgaccttttgaggcactttcaaactccataagtcgttccaccactcactcaaatctgacaacaaagcaggctatttcgtagtcactgggtcaagagacaaacagtacccattataaccgaataatagccatgcgaatcataatgccaacatcatgaatccatcgcagacctaaccgataaaggaatccccaaaa

SEQ ID NO: 200194 - DNA, 960 bp, Cannabis indica
caaatgagaagtagaaatgactaaagactctattgcacaaggtgtgtaagaaccaaaagcactctctactatctttccccaaaccccataagctgcaggcttacaataccaacttagtagctcaaacctcatatttggttctccaataagaaacaattcaaaaaagaaacatacccagttcacttttttagatttaaatgaagagaaaaaccaaatagtgagaagaacaagggaatgtgttaaatgggttgaagaggaatataaaggaaggaaagtgttggattcaaatattttgaggtgttgacttccaaaagaaacaagggtagacaaagctttacatcagtcagcgggaaattttaaaaaatagtttatagttgaatattccacacacctcaaaaaataacaaaagagaacaattgcacatgaagttaagagtcttttttttatttatttatttatgagaataattgttgttaactaggaattaggatgcaagtggtgtcaacctaattataaataattacgtctttttttctgattaataaaattgctagttgaaaatcatgtcattcctccttttgaaaaaaaacaaaaagaaaaacaaattcttcatatttattttgaaaatataaaataaaaaaaagactgaagtcaaatatgctcgaccaacctccactaagtttattaaaattccttgcatttgacgaactcggaatttttcctaaataggagcttaattgtcaaaagataatatttaggtctactttaaatttattttgtagtataattattaaatttaaaaataaataatatttaattatttttaatgtaatttttttattgacgttttcgccaccaccatcataaagtgacactagttataaattaaattatgtaagacttaatactaattaatatcgaatttaaatcttatttggttcagatctcaagcgtctttgc

SEQ ID NO: 200195 - DNA, 858 bp, Cannabis indica
aaaaaaactcacctttaggcaccaaaaaatgcaccaaactctacccaaaaataccattacttgcgaacaagtttcccaaacaatttaaggtgttttccaagcattgatacaccaaaatacatccaatactcatgcataaaccaagattctgatcaaaactaacctaatctaacatcaacaacaattttaagccaaaaacaaaactcaaaattaaaggcaaaacatatctaaagcatgttacacaaccacccacaatcactattttacatatgtcatcaaacttgaaattccaaccttcaaacattcaaagcacaactcaaatattcacagcaatacccaaaaatttaatctcaagaactcactccaaagcttccaatttaatctaaatgcatcaactacaaccctaatacattaatcacacaataatcaccaagatttcccttgaacctcatcaacatgcatccataaacaaggaataccaagaactctcagaaactcaattatgaagcttgaaaatctgaatttaaaacaagtaaaataggttagaacttagaacaagttgcccaaagtcctcaagcaccaagcaagaagaatccacgccaatttcaagcccttttcctttaaaactatgtttgaactaacaaaatagagagagggagagagagagagcagttgaggatggtaaaacctagaaagttggtttattttggctaaaaaactattttgttgaaagtagattaattggtcaaaaagaccaaaatgcccctaaggcacacataataccatatacacataaaaggggtaatcatgtcatttcactcacacacacatataacataaatcacattttctcattat

SEQ ID NO: 200196 - DNA, 1282 bp, Cannabis indica
ggccatgacagcaacaagaatcaaaacttgaagagggaaattgaatttcaatagaaaaaataatcccatcttcgtcgctatgtgcaaaacgactagactcaggcacaaggtgcctaaaattgagaccatatgccacctccagaggcgagtcacttaggggtcattatcggcaaatcccacattgcaggctagatcaaaaaagctagggagtgctacgctcggacactatgtcatgagcccaaaagcaagatccttgtcatcaaagaaaggggctttaagcaaccaaagctttgagagcctacaatctctttcacagaaggagatcttgctcacgtcactttcccacacaaagaccccctggtccttactgcacaaatcgagaatatgactgtggcaagatgcatggtggataatagagcctcctccaacattcttttcaaatcaacatacgaaaaagatgggcctccaactaactgattttccacctttcccacaagttatgtatggcttttttgtccaagacattgcacccatggggtacatcagattgcccctcactattggagaaagtccaacaactagaactctgatggcacagttcgtcgtagtggatgttccctcaattttcaacgccatgataggtcgactagccatgtacgacctaaaggcggtgacatccatttatcacctctacttgaaattccaaacaaggcgtggagtaggatgtttgaggggagaccaacagtctaccggtcattgtagacacttggccctctcgaaagccaagaaagagaagatgcccaccaggaaccccaaagaagaacccaccaaaggccaatgaagtgcagcctaaatcgaggacgcatacatagatcctcactttggggatcctattgacatctttggacttgtagaagagctcgaggaagtggtgggggatcccacttctctagctagaagactgaagatcggaataggtttggcactggaaataaaatcagtgatgataaaatttctaagagtaaacttggacctcttttcatggtcgcatggagacagggttagaattgacccttctgtgatgaccaatgccctcaacatcaattcaaacttctaacacgtcaaaaaaaaaggaggttgttggacaaagaatgtgcctaagcgctcagagatgaagtcgagaggctatgggcccatgacttcataactgaagctttctatccagttttggtgtccaacactgtgctggtgccaaaactaaaaaaaaagtggagagtgtgca

SEQ ID NO: 200197 - DNA, 921 bp, Cannabis indica
ttagtaaatacatatgtagtattattataagaatttttaataagttgtgtttttgagttagtctgttcgtgctcacgtgtcgtgttttgtttaagtttattttttttctgttgtgtcgtgcttaaatctatatttttttatgtcgtggtgtcatatttaagcccatattttttcgtattaggtcatgctcgtgcctcctgagctcgtgttgtatcgaaaatcccaacctatatttacaacactagtttatactattaagaaaaaagtaaaataaataaataaataaataataataataagtaaaagcaattataaaaaacaaaaaaaagtagttttaaattaataaatgagtgggtagcgtatgtattgttttagttagcccaatatgagaaaaggccaggcccaggcccaggcccagttacaaaacccaaagtcttggctgtctctccctcaaatctctccattaccctaaatatcttatcaaacctccttcactcgctgatcggagaccggagatcggcgatctgagaggaggaattccgttttactcattgaccgctggataagcatttacttcactcacaacacaacacaacacaacaggtgctgtactttacttagggttttaagttttgaggttgctaactaatgcttgcttgagtttcagagttcaagttctacaaggatatgatttagcttattatcaaattctcttttttaataatagttaggttttatatttgaaaagttacaatatgcatatctgttaatagaatggtatgagattttgttctaataatttggatagaaagatttgagaaataagggccagggccaaagaaagaaagtttcataattttctggttttgtatggtatttgtatattttgtttctgtacactgtgtttaagtttaggataat

SEQ ID NO: 200198 - DNA, 1843 bp, Cannabis indica
aggtcctcttcttttcccatcttggtattgagacgaaaaagtttttcccaagctcatcaatagcttccgatcatggttcattgaacgatcagcttggattccaagcttatcgggaacctttctctgaaccatattccaagaaagaacaatgaccacaagctaaagacaagtagagaatttggtttaattttctttccttagaaaaaaggttacaaaaagctgaggagaatttagtttgtgcttttgggcatgttggatttcattggaaagaaaggagattctttggaaccaaaacaaccaaatattcttcaattctgatacatagctgctgcttcttttatttttctgattattttatgaatttattttaaagacttaagatggcatatgaaatttgaatactgctccctaaaaaaagtttcattactggtaaaatggaagagtataatattgacctatactagcagcaggttgttttgggcttagtgttgtatgcaatcatatatattttgaattatataattatcatgtgtgacataaaggtgtctacatatagcactatataataataattattatattttttttagtattataatatactgtctttcctttcaaaaaaaagtattataatactgtatgattggacgttctaacttaatctttatagaatgacagaaacaccctatattgtttagatgaggatatgcaagatgttatatgtaaaatcttaaactaaatgttcaatcattgtccagagataagctctactggagcccattgcaatcctcatcctataatgctcccaatattttttattattgaattaaagtgggttcatattaattaaataggaattaaacgctataaattcgatcgatggagagaaattgattaacaacataaattgcaataaaaaataattttagaaactaatttatgacttaaatgtttggtatgcctacattatcaaacaagtaaaactaatataatcgaagtttagcaacttatggtaacatgagatgatggctataaaatacaacactatcccaaattttgttaatgtaacaactcaccataattaattaggcaactgcttgtgtaatacattaacaactcttacttatgtccttgaagtaatctttgtatatatacacagtatttatgttttcttttcaaataaaaaagtgtatgtacaacaatatgaaaaatcttgaaacaaaattatattgggggtaacatagtaattctacatggtaggaggataccaacaaaaaagaaggtacaaacttcctattatataacttttttttttaatcagaatgcctattatcattttaatggtggggaacagcacccaaaaatgaggtttgggcggttgaactatgcgaaggataagcccttggtcggcgattatgggcccccgggtggagcctacggcaggccgtaagtttttttttttttttattttttttacaattacttagaaagtcacagacgctcccctctgccatcccaatgaaaaagtgtacctatgaaaaagaaaagtgcttatttgattaaaaggtataaatgaaaatactctcaattcccagtttttcaaatacattttcaataaattaaatattgtaaaattattttaattaataaatttagaataattagtatttgtgctcttgatattaccaaatgtgcatgtggatttaagttgtccattatgtaatgttgaagttgaaaccatatgccatgtgttagttcaatgtggttttgcaagatcatgttggaacatttcggttgttaattagggctgggggaggaggtcacgggatttttacaaggtcgt

SEQ ID NO: 200199 - DNA, 709 bp, Cannabis indica
gtattttttatgcagtattgtgcagtgcaagtaatttgtacggtgtggacggtttaatgaataccccatctttacttagttttgagaaaataagataagctacgagataaaccatctaattgaagaacaacatatacaattcaaaacccattaaatcaaaattattacttatgtattttctagaagaaaaaaaagaaaaggaagtagaagagacacataggaaaaggaagtcaataaggtggtgtttgatttgaaataatgaagtaaaatagaaaagaaataattttattctaattttttgtttggcttcatttcaaaatattagaatgttatttatattttaattatgttttcattcattccacaacaaaataccgtctaatgggatgtttgttatgtaaaattaaattagagagaatagacttgaaaaaaatatggaacaagtgttagaagagattaccactattttaatttgaaaagtgagactcacttaaaaatacaaactctttctaatttaaaatttaatttaagtttgacattgtcattgccatcaaagtttaaacctcgtaccaaacgcagaataagagagacacaagtcagtcaataataatgtttgatctacatttgatatggtataaggtacactctctcatatacttgacatttacaaattaagataagagacaatattaaagaattagtctccatc

SEQ ID NO: 200200 - DNA, 1512 bp, Cannabis indica
  modified_base (1406)..(1406): a, c, t, g, unknown or other
ttttccaaatttctaatggtgaacttgttcatattaaattatgaagagacatgtagatacgtagaaacagtctgatttttaatgtttcataacagttgcattatacagttgcataaacaatttgctaacagttatttcgtctgattgaaatattcgtctgatgcaacattcggccaaccacccagcaaccttcgtctgatgtaactttcagccaaccaccctgcaaccatcgtctgattgtgtaagtgatattgtaagagatattttggtaattaaaagcacataaaaaatataaatattatccacaccttatgaaaatatttttgtaaataaagtgtcaatttatatttttcattgttaattttttttttttttgtttatcttatgttattattttctttctaatttcttttgcgaataatttttttgaatttgcctgagtctatgtaaattaataatttttgggaccactttacttatccactttatgatgaaagcaaaaaattcatattaaaaagagattaagtaagaaaattaggccaaaatggtatttaattaaggtaattgtttaaagcttaagtattgacattttaattatattttgttgtgtgctttagaataaggttgaatatacggtggattgtatttgcatccactacctactatcatagcacaacattagtacactttgaatataataataataataataataataataataataataaaagaaatattgaataatataaaagtggcgtcattaggcgcatatgcgttgtcgtttgtgttagattaaattttagagatgaggaatctgggtgatggattttagtaataattaaaaaatatatttgtgttttttctaattaacatatatggtaatgttgttttgtttgttacctaattacaaataaataacaaaatagataatttttttgatttagattgcagtatggatgagtaatgttgtgtttgtcaaattaactagtgatgcgtgcaaaccatattctacaataaaactatattcacattattattattattatcattattattattattattattatggtaaatattattttagactttgtgttttgcaaaagttatcgattggatcctgtattttgttaaataacaaaatggaccttgtattttccaaaatagtaaaaataggaccctgagcttaatttttaacaatttttttttttaatatcatcaacttgaaaacaattcctaatacgaacagatacaaaaaaaatgtaaacaattttgtcataacacttttagatcggattataattaaatttaattttgacaaaaaatcaattcagggtcttattgtaccattttaaaaaatacagggtctatttgtcatttacaaaacagatggtccaattaanaactttttgcaaaacacaaggtccaaaataatatttacccttattattattattattattattattattattattattattatttattattattatatcgattcct

SEQ ID NO: 200201 - DNA, 1800 bp, Cannabis indica
atgcatacattatactattaactttatataacatatacaatgtatatatttaaggataaatattattttggatattgtattttgcaaaatttactaattagattttttattttgttaaatgacaaaatgaaccctgtattttttaaaattgtacaaataggactctgaactcattttttgtcaaaataaagtttaataataatctgatctagaaatgttatgataaaattggttgcattttctatatctattcgtgttaaaaattatcttaaagttagttatattaaaaaattaaattctcaaaaattgagcctagaatcctattttactgttattttagaaaatttaaggtcaattttatcatttaacaaaataaatggtcaaaaatagtatttgccttatatttaatgatataatatatttattcgttgttattacaataaaataaatatactggtaattgtatataatataattttattattatataatttttttttaaatgttgatgttgaataaatgtatttttataatttttattattaaatttattatagtttgttattttttgtaaaaagaaaaaaatgtatattttactaaactaagaactatatttttcacctaaagcaacagaatttatcatgaaatgtgtcaaattaattgcacgctctttaaaaagaaatatgtagacggtataattaatttgaatgtaagttcatacatgataatttgattacgacaccccatacaaagttagcatggtataaattagttgatatataatttgttggtgactaactaataaaataatatgacattaaaagtttgattaattattgtgtctctcatctcagttgaaagctccaagaaggcattgttgtgacgttttaccctctaaaattggtgacgcattggacgtggccatcagagaatgcgatcaagaagagttaataaacatgcatccataaaccctatactacttaattatataaattactctcttctaacctttttctcttccctagggatttagggtttcaatttttttatatatttatttttttaataatagaagttttattcaaagaatacaatttataaacaccaatcaaagactcatagaattaattctaactactttctatctttcctacttattttatctcttttaaaatgagaaaacttataacacttctcttttaatctaccatgccttagccgagagggactatatgtccaaaatagaaactttcggatgagggtttctatagcttggtcttcccttaacatttgctttcaactctctagtatcacggtgttggtgaggtaggaatagacttttactacaagaaaaacaaaaaagtcttgtcaaaaacattttttgagggcttaagaaaaagtggtgctatcataaatcagatcactttacataagacatttttataatcatacagatatgttactataatatataataacacatttttgacattgttgtaatatttatataattaagcattttttattattatgtatattagattacataccacattttcttattacttataacacccttgttatagtatattattctataacacaattttgcattatttagtatttatataattgtatactcttaaatattgtacgtgaacattccgtttcttttttaatttttacgtaaaattataaggaaaataatgatcattgaaataatagaagttagtaccaagtaaaattctattaattactctaatataattacaatgttagtttaagcttacaagatcatat

SEQ ID NO: 200202 - DNA, 1142 bp, Cannabis indica
aagttgtggaggttacaggatcagaatctccttcaacctttagctggaattcgaagaaccaacgtgttagacatgatttatcaagggctcgtctacgtgcaatcgaaagttctctagagaatgggcaagtttgggttcctccatccccatcccatagaaaaacttgggaagaagaggtaaaacttcatttctatgttattttctttgtatgaataaaaggttggtatgtatgtgtcttgtttggtgtgtctacttttcaactttctctttgaactgtctttttgtcactacaggcacacattgagcgggcattgcacgatcattttctcttcagaaagcttactgattctcagtgtcatgttttgctggattgcatgcaaagagttgaagtccagcctggggatgttgtagttaaacaggttactctttttgcattttgaatttaccgtttttcatttactggaggtttggctgttatgggttgacggtaaagtggtacatatatcctttaaatgtaagtagtattttgaaggttatatcatcaaaatgtggtgttccaccagttctagcaaatttggtttatatgagtaattaggcaaagctttaacaattgttagttttcatctttttcaggggggtgaaggagattgcttttatgttgttggaagtggagaattcgaggtctttgcaacccaggtatcattttcaagttccaatagtactttgtctttccccaattcaggcattttgttgaccggatgtaattttgacaggaggaaaataatggagaagttcctaaggttcttcatcgctatacagctgataaactatcatcctttggagaattggcactaatgtaactcttatccatttaacaatcatattttttggttcatttgatttttctgtctagtttttccaaattgacaaattagcattattgccgagttaaaattgatatttcttttatttgacctattctctgctgtattgttttcatcattctaccgcagtgttgtaatttgttttaaggtgatacaggtataacaaaccactccaggcctctgttcgtgcagtgacaagtggaactctctgggccttgagaagggaagattttcgtggaattctcatgtcagagtttt

SEQ ID NO: 200203 - DNA, 1384 bp, Cannabis indica
catacgtttcttttgttcacataattactccttgtgataatagctgttgtttacaattatgcttacttcttcttcttaattggtgattttctatttccagttctatgagaagctcgaagaaaaaagaaatgcagatgaggctgaaaagaagcgtcagcagacaagattccaggtttgtagcataactttcattccatgctcatttgtgagaccatttcatgatacaaattccaattggcctatctggttcagttgagaaggataacaactcacaaatgtagatatgcgttagggggtttcagttctttcaacaatgtgaataaatcaagactgtcaagtcaatttgattagtcacttgatctagagtgttaaatttctcccatctatgtagtctttagaagggactgactgagagttcagtaaatgttgagctgtgagaggattagctcggctcaggtatgtatgagtaatgaatttgggcaactcactgaggtgctgctcccatgtgagtcccgctgtgatgactaagactagcgacattcatgctataatcataaactcatggggtgtcatgataaatttcaaattgtttacataaacttgttcgatatgagtttgtaaattggtgcatctgaaaatatgcagggaaaaacaatcgcatgatattatgaaagtgtggcagagcactttgttaaaagacaaatcaaataaagatatgttctacatcacagttgccactggtcatataaaaaaaggtagttacatttttcatattttactcaatatgaaatataatatcattctgttgacttaattaatttcagcatttgatcacaaatttttaaactgtcattctacagcagttgcaatggagttgcaatacaaaggctcattcgattgttgctgaattatgcttcctattttaaactgtttcacagtattcatgatggaattcacatttattgtgaactatttctagattacataacagttctttgtctaatatttttaaacattgacacattgcatatcgttctctttcaaatttggcttgcaaagtgtcactttgtgggaattgacattttcaatgggaaaaaacttgaagatagtgtcccttcataccacaactgtgttgtaaggccatttaatgtggtgaggttcataaggttatttgcttctagaacagacatggtgttgttctgaaactaaaagaagttttaaaccagtacttttctaaagcaaatgtttatttgtttatttgtgaagatttagaccaagtctatttggttattagtttcttttttctttttaatgatgattgttaagtaggtcttgaagaattggccttctttatttttttcttattttaagatgacacattttt

SEQ ID NO: 200204 - DNA, 1422 bp, Cannabis indica
cccgacctgccttgctgggggtagacctcaaatcaaaaaaccaggtaacctcgtgcggagaaggcatatcccatttctgggaggcaaagaggacaaatagggcggatagatacttgatgcccttaggagtaaactgggtcgggcaaagacggaagaagtttaccaccttcctaaaatacaaagacggaagaagtttgccaccttcctaaaatacaagtgcaaaggcagcattgccccttgtttggaatgagcacccgaccaagcacacatcccctccttcgggtttgtggctcggtggtttgaggcagggacataacagtccagtttacccagatagccaagtcggtctaaagcacttaggcgtgtcgtagtgaccttggatggagggctcacccacctagcacctaaggcaccttgcctcctgtgaggaactgcagcagtaagctcctcggtgacgcagtctactccttcaaccaagacatcgccgtccgcatctaccagctccccagcctcattgtgtcccccaaaatttagaggtgcagcctcctcctcttcctccgcctcggaagggctgcccggacgaacatcgccttgttcttcaatctcctggacttcggcatccccatcatgatccccctcctcctggacgggtgaatcttgttcagaactgggtaaagtggtgacctgggccgcgtggggatcagacgcgtcaaccctacgcattgtttgcttaattcgagccgtcatcctatggctggatggaaagattgagttgaaaagtccgtcacttgaagagggcagactagagcagagacgagggttatcctcgtacagaagttgaagcaagtcctagtcaattcggtgttcgcttcccaaaactcactagagttcatctataaaagacaacacgcgagatgagtgtttggtcgggatattgaacaaaaaacaggaaaacatgccgaccaagagtactcaacagattaaagaatggaaatattcagtagcaagttaaaacccagaagtttaaaatttattggggtttagggcaaaatttcacaaagctttgaataagcaaggtgaaagacagacaatgtacgatcaaaaggcaagcgtcatgaatcatgaagttgcacagatcattgtaaagaaatattgcaaagtttcagaacctagggttttctaactatcttctacagcaaggttaagatcgcattcagaaattaaatgtacaaagtaaaagaaggaatggaaaacttacttgctgatcgacttctgagtttggtccaaacgaggctgctcggatgattcttgtggaaatttcacggcaaaattaaagcgaaaacttcttttttttttactttgagcttactaagtagagaagttggaataagtgaatttgtgaacaatactcagtcctatttt

SEQ ID NO: 200205 - DNA, 2231 bp, Cannabis indica
agttactcggatacaaggtctgtaagcaaccataaatgaagacagctagattttcgtgaacatcttaatcaaagacaacctgatttacgcgagcgttaaaattaaaatgcacctaatttacccccaacaagtcaatgctaatctaaagcaagaggataaaatccaattgcgaatcattgagttggaagataaattcaggaggtacaaaaatggggaatatgggaaacttcctggttatgactcggacgaagaacccgagcctttctacccaaatatcatgaacttttaatttcacttaggatttaaaaaccttcacttctcgccttacgatgggactacggacccagttgcgaatacgagttagcaaagtcacgaataacttatgctatattttattccccacctcattgagtggggcagcgagtagttggatcaataagtttacccatgagtcaattacttcttgggaaaaattacttaaggatttcaagaaatagtttcaggcaacaagagataggcagcctgaagcaccctcccttactaacatgaagcaactaccaggcgagtcgcttaagcctacctaagtcgtttcaatactgctgctgttaaatttagaaacttgaatgatagtattcaacttactgcacttcaagcagggattacaactgatctctcaacaattggaggggagctgtgggatgatttacaaggtctcacggtgaggaacatcaatgggttaaatgaaagagctcaagtgttcgtacggaaagaggaagcgaggaacgagatgaaattgttaaagacttgctcaggaaataaacccagcagtatctcagcaagtaccatcttaacaaaggctgacaatccaggtggctctaacaggaagagaaaagatgactctagggaatcaaccaaagataagaaaaaatagaagaagcacgataagtacatgtcaatttttactatttataccgagtttaatgaatcccgagaaaacattttcctcacacatgagcacaaggttgcaatttgcaagcctgagcccatgagacatgcgagacacaaatggaaaaaacaaaattctgtagatttcacaaggacatatggcatacaacggagagtgcgtcagttgaaaacgagatagagagccttatctctcgcgattatttccaacaatatgtaagacgacagggtaatggacaaaactagcaaaatctgcccaataacctaggcaaccaaagattacaatgtcatcctatagaagttgatgacattttggtcatctcaagagggctgcatcttgctggagaaagcagtaatgcccaaaaaacatatgtcaaggaaataagaaatgaacaatcagtttttgctccgaaatcatctaagaaagtcaagactgaagaacctccaatcgcatttttggaggaagacagaaagcacgtgaggtatcaacacgtcaaccctctcatcattacaattcagctcaccaacaaaagaataaaaagggtgttggtggataatgggagctcagtgaatatcctatacaaggatacactgaagaaaatggaattgcaaaatgtcaagttaaaaccttagatggtgaatttgtgcggatttaccagagataatgtctccagttaaggatttattgaactctgattaactgtaggcaagccacctatatccataacattaatgcaagattttctagttgttgacctaccatcggcctataacataatgttgggtcgtcctgcactaattggactaggggcagttagttcaatcaaatacctgtctttaaaattttagacaccggcaggtgtaggtacagtgcgaggtgaccaactactagctcgtgaatgctatcgtatagtactacaaaataaaaaagtcggccatcagttaatggtagtcatatcagaggaaggcgagaaataggacgaggatctagatcctcaaatttaagaggaaaagaatcagttgaaactaatcgaggaattggaggaagtttttttagatccaaaaaattccactaagtgtgtatttattgggaaaaatccgaagaaaaactaaaatatcaactaataaattttctgaaggcaaacaaggatcaatttgcatgtagccattcagatatgataggcatcgaacctaaagttattttctaccacttgaatatcgaccgtaattacccagctaagagagaaaaaaggcgacccttggattct

SEQ ID NO: 200206 - DNA, 1248 bp, Cannabis indica
agggttatgataacaattgttatgtaccttttcgttgacaagccaaatggtgtccactcaaatagaggcaaataggaatgcctctctcataaccacccttatattctccaagctccaaagaaatttaacccaatcccacattgtgcccccattatcattaataggaatcaatccccaaggtgaagctctccataggtgagaagcaaggttacaatgctgaaacaagtgttccataattttgacatcatcaccacacaacaggcaggaagagatatcgatttgaaatcggtctccaacgatttttctgacttttgatttgagactttggagaggacgaaaatagagagagaaagcaaccttggagactaccgccattgattttcaacaagttcttttctttttcctccatctttaggtttttaattagtcttatgcaattatttagaatgagaatgaggacctaaactcctaattagggtttttagtggatattgtttgatacttttctatggtttaatgcaattgcttgattgcattaattgcttatgtgaatctatttcatttgtgattaatgcttataattgttttattaccaattatttcttttatgatttcaatgcaaaatttaaaaagtgggatttgattatgctatagtaaaatagacatagattttaatattgaacaagagtactaatatggtctatgtagcaattagaatttctttgcttaatgcaaactatgtgtaatttaccacaaaagtgtaggactttgacacatgatttatattctatatgtcctaataagaatatagataattaataatccgctatcacataaaattaaaaataattaaattgtattttgccataagaagttgatgcaattaaaattaaacgccctaaatttctaatcattgttagttgcctctttgtttatttattttcgttttagtattcaattataatcaccgatctattttcgtttgccagatagaactaggaatttaattaattagtatttaactacagtctttgtaggatcgatctcactcttgtgagttattatttgtaaacgatacgtgcacttgcgtattgaattttcacaacatctccattccaatggagatgctcttactaatcaatgtttttacatttttttttatttcttttgtattgtttcattcagcataaatagctacacaattttattcagttctcatgtagaaagattctataatgccatgataga

SEQ ID NO: 200207 - DNA, 1347 bp, Cannabis indica
cactcatatatattctcaagactttcaatctcttcttttgttttttttttttttcattttcaccaaaaatggaagtattgatacagcgggataaagtctcttcagagattgagaaagaggttggaagcctgccagttcattatggtaagagttagttttattttatttatcttaattatattttacgaggtagaattttgtttcgaaaagattaattttgttagtcgaattaatgatgggattcatttgacaaatattagttattacaacactaattacatccctttcaaaaaaaaaaaagggctagttacaaaaaccaagcttaaaatatattaaagctaaacataatcattttttttttgtattgtcctagacttacaaatgatattgttcatttttttttttttttgctaaattggtctttgactagaaacattaatcatatttcaattagattgaaatatatatcatatcttaattgttatttcaatttagagtctgttctcattaatttattacttggttagtagcaaaagtcgttatttaataaaaaccaatcttcaactcaaaaaaaaaaaaaagaacatatcatatgtgacaaatattaaaaaaaattaatagttagtgtcactatcatgatacattttttttttaattttatagtttataaggtatacatttgaaaaatatgattttttttgttaaaaaatatatataagaaaaacagtataagataactagttatcccttgtagtttttttttttttttttgtaaacggaaatattatataaaaagcacaaacattacacaggattcggctcatcaaacagaactgcttgacgagcacaaggaggaataaccccaatccacatggcactagctttgtgaaccaaagcataattggctaaagcatgagcaactcgattggcctctcggaatacaaaagagataccaacaaaattatcataagaaatcaaagctctaatctgatttagcaaaccatcgatgtcccggcagccattctccttattttggattagatgaacagcttgaagacaatccgtttgaacactaaatctctgtaaccgttgctgaattccaacttgaattcctttctttatagccattagttccagctgcaagggtgggagttcttgctgcagcaccgtagcagcagccgacagcactacaccagccgcatctcgcaccacataccccagacccgaaagcatcccaccctgtttaaccccagcatcgacattgacagtcacctggtcccttgcaggaggaacccatcgtcgatcttcagaagaacgctggttacgttctctgcctgaatcaccccg

SEQ ID NO: 200208 - DNA, 1158 bp, Cannabis indica
gtgagttctgctttggacagtcttgggattcttgggcttccaatttggttcaccgaacttgatgtgtcttctgtgaatgagtacataagagctgatgatcttgaagtgatgcttcgagaggcgtatgcacacccggctgtggagggagtcatgctttggggtttttgggagttgtttatgagtagggaaaattctcacttggtgggagctgaaggggagatcaatgaggctggtaagaggtaccttgagttgaagaaagagtggttgtcacgtgctcatggtcatgtgagtgaggaaggtgagtttggatttagagggtttaatggtacttatgcattggaagttgttgttgggtctaagaaggttgtcaagacttttgtggttgataatggtaagactgactcccctttcgttgtgtccattgatttaaaggtttgaatgattgtttcaaaatttatcggtgggtgggcgtgtcaaataattcttatcactgtaaaaaagcatatatataaaatatatatatatatatatataattgtgaaaacgaaaagtgtgtggggagggtgaagttttatggtatttgtgtaatggaaaagaaaaggaaacagaaagcatatatatgatgtgatgattattgattgtaattttattgaaggaataagataatgttttgtgtttaatactgttgtgataataatactgttgtgataataataataataataataataataattgttaaaaaaatgggtaatttaattaaaactataaacattttttttttgaatgaattaaaactataaacataggtcttcggtattaattttcgatccttttatctttgatttttttttaaaaaaactgaaaatatatcccaattttcaatgagcgccaagctaaagccgataaaacaaacctttaaaacttttatattcaaatttttaattttctaaagaaaaaaatcgaagataaagactgtagttgtagtagtgtatgttattgtgtgttgtgtttgtgtccatatgtttttggcacgatacgatgaagtaaacatgtatacgatatgttttttaaacgtgttgaaacctcaaataggaacaagacaattaattagcaggtcacacgacatgacacgataatataattatgatatgatta

SEQ ID NO: 200209 - DNA, 1107 bp, Cannabis indica
ttagtttaaaagaggctttcaggtgagtagagctttcagggtttactttattttttgttaaacatcaaaagttttggatatgaagctgggatatatattaaggagtaatgtaaaacttaaaacaaaaacaatatgatattaattttttacaaaagctaagaaagtttagtcaaaaaggagaggaatatttagaggctaaaaagatacatgccaataaaggggggaaaaagaaaattaaaaagccaaaagaacccttttcataagatctatggaaataaaaagggttccgaaatagacattttctaaactttgacatatgaagctaaagtatattttctacccctagaataaatagaataaagacctacatcctgagaaagtgacatttttaaactttgatagttaaagaatatgacccatacaaaccaaaaaaaaaataaataaataataataataaataaaggcagttgctttcaaaataacagtcccctcttctaggatatatatatatatatccattgtacataaaatatatataaataaataacccaagttcagcacatatatcaaacaaaaaaaaaatcataaatcaataattcaaaaaaatcataaaatatatgaaaatgatgaagaatttactaacatttttgtataatataataaaatgttaccaggaagacagtggcaagagctggagcagcggtacggcggccagtggaacgagaagcctcaatggcgacttgtgtgacgagagcttcaacgaaatgaccaggccagtcctcatttgtgggctcacgccgctgagacgaagagggtccttcgtaccctgtaccccttcgcctactcgaactagcaccacctgtcccacctcttgcacccacatttccattattattattattagttcccctcggaatgacgaagataacgatgatgatgatgatgatgacgacgatgaagacataattatgacaaataatatatcaaaactaattaaaaatggtcaaaaaccgaattgagctggtgtgtaaaaaaaaaaaaatggagatcgatcaagaccaagaagagaagacccggaaagtggaacagagaacaaaaaaaaaaaaa

SEQ ID NO: 200210 - DNA, 1294 bp, Cannabis indica
ccttgtaactcagccttgcagatgagatcttgaatgtatttttgttgggagagtacaatgccatctgaggtgtgaatagtttgtatgccaaggaaaaaatccattatacccaagtcttttagagcaaatctcgagctgagagcttgaatgagactagtgacttggttagagtcactcccagtaattaggatatcatctacatagataaggatgtaaatgacactattgggagtgtagagagtgaagagtgagtgatctgttttagcagatttgaacccaagactcagtagaacagatgacaatttctcaaaccaagctcgaggagcttgtttgaggccataaatggccttgtgtagcttgcatactttgttgggatgttcaggatcaacaaatccgggaggttgcaccatgtaaatttcttcttgaagatcaccattgaggaatgcattattgacatccagttgtcttacatcccaacccttagacaaggcaattgtgagaacaatccgaatggtgactggcttaaccactggactaaaggtttcatggaagtcaaaaccaacttgttggtgaaaacctttcgcaacaaggcgagcttttagcctttctacagacccatctttgttttctttaactctgagcacccatttgcatccaattggctctcggtttggaggtaaattgacaagagagtaggtgtgatttttcttgagagcattgtgttcttctgacattgcagcaaaccatttggcatctttgagagcacttttgagagaggcaggagtaagagatgccatcaacacctttggttttcgaatacccgatttccctcttgttttcatgggatgctgattaattacaggaggtgctggattggatgtttcaacattggataacagaggagaagcaggtgaatggatctgttcagtgacaccagcagcaggtatagacacagtagggacagctgggagagctatttgagaagcacttgaagtggattcgtcctgaaaattatgagtacctgtatgctcagcagctaaatgatcaacagagacaatgggattagtagcacctgtaggcatagtgtgagaattaggaacagtatgtgtaacatcaggtgctgaaacaggaggcatgagtgttgttggacaggtagcagtgttaggaaatctgggtaagggagagaacccagggggaggaaatggaagtgggtatctctgaggtgctatagcagtaggcatggattcagtattgggagttgacagagaaggagatgactgcacagcctcattgg

SEQ ID NO: 200211 - DNA, 746 bp, Cannabis indica
gtatacacaataaacagaagggagattgatcattctctaatgtctttagaaattttaagcaaaactaaactatgcatgcattgttttatatgcatacattgacaatcaaaacagtatacatatatatagttataaaaatgatgatgatgatcaaaactcagaggcagcaatgttgatagaagaaagagaaaacataccttgttgtgtttgagttctttggattttgcatgaacaagttagatataggatcaaaactgataatagaaaaatgtgaagaaagagaagaagagaagaaacaaacaagtttcatttgaagttgtgaaaatatcaaacaacaagaacaagaaacctttttctttttattacaaacccaatcccatcttcacttctctcatcactctttttgctttggcaggcatgatattgattcctcttttatttttcagtactactacttcttctttcttcacacttaaaaaaaagacaagagagaaagaaattttcaaaatttcaaaagcccccccaaaaaagtaaattcccattccacactttaatcatttcaatttactaaactacccttcattactttttctctttttttattatcattcattattacttattttcttaattattcatgactttttgggcatagagagaaagtatcttaagacatggtgctatcatacttggtttcctaagtttacatgattattagcatgaaaataattaattattgagaattg

SEQ ID NO: 200212 - DNA, 1156 bp, Cannabis indica
aaaaattaatcaacattaactatcattttatctaaattagcaaaaagactttaataaacttcataaatcactactcccactacacgagtgttgagtaatgccccaaaagaaaaactttcctaaaaaaaatcttcaatcatcatgggaatttatatttttatatctacagaattgtgagcaataagtgcgattttcattttataaaaaatgaaagtcttattttaattttcttcactctagtctctagatctactcaaaccaaatagaaaactcatatatgattataatataatgaataatttacggcataaatacttaaatttaacttccagttaaaaataaatacttaagtttaatttttggtggtaatagtatctaagttataattttggaacttctgtaagtattcggttaaataaattgccacgtggcaattcctagttggtccaaagtcattaaatttttattatttttaaaaaaattggttcaaatataccaataagaaaatgacatgtggatataatggcttaacatttaacggttaggtacctacaaagttccagaaatataatttatatattattactgtcaaaaattaaatttaggtatttatttacaactgagggttaaacttaagtatttataacgcaaattactctaatataataattgtgactgaacaaataaagaattaatttatttataaaacttaccaattatatccaactttctcaatttaaaaaagtgagatatcttttataccttaaatgaatcaatcaattaaaaaagaaatacaactcaaacgaaatccatattcaatttatataatatttttattaatctaaatatgccaaaaattaaattaatatatattatatataattagatttgatcagtcttaaattaaattttgaaagtattattcaataaccaatacaatttaataatccaacaatacacatttaatcaattcaaattataattagatattcaatttttttataatttaattgtattaaattagttcggtataattagattgatttagatgttacttgctcctactttgtatttaagaagaaaagaataagagatatgtgaatacaaatagaaaaatctatagtaaaaataagacattttaattttttttaaaaaa

SEQ ID NO: 200213 - DNA, 699 bp, Cannabis indica
tatatatatatatggatataaatacctgttgcctagaatggtatggagttcaatgatgagggcagcctcttgaggtgagaagctcccacgttttaggtcaggtctcagataatttatccatcttagtctgcaactctttccacatctttgtagacctgtataaatatatatatatcagtttatgtacattaacaaacacacacagtacatatgtatacatatatatagaaaaaaaattagttatattattacctgcaagttttggaacagagctccaacaaccatggccgtaggttgaaatgtagttgatgagttttctcatcttcctctggtgaccatagtcctctcttcaccttctgtttgttgcagcatgagtggtgtcccattattattgatgatatgtgtttttgtttggtgaggagaattaattatatcttaattagttataagaggtgtggtttatgcagtactaccaacgaaagaaagaaagaaagaaagagagagaatgagaatgagaatgagaatgggtttagagagagagagagagatgaaagggaagatgatgaatacggaagtgtcatgtagtggtgaatttaatgtggggagcagtacaatattgagatgggggagtggcccagttacggtttttggaaaagggcctgaaaagtttcagtatcgcttcctgtaacaattgtatgc

SEQ ID NO: 200214 - DNA, 1160 bp, Cannabis indica
atgtttcttcttgttagcctcctacatttcttgcttcataaagtcctacaatatttcttaatgggacttggcttgcctcagtgaaaggagccatcaatttcgcttatggatttttattttcctctagaattttcatttctatacctgccttctttgttttgacttctccccctattttctaaaatatgggcttgagactccacacctcttgccttattttgcttttcaaataaaaccaaggcctctgcaatgacttcatactcaaacgtgtccttcccataagagttatgataaggtgatcatatgatggaggaagtgttgccattatcaacagagccttttcctcataactaaactttactttgaaacttatcaattgggaaatcatgcattaaaattactcaaatgttggagcatatccccattgtctagcttccgcatctggtacaactccttccacaagtaaaagttgttagaaaaattcctggacatgtacaaattctctaatgtcgtctctcagatagtcatcttttactcttttgattctatattttgcaagacgctatctaaaagattcagacgaattttactggctgcgatctcatctgtctcctcccagtcttcatccctcatcgtaaaaggatttttctctatgcccaataatgcttcgtggaccttctgctggttaaggagatcgttcatcctcctttgcaagagggaaaaattaccgctatcgcagaatttctcaatttctagttattggcttgtcatgtttcttgagtctcaccaacctctatacttgctaggtgattcccatgaaagactatgtatatttatctcagtactatcaacaaaggataggcccaaatagtctcctagacattatcacccttataagtgagctcctaagaaagatgtggagactcataggcagactacttaaattccaatctcttagacacaactacttacgctgtacgtaagcaatgatgatgtaggaatagagctccagcctcatggctctattaccagtacttaggaataatggaaagtattccaatttcccttcaagatcaatatttgcaggaaaatacaatgagaactcaaataattctttgtgatgtgaaagatcagtctcagctgcaatcacagagcatatt

SEQ ID NO: 200215 - DNA, 909 bp, Cannabis indica
tgactcctcttaaagacggtatcgatcaactctttttcttttttgtttttgagaatttgaattcggttaaggtttgcttactttcttaaatcaaaatatgaagaactcaattgcattgcatttcagttcgttcatattatttctggttcagtactgtttggattaattttctggttcatttctgactggtgaaatagggatttagggtttgcgaattaaataatttgtctgctctactaatgtgctctttaagaagaaataaaaaatctacgtattttatgtcttcaaactcttgaagagtgtagggaataatttacatttaatttattaaaaattataataataataaagaaaattgcatgcaaatgtatgtaatatatctctatgtattaagagaagctattcattgtttgtgtttaatatttccttaatatatttatttgctctgacgatatgatactctgaaattggttgaatgctataaacgtacttttaatatctgtttccttgtttttggcctgttttgccagttttggtaactcaagctgtcatgtgtatgcaattggtctagttttcaatttaaacattgaggtatggagacttatccatactaatcctgttgatatcatgtttctttcttgtgaaatgattacaattttgtctcttatataaattagttgtacaatcctgataacaatcagattgagggccattatggatctggaattcactctgttgctctttgtatgagattctgagctattcccagttctgttactgaaagtcttggcattactttttttcttttttgtttacttccaagttctaattgcagtatatgctgattaaagtatgatgcttgttagaaaaaaaaaaaataatgatgcggttgaaaacttgtttaactag

SEQ ID NO: 200216 - DNA, 1750 bp, Cannabis indica
acaggattgttaaggacattcaatataactgcagttagatcattgccaataacattccaattcttttgatagaaaaccggattcaggccatcaatccccggggctttgtcgccagagagctggaaaagagcttgttgtatctcattagcctcaaaaggggaatcaaggaaatgaatttgctgagtatccagagatttatcgagggctgagagaagaagattggtagcccccccatcggagtgctgcgtttgaaacaaattcccataataactacaaacttctttacaaatctcctcaaacgaagtgaccagtctgccgtcaccacacttaagtttacggatgtggttctttttcctcctcacagtagctttattgtgaaaatagcgggtgtttttatccccagcttgaagccagtgaattttagacctttgcttccaaagaatttcatttttgtaaagaagtgaatccagctgggactgaagggcagtcacctgcttgatattatcactggaaagaggcaaattagagttaatattattgatagatttttctagagcacgaattctgaaagttaaactttggaagccttcattccaggttcgaatatcattcacacaggcctgctgtttttgaagaaaaccattgagggaaggaaggtctctggaagaggaagattgaaaccaacttgacttgacagtatcaaagaaagaaggctcagtgagccagaagttttcgaacatgaatcttttgtgcttagggggggccatactatcatcctcaagaacaactctaagaactcgatgatccgaactatagaagcccaaatgatatagagtagtcttaggaaaagtttgcatccaactatggctaacaatcccccaatccaacctttcacagatagtaccatgcttccaagtaaatttggagccaatcgggtttaggggaaaaagagagaatttacaaagaaaacgctgaaaattcaccatagcgtaacttggaggggaagcattacttgatctatcactaagagacaaataatcattaaaatcgcctaaaataatccagggcagtaaaggtgcattatcatgaagcctttctaaaagagtccaagattgaggtttgtcatgaacataaggtgagccataataacaagaaacatgagtacttatattatcattaaaagttatattacaatcaacatgattagatgaggagttcaaaatattaacaactacatcagaattccaaaaaactaaaaggcccccacctaaacctgatctcgggacctcaaaaacataatcaaaagggagactgcggcataaaatatcaccacggccagcagcacatttggtctccatcacaaaaagaaaagtaggtttatacttctgcacaaaaagggagaggttacggaatgctcgggaactccccaatccacgagcattccaactcaaaagactcatttttctgggcggggttgctccgcaacacccgcctgttccatggaatcgttgagggcagaggaaacttcagcaatagtgggtccagctcgagcacgcttgagaatgcttctaagagagtcaccaaccacaacagtttggggaaggaaggcagctctcttagctccaacaaccgcttttcctttggctttttcagagagtctgggaaagctcccttcagtatgagtaacctcatggctacactcactagccactatagcagcttgctgagaaaatgaggaaggcaaatcaca

SEQ ID NO: 200217 - DNA, 1956 bp, Cannabis indica
ttgtctctaacaatgattgtacaagtttgggcgatctacaagaagtttaaaaacctttgcgctctgataccaaactctaacaccctaataattatgcacactacgctaaccgattacgaaatcttaatcccctaatttttgattactaaaagaataagcgcaaaaaatttaaatttgtaacaactttaaactttacaacgaaaaagatacatgtttcgggatcccgtaagcagcaaaatcagagttacaaaatacatcacaggtagaccccaacctgcttggtctagtgtggcccaaacatgtacaagcatcaccaagctttcgcactcatggttgatcatagacccacgtgctacgctcacacgtctatttatgttagcatagactcacgtgttacgctcacacatctatttacaataaggccttagtagagtttatctgagttatagttaccgagtctaacttgattatgcctttcccgcataaccctattcatatatacataattcatatattacgttctttcagtggtttatcctgatgataaatgttaggtctaacccagttatgtcttatacacataactcttgatatatatgcgtacattcaatatatactataatatataaaatcttagggtaataatcctaacttgcatactaaataattactcatataacatattatagtatgttcaaaataacacatattgagggtaataaccctaacttgctttcacttgattagcaatgttattatacatcgttgctttcttaccttcgtgtaaattctagggtaataaccctagaccgcaattctattaaacttagggtactaatttaccgagtctaatttaattatgccttgagcacaaaattctttattataacatatttagcatggcataacacccaaaatctttaattactagggtaataactctaggtcatataaccgcccattttagggtaatatccctaattccggttcttaattaatcacaaccatagtataaacacatgagcaccaccgcgcttaactctacatgcaaactactgtcttacctgatgtcccatgtacgaggagattcagaatccccgggtgctcctaatcaagtgtcggtaatcctagtcacaatttctgggattcacaaatagggttaatccctaaatccactctcaataatcacataattagcattaaatttacagattaacatatagagctcgaaacaagctttctaacagtataaagaacgtccaaaacagaatcccgagtcaaaagttatggccaaaacaaagtccgaccttcccacgatacaatccaacgggaattccggttggaatagccctgaaccaaccggaattctgattgtctgggcagaaacaacacgaaaaatctcctactcaaatcttccctaatcaccgcctaactttccagagcatcatcgtataacataataaacatattttacagctcaaacacaatgattggaccaagaatcaaaaagtgccattgttgagcaaggtttgagttcttgaactcaaacttgctcaaccacacaattaaacaataataatagctcaattagttctaactcttcaataaaacataacccaattaacagaaaccaaaactaaatcaaaaatcacaaagtgccataattacacaaaaattcaagcttgaacttcaaagcttcaaaccttcaagcttaaaactcagaaatccaagtttaaaacccaaaaattcaacctcaatttgcagccctaaaatcccccaaaaccatctagatgcataactcaatactttagcaggctcaaacaaccaaaaagctatcaatttacttcaatcctccacacatgcataaagaacacttaaaacatataaacattctcttcaataaccaattacagcaacaaaatcaagaattaagaatggtagaaagactaccttaag

SEQ ID NO: 200218 - DNA, 1501 bp, Cannabis indica
gagtatatcgagccaagcaggaaaaataatggataaaagacttgaaatatctacaattaaatctttaaaagaaaaaagtgcatataaagaggttttttaaaagtatttgaaaccatcaaggtcatgtccatctctatttgtttaatcgacaattgcaattggaggatccaaatcaaactatggaacatggcccttgccttcatttcgctcaatgcaaaaatttccaagaataggcttcgaaagagtagccataataacacaaccagttgcatctcgaacaatggcaccaattaatgccaattatattcttgttagcatccaaagcagcagcatcgatgttcaatttatttgttcccagaattggcagttgccatggaatttgtactagtgctaatggcaaccatggattttgaactggtgtatgtggcgagaagtttggagtggcactgacagcaggacaaaatttaacaaaattctccaaaagttactgcaaagtttgcaagctgactagctgggttagcaacatctccatgaaatagaccagagtgtgcaaatgatttgctccatttttggctttgtgtacgattgaaatgcgaataagatagtcatctttgctcatagaacaagattggttccagtcaaaaacccgacttgcagcaccccaaacagaacaagcatacttacaaccaagcatatatggttttctttttatttattctaataattgagaagaattatttattctataaattactatcccttttgtgcatttcttgcatgccactttgctgaattaatttacttttaatgaatttgttgtttatctgtaattaaatcctcagctataattaagaatgtataaccgagctatatatatatatatctttagctgagtctatctaagcccacaaataataccatatattattccatatagatcaaattacatatatataaagaagatgttttttatgacttttcattaatttctcttctctctctctctctctatcaattttattaaaatgtttttttgcagggcttatgatgggattaagtattattactacttttgttaccatcttcttcatcctaatttctattgttaggacagtagatggacaattcgaagaagactttggtatctctagtaatacgatacacattattattattgtagctatttgtgtatttttatatatagtataatagcaggtctttattttttatatctggattactaataaggagattgcttccaaaattgtaatgtttgagctaagcaaatatccatgcgaaggatatacaatatttgcaaaccaatactcaatatgtgcctatgaatttgagaatggtgagaaagtaagaatcactaaatgtgatcattgttttcacaataaatgcactcgtgacttgatcgagagaaagctcactcaatgtcctatatgtagaatgtcattatttactcagtagaaacttttattttataataattaattaa

SEQ ID NO: 200219 - DNA, 735 bp, Cannabis indica
aagtgcatggtttttcagttgaagtagagttgctttcctccccagtttgaacctgatttgctgtagcatccttaggcttgttttgcttattgaatccagggggatatccatggattttgtagcattttttgatggtatgtcaaaggatattgcagtgcatgcaaaagggccggttcctcgtaggaggatgggattctccagcttgattgtcatccttctggttccctcttttatcaccttgaaaagaaaaagtcatggcagagttagcattattggaacttggggcagtgcctctttgttgttgttctttacaagatgaaacaccctattcactttaggtaaaggatccatgagaagaatgcttcctctaacttgcgagtatgaattcgagagtcccactaaaaattacataatgtactccatgtgataatgatcttggagcttcttgactcctccacatgtacatccgttacatgtaaatgaaggcctgtaattggttagttcttcccatatagttttaagtctagttaaatacatgcttatggtctgattttcttgtttaagttcataagatccttcctcaaattgtatatatgaggaccatttttctggtaaaaatggatctttaaatcattccaaattgtcgaggcacattcatcataaagaatgcttgatgaaatttcttttgaaaaaaaaaattaaaatcgaggagatcacaatgttattatacgatac

SEQ ID NO: 200220 - DNA, 857 bp, Cannabis indica
aatacttagcgttgaatatgggcccaacttacggcgactccaagactagttttgaagccaagaacacatccaataggaagaccaataacataataagctgtcagattaacataagccaccacagcttgccatccacttccaatggccacccctgaaaacacagcacaatacattacaatacttgtatgtataaataatgaattttaagcacatcgttattgaaattaattaggattaattattttcacctgatagtataggttgaatcccattcaagaatatagaaatggctaacaatggggtcaaattggacactgcttctataatactagtgtcgcttgtaaacaactcgctcaatgctacccgaaaaattaaaactattgcactgaagattaggctgatgatgatggtgtttccatttactactaatactgaaaatttagctacttttggattagctgctcctagctcgttactcacccggacactgcaaaaatcgacattaatatttttgctagtataaaattgtgtttatatataaaacagcaatcaaagtaattatgttaaacaattactaattacctggctgatgtgcctaggcccaacataaaacaaatgtcccagttcaagtagttcatgctgaatttatttaacacagacaccaataattgttatgttaaaaggtaggggaaagaaatcaagaaggtgtgggcatataacagcataccaaatagtaatggagtctaaggaaagtgtaggattggaaagcagtccagatatgagcaccagtccttggttgtaccatatctccaaactacatgttaagcatttgtgggaatgttgtagaaataccaata

SEQ ID NO: 200221 - DNA, 713 bp, Cannabis indica
cgtaccaaacgaacccatacaatcttaccaatttggattcacaccaaaatttcactatatatataaatatagaaaatttgtatagtaagtaaacctaacatatacttgcctctattatattaaaaacttgtttttgacgtatattatattaaaaactttaaaaaagatgaaactacagaaaacaaaataatataaaatatttataaaagctaataataaaataatataaaatattaaacagagaagaactagagttttgactctttctaagaatttgagagtgttaatattttgcattttcagtatgtctataataaattttaaatttttgctttgctttgctttggttgcttaaataacatcgaagagagtgattttagagctaactattaattaatgagattttaaaatatggcttcccaattttaactcatcatgttcttatttagcttgtgggttttacctaaataaccaataataaaaatctccatgttgtatggcttgtttgagctttccttagtagccaacattcttaactgtactaatcattatcaactattctgaattaagattagttagttgaagagaatgatttgtaattttactgtaacctacataatacttgtacatttttgcatatatatccttgattgtcagagtaaatgtaacatttattttatttttactctttttaatgagcatgggggtacatt

SEQ ID NO: 200222 - DNA, 529 bp, Cannabis indica
ttttgttgatctttcacacagatggacatctcccaatgagtattttcttctgtcaaagttaatttagtgggtaattagttatcattcaattgttaaaagtacatttttttaattaacagggtaaaattagttaaccactatcgaaatctattattaattcaccaaaataaaaaatagattatataacttggaaatgctattaaaataaataagaaaacagaaaacagagttttgagaaagctggccacctgtgcagcttaaaacaataaacaaatataaagaaaacgtgttgaataaaaactctgttgagttggtaatccagtccatccccaaacaaaattccaaaaaacccccaaaaatgtttttttttgtaaattatttatttttgtaatttatttgttaaaaaataaaggacacgcctttctctctctatatatatgtataaatatttaagccagcaatccaaacctcccaccaaacccttcaaacgcgaaatctccaagaaagtcagtctcagtcaagaaaaaag

SEQ ID NO: 200223 - DNA, 739 bp, Cannabis indica
tgtggaagaagtgagaaaataaccgttggaaccaatttatacttcaagagaaaatcaagcctttttaaaatcaacggtccaaatctccttcacaaagtattattagatccaacgactagagagttgaaaggttgaaagcatttactttccatgatttgtctcgagtccaatgagcaataatggaggatcttttcaaatcaccctaccatcggttccatctttttctgacaaatgcaccccagcacacacatgatgaaccaacaagggcttttaatatgccacatgatcatgacataacatgcctcgatgatccatttgctcctgggggattacagctcaccaaaaagaaacgtctgtgacactaacagttagcatgtgtcaaaggtcagtcttgggggacccgatgaggggttacaagctctcagaactcacaaagtcccggaagcttgggggtaaatattatatgtgtttttaagcaggagacacgagacataattagaggtaaagatttgttaacctctcagattaatgatgatgaccattacaattcctcgtggagatgccttattaatccaagaagagcttaatgaaagcttgatgtagagagctatcggtggcccagttagtgtctccggaacgtggaaggatcatactcatcctcgcacaccaagaagtcctgaaacaaggttctgactacttgacatctggataaggattctctgagttgatcgcggacgac

SEQ ID NO: 200224 - DNA, 1206 bp, Cannabis indica
agaaaattaaattaaaaaaaaatccttctcctggatcagttataatccgtagtagttctaatcatgatttacattacataattaaattcattaacatccaagatatctgagatttcaaacttcaacatactgctgcaatagctctccggttcatcctcagttgaacaagtagtactattcaaataattggtcgaattattcgaattcaacgccgtaggactcgaagaaggagtagacaaaaccgatgtagtagtagtaaaactaaagttttgatttgactggtagctctccgttgagggatcaatcaccgtaggttgttgatgatgataattatgattatcatgataagtactgtaagaactgtaacccggtaaactcggagcatagtgatctgcttccgtaaaatttgaaggcatcccatttgttgttgttgttgttgttgtactactactttgccattcatgactgatttgggaacttggggaactgaaatttgtgaaatttgataggtcctgatgtactagttcatcattagaaagtggggcacaagacacgtgatctaaagtacttgtagtagtagtggggcaaccaggttgtgagatttcatggagttggttaggttggtacagtacttgttgttggaattgattaatgttgttataaagctggttttggtgatcgacaacttcttgttgggagttttggaagtagaaagtagtggtgttactgttttggtttgttgatgatgaagtattcccacgttgttgagaattgttgttatttgaggaagacatgagagaagtggctagttttagaagttcagggttcattacagctgctggttggactcctaagaacctgctcatgtggttcatctgatgatgagatgagttgtagaatgaagagcttagaatggaggagaggtctaggagatctagcctaggactgtgagtcactggatcaattcccattcggaggagccgttttctaatgtgggtgttccagtaattttttatttcattgtcagttcttcctggtaaccgagcagcaatagcagaccatctaagaaagaaaagacacaataaatattatattaggaaaaacactcgtaattttatcaaatgggaaaatgaaatgtgagctattttttccaaaagatgttactattttagatttaagaaaatagcgcttacttgtttcccaaaa

SEQ ID NO: 200225 - DNA, 1251 bp, Cannabis indica
ctaattggttccaatctaatctcaaatgggtttttgatattgattattgtagaactaatatgaatataatatatagtatataatgtcataatgggtgtgacaatagttatactttacacataataatttctgaatttttgtcatacttagaagttaccctttaccaactttggcaaaaaaatttcttcttgaaaatggtacctaaatcattaagccatggagctttgtaccactttcacacgtttgctaggacttaaaaagaaagatctcaattaccaaaatctattcttttcttaataagcttttttgggtttagtattgctttttgaaccatttaagactttttttttcactttaaaatattcctatagaaaaacactttatgtttctcatagttaatagacataataaaataagagtaatttgcgacaaaaatacttaaatttaattttctagttataaataaatacttaagtttaatttttagtagtaataatacctatgttataattttaaaacttttataagtacttgactattaagtgttaaaattaaacttagatatttatttaaaatcaataattaaacttaaatttaacactttggtctagttttgacattttttttgcaaataatctctaacttaaatttcgattaattatttaaacatctcaattactcatctaaataattcgatcatctgtttagattattaaatgtacaatttgctttaattttgataattttttatgaaaaaaaaaatctttttctaacacttcaactagttgtataaacattttgaccacctactttttgtgatatataatgtatgtatagttaagattgactggtattcaaattgactctgtaataataagattgttgaagccccaacggcgaaagtactctgttggaccaacattgacacttaaaaacgaaatctagggaacgaatgggattcgaacaagtgtcatttcacaaaaaaaaaaattatcaaaattaggctaaaatatagactaaaggacccctaacaataataccctatgataaggtgtactttaaactaaaactagtaaattcaatttttttaaaaaaatccctttattgaaactttaattactatctaagcaaaaaaaaaaaagcacaatcataatagaattccaaggtatgtttcttatctcattagtttaaactttaaattaattttaaatctgtttcattgggatttgcatagttaaaaaaaactagatt

SEQ ID NO: 200226 - DNA, 2293 bp, Cannabis indica
atgcaagacggcgcatatcatgtcaacttgggcgcccaacactgatgctggacccaggttgagccctgagatgctcacgtgacatcctcaacttcatggttcatcattttaggctcattaggacctacttacttgaacttttttgaatgatggcagcttgaaacgtcttttctggaccttagtgcttacctgggcgctaactagtgtcaactaaggcaccaacacagttttcgatgcccaagttgacaatcattagtcccaatggctggggcccagggttgtttccttcttgccatgcgtcaaaagtgttgtccatgtcattgggttacatttttcaagtaaacatttaccccttagtcagtatgacacgggtgtcatgttgactttccgaaacaaactatgtctgtttcatgcaaaaccaccactttggcatcactttttgtcacgtgacctttttttttgtcctcccactgaaattctctacgactgggagttttcaaagttttttttaaaaaaaaaaatttttcaatgatttcctagttgcattagagatattgctataagtacaagagctcatcattcacattaccctcttctcttctccttagccacacgtctatataagcttacattgctctacttgggcttgcttcaacttgcttcaagattttcaattcaaggtaaatttcaatatttttttgaatctcaaagaaagtgactcaacgatttcaatgaaatcgacagaattttattttgacaagcattcccctccaaattctacttttaggaattttttgttgtttgttgaagcttcatttccatttctagcttttggaaatattttcatttgagctgaaataagcttaattgaactaaaatgagctaaagttaagctaattaagcttggacaaatcatcccgtggtgagaaatgggtcataaaaaataacctcgaagattaccatctctttttttccctcatattgcttagtacattagagaaaagtagacaatgcctaagtctgcaaccttagaaactgcaaggggtggaaataaagtagtcttaaagcttctgacttcagccattaagagtgagaatgttgctgacaaggattatgagcttgaacccctagtcaagagcactcttagtgaaaagcaacttgaatccattagaaataattaaaaccttcttgatgaaaaagcaaagaaacttaggccaaattgaaatgccctactagcttaggcgcgctatagtatttttcttaattattgtgcaagtctttggtaaccaaaaggtgcattgaaaaatattttaataaaaaaaggtaatttgcggccaaactccttgaagtttaaagtttggcatgatcaaccccctagactagaaaaattagagctaaactccccaaccaccacaatcattttgctctgtactccttcgatccatttggtctgttaagtgccaaagtggactaccaatgtgtacacaagtgtacaagtggcaaaatttaattgatctacctaatattaattatttaaatattataaaattatttcaaaaaataaaaaatattttaaaattaaaaatatatgaattttagttaaaataaattatttcctttttctttctttgttatttttcttctttttttctttctcttcttctcgacctttccaaccttggcttcccaaaccttgataaccctctctgagatcagtttctctcaccacatgccatggaaacttgttcctccaagtcatctaaacccaacccatattcgacccgacacctaaacgatccatcctaaacccctaaatccctcccaaacacaaccctgcacacactagagagatgaacacaatgatgtgtctgacgctagaaaaattatgcgagagaggagatctgagagggaaaaagtgagagagaacaaatcgaaaatgaaaatgacacttgcgatggcaatgcccatggtactggagtacatcgttgggatctcagggtttgggtctcggtccttagagttcttggtgatggcaacgaaggtggatcccgaggtctttgggtttttattgacatcgacgacattgaggtcttagggttctcgatcaccggtatgggattggttggtgagaacacaaaggtctcggggtcagcttagagggaggttgagagggagagagaataaagaaagaaaagaggaagaagaaggagggggagaagtaggaggaagaacctcattttattctcgatgatggttataggtgaccattccaaattaaaaaaaaaaaagaaag

SEQ ID NO: 200227 - DNA, 551 bp, Cannabis indica
tagaagagccacccaattctaatgattacatataatatcataatcacataaagctagaaaatttaaacacgaaacaaccccaaaaaataaaatccccaaagagtgagtaaattatgatataccagaaagaaaagaaacaaaataatcccaactataaacagaaatatcaaagcttcattttttccataaaaaaaaaaaaagaagaaataaagataaatgtagtgaaaagcctaaattaaatcacaattcgaagatgggttttcctgattgaacctaaattaatggaaaaaagttccaaaaatcgtaacttcgtacaattttctctctcgttttctcggaaaccaaacaaaaatttcaaatcattaaattaattcagaaaaaaagaacagggaatcattcttcttcttaccttagctatgttcttcttttctgagagaactgaaaacgcagagagctaagcccaaacactaacgagcgaagagactttcttcccttctgctgaggatggcaatggttagagaagaagacggtgatcgttttcacaacccaga

SEQ ID NO: 200228 - DNA, 2523 bp, Cannabis indica
atatttatataaatatatacgttgcttaactataataagagagtcatatatatacgtttagtaaatttgatatggttgacttcacaaagtctatacattatgttccaagttaattaaacatataatctattcctttcttacatgcgaacgtgagtgatgctatacaaactaatctatacataattaataattggataaataataacataagtaatcaaaattttaggtttaaatttattaaacgaacatttgaaagaaattgatactacatatttctatcatgatctaataatttagaatttgtactttatataacagagtttgtaatgataaaattagaaaaaaatgatagttttacaaatattaagtacttataatactaaaaaaataaacattaagtttataccatttataaacacataaaactttaggtagttatgctactatttacttttaataattgtatacaactaaaataaattatgtacattattaataaacttatattaagcagatatgagtagtctgtagtagcacctatagaattttcacttttgtaatttaaataagtccaaaatttaaatgttactatgttctatatttatattagagaaaattacatggtatatccactttatttgttttaatttttaactctatttttatattctttaagatatacccatttttataaatgatatccccattaaaccctttagtttaatacaaattatatgttagattttaaatagagagtgagggtatgttgggcaatccactcaaaaattaagtatatttaaaaaaatataatataagagtatttttaattaatgaatataaataagatgtatttttcaacttatccgtttgatatattgatacacgtagtccacatcacaaagaaataataatgatataaatttatttgatagaaaaaataaaaaatttatttaaataattagttagtatatttagtaaagataataaaattaactatatgtggtatttttaaaataaggttgaggattttaataatgtgaaagttttttttttttttttttctaaaatcaaattgtgtttattggtttaataaatattgaatttccttattatcatgatggggggtttttatgtttaatgtatattttgttttcttatttataaaaggatatattcagttaaaaaattgtctaggtacaaaaaatctatttaacaaattaatattctgtttgaaactttttattttttagaatatttttcatttattgtcggattgttttcttatttgtaaatcacgacatatgtaatgtattaattgagaatatattgttgtgattttatatgaaaagaataaaacattttattatgtaataaatactatactatatttatatatagtatttctctttaattgatttattttattcattttttaatatgatttacattaatctctccagttaagttgtgtgatgtcgaagaaaaattagtagggatgaatttggctagattcataatgctcactagacagatcatgatttcgtctacaaacttttcatatatgttcaaacagaattttgttatttaatgaattttcgtaaagaaactaattaatattttctctttgtattcaaatatttgaggttcgatttcaagtgtcatctatccctataaataccacataaatcagcaacaaaagttaaaactcttctacttcttaatttcatatatttttagaagagagtatttttgttgtaatagatagttattctgatattccttagtgagtttgtgtgtctttgtaattacttttatgtgaagtaactttcgaagtgaagaacataaagaacaaccttcaggagaaggttcatccaagtcttgcttcgggagaaagcaagcgccgctatcttcgggagaatatttctacaagtcttacttcaggaaaaagcaagcaccgctatcttcgagagaagatttttacaagtcttgtatcgggaggaagcaagtatcgctaccttcgtgagaagatatctacaagtcttacatcgggaagaagcaaacattcaataagtaatttgaagggagttcaaactttggtgtcttaaggagaatcatttagcaaaataggagcacattaagcttgcggcaaaatcattagaggatgtctatgttttgtttaagtcaattactttgtacttgttaaaatttgactgatgaatcttatctctgagcgtagcgtcgtgtactaatagtaatttataaggattgttgatactacgtacaaaatatcatgtgtcattttattttctacaatttattactttctacagtataatttcgatctatagctattattagttcaatttttaatagaataaatttcatttctgttaaaacaattttataaaagttctacattaattaaattatttattaattttatttgtaatcataaaagtagaatttaatacaaaaaataggaatggaaatcctaataatactttcaactaaaatacgtataag

SEQ ID NO: 200229 - DNA, 888 bp, Cannabis indica
aaaaaaaaaaaaaaagaatcattttccttcgaacatttacaatttttctgtgatcaattattttgaagtgtaattgagcgcttatgttttgaggataacgacatttagaggttgttttattctgggaacaccattcttgataaactatcgtgcactctttgtgcacaactacaaaatatcctaaagaaattgacagttcgctattgaactagaattatcaatcgataaagaaagcgacatagttcacaactcatccagaattatcaatcggtaaacccattccaatttatttttacagtgtaacaccaattaccaaatcatttcacaccctagtgaaccaaatgataattattggtttctcttctattaagttattaaattcctttcccattacagagaaatccaacaatataatagtaacataaaggaaaataaaattagtataaaaaaaatccttaaaaggtgtccttttgtgaagacaaagccaagaatgaaaccccactcacattgaaaggacttgaccatgtaatcttcggcacaataaagatatataactagtgaactaatcactcacaataaagataatgtacaaaattaattaatcaagacaaaaatacaaacaaaatcataaccccaaaataaagtggatccgaacctagtttgtattctttaaccaaacaacagaagggacttaaaaggaagctcaagtgggaaagaaaagggcctaaatattctcaataaaccaaaaggaaatgaaagccctctttttttgaaattaaagaaaacgtgtatgctacaggaatattttgggagaatcttgaagaagtaggtggtttacaatctggatgaatctgtcagctttcctagaaaacacaaaactctactaaa

SEQ ID NO: 200230 - DNA, 794 bp, Cannabis indica
tctcttattcttgttctctcattctctgatttgattgtggtctcattttcagaactcacgatggtgggtggtgttctgggctcatcgtggctagtggtgtcatggtgattgttcaaagctgttgtagttgagtttaaatggttctcaattttgggctcgagtggcttagatctattttttttttgtttattgttttatttgtcagttaaaaatgatgggcaaaatagttgcatattccttagcaaccctttataatggttgcctattcctccttagcgactgtttggaaccaactcctattccatcatgttttgcgttggtggtatgggtgtccgttttaagacttgatggaaaaactttacccaacagttggaaaatatcctttttttaatagtattttgctttcattaatcaaattagaaaattttgaaaagttctaattattattgatcattgggcatcctgtaagagagttcttcaatatttggctagtacctttcattttacattgtggtataattcacacttactattttattgggtcttcaacaatttattgatcagatgtatgagaagcatccttatttgtttaatttttaacatgaggttgtataatgaaatatttagataaaatttcttaaaggagagaagagtgtgatgaccaaccgaaagaaaaaaaaataatattaaataaataataacagagtggtaccttgttcaatcactttaatttaaattttctctctctcctctttctcaccactataacattctattagcttctcttttttctt

SEQ ID NO: 200231 - DNA, 2090 bp, Cannabis indica
gaattttcaagatgtttttatggagcctactcagctgccaccagttcagaagtatggatcatagaattttttttgcaaccgggagtagcgccagtgaatgtacgcccttataggtacccctattatcaaaaggatatcatcgagcaactggttcgagagatgtcatcaatcgggttcatcaagacaagtaccaaccccttctcttctccagtaatcttagtcaaaaagaaagatggaacatggtgcttttgcgtggattacagagctttgaatgacattacaatcaaggatagatttcctatacccacaatcgatgagctattggatgaattgggaggagctacaattttttcaaagttggaccttcgtgccggatatcaccaaattcgaatggacccgcgtgactgccacaagactgcttttcgcacacacaagggacagtatgagttcacggtgatgccgtttggactcactaatgcaccgtcaacttttcaggtagctatgaattaacttttcaagccattgctccgtagacgtgtcctcgtattttttgatgacatcttggtgtttagccgaagtatcaaaaagcatgtggaacacttaaggctggtgcttcagctactcagagagaacaaatactatgctaagggcagcaaatgtcagttttttcagcaacgaattgagtacttaggacatattgtgtcggctcaaggggtacaggctgatccgaacaaaattttagcaatgttggaatggccacagccgaagaatctcaagcaattaaggggttttttgggtttgacaggttattatcgaaggtttgtcgctcactacgtgtccatagcagcccccttgactgaacttttaaagaaagacaattttgtgtggacaaacaaagcttcaatagcttttgctcacctcaagaaggcaatgacagagacgccggtgtaggctttacctgattttgataaacaatttgtggtagagactgatgcatctaatgttagaattggcagtgttttgatgcaggacaaccatcccatctctttctttagtcgcaaattgggaccaaaattcattggaacatcagcataccttcgagaattgagagctatcatggagccagtgactaaatggcgacaataccttcttggccgacattttgtgattaaaacagatcataagagcctcaaagaattatttattcaagttatacaaactctagaacagcagcattttctccgaaagctactggggtttcaattttccattgagtacaaagcgggtaaaaacaatttggtggcggatgctttatcaagacaccatgaagcaccttccttggagttgctggcagccatgacggcaggctgttttgaatttttagatgaattgcgacttgagaatcaaaccagtccagatttaagacatattcacactcaccttgagaagaattcagctgaagtttcagattacgtggctagagatggtctcctctactataggcagaagttggttctcagtcggcattcccacctcaagcaacaagtccttcgagaatttcatgattcgccaatggggggtcatgtaagggttgttcacttttctctgtttgagtgcaaatttcttttggcatggcatgcgccaagatgtgaataaatatgttcaatcttgcttagtgtgtcaaaccgtgaagtactcgcccacaacgccgtatggtttattgcaacctcttgagttaccagagagagtttgggaggatctcgctatgtatttcatcgtcggagtgcctaactccaacggggtcacaaacattctggttgtcattgatagatacaccaagtatgctcatttcggagcgctgccaacacaatattcagctactaaagtggttgaactctttacaaacatggtaattcgtctccttgaaatgtcgcaaactattgtttctgaccgtgaccctattttcactagtgtgccctccggaaaaaattatttgaactcatgggtactaagttgaaaatgagttccgcgtactccgcgtaccacccacagacggatggccaaactgaagttacgaacaggtatgtgga

SEQ ID NO: 200232 - DNA, 643 bp, Cannabis indica
ataattaaaaatcaacaaaactactattatttaattgtgggaacttaatattatcaaaaaaaataaataaaaaatttagaagccaattcgttaaaaaaaatatttagaaactaacttgtaaaaatttatgtggttaagaaatttagtacatataaacattttttttttttcattctttaaaattttaaaattttttgaataattaacaataagggtatttattggaccacatcaaataattttaggtctattcagttttgattttgcatccttctatggcaagcataatgcgtacatgctaatactttattactgagttgcagtacatgcataaggacaaagaaacttcatgatttggaacaagccacaagtgcaagtttattcatgaaaatccactatagcaccgaactcaactgattctctagggtggatattcaacgtctgaggtccacatgtgtcaatttttaaatattgagatttcgcaaactacaatgttaagttctcctccatttctagtcctagggtcttcgtctacttgttaactttttcttttcgcgtagcaaactactgttagactttgaagctcaggtatgctacaaaagcagtgatcggaaagcctcttgattaaggctcaaatttatat

SEQ ID NO: 200233 - DNA, 810 bp, Cannabis indica
aggtaaaaataaaagaggacaatataaaaagggtatagagtgtaatttcctcaattctgaacctatttaaatgggttggtatttttctaaacccatgactttttctcacaataattttagggattatttcacaaatacataaaaaataattacaaaaattacaaaaatacgaattttaaatatttttgcgatttttatgattttatttacaaaaaaaatacagttttttgatataattttatgttgtactcttgttaatttattgttgattttttgttatttatatgttatttttttgttatttttatgtaattttcgtgtagtttttatagaacactgtaaaaatatagaaaaaatatttaaatgtaaaaatgtaaaatttttaacaaaaaaaaaaaaaaataaatgttttatgcaattatctcgtaaattacgagttcatcgcatattttcgggctgatcagtttttcgggggtaaatgtgtataacaaatattagattggaaaaacctattcaattaaaactttctatatatatgtatagaaagggattctaaggcctaaaacccaaataattaggattaattctacttccatctaccaaagactcaacttttattatggttgaatcaaaaactaaatcttcaaaactcaaaacaataaacccaaaacaattgaatcaaattgaacaaacccaatacagaaataaacctctacttcacaactccataatcatattacaaccaagaaactctgataaaaagttcaagacaaatcaagataaagcatcaaacttaaagcaaaaactaca

SEQ ID NO: 200234 - DNA, 1686 bp, Cannabis indica
cacaaacagtcaaatacacatattcgtttgaataacaacaaccattcttgttttgatattggtgtgtggaattgaaagcctaataataagatagaaaacatttgtcatgtgtgattaagacatgaagtaccaaaagctaagtatatagttatagtgaggaagtttggaaagtatgttacaaatatacttgaaattttattggtagatcgtaaaccataactattattttattaaaaaacaaaaactagtagaagttatagaaataatgaaaaaatgaatttatggatcaatgcccttttattagattttagtttgaaaattgtctaataacttaccattttcatagtaaagaaatagagtaaaagtaaaaaataaatttcaattttagacgacttgtcaaagcattgtgattaagttaagtagtcggatatcacttgattcgtctttgtgtcttgttttacaagacattattcatgattgtaattttttttaagaatgttgtttcatgttttgttctagaactatgaacacaccttagctattaccatgttcacatgattatcatgattagtattgtttggtggtcaggttatcctcattgtatttagaacattcttatgatagatgcgaacaatcaatgaatttgtgtcctcaacctcttttagagtgttttgatctagttggtggtattctttgaggagattcttactaaaaagaaaaatataagtattaaaatttcaaataacaacatgagttattgagggttattctttaaaaaattgtattagacatttgaaatattaaataaagtgaacaatttaaatatagttgattattaaattattatttaaataatttataatatataaatttcaaaaaaatttatattcatttatgaatgtatgatcttgtattagtatgagagaattaaaatcatagccaataaattaaatatataatcagtaacatattaaagtaagaaatatttaatcaaattttcttagtacggtttattaaagtatgtcatgaatatatttataccaaacaactttgtttctggcctttcaaatcatatattcatcacgatatctcacttgatttttattgtacatataaaatatgtatatataattacatttaaagaacacattaatatagtcgcaatagttaagaaaaaaaatcttcaaaaaatcaaaatctcaaacttttcaaaaattaaaaaaatatgtatacattaacctaatagaaaaattaaacaaacttatattacacttaacatcacctaattaagtagaaaattaattatacgtaacatcaatctagcatatacatatacatggaattcttaggttggtacaatgataattaaaataaatgcttctgctacatacttaatttagtacggtaaaactaacataagcatcaaggcaaaattaatagatcaattcattggaataaaaagaaatgaattttgttttataaatagaatttgacttttaaattatgaaatttatttgacttgtataatttagaatgaatatatagtatactattaagtaataaacaaatagttatttggcaatttataatagttttgcaagatatttgtttaatgtttttgagtttttattttgtaatcattccatcttactaaagtagttctctctcttaatgataagagttggt

SEQ ID NO: 200235 - DNA, 1124 bp, Cannabis indica
gtgtagagcaaagcggaacctgggtttagtaggttttgccgttaaaattttggtttttgtggttaagtgttaaaaaatttaaagttcgggtggtttatccgtcaatatccctttgggtaattcagtacatatcttccaaaagggttattcttttttgtgaaaaaaaaaaaacaagaaatgttgctcactgatcacataaataaattgttacatgagtacttataaatttatgacaagtatttatccacacacgaactccattgggactagtaacagattttacagtacatgaattaccccattcacatcacacgaaatagcatagcacactttacttataaatttttttacggtactgtaaattattgaagttttttaaaatatttacatgtagttttaaataatatatatatatactaaaatggacctcttaagtaaaatatttgtacatatttttaagggataattttacaattacacaaaaataataaaaaaaattataaaaatacgattgtacgaaattttaaatatttttataatttttatgattttatttacagaaaatataattttttgatgtatttttatgttgtactcctgttaattttttgttatttgtatgttattttttattgtagttttgatattatttaaatatttttatgtaatttttttatttgtttttgttttacttttttagaacatcgtaaaattgtaaagaaaaaaaaaactcttaaaatgtaaaagtgtaaaaagtttacaaaaaaataatattttatgtaattatctttatttttcaggtgttctctaatgaaatataaatgtgtatatacttcaacaattatcgctttaattaattacaaaaaaaataaacaaatagtaatttacattgtacaaatgtatcaaaattaatggtgtaattcaatcaaggaccatcatcttcctcacccatcaaattacaaatatctgaacactccaccagactgcatgcaccaaaacaaaatatctaattatacatattcacgtcacatacataaatattagaattcaacattctaccatatcaagacctaaatgtttgtttgtattaattagttaatcccaacaatttttttttaaaaaaa

SEQ ID NO: 200236 - DNA, 522 bp, Cannabis indica
tgtttcccaaagctattattaagtctctccacacttgcaactaaaaccataggtcgttatgtgtgttctttaggggaagcgatgccaagatcactcgttagttccattttgaagcttactagacaagagacccgtggagctctttggtcgtggaaaatgcgtgggggtctaccaatcacttttggacccctgcctgagtctttaagagagtgtgcgctactcgggtagttcttagcaaatggaattaggaacagtttggtaagatggaacttaatatcaagaagcttgaacaacagcttgttcaattacaatgcttgcctatgggatctcgtgtttggggccaagaagtagaggttcggaatgctctcaatgaagttcttaatcataaagctgtctactgacacaaagagctcgtgcctcctggattacctagattaaagatggaggtaaaatgctcacagcttttcttatctctgccataataagaaataggagaaatgccatcgaaagcatatgtacaag

SEQ ID NO: 200237 - DNA, 2352 bp, Cannabis indica
agattgtttccacgaccactgcctctgcctgagtaatttttgcgactacctcaaaagtttccacgagatccacgatcaaagaaggactgatttccacgatttcctccttgtacagacaaaccataaaaattagcatgaacattttttagagtagcactagcttgctgattgatttacatttcttatctgtgtaacatgagctgaacctcttgaagagtcaaggaatcatatctggttgtgagatttatcgcaacatcatattcaagacccaagcctccaagaatatataacaccagatcatcattagtgagaggttggccagcagaagctaaggcatcaacataatgcatcatcttcaagttgtattcatcaatcgatgttgatcctttcttggttgatcgcagaaggccacgaatctggagaaggcgagctcgagattgagtggcaaagagttaaggcaaaaaacattccaaatttcagtagaggtgttgcaattgatgacatatccctgcatttgctcagtcatggtatttataagccaatgcattagaaactgcttgaattgaagccattgaagatacattgaatttggaatgttacctcaaagattgatcgaaggagatgggatttttttccaaggatgagtccatcgagattataggcttgtgttgcagcaagaaccaacaatctccagagagtagttggatcaatctaactaaaggttgagtggaagaagattgatgttaggtaagtcaatctgagcattttcttgagagtgattgttgactaattctcgttcttgagaaatgccattgttggtagggttgcatagagtttcaggcgcattatttatgctattatcagccatagctctgataccataacaatgtttaatgaacactttagagaaaaatagagaaggtgaaaagagagaatgaataaatgaatgactcaacactgaaactggttgagtctttctgttataaatgagattacaaaggaacgagctcaactaactttggctcaacaagaatcaaaactcctaattttgttacaaagacaactaagcaaaacagaattatagaggaaccaaattacctgataatagaatcttgactaatcttaagtatatctaatattaactttcgttcacgttagacactcattagtaaaattgaacaaaagactttaaatctaacaatcttaatagttttaaaaaaaaataattaacaattaaaaaatttagacaatacaattttgtacatgttaaaatttagaatgaaaaatcctaattagtttttctttattattaccaaatagtattattaactcaactatttgaatccattttcttatttttattttcttccaccaactcagtctgccacaatatactaaaaatgcatactattttaatttatttctaactaaatttgaactaatggtaccattttttcttaggaatttacaaataaaggatcatatttgtaactgtttgaaacaaatagtcaaagccaatatttgttttttactatagaaagccaaaaatatataatttatttatctttcttaaatttaatattctagtcttgtagttgtagaaacaaaatagttaatatttgctaaattatataatgggataattttaaaaaaaataataataacaaaataaattataaaaatatgaaattttaaatatttttatggtttttaaaattttatttacataaaatacgatcttttgatatatttttatgtttaacttttattattttgttgttaactttttattatttgtatattatttttataatgttttcttcttacttttatataatttttttttattatttttatagaataacttaaaaataacttaaaaattaaacataaaaatataaatattttaccataattattttttcattatataaattagatgtgcaatattttgaattaaatgactgaaagtgggccttctcagtcactctccttccttgagcagttcaacgactttggtggataagtcaaaatttgaaattttttttatcaagtttaccattgtttttttatatatatattattcttttttcagaataaaaatgtataaataaataggatatactttacacttagatatatggaatgaatataatattgattagcttaatctagaaatgacaatattgtaatatagctgttggatcatatatttggacttttttgaacttcatatcatattcaatcatagttgctatatttcaaaattgtaaattattgacataaataatgaaaattttcaataagtatacagtttatgacacaattagcaagtcatttcttatctaaact

SEQ ID NO: 200238 - DNA, 803 bp, Cannabis indica
atacaacattttgtaaaggattaataattttccgcaatggttatgaacctaaaatatgtgggaccttggtagaagaaaaaaatgtgggactcaatacctatttgcattaacaatagtgtgaaatatcgtagtgatgttgggcattaagattatagtaggataccacttttgtttttatcaataaaaatatttatgtttttatgtttttggtatttcaagaaattataattcaatttttttatatgaagatctatttacattatgattatagtaggcactaggcatctcatttatttttgaaaaattcaaataatttatgatattaaaaacagagtttaaagattcaatagcacgagtacagttgaatgtttgaactttatttctaatacactataaattatttttctttttttagaaataggtgaaatatatactataactataatatacataatcatataagaacattttagttataatacttttaagcactaaaatagagacatccctaccatcatgatgggtgtaaagggattttgaagggtatgagggagctaccacttcgcaactaaagagtatgatggcaacaaaaaatactacaagtagtagctaccgatctatacggcaggtggtttcgagtcaacataatccacaacgttgacaaaggcaagatcactatctttatcgacgtgccaacaagttcatcgtcaatggccagggtcagcctgtcagagcgacatctacttacaaatttggtgtctatgcctacctctgattcaagtggttacatggaatctaagttg

SEQ ID NO: 200239 - DNA, 1731 bp, Cannabis indica
attctcattttcattatgattattaaattagaaaattaagtttgaatataaatgaataatatctattcaaaatatagttattgaaaatttaattttatcatttatatagtatcaatgatatataaagtaatgagaaagatttaggttgtttggtagtgaagtaaaaaatgatcattcaacatggtactcagtttcaacaaactcctataatcccttgacattgtagaatcccatacagatatcccttgtataacgaccaagctctagaccatgatagatatgtaatatttataacttgggtggtcaaatgtcatattttgacccttataggaaaataattcctataaatgattatttactttatattacaaaataaatatttaaaaataatggaataactcctatatttataaagaaaattataacaccctactagattttgcgtgttatcgtaatttaataataactgtgcaatctgttgctaaccaactgatttatcaaaatgtttacttaaaacttttcataattaactttaaactttaaataaataaatttacaccatctgctcacactcacagtttctcagacttagccttgtctacacatgcaaacaatatttgtgattcgacaaacacagtaaaaaaaacataatcataacacaacataaaccggattgtaactagacgtccatacacccaattataatcatatcatgcatcccacacgtactgagtctaaaatattcatacgacagtactattgaccctaatatcagtctatactcggtactctagtcgtaccgatgtgatagtgttaattagtacttaggccaaatatatatccatcggtattcattgtaactctatgtatactaatactgccattactgatctgttagataatatgcatttccaaatatgcacgctaaacatgtaatcacatataatactattatactaatcttaccttgatttagaattcaggtgtgtgggtcaacctgagtggaactgctgctcaacagtttacaggcccctaagtcaggacttacgcaaaactgataagtgatacgctaaatcactgtttggggacttagactcatagctaaaagttttcctatcaataaatagcgtgactaagcctaaacatcgagaaaacgctgaaaatgagatctcaaaaaaataccaccaaaaacgacaggtcgtttcctaaaatcgacaagccgttttttcaggtgtgtgactgccaaaaattgtaagtcatttttagaaaaatggcttgccgttttttactacaaaaacacaagaaacctcagagctcaaagaattcaactccaagtcttaccaaaagctcatgatcacctaattagaccgtaacaagcgtaaacaatctgaaaaatccatcattaagctgaaaattcaaaaaccaccattgaaggatctatcttgagcttgaaaactcaattcaagttaaaacatagctacaatcatcaaaacctactcaaaactactcaaataataacataaaaattgtagaaacaaaacaactcagccctcaacaaaaatagaaactaaaccctaaaattcatgcatgaaagctcactttttactaaagaaactaaagggtaaaggcttaacttgtccctaccaaaattcttgctagatcacaagaaagatgaaaaaaaaaccttggttccttgctggttctaagagaggccgagagagagagagagag

SEQ ID NO: 200240 - DNA, 1304 bp, Cannabis indica
ctcaatgtctactcctttgattagcaattttgaacccttgtcctaagcggctgctttactctctaactctgtcttacaaagtaggttatcatcgtgtgaagatattcgtcgggttgtttcgtctaatgtaaagtgtgggttagtaaaaaataaaatttttcagagtatgatatatatgatatttttttgtgtgagattcttttttctctattacattatctcattgtaagcgggttaataatattgctaatgctcattcgcttgcatagctaattttctcccttgagttatcgcgtgtttggtggttggaattgcctaattgtttagcgtgatgtgtgtcttttgtttgaatggtttgcttgaagaatgccttataatattgatgaattttcttttaaaaaaatacatcttctgtacttcacatagttgagaattgagatgagaggattattagtaagtacatcaaaactttattcttttcaaacttatcaaataaaaatattcagaagattatatatacaagctataataatgtaatcaaaacacaataaaataatatataattgatatattatgatgatgatctttaattaataattaattaattaagttggacatttgtcagaatagccaggaccaccatagaagaaatgagtgcctaaagcaccactcttgtcatctgctactttgacatcgtagcaagaaggcttggtagcataaggggtgagtttctcaggatctttgtagagtttagaagcatcaatgtactgtatgttactaaaatagcttgctttaccaaagccttcatcaggaaaatgaccactccccatttgagtactcgagtgatgaccatcagccccgttgttaataatttctccaccccaactcaacatctccgcaccattaacccctagcgtcttgaataaggagttgggccaataacctattggattattcccatatttcagccaccattctccattctccgtgtgctgcatgcattatatatatgtatacatgatcaaataatattaaatcaatatattattatatctatgtgtttatttataatatatatatttatacatatatacctggtctatgacaatagttatgatttttttgcttcccgttataggtggaaagaggtcttagtagagctcctagagcgatttcctgcttacttgaacaaaccggggcaatgaagattgtaacaacctgtgcttctatacccatcactctgatatatagagtcacacgatcaaaatttagatataattaaatacctatacatatatatatat

SEQ ID NO: 200241 - DNA, 1748 bp, Cannabis indica
aaaaaagaaaggaattttcttgggttctcttaatttatttataagtttcccaaaaatggaagttgacaacaacatgggtgtaggtctcatttgcaatagtaactaactcattaatttatttttctatctttgctagtgacccaagaagggttagttaactttgggatttgtggccaaaaaaataaaataaaattaattaccatacttattaattctcttttatatatctatacatactttaaaaaaaaaaattcaagaatataatactagtactaataataaaatctagaaaaaagggcattgtcccaatgactactacccttcaattattattttatttttatttttacagagagtatagttgtagtttggaggaccagagtgaaaaatgatcagtgcaattttgcagtgtgtgacagacatttttcaccaataaacaaatataaaaaatcgatacagaaacacacagagaggataataacattcatattaaaacgcgttttatttatttatttcttttattttttctacatttttttttcgaagcataaagttaatttggggttatatctatataaggtggtagtcaaccatgggaacaaacacagggctcgagaatgacagaaacacaggtacaacaattattgggactcgtatactatcattcattttatttatttatttatttgtttttaatttaatttaatttttcttctcttcactgcaaaacactaaaaaataataattaataaaccccttttttctttattactcttcttctctctctctctagcttttttttctcgttcgggttccttttatcttcccaattcttttcttaaagcgcgtgtaataaatattataaaatatgtataaaaatatatgtaattaattatctgtgtattaatataattaattatttttgttaaaaaaatatataatgtatgcgtgtgatatgcatggaaaaatataaaagaaaaataattcatcacgggatgaatttgtatatatagacatatatatatatctctcattccctagagatcgatcatgtttggtgagaataaaagttagtatatatattaatataactattaatgaatagttaattctatgtggtttgatcataagacatcgtcactaatttcttttttatgcatgaatatatatgatgttatatatgtttataatttgttacgtacgcacattattataattaaaaagaatgataattattataataataataataatataataatgttaatgttgtttacatatatatgcatatgatatatgtcatgtggatatttgatatgatttgtataggcatgaaatgaaaggtgtccatcaaaggattttaaggtgttaatcaagaagagagccatgcatgtactgtatatatattatattatatatataggtatactagctcaaagagaatcagtctttgtttgactgttttacttatttttaaagaatgataacaaaatcaaatttctaaaaaaaaattatttaaggaaaaaatatataaaatcgttcatgggtgattacaaatattatagtgattcactatataagtattaatggtatgttacaaataaatattgagaattcatggtattatgatagttattttcttatatttatttacttaatttattaaaattataaaaggacaactttgataacataaacataaaaaataataaaaaagacatcactaattttttaaaaaataatatcat

SEQ ID NO: 200242 - DNA, 1524 bp, Cannabis indica
ttcttaagttaaaaattttaaaaattaaactaaaaaaaaaaaaaaaaattaacacgactaaaaataggatttcgacgttacaaaaactctgttgcacacatgtgaaataggcggtttgaatattagactctatattgtaaattatttcgaattaattaaaatttgacaaagtatcatcttaaataattataatataaacaactataaaaaaaattaaattaaaaaattcatttagatatcaaaaaatatctgttttaatgggatgtattgtaaaattacacaataatatatatatttaaataatttacgtacaagtaatgataacatgatacatcaattaatatgtgtaatttaattgtatggaataatttttgctatatgatgacattcaacgcttaatgagtagtatttatgtttttgtgatttcgtaaagttataattactatgttaatcattgacgtagggcaaagtaaagggcccaaaaaagaaaagaaaaaaaataaataaagatgagaatgactaagaaatagttgtagtgctttataatttggatattgcacacaacacaactactgttgttatttttgtattcaacttgttggtgtgtgtccatgtcaaattcgatccccattacaagtgatggggaggcttgatgagatgaaattaaagaagatggaagaatatagtgtcacccactatcactatatatgcaccaaatatatacaaataataataataataatgctcttcaactcgacaccactattgagaataattagtcagaattataacaacaatttctctcctaataaaataatgagatagatcaccagatctctcattatatatatatatatatagtttatacgtataatatatatatatattatctgaagaccccaccatttcctgttgtaaatatgggcttgaacacgacacaaaaaatatgtatccttaagcacgacacaatacgagaaacgcgaaaggcacgactcgtaagcacaaatagactagtctgaaaaagacgacacacgaaaaacccaaaaaagacgacacgatatattaaaaaatcttatactttatttatagagtgtaataaaaaaatattcaaattctaataatattaataattttttgtatgattattgtaaaatattacttattaaaagttatataaatataattaaagttttgaaatatacatataagttcttaattctaaaaaaatatatataaaaaagtaaattacgaatttaagttcgtatataaaaataggctggcctctataagaaatgcagaccgacacgagaaaaatatgacacgaatttgagtacgacatgaaaataccaagcctactctttagaaatattggcacgatacaacactatctatattcttttgtatcacgacacgacacaacccgtattttaaaaaacacgaataaatacaggtcggacgagcacataaagcgcgagtaaatttatgacaacaattatcacggtaaaaataagggtaaatactatt

SEQ ID NO: 200243 - DNA, 1407 bp, Cannabis indica
atctgcgatagaatataaaaaacgatgatttccaatctagatttcaatagtcggatggagatataaaacgattggaggaaaggtataaagagcaatttgggttttcaatcgctactttccaattgaaatttgcgatttcagtcgctgagtgtagaagtttcaatcgccggatgtttattctgtaaatgttgaggtttatattttgatttcaacagggagttcatccaagcaaggcgagatgtgagataaagcataagaaagaaaggtttgtttcaatccatttctcatttcatatacaagtttaatatttatctcccatggaataactcttttatatatcagtgatttaaaagaagggaaaatagataaataaaaagttactggaaatcttgaagaatacaaggtaaatattgttttccttttctttattgccttttataattactctacctatttaaatttatatgtaaaagtatataattaaatgattgtatgttgtcttagttgaaaaggacggggaagcttcaaatgcacttgcaattgtagtacaacaaaataggtataactactttatgcactggccacatgatctatataagagttcttggaggacttatttacatcaattagatcaaggagcttttaagattctactgcttatttttagttgttctgacatttgatattccattgaacatatgaatcatctactttatttttgcaaaaaaattatattggatggggtggggacaaacttaaaatgttatcctccgcttgatagaaatttaattatcctctgattattagaaatttgagttaatagagcctaattatatggtttttaattgatcatttcacatttgtgataattactggttcaaataacataattattatgaaccaaccaaatggccactgataaattgttatttgaatcaaacacatgcctattgtttgtggcatgacaatatcaaccatgtaacacattcaaattcctattgttgagggtcaaagaagtgaggtcaagtacttctttcgaaagatctattatccaacaatgtacagcacacattctactctccctttatcttctcctcagcttggtgctatctttggtctctgctcagcctcagggtccatggttaactcttaacgatactatatattgtgtttctatggctctcctatttctaaggcatttatttttacttcttacattattccttttgtgacaagctcactttggtattacactgtttagatatgagtacgggttgtttggggatttagttaaagagatttttccagctgtcattgtttttctgcattattattaatatttctttatcattgctaggtggagaattttgcctattattgcccatatcatttccaagtgtcaggtaa

SEQ ID NO: 200244 - DNA, 840 bp, Cannabis indica
attataacaatacttaaaatttcgtataatggtatttttataagtttttttcttgtttatatgtatttgtgaaatagtcaaaaaaaaaaaaataagcaaaaggcttaaacttgatgatctataaatagaaaagaaaaagaaaatagttacatattcaatatattttggtgttaaggtcaaagacgatgtcgttttactcttctttgtcaccactccatctccatccccaaagtccccaaatcctttcttcaatctcttccaaatcgaaacccaaacaattcaatacacctgcaattgcaattgcaacttcaactttttcttcttcttcttcgatcagatatggcgtcaaagcttccggcgacgttcccaattttctgtccgaagactggcttgaatctcggaaaaaaagaccctttggtccaagattgaattttggggcagaagaagctgttcaacaccaacttgatgcattgaaattcaatgaccaaccccgtcaagattatggaattgaagttatgtacaggtttgctgggtttgatccttttgaaaggtctacctattttgggccattttttgatctgggtcagtttgaacggtttaggaggatttttcaccattcgacgtaccgagtattgctgggtcacagagagaggaagattttgagcagtttatttgttgaagagaatcggttcaagcaacgagtttggattaggggaaatcgtcctgaggaagaagaggtttttcagttcaccatgattcaggtttcctcattctaacacttttttctataaccacagatttcttcatcatattttcatgatattgttattattattatta

SEQ ID NO: 200245 - DNA, 1649 bp, Cannabis indica
ttatcattaaactagtgacaagttgtattcaaataatactgataacaaataattttttgttataactagtgatacttaatcacaaaaaatttatgctgactaaaaaataatcattaaaatagcatttttgagagtgcactaatagatgcctatatatatgtaactctcaaaattactccaaagtatccaaagtactcatcacatatttcaacatggagcttcaactactaccctcttattatttcccaatagccctattgatcatctcttttgcttttttgtttaagttagtgaaaagagctcctcatcatgatcataccaaaaactcagcttcaaaactaccaccaggaccatggagattacctttagtgggaaacatccaccaactaataatcttattattaggttcgaactcattacctcatcatacactcagagacttagccaaaaaacatggacaactcatgtacctcgaaatcggacaagttccaacaatagtagtttcatcagcagagtatgctgaagaggtcatgagaacccatgatgttgttttcgcatcaaggcctcaaatgcttgttgggaaaatcatgtcatatgattttagtggcattgcattttctccatatggtgagtattggaaacaaattagaaagatttgcatgcaagtgcttttgaatcccaaaattgttcaaacatttcaacccattagagaagaagagttgtttaatcttgtagaagaaatagcttcatcatcatcatcatcatcatcatcaaatgatattggatttgatggtcctatcattaatcttaccgaaaagtttaaagctttgacttataacatcatatctagggctgcgtttggcaagaaaagcggtgatcatgaagagttcgtattgatttcgaaggaagctctcaaagactttggagcctttgaagttggtgagttttttccttttcttagttttcttgataaatggattaagggagctaaatatgaaaggctccaattaaaggcttctaagatattggaaaatattatggaggaacatattacagagaataatgaaaagtccttgtcatcgtcgtcatcttcatcgttgtcaatagttaaaagtggaaaagaagaggacttggttgatgttcttttgaagtttcataacaacggagatcttggcgaatttaacttaacgaaaaataatattaaagcagtaatcatggtaagtatgtagtaataatatgtatatttaaaatatgcactaaaatattacaaatagtgataacagcatacccaagatatttgttctacaagagcttaattattataaaaaatatttaggctatatactttttttttttcaaaaaaattataacaaatcttagtaatttttttgctaaataaatttataatcaatcttactaaatttatttaattttgtagcgctgaattgttatatataaaaaaattacaaatctttttactatttcggtttataattaaagtatcatattagaaaaatatttaattatttaaaccatatattttttcaatctttgtcagttcttgatgtgtggcatgcattaatttttccaacaaatattctcaattaggtgtaatattggagagtgcacatatcattactcaaataata

SEQ ID NO: 200246 - DNA, 650 bp, Cannabis indica
cttttcttgccaaaggcagccctggatatgatgttataagttaaagctatgaccttttcagtaaaattaatagccatagaatcagatctagcaactgcagctaactcttgtacaagatttaacaactcttgttctctaatgggttgaaatgtttgaacaattttgggattcaaaagcacatatctttctaatttgtttccaatactcaccaatatggagcaaatacaatgcctatacaatcatatgacatgatttttgaagcaagaatctgaggcctagatgtaaaagcaataccatggtgatgtaaactattaaagttggaacttgtccaattttgaggtaaatgagtggtccgtgttttttggctaattctcttgagtgtataatgaggtaatgaagaatttgagcctaataatgagataagttggtgcatgtttcccaccaaaggtaatctccatggtcctggggggtagttttgaagatgagttttttgtatgatgaccatgatcatcagtctttttttcaaaagtagtaatattatgttcacttaaccttaaaaaacaaaagacaaaagagataatgatgatgatgatcaagagggttatttggaaatagagtagttggagttccatgttggaagtgataagtat

SEQ ID NO: 200247 - DNA, 1959 bp, Cannabis indica
ttacaaactaatttgacccactttttcactctaagaattttgtgtcataagcactgttaaaatacgtttggttggagtaacgaaaatagaggaacgaaatgaaataaaataaaatttaatgtgattaaaaaaattaatattttgttaatttgtttttcacttttactttttattgaaatagcaatttaatactttgaactacaatcaaataaataaatagaatgaaaataatttaattacaatatctccggcaaaacaggttcttaattgccttatttcggaggtagtaattggtagatacaaagtagtacaagttatttaagaatgacacaattgagaaaaaaaaaagaccaaaatacaataagagtacctttaatgagattgcctcaagttgttttagccatatgcaatatggatattattgttaatggaatttattaataccattatttgtatttggcaacagtcatgtaagtattatttatctttttatttaacaaaattattttatggtattattttataatatttaataaaatttaatttatttaaatggtgacatgtaagatcatggtggataacttttaaaattgtaaactattaaagtaatttttgtatgaaaaattgtcaaattttatgtggataaagatgtctaagatcatgaatcactactatttatacatttttttttttgaagaatcacctctttctttggttattctttataagtggctatatattgtgatgtttaattttatttacttattaatttttaaattaggagtctttcactattttgatggaatcgaacactctctgctcttttgatcatacgccgctcttactgtccaatcagatcttgctgtcgatattggctccgataacttattcgataaccgaacagacaattcaggtcagagaaatctttaaagccaagttaaatgtcaagtttgacatgtgatttttttttttttgaaaaggaattgacatgtgattaatgtcggtaataatttttttttaggttttttattcaatattaattaattaggatattaatttaaattaattttaatatgttaaatgaaaatttgtaggccagaacttgtttactttttggtttcttcattaattattatttaattgtttttacaaggtatgttttatgattttatagttttgcctttttattgttttaaaagaagttttatgttttcatttattacttattgtatatgatattcatttataaagtattcctatattaaaattaatgaattgttttacatactcattcaatacattaaattattttaaatttttctaaaaatttataagaaattttaaaaaaattaacaatgtatattgcaatataaaaaatggaatattgtcaaaaatttataggatgagttaaagtattacaatttatatatcatagtaaaaaactaatattaaaattatttagatattatctcaaaaaaaaaaaaaatttagatatggaaaaaggatgcattagtcatttttttcaaaatgataataaaaaagttcattatgtaatttactttttttttctttctaattatgcactaattaatatagaacctttgagaaaaacaaaaaatcaaaacttccataattttcctctagggatatcgaaaacaaaatctttgaagatcttcaaggttctaagtaaattttaaattattaggtttaaatagaaatgtataatatcagttatttttaaattttctttgaacacatttaagatactaacaaagtctataatgatgaaagtggacaaaaattacaatcatactcatataaaggattagagaatgtttaatagatgacatgaacatatttttgatataatagatgcttacaattgaagttaaaaagaatgcaatgcccaaaaatagcatccttactatcttcttttattattattttgtaaaatttaat

SEQ ID NO: 200248 - DNA, 1877 bp, Cannabis indica
cacctttcgcttgagggggatgatacaactcatgttgtaacagaaattagttaaacagttgtctctgtttttggttgtaacagttttttagtttctgttttttcagttattttcactgtacactgcctatataaatgaaactcctccaaaagactctgcagcttttgcaagtcttgaattgcaatctcatagattgaattctcatagttcttagcatagataagctacttacaaattcaaaattaagattgtataatatgtacaaaaaaaaaaattaagattgtactgaggaaactagaaaaaaaaaatacagttttataaatattaagtacttatgccgctaaaagaaattattgaatttatgtcacttataaactcaaaactttagatactcattccgatatttattataaggtagcactagtaggattacaatctactaattttaaaagcaatgctctttatattattcatagggaagtttaaaaaggttaaaaatcattaaacaataaaaaacattgtgagtattttatttatttgttaatttcaaattgctacttaatattatcggtataaaatataaaatcaaattttcaaaaacaaaaaaataataataataaaattaactttcttttttaaaattaaaactatttttgctaaaattgttaaaataagggaagcttggcaattttgcaaaaagcccaaaccctttgtaatattatgggctctatattacaaagcccattttgggaaatggagtttacaattatgggctacgaaataaaaaggtccagtgggccccttttgttcacgtgagttattgcaatgtgtgtgatcagcttccttttaggctggcaacacaatctaattgatagagtaagtacttgtttggaatctattttgttcctatttatttttctttttatgaatctactctatactttaaaataaaaataaaaaaaagctgatgacaatctttttcagcatgtgagccccaacacattgcatcaaatttatatcaaaacaaataatatcgatctagtataatggatcccactataaaatacaaataaataattatgtctcattatataatgtacatgataattacacaattactattagtaggaatattagccatataattagctaatgtcaatacatgtgttcactctatcttttaatttagtacgttgtattgtattaattatattataatgtattgtattagtattatttaatacaatactatatttattattgacttgtattaaaaggttgtgtaaagttataatttattttcaataaactcgacttcaacactgactccaggtcaggtccaggttcaggttcagtccgtgtccgggtctgggtcttagtacgaggtctcgatcccagtcccagtttgaatttgatcccgagtccgaattcgaatttagattggagattggggttgatctcgaattatttgtaaatattataatacaagttaatacataccatatgttatatattatataatacaacttacattgtattagaattttggttgtaataattaatacattgttttattcaaatataatgtgatttattatttaatataatacgatcgttatacagcctaccaaacaaacccttccttcaagataataagtcgagcaccacaagaacaagaaactattgtagggttacacctctagcattggtcataaacacacacatcaaatataagagaataactacaccattccctttcgggcatccctttcgggcatggtaaagtaaagcgtacgctagagctagtagcaattctaacaactaatactcaaaccgatgaaaaaaaaatagtaataaagaaaaaataggataacatg

SEQ ID NO: 200249 - DNA, 1360 bp, Cannabis indica
cttttttttttttttttggttacctactacaaaataagagagagagttagcttttatttagctaatgttgtagacttaggaaaaacaagaaaaaaacgaagaagaagatgatgaacagggaaagataatagaaaaatagaaagaaaaaaaaaactaatatactcataaatagccatatgaatttgtaaatacaaaagaaaaataaaatagtatagatttgtaaacataaaaaaaaagtacagatttgtaaacacaaaaaaatttaaaaaataaataaagaagaacgtaagaagaagatgaacaaaggagagagatgaagagcttaaggataaaaatgatgataaaaaaaatataagaaaaataaaatgatgaaatgccaaatgaaggtaacatgtgattgataaggaaaaaaaaaaaaaaacgtgcatgaagtaacaagtttatctaaaagaaattaaaaaaaaataaaagtataaaagttatacgtacacattataaatgttatttataccggtgtataataaaattataatatttggcaaaaaaacagtatgagatgtaaatttctctagtttttatataaaaaaatgtacattctagaacatgtgtggccatgtataatgctttgggcgcacacaaagttctattatcatttatcgttgttttagttctgatttcagatattttatttatttttatatatataaatataaagaaagaaaaaaaatgggtcttatatgagtctttgtacagtggcccaagcggcctaatgtttaggccagccttgatgatagcgtacattttttttttaaaaaaataataatttaccatgtcgaaataaaaactcaacagttgcttacaatgtgaaaaataatcacatgtgcaataaaatatttaagttttatttctattatcttaaactatttagaattttataaaaaattataaataattctagataacgacaacgtacacaattatgaaaaaaaatctcctaaatatcaaaacaaataacaatgtaccacaatgacttttttaaggtgtatactataaaaatcaacacaccaggttaaattcctagagcgaaatttgcatatgagtgacaaaaaccaacacaccaggaatgtcaacctagaagatgggctcaattcttggcctttcaggattccagttttctcctcgagtttacccatatcttcattatttctgatgacagaaaaattgcttggaacactttttagaaaaaactccttggaaaagacccatgttgataaatatgttaacctgggcgtaggagcctagcaccaggtcaacctgggcgttgggtcccttttttacccccaaatggctatgtttgact

SEQ ID NO: 200250 - DNA, 684 bp, Cannabis indica
ctctataaccacttggaacaccctacttaagtgattgtaacagctagtataagaggcaacaccctctggtggaccaacaacacaaaaagggtaacctaggtatagtcacctacatgttcacaaagtggaccaccattgttatcaactctattaaaaggaatattgttaagattccacatacacatatcagggcttagtttgttgttaataaacaaaaccctcatcccataaacataggctagtattttggtagggatttcaacataagtagttgtcacacacatcaagctacttacaacttgaataaaattccaaaatgttttgattgtgatcgcattcacatatgtatgcaactatatgattttatttataagggaagaacattatatgtcaaaaacaatcatatcttgacatgataagttaacaatcatatctaagactgagcaaagaatgaagtggtacttagtttcacttcaagcccatagcacaaatgtgttggtacaaatccaattaagtaattaacactttccttcctctcctcttcccttttacctttattctcatacttcttttaatttgctctccaatagtcctcatctcccatatcttatttgttttttaaatataaaattgggaaagaatatactcttcctctcaaatctgcctaacctatgaacatgatat

SEQ ID NO: 200251 - DNA, 724 bp, Cannabis indica
tataaggaactcatgtatttgatcatgagattcctaggtgtgaaattgaatgtaatgaaagcatgtctctcttagttttgtaggtaattcgaattggtgtgtttcaccattggagggttgtccatgtatatcgaagtaagattccattatttgtctacagtactattgaataaaatttagattgtcttttatctttggttcattttgtttatagtttattagtcccaattgtttttgtggccaattgtgatcatacatatttttgttgccaagtgtgccgattgtacaacataaacaaaataaaaccaatgtatccaaaaattaggaacatacgtacatattgtcattcttggaattgaagcggaatgtctcaggcacgcttccattaagcttgttaccccctaaaaatctgataactagatcaagttattttcattctactatatctaaaagctgacaaaactaaaacttaataattaacaaagtagaattttcatttcaaatgttcaatataaaatatcatatgtatattatatatatatagatgcttacatatgttctgttgtgtaggattgggcagtgttcagtcctcctaccaaattattaaagctcaagtctctgatgagagatattacaaaaagacataacaatgaataagaaattgttgcattaggttgtcttaatgcactattatgccaaactatagtagaagatatataatttt

SEQ ID NO: 200252 - DNA, 1637 bp, Cannabis indica
ggaagatggatgtatccattttcaaagagatatgaaggtacttaaaagttatgtgcataaccactttggccagaatcatatatggttgagtgctatatatttgaagagactgtggaattttattcagcgtacatagccagaggttaggtaattggaattagaaaaccaagaattgacccaaataaagttgatgaggattaaggaggaaacgaacaatggttattgtgtcaaaattgaattagattggactcaattagttgtgatgaacaataatacagaggttcaaccatatataacgtaagttatagctagcttttcctttgattaacttaattagccgcgataaaaaataacttgatcaacattacctttttattctaatttcataattatgatttgcagtgatcatatggagttaatacaatcaatggttccaagacattataaaaataaaaaaaaaatgagttacagacgagcatcgtaaaacttttattaggtggttaaagaataccactctagcaaagttgaatgaaccggatcatggagtgtccgatgaattgagtcataatgctcttggagcaaactctgaggtagtaaagcatgaagcttacattgtaagggaaaacgtttttatacaaagttgagagatgatgctcatagggttcaaagtagtggcttaagtatcgttgtagaaaccatacattttgaaagtgtaaaggataataaccatgttttaggtacgatgacatattatggggttattgaagaaatatggtaggtgaattctttaacgttcgagttccactttttaaatgtttttggattgacaacattgttggagtaaaaatgagcttggttttactttagttgattatagtaagaaaggaagtaagaatgatcaattcatcatggctagccaagtagcacatgtttttttacatttatgatccagctaataataaattgtatgttgttttatcgacactagaaaggaagttcttagagaataaagaggatacggagaatgctaatttatgttatgataacttcattgttggacaatcaatgcatgaacaagtcgtgaaaattgatcgtaaccttgaagaaaacgataatgaatacattagaaacgatatcaatgaaggaatatgggtcaattgtgattcaacaaaagataaacgaaaagaaaaaatgcatgtctaattggtaacttattattttgtttgtttatgtagctactcagttatagataacttgtgataatgtttatttatgtagttactttgttataactaacttgtgattatgtttgtttatgttgtagatatgtcaaactcaggttcaggttcagactcagaattagacccagcaacggagtgtcctagggtgatatcaaggcaaggtcaaacagagatgaacaaaataagtaaactgatggaccaagggaaaagatttccccttgaagtcaatgataaagggaagtactatggcaaaaactctggccagttcatatcaactttaggagtttgatgttgtaggacatttgcgttggactatgaagattaaaagaaggttagccctgcattgaaaaatagaatttggaatgatataaaagtaggaatttatttgttaattat

SEQ ID NO: 200253 - DNA, 1141 bp, Cannabis indica
tgagtctttaagtgtttaccaattgtttctggacaaatcatgagtcttccatgcttgttttccccaaacatggcaagcagagttaactagccaagtaatatggtacacccatatgaccctcacaccctgcagtgatacaacaatcacattttacatcttcaaaattaatcctccaaaaagaaaaagtgaaattgaattgttaccattccccacacaaggaaaggaaatcctccaagtgcatatagtagagttgccattgctattgggtgaacaatgtaagtattcttaaggaacttatagaatgtctgcttctctaaatctgaaacattgtttggacccccacactgcaaaattcaatcaacagtttagaattatgttatttgaacaacatgtagagatatgaactgaagtagaagaaaagagaaaataatgcatataattaataccctttgagctacagaattggtatcaaatagccaactcatgtgactaaaccagaaaccttcaattgggctatgtgggtctctctcagaatcacaaaactgatggtgatacctatgtgtgctcacccaatcaattggattcccctatctcaaacaaataactcatcaaaatcagatcttttttcattcttcctaaaatcataatcaaaaaggttaaattaaaactgacctgaagagctagagctccacaataagcacacaagtactcaagccatttgggtagcttaaaactgcggtgagagagatttctatgaaaagagagagtgataccaaataaaccagtcacaatgtaaagtgaaagtgccacccaaaaggcagcccaattacaatgaaacggtgcaaaaagactaagcaaatgcattgccaaacaacaccagcagtgcccatatccatagaattccatttcctcccagaaaaaactcttcttggcctcttcaccaccacatctgacaacactaaattctcttccccatttactggctctgtactctcacttaactgtctgcattagtaactaacccaattcttctgtcattacttcttacatgaaaatgccttaaaaggtttgtatttcccaaaaaaatttcaggctttggaaaagttgaagcctttggcaatggcctgaaaggggctacatt

SEQ ID NO: 200254 - DNA, 780 bp, Cannabis indica
ccacgtacaaaaatcttgtgtgtttttacttttatgcactgtttgtttttctgggtttctctggagttacagagttgcattctgtaactacagaaaactgttttcagtaccagttttattattccgcatttaattaatcatttaattaaataatcaaactgggaatattaaaatacggaatttcagagtaataatatagttgatattgggtaagtaatagtcttaatattatgatgaaattatctaatattatgatgaaattatctaatatctatagttattataatatgaaagtgattgtaatgcttttcaagtgtttttattttaattttactcatgatatattattatcaactatacatatacttttgtattagtttggttaattgacttagatatggatacatatctttgtggttttattggtagatggtattctatttttcagcttaactattattgattttgtattacctttaaattaagagtaaatattttttacttcttatgtgtgtcttcttttattttttgttcattaatatacttttgatgagtatgtgaattgtgatagaagtagaagactattgaaggattctctccctcatgattcaggaacaatgatttcagatgtgttggaaacgaagtgataagtctttaatgaactttttatttttttgaacaaccccaacgaattatttggataatcaccattataattttagaagatttatactttgtgttatgatcggtaaaaatcaccttttgattgaatgataacaa

SEQ ID NO: 200255 - DNA, 1267 bp, Cannabis indica
ttaacttattatcaatttatgacaattttaacaggtttataattttgttatgatacatttttgagtaatttaactaaataatttacatgtaataaatttaaaagtgtatactcttacataggtcattactcaaatttatttaaggcaaattcaaacttacttattttgtgtgggtttcgattcatgttatcgtaatccaaattgtcacccctaatgggtcttaattccttagcataagcaataaaatagaccaatagtgatgctaaacgacacacattttacttctttttttggcacttcaaacgttttttagtttcaaccataattttagtgtgctatcaactaagaagcatagccagccttttttagtgtggaaaaatattaggaaaattgtgttatacatattattatgtacattttcagtgatggtagggagtagtaaccttatctatatatatatttatataaattttacatgagaatgagatgagaaagcaaacttattagctaaccaactctgtctttgactttgtttttggatagttagagtgattttgttttagtgagtgaaagaatggttgaaaccattaacttatagtcaataggcttagttagataagcatccattcccacctccaaacacttggtttcatcagatgacattgcatgagctgttaaagccacaataggaatatgtaaactacttccttcttctgattttcttattgcttttgttgcttcataaccatccatctttggcatctgaaatcaaaaaacacacataaacatgttactaacggccctgagattggacggaccttaaaaaaaagaaaagaaaatcaaggggtcaattttggagccattattactcagggtaggctctgggtggactctaagtgcaggcctagcatgtcttaattaccgcaggcatgaccctattaacaggtatttcgtgctaagctgatttgctcgtttgtttgtttgtttgtttgttttatatgattttacctgacaatccattagaatcaagtcgaatggagggggattcgatttttcgtcttgtgagcttgtgcaggcatcttcttctgcattgagtgagcaatataaagcctctactgcttgtaatccatcaccaaccgcggtcaccatcgcccccattttctcgagcatatggttgccactctttggagaaccggtgtgtcttcagcgatcaatatccttagccttcaagagatttattgtcattcatagctttgctccaaacaat

SEQ ID NO: 200256 - DNA, 1751 bp, Cannabis indica
tccaaaacacaacttaaattacataacaatgatactaataaactaaaaaaaaaatacaaacataaattataaattataattattattaaattataaataaaatattaaacgagtcttcatcgaaataggagtgtcatctctgtccctgtcttgtttaacatttagggacaaaaaataattttgcccctgctccatttcctatttaaacgagaaattcctaccttattaagagcggatccctgaagaaaatgtacatcggttggtaaaatgattaaattagtattttgaagatatattttagggtaaatactattttggaccttgtgttttgtaaaagttactaattggaccctctatttcgttaaaaggacaaaatggactctatattttccaaaataataaaaataagactatgtcttgaattttcaacaattttattttttgatataaccaactttaagacaatttctaacacgaacagatacagaaaatataattagttttgttataatatctttaaattagattattattaagttttattttgactaaaaattagttcaggtcctatttgtataattttagaaaatacaaaattttttttgtcattttataaaatataaaatctaattaataacttttacaaaatacagaatccaaaacagtattccccctatattttaaagaatagagttaattgctggttagtaattaatgggattgtgaatcctagtccatccttcctatgacctattccttccttggtaatgaaacctattgcttatcttttaagcagtcaaccaaaaataaatatacacataaaaagttaaaaactcattttgccttaagtaactgccttgaccaaaacaaacaaacaaaaaaaaaaacagaccacacttcctttctaatagttcgtccggaacaccagaagtcttcttcttcttcttctttttgaacttttaatcctccattttataaccctttcataaaaaaatcatcttttgaaagaaccctcttccattaccaagctcctgcactgcacctacaagtaagtatcaactatattctagtattgatttctctgtgtttgttactttattctgtaaactttaatttttacaggtcattttaatggctgaaaaaagagttaaaaaaaccacatcaaaattgatgatgggtgaagaggaggaaaaggtggacagaatttctaaactacctgatgcacttctcattcacatactctcctttcttttcactgatgatctcgttctgactagcctcatctcaaagcgttggagattcttgtggtgttcagttcctaatctccatttcctccaaactaagaaaattggacactcagatggccagcttttgtttaacaattatgtggaaaatttcttggaacaccgcaagagaggtatggatggtgatcatgattctgtcattactacttttaaactttcaatggataggtatgattggagtaatgctagcttcctagataaatggttaggttttgtagttgagaataaagttaaggaaattaaacttgggttgtgggaagaagacactgatgagaatggtaatggttactacccttctttacctaaaccacttgttacaaaatatttgactattttgaatttggctatggtggagttgaattgtcgttacccatttagttttccatccttaaaatctttgaatttgggtgttgttcggtttgcagaaaaagatgtgttggataatct

SEQ ID NO: 200257 - DNA, 1349 bp, Cannabis indica
ttttcgtaagaactccaaaaaaattaatataaagtatatagatttataaatttttctaaacaaaatcagaacaatgaatactattttataaagggctatttacaaaaatatgagaaaaaataaaagaaagttttgaaatatatggcatgcaaacttaattgcactaaatatgatatttttttttagaaaaaaaaaagaacataaaaatttaaaaaatttgagataactcatcatagataagaaggaatagcataaataacttaaataatatgtataaaaattttacttctatataatcaaaagcagtttcttgatgaagaaactagtttcttgaatttcttgatgaaataactagcttcttgatgaaggatcttcaatgagtttcactttgacagatcatcgtcggatgggtaaaaaacttaaaaagtcgtacataaattttacttctatataattaaaaccagtttccttatcaagaaactagtttcttgaattttttgatgaaaaagccagcttcttgatgatggatcttcagtgagttttgctctgactgatcattgtcagatgggtaagaaacttaaaaacttgtttataaattttacttttatataatcaaaattaattttttttatgaaaaaactagtttcttaatgaaaaaattaatttattgttggatgatctttgatgagtaatttatgattatatattaattttgaagattaaatttacatacacatgacataaaaaatattataaaaaaatttaaaaataaaataaatgccattaaaaaagggtcaaaattaaggctgacaaatttaaataattttttttaaaaaaatactcaggtaaattcttcttttataaatattgaacattagcactatattttcgccactttataagtgttgttagcatttgtttttgatatttgagttagttatatgatgaaatccatttcaactcgtgagaggtgtgctccaatgacatcaaatataatcttttgttcgaatgctttgattatcagcatacataatctaattctccaacactaattcccgaaaattgcaagtaacacaataaattcttaaacgattgactcaatttaagatttttttttaataataaaatatattattgcatcacaaatttagctaattggggatgctagctacacttaaaatctatatgcttaaaacacaagtatgaatttattctttcattttcacttaatcatctaagatgatataaataaccttatcattttctgcaaactattccattttccactcccctgaggctccactacaatcaagatactccatctccactgactcctttggctcaaaaaa

SEQ ID NO: 200258 - DNA, 1966 bp, Cannabis indica
tctagtgacaattttttagtcacaacataatttttttggtgattagatataacttttagtcacaacaaaaaattacctgtgactttagcataatattaagatacaagctgttactaatttagttttagttacaacaagtattgtgactaaagatacatttagtcacaacaaattgtaatttttgtcactaatactttagtcattgactttttggtcactaatactttagtcatggactttttagtcacaatataggaatgatggtttataattagtcacattttttttcactttttagtcacaaattttgttgtgacttaaagtaacattttttgtagtgatacattatagttattgtagacatcttgccattttcggaaacttttgagtagtttacaatactaaaaatgaggtcaaatagtcagttgcattgcacgcgtgcctatttttattacgcgtgcaacgagctattctgaaatatattttcaacaccgtaaattatttagaatttttcaaaaaacaggtgaaatgactactataactacaatataaaccatataaaaaattaaggttattctttcttctaagtaccaaaagtagaaaataattttatgaaatgagcaaaagtgatgtccctacctaagaagcttccaataaatctttatttgtattagaaaaatttaaatccaatttccctgtatgctgtaacatgttaagtttattttctcaataaccctacttcaactaaagttgcatagattttagacgtttgagtttgagggatttcgaaatccttagtacatgtttgatatcataacgaaaaaattgttctttgtttttgaaaacaattaagcttgtttggtcttattttttgaacacaaagttacaaaaaaacaaaaattttgagaacaacaaaatattgttttctattttaaaaaacaattcactttttgttagtattttttttctactttatctcacatcattatatactcgtcattttctcatattattttctctctcctcattttcactctcattaaggtttggagccgaggaccggggctccggtctcggggctccggtctcggggctcagggttcgaggtcctggtcggggtcgggatcgaggtccgggtcctggtcaagtcttgttcatatcagggtctcaaagtattgaaatgtttttcaaaaaataaaataaacacaaaaattgtttttagaaaacattaaccaaacgccacttgtgttttaaaaattgttttttgttctcatttctaaacacacatttttgaaaataaaaaacaaaaaacaatgtcaagcatgctcttagtaaacttgttcttttgcctctctattcctctaccataaggtgtttttttttttccttccattcatttatattattatacccgcattctctcagttttcgtctttagcaattaaagcctaatggtgattagttgatggggcattttataaatttagagaggcttggacctcggggttgacaggaaaatgaaaaggagaggggatggaacccagatacagagagagacaggggaatcttagtatgaagaaggggaagaaggggaagaagcagtttctttgccttcaattaatcttatgaaagaggtccacgtatagcaatcaaactgatattaaagctatacaccgtctttgatgagagtttaacattcagatacatgatctggaaaaagtgaatgctggtctttaaagttgcatttggttggatgtaatgaaatggaaaggaaataacttttattccgttcttttgtttcgttttattttgaagtattggaatgttattcctgttctaggtatgttttcaattcttccaactaaacatcacctaatggagtgtttgtttatgtaagtttgagttgaagggaatatgaaaccccaagtgttggaggggattaataccattttaatttaaaaagtga

SEQ ID NO: 200259 - DNA, 760 bp, Cannabis indica
atgctcttaattagtcttcattctctgtcctgcgttaattgatagacacaaattatatgtgtcatctgtggtgttggcctcctcttgttcttcaagttcatcagtagtagctttagggattgaatccaccttaatttgtgatctactgctttctacttcttgagtagacttagtatctatcttttttaacatgtccatcttttcttcttcaaaaacatctctattggtgatacatttcttgtagccaagttctatacaccataacttacagtcatttactccatctggatgacctaaaaataagcacttgagtactttaggctaaatcttgtcatgcctaatatgtgcatatatataggtagtgcattcaaacatactcaagtattcaagcttaggtacttaacttgtccgtagctctgttagaatttatgtcgtaaaagacaagtaattaaaagaaaggctaattagtatttttgctcccccaactttaacatataccaaatgatgctctctgaacttttaaggtcgttaaaaatgctccatgaactattgacattgttggatttaagaatttttttccaattttagtaaaaaagtctaacgtggataaaaattcaggagacataatttagtacatgtcaaagttcgaagggcatgatttggtagatatcaaagtctggggagtatgatttagtacataaacaatcattgaaatagtaaaattgaatgaaattagacaaaagtcctaaatccaacaatc

SEQ ID NO: 200260 - DNA, 2616 bp, Cannabis indica
tttctatactattctttctctttgagatgacaaggctttttatctatgcaacctttacttcaattatgcttctccatttacctttcactgcaatcatccatatcaactccgtgaccacttctcttgtcaagcagctttaccctctttgctgcccctgtgaattaagctccactaacttctctacttgttgctccacttggtctcattgtcttggcaattttatcagaataaacaccatcttttgtcatgttcctttggccaaagtcatcgcactcactaaatgaagacaccgtttcatctcatatttgacagggagatttccatcaacttttattaagcaccaaggccattggtttaagacggctaagtttgtcccttagcaatatgtgccttttcattgtgctgaatttagcaatatgaacccttatttgtctgctttttttttatttatttaagcatttctctctattatgctcagctcaggatgtatttagtttctatgggaaggaagagtggaattacagtcgtgtgattatttcatctgtgattgtttattaagttgtatacatttcagagttcatttttttgtgcaaattaagaatttgtcatgttttatagaagtgatgattattaaacaataagtctctaaccctgttcaggaatataaaaaaatcaaccaaaactagaaaaggggaagaaaaaaaagtcacaccacttaagtggttcttttcaatgactggaaagaaaagattgaatgagatgctcaaaacaaccattttcctttgtctgattccttccacacgttttctactattgccttttcaattagaaaagagattctatagagcttttccaaaggtaacaggatatgttttttattcttgacagaaattcagagatcagaatggaatctctgttatcaaaatgtcagccgggcctctttcgttctttcctttaactgagaaagatccttttattttcttatgttttttttatacacttatatagtgtgtgtagcatataataatcatatcaactctacaatgaatccaagaagagaagttcttcgcttgattccataggctaattccaaggccactgtggaagcttgaattttctcatcttcaaatggcatactcaactgagcccaatattttctattgcagctatgaacatgatgctactctgaccgatgaagaccatatcgcatctgaggactctttctacagttgcccttttttcaactccagtgattatcatcaagatgaattgctccatgccttaattccatcctcatgtagggaagaagctttctctgctaccaatccctggaatgagaatgtggaaaccgaagaggcttatgagggagaacaacagcctcctaacagctgctatggaaactggctgagcaaataccagtctgttttcaatggttgttgggaagagaattatggttcagttgggaatgagaatgacaacggttcggagaattctgaacaggccaacccaaatcatcaagaacagaacaatagacattttactcatcaagatgaagatggagaatactataatccatggtctgattcatggttggaatatggttttgagaatgattgttctaactatggtggagaagaagacaatgccgcctatagcagtggcctacctgaagttggagtctgtgaaggtttgtttggctattggccttgcttgtatcgtacagcatgataaaaaatgcatgattatgaataaacttgaggaacacaaaataaagggaaaatccattgaaggaaggaaaagatgaagaatcaaataccatttactttttttttagcttagttttgttgttttgtttaatctatgttggagtagctgtagagtgacagtcaaagcaatgtatggctcaaaaaattcaaaggatttggttaacttctactgctcaataagaagctaaagattgatcaatggtgagaggtagactcttattattttcattaaaataaaaatggtgaggaattctttcattcatcctaatttaaatatttactatggaaaatctcaccatttatagctctaggctctgtttcactccatacattactagaattcatcattccatgcaactaaagattaataaggtgaggtttggtttaaggcaatgaaatggaatggaaatgactttaaagtattggaatgtcattcctatcctagttatgttttcattcattccaatcaaacgatgcttaatggtgtgtttcttatataagtttgagttggaaaaagtacagttggagggaatatgaaactcaagtgttagagggaattaacattaccgctattttaatttaaaaagtaagattcacttggaaacacaaaccctttgttattaaatatttagcaattttaccctttgaactttcgacaatactaattctgccacttaaaatatacgacttgttaagaatactccatcaacttttacatttaaagtaacttagtccttctgttaggttttgttccattattccatttaaatgctcacatgtctttgtaaattagcaattttgcgtcctaaactttgataaatattaaatcgcaccctatcaaaataaaaat

SEQ ID NO: 200261 - DNA, 861 bp, Cannabis indica
ctgttaaaaaagtgaaaagtatatatcacacttcacaaatacagtacgtacaacctaatctatgatgtaaataaaaatatgtatgtgactactaatgtgatgatttttagaccaaattaactagcactacatatatatattatatatatatttataacaagagagtgggaatattatgccaccttggtttagctagaaaagggtgagcatccaaaaaatttatgggctgagacgtgtggtgatggttacacaaaatattataaataaatatgttgcacatttagtaacattacatagctagctaatcataaagtattggtctataatataaaccatggcatataacagagaatagtatacctcactttcttaactttgtttgcatttggttggtaggctccaattaattataatatatgcatatctactatatattaaatatatgagagttattattgagcatgttattagtctaatttattacattacttcatctatattcgaatctaatttaaatatatattaaaatacaaagaactgctatagtcgtttacaccttttgattttaaaaaataaatcagctataagcggtgctctaagtatatacaaactgagaaagctcatatcctcttagcaatttgggaaaattgattgatttaaaatcaaaatacaattctttttcttaaaaaagaaaagaaaagaagaaaaaaatcaaaatacaatttatgctcaaaaaaagaaaagacaaaacataaacaaaattcattgatacaattttaaaaccaatttatgaaataatttagacaacatattcaacaacacattaatttgttgactttcagaattaaatgtaacttcaac

SEQ ID NO: 200262 - DNA, 548 bp, Cannabis indica
taataataaaaatgaaaaatatatacttaattttttcttttgaatgaaataaaaattattcaaatcaaaccaatatgttcttaaatagattggtttggtatttaattagtttggttttgttctattttttttttaaaaaaaaaaatagcaatactggtttgatttaaataaaaaaataaataagaattctgactaaactaatctttgaaaagctttaatgagtggtgctaaacactatcataaaatattacatttttactgatgttaattaaataattaggaatcacatattttaatttgacaattatgaaaattactaataacacttttgcaaggtgccaagatttcacgcagtaatggtattggctttataaataacattataactctttctcagaagaatactacaatatacaatgtacgtaggcattataggtcgctgtaattttccatttcaacaagtgctgccgatgttttctcaagcaaaagatatgaaaataataataaaagaagcataaaagttgcaactttaggccaagatataatag

SEQ ID NO: 200263 - DNA, 1115 bp, Cannabis indica
cgtggctcatgaaccaggagataagagacaactcaggagcaccttcagaacgctcaggaagaacaatctgggaaaactaagggtccccctgaaaacgaacaaccaaatgatcagcccacgtcttctcatagaaatgagaacacaaagcgaccaaaaaccaatgaacagaaaatccctttttggaacgagggaaatcctgggactcaaaccaacaggaaagaggcacgtataaaccctagcagggggcacacaacaaatcatacccaagggagaaggacgggacgtgaagaggcaagcgttagctcggggtgcacgagaactcatagtcaatcaatgggaagaggagaaagtactcgttgcaacaatgatcgagaaagcacatgcccgagtaaaactgaaagttactaaaggacgaggtccatgagtaggacaaagtccgtgagtaggacgaggtccgctagcaattataaccaactggatcttcgtgatcacttgaacaagaaaaaacctgatctttgccaacaactcgatccaaagcaagaggatcctatccaattacgaatagatgaattgggggataagttcaggagctgttaagtcgggtaacaagggaagcagtttggatatgactcggatgaagaactcgaggccttccatcgagacatcatgaatgctccattcccccagggattcaaaaaccctcacgtctcatcgtatgatgggaccacatatctggtcttgcatttcaataatttcagaactataatgcgagccaccaatgttaaaaacaatctgcgttttatttagtttcctaattcactagttggaggaggcagcagtaggttaaaaaaatttacccatcattcaattacttcctgggaacaattggttaaggacttcaaaaaatagttccaggctgcaagggataggcgacccgaagcgtccccacttatcaacatcaagcaacagcctagtgagacacttaaggcatacttaagtcattttagcacggctgctgtgagagtgagaaatttggatgatagtacccagcttactacctttcaggcagggatcctactaatgtctccactactgcaggtgaactatgggatgac

SEQ ID NO: 200264 - DNA, 1258 bp, Cannabis indica
gaataattttgaattgctttgttgaagccactgtgataagcatgcactacttcatccacaacctcctcaacaacatcactttgctccttcagaaactgaacttcagcttcacgatcttttgatgtcaaaatatggacaacatgaggcaatgaatcaaaccgtgcagcagcccagctctcatctatgcgtgaaagctcttcccttaaatcctgcattaaccaaatcagtttactgactgaaatataactcaattaactgatggttttaaggaagtaatatcttgatgcatctagtgacatcttcatttcaggatttattgctcatatgcaaaatcttgtaaactactctacacacttgcatttacatctggttctgaatttgggatacaatacaattcagcaataaaggttgaacttccaataataaaaattggaacttgacgtaatcaccaaatcaaaaacgcagagctggggaagaaacttgcaaatggacaggatgagatcaatcatttatacttactgctttatttggagagacaggcaatccatcaaaaagtcccatgcttttcctctaatttgatgtggggaacttatgagagtgcacgacagcttataaaattttgtgctctaactgggaaaaaaaaaaggatagagaaacaccaaattgaacaatatcagcaatgaaaaaaaactgtaaagagaatgagtcaaaaattatgtttttccttttctttttcagcaaatataaaaccaatcaccaaaacttgtttctagttgtgtatgtcaacacaagaatggatggaaaaggattatgcccattggagattaagaaacaactaaacttggcctagttgataagaaatttaatatttactggaaaaaaatagacaaatcatattctgatactaataaagaaaagaggattgagcctaagcaaccaacaatgtcctattatggaaggaaggccattggcttacaaaaaatgtacttgatcagtgtttgtgaactgaaaatctcatttcacctaaatcatacgaattcaaggatttgattctaaagtttctttctttttttttataccttcaaaacaaagctctaagcaccggaaagttaaaatgcccatttaaaatatattatatctacaaaattcaacctaaaatttgaagaagaggcaaatcaaaagcaatcaaacaaagggaaacaaacgaataaaaatcatacctctagatctagcgtgagaaacttaaatgtacacagaa

SEQ ID NO: 200265 - DNA, 3293 bp, Cannabis indica
aattacattgataataacatttcacctcacaaatatgctatactgtaaatagcctttagcattctaaaaaaatgtcttttttttcactcaattgcaaatctcttttttattagcatgcattattaagttatgatgagaatagaaaggaaaggttgtggtgggcattagttctattggatggaagtgataaatttagctgtatctttatatgtcggtgggtccctactaaatccaacagctattagaatgaggagaagaaagttaaagtgtgatatatatagagaaaaataggatcacaaacatccaaatttacttgttgaaggacattggatattgccaagacttgattaatttatatataattcattataatatctctcaacagagcatcttttctttgaatgcaatattaatctatatacacattcattctaataatcaacctcctttccttttcactcttattagttattactatgtttttattcattaacacgcaaatacattgagggaaagtgtgtataagtcatcgacttttagtacatgttaatgactttagtgttggtaacgaggcttcaataaggaaatttaaatttatacgcctacacattacattttttttaaatagaagcttattaaaattttaaaaaaaaaatagatacagtttatattgatactcataatatttttttttctaacttcattatccatactctccattctcattcatactgatagtggtccgatgggggtccgaaggtgtcccaatgctaaccatttttttttttcatatttttatacataaaaaaatggtagcatcaggccactatcgaaacatattctacatttatagatattaagctccattcattaaggtcgtcaggaagacatcgaaccaccatcggatcttcatctttaacctttactcattttaataacaggaaggcattgagctactattggaccaccatcgagcctagcaaaaaaactagttttttgtccaaaactcagatccgaccatcttcgaccataaatctaacatcaactcacaggtaacagacattaatcatacaatttattcctaaatcaataagcctattaataaaatcatacatttcaactctaaatcatgcttaatacagtaaaataaaatggaaaatttacattcatggtgtggtggtcgtggttcagagatcctgggtcttgggttggtggtcttcggttggaggcgcggtggttggcagcctaaattgctagggtcttcgtgtagttttaagatgaataatatatttctctctttaatattatttaagaataatattatatttaactaattaatgtagttttatcaaataaaactaaataattaaatactattatattacacaattcataatcgttataattattcaaaataataattttcacaaaattactattttactcttaagaattatttttcatagaaattaattctcattcaatttcttttatcaaattaaacattttcctgtagtgttgtatagggatgactagaggatcatgaacctatattttaaagctctaataaacacttgattattattgatctcattaatagaataatccagtttattaattctattattactccactataaatataaaatttcactctttgacaatataaaattatatttacaaaatttttactagtactcaattattataatcaatataagtagttcgccctccagttattatttcataataagacttgatcaaaattattgttttacctttttaattatctcttgattccttatgtaccattaattcaatgtgaacagttaatttataatccaattatagatttggatccaactgttagcactctcagaattaatactataagagaactaatatttgattcttttgaaagcttgaattcaattattatacaacatgttcccagctactcatataattaagctcccaaaataaaagttgtaagaattatcttctctgataaactttaacgagtgaatcaaagaactcaatgaacacaaataggagtgcatctatacatcatatgattcagacagatctactaataattatcattgtgatatgaacaactctttcatgataaacaacacattgatgaaagatattattacatatcgatcaagtcatgtacaatgaaattatagacaacacatttaatatatgtttatctacatatgtgatccaaattaaaatcacacacaatatagtgtacagtaaaccgtacttagtagttctatattaaagatcactttattttaatacactaccgactagttttattcatattatataattttaattctcttgtacgatcttacaagattatacattctccatataaataagaaagttcagatattaattatatttgtataattaatatattcatttatcttataattgcattttatatattatataatatattatacattaattatttgattttagggcataaattccaatacggagtccaggtctgggtttggggtccaagtccggcgtacggggtccgggtctaggtctagggtagggggttcgagtctaggcctgggtcggggtccacgtcccgattcaggtacggggttcgagtttggggtccgtgtcgggggtctgggtcaggagtctgggtccggggtccgaggtccgatctggggtccgggtctaggtctgagtcctgggcatgttctggtccagggtctgggttcagtccgagtccgagtctaggtctgggtccgagcccaggcctggtcggggttggagtcgagtttattataaagaatttataattttacacaacctattagtacaagtcaatatcaaatacagtattgtattaataatactattacagtccaacacaatactatacaatacaatatatcacagtgtactaaacgagcccataataatatattatttaaagtcttccaacgctaagttttgatctcaatttttttaactacatatatttttctcaattttcttctcctgaccgagtagaacatagggaacttacaaaaatactataaaatgaaagaaaatttacaaaaatattactgtatcaatattacaaaaatactgtgtttaaagtttcaaaattacaaatataaaacaacatgaaaataactatgaaacaacaaaatataattacaaagcaacagaaacataataaaaattgacttgattgcaataagcaaaataatatcaactcctccttattatgtttttgtattacgattttt

SEQ ID NO: 200266 - DNA, 991 bp, Cannabis indica
aacactagtcttccaatcactaccatctacaccgacacttttaggcatcacatttatatactataaaataataaataaggcttaataattaattaagctcagtttaagaagtaataacacgtagtaatcattcgtaattaaaaaacacacagcaaatataattaatatcagatttaataaagaaaatattattaatttacctgattagcaaagccaacaccacaaccaagtaagatcctgccaatgatgagcatagcgagattttcagcggcggcgttgaaaatggtgccgatgatgaaaaagacgccggcaatcaacatagtgagccttctgccgagctttctggtggtgtaggaggcaaagaatgttgccgttaaaccagccaagtagagcgacgacgtgaacagttgaagcccttgattgtcgtacttgcagtaattgctttctaaatgcttagctgtcgtttttctataaaccaccggaaagaatttcttcaaaaattccggcatagatgttaccccacctatatttttccacacacacaaaagaaaaataataattaattatgtaacatacttaattacataataattcaagttccaagtttaattatataaattataatgaataatagcaaaatgacaaaagaatccatagcctatatacctatcaagattctagacgtaaaagactatgatgaagatgctcagaacaatatgaatttattaaaatacccttctcattatatcaaagaggagaagtcacagatcagattccaacttttggtgaaagtaataaagaactttagtttatcatgatatgaaaccctatagatctctcaatctcaagtaccttttttttaatttaacttttcaataagaaaagttcacttcttttttcggaataaatttccttatcttttccaagcacaaaaaagttaaattgtcatgggaaatatacgtgagtacttattatttgtttatttatttat

SEQ ID NO: 200267 - DNA, 899 bp, Cannabis indica
atctaatggctactgatatgcctgacataaatttgttggtatttcagtgcaactctatctacacctcaccgatatcctgatatgttattctaatgttaactaacatgcacactaaacatgtattcatatatacacttattatactaatcttaccttgatttcaaattcaaatgtgccgatcaacctaagtagaaactactgctcaacgatttacaagcccctaagtcacaacatacataaaactgataagtgatacgctaaatcactttttgaggacttaaaactcaaaactaaaagtttctctatcaatgtggcaatactctaaatatcgataaaatatgaaaaactaagccctagaatctaaaaattctggtgcaccaaaaccccaaaatggtttaccgtattctagggtcctgctagaaaaactggttcatcatttttagaaaaatggtgaactacttttctttgtagaaaagacccaacttcgaaaactaagtccaaactaccccaaatgacaccaaattctctaaaatacctaattacgacataaagaacaaaacccaacctaaaattgtaagagaaaccccctgaataacaatccaccattaatgagcaaagtttgagcttaaaagctccaactttgttcaaactcaacaaccataaaaccaacttaaaatcagctaaaacaactcataaataacctcaaaatctaaccacaacacaactcaaaacttacagcaatagaaacttaaactttcatgaacacctagttcaaaaacttcaaaattcaaagataagaataagaacaagcttacattgagataaatccttcaagttctatgaatttccaagctaaaccactctgaattggctaagattgaatagagagagagagagag

SEQ ID NO: 200268 - DNA, 1609 bp, Cannabis indica
acttttaaaagaaaatggctcaacaggaggtaattcaatacttgttgatttccaatttttttttttttcatatagtctaggaggggttgtatattccgcaattcggagtttcaaactccaaccaatctagactaaactatttgagactggaccaaatagattcggtatgaatgatttgatcaattcaaactttttaagattttctagttcggctataattttagaaatcttagtagcagttcaaagcaaaaccaattcgtgtaattattttatatatatacttaataagtatttttatggacaaaatattgatatttaaaaataattttaggtgaatattgatattgactttatattgttatagtaataattttttattgttatttatgcattataaacttgataaaggtaaaaaaaaattagataaaaaatgattattgtaaaaaaaaacattagaataactacgaattacaaactataatttcgaatcaaacaaatttatttttgagtgaattaatttagtttgatttgatcttttcaatggtttagtttgcttttaaatttttaaaaaaccataatattagtttggtttgaaaattttaaaaatccaaagcaaattaattcctaaacacccctaatctatgattcaactaatctacacaaaaaatcagcttttcacctaaccttgaaaatgaacatattcaaatttatatggaccttttttaaatattaataaataaaactcaattattataaaggtttggttaagatatggtcctataattttataagtaaataccattttagattttgtgttttgtaaaagttattaattggactctctgttttgttaaatgataaaattgactctatattttccaaaatggtaaaaataggactctgatctcaatttttaacaattttatttcttaatataaccaactttaagataatttttaacacgaacagatatagaaaatataaccagatttgtcatagcatttctaaatcagattattattaagttttattttgacaaaaaatcagttcaaatcctgtttgtacaattttataaaaatgtatggtctattttatcatttaacaaaacagaaagcctaatttataactcttgcaaaatacaagatctaaaatagcatttatcctaattttattggaaccagttttactatataatattggtaaattttattgggcttgccgcaatgtacacgcttcatgtttttaatatctaaaaaattttatttttaatatttttatatgatagtgcatgttgtaattgaatttttttaaaaaaaaattaatgcaccaaaataaacttaataggttttttttttttttttgcatacatgcctctttaatttatatgcatgtgaatagacaatttgaatcttattttttatattgtaaattatttttaattttttaaaatttaataaaatatcttaaataattaccatacattacctgccacaccatcatatattaaaaaaaaatgagattataaatattctaatataaaaaaaaaaaaaaaacatgataaaaattaagggttgtttcatttttacacttcaaaatagtttttttttta

SEQ ID NO: 200269 - DNA, 583 bp, Cannabis indica
atcaggaagctggaagacagtgaagctgccgaacagtattgtgctgatattgggagacccgatgcctacatgcagttagtgttctctctcctttccacacacgtacaaatacacatacattcaaaggatatttgtgatttgttttcgcctcacgatttttctaatgacctcaggttgcttgatatgtatttggatccacaagatggtaaggagcctatgtttaaggctgctgttcgccttctccacaatcacggagagtctctggatccattacaagtcttagaggtatctgttttcgttttccttatcaatggcggtcgtagtgcaaatcattaaaactcagtaaaaatctgttttgtatggtgcagagattgtcttctgatatgcctcttcaacttgcctctgaaacaatattaagaatgttgagagctcggcttcatcaccatcgccaaggacaggtatattttttaaaagcttgagattttattgttagcctttccttactgtctctatagtaatttatttttaaaaaaatgacccttttattagcgtttatttttccgacaaaattgaaccgtgcggt

SEQ ID NO: 200270 - DNA, 579 bp, Cannabis indica
gatggtattgatccatggaaattattagacttgagttgcaagataagcaaagttgttagtgtttccccaatccacattggtatagtcccttccaagttgttctctccaacatctaaaaatatcaactcagtgcaattcttcatggatgatggtaaagttctagaaaagttattttttctcaaatcaagaaattgaatttgatatagagaagaaattgagttggggatccctccaaacaatctgttgttgtgcaagttcagaaatatcaaattttgtagctgaaaccaacaatccggaaggtttccaaatagttggttataagaaagatcaagaatctttagagtcccatgatcaagtaatgagttgcaaaagagaggatcaaatcctttaagagtgttattagaaagattcaagatagttgcattgaagagggaatttagtgggatatgtccatggaattggttggagcttagatcaacaacaggagaatgattcgatggcaatggaatgtttggcaaggtaccctcgatctgattgaaagataaattcaaatatcttaaactagaaattgtattgaaa

SEQ ID NO: 200271 - DNA, 812 bp, Cannabis indica
gaagaggaagagactgctactcatattttttgccattgtgttatcgctaaagcagtgtggttcatgagtaggtgggggtattcgatccgagtgcctaccttggacagaccccggggaatttgaagaatggtgggtgaatctccaagatgatgaattaaagctatatgtcgtctgtgctattgagaccctttggcgttggaggaacaatatactccacaatcagctacaatgggatgtgcctcagattcataatgatataacgaagcggtttgttgaattcaacatggtgcacactatcgaagagcctatagttttacctagtgacttgaatcccaattatcaacctgtctggggctacatggatacgcgtgggagagctttttggttccttccaagtggatgcatcagtggtaaatgaggatgcgggcatggctgccattgaaaaattgtctaacaaatgggaggattctcaagctgctgtcgattttaggcagggtacactctgttttggaagcagagttgcaggctattctccttgctctgcaattggcaaaaaagttgggattgcaaggtgttctcattgaatctgactctgcaacggctgtaaaatgtcttcactcgggctctcttccttttggttagggtgcttacctggtttttgtggaatgccttcttttctgcaagaagtttctgtatatggaagtgacttttatttctcgtacttgtaatactatggctgattgtctcgcccaatgggctcgagatgctaaaatcaagtcatttggttgtttaagggaagtggccccctctgt

SEQ ID NO: 200272 - DNA, 1056 bp, Cannabis indica
ttatctttggaaacataaaaaattgtagttttcaaaattttgaaagttcgctgggtgctacaagcccactaaacaaaccttggaatacaagaaatttccttttggaaatattctcattcatgtatttgcaacactcataaaacaaaacttagaatacatgaggacaatcaatcaaaaagtataacctacactaggcctctttcccaaactcttagcctttcttacactatcaacctaactgtcaagcttacccttcaacgacgaaatggtcaattcaaaagaattttgccccaaacaaactcattatacctaccactatctacaatatctaaaatggaccatgaattttttttatgcttagtaccactaagcaaaaactattcaagaaaataaaaaacaaccaacttaacaacatcctcataagaatcaccccacctctttgttgttaaacatttcctaacagattctttggtaatagaggtggaggtcggccaatatttcacacaaagactgttaacatcttgcttaaaatccaacacactatagtcaccttcacaatctaaacctgttatcgatgcaaactcctcaatgctaaacctaagcctaaaaccacgaatcattacccacaattcaacatcgttaggccgctgaacctccctcaacaacaacccgtgaaaatcttcgagttggactgtaaactcaagaagcttacggaaatgtccaaaataagtttttgaaaacatttaaagttgcttagaagaaagacaagacttaatattacggataaacttgtagaaagctgtggagacaacttatgcaagaaaaaattttttttagtcatatataaaattccattcctgcaatagttgaaaacaaacatcacaaaaacaataaaacaaactataaaacaactatacaataaaaaatcaaataactaaaccaagaacacaaatagaaagatacaaggaaaaaaaacataaacaaaaaatacaccttaagagaatttttaattggaatatcgaaatcttcaagcatgaacctgaaaaaaaaaataca

SEQ ID NO: 200273 - DNA, 858 bp, Cannabis indica
aaaaaaattcaaagcatggtaaaaataatagtaaaataataataaaacaactcaaaaataaacctctttcatatcaacaagaattcctgaaacaacaagcaatttatcatcaatttctgtgcactcttgagtagtagatgcatcatttgtaccttcatcaacctttgcaccaacatcaataacaacacacacctcatcagttttaatcttttcaacatcagacacaatctgtccacgatcatctccaccactaccatcctcatcatcatttggaccaccatcccagaattatcatcgccatcatcatcaacatcatcttcttctttatcgtcatcatcttcatcctgatcatcttcgtcagaatcagattcttcatcaacctcattttcgacatcaccaacaacatcatcgtcatttttctgatgaacaaagcacatcatctaattggctcccatgatgtttagaagcagcatgtgaagactaaaaatatagaaatttaaacataagcctaaacaatatgaaaaaaaaaactatacaaaaactactaaaacaactacataaaaaaactaaaaaaaaaattacctcgataaaaatattcatttttttgttcaaatcagcaaaagcagacataataatttgttgatggctaagaacaagggacacatctttcttcaaatcctcgtactcaatacgagtgacatgctcatgcgccttagatgaggatggaccaacctgatcaccttccagagaagacttgggcgcatatttagaactgccatcacgattgcatgcttttacctttaaccttaataaaggaatgagtgttgtgatattatgcacacgcaagtgcacatatcg

SEQ ID NO: 200274 - DNA, 1107 bp, Cannabis indica
ttgtttagtacggctacttctcatattaattgtgttgttgtcttagttttttagtatcctttatctgaataatttgcagttttggagcttaagtaagtgataatagcattaagttaacaaaagattgctaagttggttccaagataataataataaaaaatatatataatctcttttcctgttgtacataatataagtattttcaattttccaatttattttgtaatatagtattagtagtacttattgagcattttttgacaacaataacaacatagaacatgcaaatatttgtttgtaaatttggaggctgaaattgcaaacaaaattattgaatttgagcttcttaatcaaagtattcttctttgtctctaagcattggatgtgggacctcaaaaaatgagtgagactcaataccagctgctactttaaatttgtatgaacatcaaaaatcaaaccatttgtatttagcttagttgtactctgactggacattgggacccattttcctatttaaatattataatattccttaattgatttatcaccaaatgttgactaagacccttaaacttgtatcagtaaattaattaatattctatttttagatgaaattatcaattttcagatttgcagttagtctgagttttttaaactaagaaaaaaaggtttgaaatatgaattattgttggaaaattcagttgagttagacatttaaactgtccttagattatattatattactgtagaattaatgactttggattattagttttttaccagtcagttgtgtatgatattttaatttgtcgttagatataaaattgcaaaaaaatgtgatggtggttgaatgatctattgtaccttattgtagaaatatcaagtgtaaatgttgattttcctttgaaaaaaaaaaaatgtgaaaagatttaaatattcaaagatcaacgaccgtggtgatgtctaaataaatatacaggacgtcttttaattgagatattattattattattagaataataatagtataagtatcttctttttttttagaaaataatagtataagtatctaatatcttacatttgcaagtgatataaatttaggtg

SEQ ID NO: 200275 - DNA, 988 bp, Cannabis indica
actgatgtagattcttctctgaccgtagacataaaaacaaattctttacttttttcattaatacttcgaattttttgttttataccttgtattttagaggcgatgtcatggcgttctttaagttttataaccaaataagcatttcttcgaagaaatccgataaatctatgcttgtgacgaccttgctgttgtgccacgagttgtgtgtactcgtcaataacatcttccacttcaaatgctgctctccttagttttccaacccacattttaacaccattgctattgtccatgctttgatgtgtttgggcttttacatcagcgtctttgaggaaagccataatatagtctagatcacatttgatttcttctacgtcattatgcacaccactcaacaagtatgcttcttcagctagtaatggaatcaagttatctatgaccaacccaactgcggtttctgccatctttatttagttatctagtaatgcactcgacttcttagctctgtttttgatgaacaatcatcaatttattgcacatatataaattagtcataattatatatgtttttttgtcataagataatactagtaatatattatatcaataatcgtcatacatgaaattttgtggattgttattttttcctaagtgaaatgacaaagtcgatgtgttatccctctgttttaatttggttatttcttgtttgtttgagctttgactcttccagctcactctatcctattcaggagctctttcagcaagcaacctccgatccgtgatttcggaagctcgtatatattcctgaatgtataccctgacgtggagaccttgctcaaatgagagttggttaagtaagttattgcctaactaacttaacaacctcaacttgtagccaccgactttaagatcatgatcctgagacctatatataccacctacactcgtcattcttcagaacatcgattacgttgagagagagagagagaga

SEQ ID NO: 200276 - DNA, 785 bp, Cannabis indica
ctggcaagagcaagatttgagtgtaaaatgcaagagagagaaagaaagacaattgtggagcaatccatcttttctattcaccagttactattcatcttactaaaaatccattaaccctttatatatacatatatcactatctaatcctatggttattaaatttattgggctaatatacattattacaggtgtattatgggcatggccggcccaatcattttggagactttgtgcaaaagattaaaattagacttttataaaaaaaaaaaaattgtatatattaaaacctccattgctagttttttactttttttcttttgttaaagatatattctaaacttttaaatataatttttttaatatatttataataataataataataataataataataataataataataataataaacatttcctataaaaaatgggtttttaaaaaatgggaggtattgtgcaatggctcaagctgtccaaagtttgggccgaccctaactatgggtcaattatagtataagagtgctttcatgtgcctcaaatatatttagtaactattaactattctattatggtttttgataaaaacagacacatagttaataattgtgaatatagtattatgcctataattatattagtccataatatgattttagccactcgtttagaatggatccaaacttatttttactctaggcagttaattgggttgcacactgctggaaaacttcatcaattccttcctggctatccaacacagtgataactctatggtataga

SEQ ID NO: 200277 - DNA, 1567 bp, Cannabis indica
tcgtcgctatctttttcttcgtgctcttcgatgcagacggagggagcaccagtaagaacccgggggaagtagtccctaatgcacctaccgacgacagaagagcaaccagtggggccttcgtggtaatggatatcgcagtacgattctttgaaacaaagttcttagcccctgagaacacattcgcatacaaggaagaagaaataatctacggcccataaagaggaaatggaatatcagtactgtttaaaattgtatcaggcgacgaggaagagcatccatgccattgatgtcctagccgactgcaatgaaagcagaaaattccaattttctcgaatttcaaactggacccatcgtttaacactgtggcttagatcaatgaaacaccacgagaaaagaggatcctcaacccgtagctcaatctcaacacgaagctagttagttcaggaagttggcttgtcctcatccaaatcaaccttgatcaccttgccagcaagagctgcaagaacttccccatttgcaatagaaaagtactcatggggaaggtgatgaacctgaacccataaccaaaggaaacagaccgggatgacaccctcaactcttggagaccatggttggagagcaaaagtataaactttaacacaccagggaccattctctaaagcccaacttctgtctttaacattctcaaaaccaaactcaaagcagataacatttttgttgctttcgataagtgccaccacagaaatagggcgattccaagttttaagaatagcatccttcacagttatatcctccacactcatagggaccaaagctctcccatacagacagtaagtagataaagctttaacacaagacgtacaagggtttaaggcaacagtagcatcaataaatgaaatgcatttaccctttgcaccattattggtggtattaacgacatccataacttcctaacagcaaacaaacaaaataaccaaataaccccaccacaaaacacaccagggaaaagacaaaccaaacaacaccacccaagtcaacaaaaccaaacactaaagaaaatgaaaacaaagtcacggaccacagacaacacacaccaataggtgagcaccagcggacaaaagaataagagcacgagggaccaaagacaacaaagaagtcaacacaacctaacaccaaaggaagagaggaaaaggcaaagcaaataaaatggtgttaccacgggagaaacgaagaggacactagttaaaggaaagaggcaggagctaccaactcgaaccagaggacacagagaggagaaaagtagatgacctttcccctccataggtgtactgaactcagtaaacatatatttacatctctcactcaatacatattagtataaattaatgaagtaaaattaaaagataaaagaaaaattgttcatttattaatttttttataattatttagaaaatttattaatactaaaaatgtacaaagcagaagggagccccctactcaaacaatacttgtaagaaacaagcattaaacaaaccaacaaacaagttgttaaaaaaaaaaaaaaaaa

SEQ ID NO: 200278 - DNA, 1255 bp, Cannabis indica
agtattttttttttaaaaaaatgcaaataccgtagaattagatgttatttaatgtttattgaaaaaaacagttgtttataagtttttttgttagattaaaaatagttatttgcaattattgatactaaaaaatcataacaaatacacaaatttcaggacatggaacctctatacattttggtaaagagcaatggccattgggatgacaacaacactatgttgattacgaatcaagtggagaattactatgaaaagattgtagtttctatcaacttgtgaaaataatgatggatgggctacaatgcaaccctgatacagtaccaatacaactgaaataccaactaaaagaaggatgccaaccactacaaatcaaaaatgataaaagtcttatgttctacataaagctattaagcaaagaaactgatttcacacggtaacaattgtgtgtgaacaaaatcagcaacacagagacacaaacctttttggcacttaaccaatcaatgatgtgcaataatatgatgatgataacatatcatactcagcacaggtagatgtgcaacatcctagtaacaacccaacaacaacaaacaagcaacaaccaactgcagcaacaatttgatcagttcaagatgatgttattttggtcgacactatgactttaacatcagagtcaaccatacaacaactagaaaacaacaaaaaaaaaactcatgcagaagataaatattttgacttcactgactacccaaagcttgttgctacaaaaatggtacaacaacttaaaaccagaaagaagaagaagaagttgacaatacagaaatgattatcgtcattgataaatgacatgaaataatagaaaaggaaaaaatttaacaaggacaaagatacatttatatgtgccctatgctactttgcaatcaagaaaacatttcaatacaaagttgtgaaatcttgctttaaagaatacaatattatttgtttggactttagcttggtggcgatggacaatgctacggaacgccattaaagttacatgggtaaacatagaaccttatattctagagagtaatagcatgttgagttcaaactttaggttttgacggggttatgatgttggaccattttacccctaagtcaatttattacttaagtaccaaggcaatggtagttttgccatttgaatttttgaggataggtgtccttctctctagatgatagctggaccttttagttaagtaaaaaataataaaaatat

SEQ ID NO: 200279 - DNA, 875 bp, Cannabis indica
aaaaagaaaaaaaaaaaaaagtctttccttgagtctcagactcagaaactcagcctctacttctctaactctttcatacccagaaattcttttagcaaatatcataaaaaaaaaaaacctctctctgtgtgtctttctttgacctcttctaatggctagcaagttagcctttactttaacttcaccaaggcgcccttttacaactattattcaaagaccctttgctccactctcttcgtctagcaccaccaaagttcaatcttttcacttcactggacgacagctttgccttcgtcgtaggctctcagtgattccctccaaggccactgctgaccaagaaggtttgatttgatttgatcagatcatgtggtgtttgagtttggttttcagttttccttttgagttttcataaattttcaattatgcgatgcctgcatttctcttctagtggattggtggtttaaaacacttggcttcatattctattgggttatgtgactatttttgcaatgaaaaccacttaattagctgcaaagattgccggttttgaactgtgatagacacagttatttgaaactcacttaactctcttaaattctcaatgttagattaggaattttggcatttagtttagtgtgtcagaaatcagaccatgtttattaatacatagatgccacatactccaacagtgcttgatttgaaagaacaatagtgcttgattaaaagcctttataacccccaaaatctaccttttttttagcatgatggtgtctagttatggttaagtagctatgaaaaatacttgtaatgacaccgattaataatcttgttccaggcaaggttgaagaagatggggttgttgatagcaagatcct

SEQ ID NO: 200280 - DNA, 729 bp, Cannabis indica
aaatttaaaattatttaataggctaaacttttcaactaaacgtgtgattgcttcccgaactacatgtttggcttagtcgcgagtaagtgactatcgaatctgaacgtttcattcaactttgcttatgggtagattggtcgatctacttggacccagtgaatgggcccatcattcttgatgggcttaattgaataaaataacacatgtagtaataaataataatcaaataagctttcgtgactcccaatctattcatagaatctctaaagacccaggttgttcacagctccggatgcgatgacaaatccagatggcggttgcaagcctctgtgactcctgagccccgaaggcgagggtaatctgtatttctggttattcaaataagcccgttaagaatgacgacccattcactgggtctaagtagatcaaccagactgcccataaataaagttggatgaaacgttcgggtctgatagtcactttctcgcgactaagccaaacatgtggttatgtaaggcaataacacatttagttaaaaagtttagctaattaaatttaaaaattttccaatgcacaaaatgaaatatatatatatatatatatattatgtattataacctcaaaaaaaatattcaaatacaaaataaataaatatataaataaaactataaagtgaatatctaaaaaattgaactaatgtcactttactagaattaggagaatttacca

SEQ ID NO: 200281 - DNA, 713 bp, Cannabis indica
tgacgttaaaaggacaattaaaatgaaaaacacagttttttactctgcatgagatatcggggatcccgactgctggtatacacccagattcaagactgaaccaaggtgaagaatatggaacaaatgacaaacgaaggtaacaccaatatggaaccatctcgcaacgacgataacacagcggctaccgtggagaacatggaaaaccaagacatggatgtgggacatgaggcagacgactcaggcgaggtcgatgaaatgcgcctccagttttttgattctatgtccttggaactggaagccgacttcgaactcaatgctgatatagtcagcaaaggggttctagccaccacctttgggcgtcgcaccattgccaggggccgcatcaaagaaatattatccaagatttggaccctctccggtagatggcgcatgaaaacgctgaaacctggactttggggattcttcttcgatctggaatcggataaaaaggagatcctcaaaaagcgcccctggactgtaaacggtcttcttctcaacatcagagaatggcccgataatgggagatgggaagaggtcaacatgaacaaagccagactctgggtggaggctcacggactgcccactccttatctaacctgggaaaacaccaatgtcatcgccaaaaaagtaggtgaatacatagactttgacagagcaaccagagcaagtatcgc

SEQ ID NO: 200282 - DNA, 1538 bp, Cannabis indica
tgagtattttatgaacatctctacttatgggtgaatttaaattaattaaaatttagaaaaagtgtgacacaataattagtaaactaaaatatataaaatttgatacttaattatattaagggatatttgcgccaaaacctcattaacatttgtaattattacacatataaccctaataaaaaaacgagagaaaaaaaacacatttatcttatgattttgttgcaatcgtacaattttagatgctacatgtcaactaagtctgttagtgtcaactaaaaaatatgtggtgacatattattgaattacgtatttctgagttggcccttaacttttaaaagagtatgattgcaacaaaattgtaagatattaatgtattttgctacttttttttattagggtcatatgtataataattacaaatattaaggaagttttactgcaaatatatcttatattaatagcactaggaaacacgatattttagttttttaaagaaaaaaagatatcttattatttatattaaaatttattttcatgatcatgtacatgatagtatttcagattactcaaaattttcataaaattttaaatagtttatagtgctaaaaaaaaatatttaaacattttattgtacgtgtgattattttttttatacatatagtaaataattatttgaacttatttatagtactataaattatttaaataaaataaaattttaaaaataactataatatgtacacactataacaaaaaaataaaaaaaaaaactcatataaataacgagaaagatataagaaaacaccctttttaaaaagtgtactatgaattgagaaatatttaaaggcaccaataatagttagaatttatcggcctgggcgtggatgttcttatttggacatcttgtttgggctactgatttatgttcttaatctctcggcgagaatattggcgaaaacgttaatgtgaacttgcttgatctgttcaattgtgaccttataatgcaatcgcattctccagtctaattgttgtttttgtttttgtattcctaatttatctgctaggtcagtttggttggttctttgcgcctagttttagtgtagcaggtatatttcgattcatcctctttttcgaagggtttcataattggatattgaacccatttcatatgatgagagttgcaagggtcttgggcgctgctttgctatgtgctattcatggtgctattgttgaaaacacttttatttgaagatggtgatgatgcaaatatattctgtgcttttaacccaactcaaggtgaagaaacttactcatccgtttaattcaatatctacataatagaacaaatttatcaataatttttttctatttcaatttaataattattataaaatattagtaattaatcacaaagagtcacatttaaataatatcttacatttttttttattaaaacgtttgtatgttatattaatgtataatttaagattcaaactcaagacctctaataaacaacgaaatctcttataaccacttga

SEQ ID NO: 200283 - DNA, 1303 bp, Cannabis indica
atttaggtacaggtcttcactaatttagttttgtctcaacaagtattgtaaataaaaacaaatttgatcataacaaattataatttttgtgactacaacttttagctacgaaccttttagtcaaaacatagcaatattgatttataattaatcataagttttttacttttagttacaaattttattatgactaaaaataagattttttttgtagtataatacaacaatattgattttttatcactatctctagatcaaaaaacgaagaaaaaaatccagatcggatactaagtccaagccccactactagctaatagcccactcaaagcaaccattaatttgagtgagattgaaagaaactcacattgccaaagatggagggagagtttccagatgaagatggtgagaatggctagagattgttggatttgctggagctctgttgttttttctttcttttttttctgttagaaatggagaagaggaacaaatcctataattgttaaagaaagtgtatttgtacattaaatttgagatataaatgaataaaaaattagtaatgtataagtaacagaaagccttttgtaataagggtgcacaaaatatatatgagccaaattattcaatccagcccaactaatttttttgtaataaaggattatgttaagagtaagtcatggttgattaaactgaaaagtaatacgtcatataattatagattgattataggttgagtatattttaactctatataatctaatctaacttgttttctaagagaccttctaaatttaaaataacttctgtacttaaaatatatttttcattcacaaaatatatacaaatatatagtttatattttaataaataaattatattattattctcacaaataatttaaatgtagtttataattatcttactacttttatcaataaatataacatgagaatcattattataacattgttactcgcaccataccaccactactactttaatttttttaaaagcccaatacttacatgcacacatatatattaaaatatattattatcttttttttttggtatgttctagattaaattatttaatcatgcttataatgtaaatattaaagcttaaatagccatctcaaactaatgaatcaaccaaattcaaccctaatattattgtaccaacaagattagattgtacaattaaaaataattgaatagtttatagtttttcctaaagcaatcataattgagttggccattaaaatacctctaattcagtcaacacaattcacgagtatccctac

SEQ ID NO: 200284 - DNA, 1310 bp, Cannabis indica
tgaactttgagtttgaattggagttagattttcttcaagatttgattgtgtaattatgacatttttgagcttcaatgtgtgtgtattaggcatgtgatatttcattgtgatttaagtttgcattcactctgttttgggcttagaaaccaattgcatatcatatgtcaaatttgagttgaattggtatatcttcgaagttgtaaaaaattgggttttttgggtttaaacacagtcgtcgtgaccatgtatgcggtcaccgcaatgaccttaagccccaaaacaggggatgctctctataagggttcgtcgcgatgacctcgcgacgacaattcacttttgaacctagatttttgtaaaacttattttggccataacgtttgactctaaactccgttttggatgttctttattatatcgttagaaaacttattgagatctatattacttagtctagagtttgagtcctacaagtgaatatctattatatgcgattttcagattaacccaattttgtataaactcgagatgtaactaggaataccggcacttgctctgaatcagttgtggactagaaattcttctctttcattggaactcatgtaagacaacgaactaagcacatagcatatagacactagcgcatttgtatgttgtatagttagttatatgaaaatgtgtgagttagggtatcaataccctaagtttcctatgattaagcatgtattaatgatatatatgaataaggggtaagatcattgcgattaaggcataacaaggttagacttgatgactaagaccgagataaatcctattaaagccttacataagtaaagtagacgtgtgaacgtaacacgtggtgtctataccatatagacaatagatgcaaaggcgtcaatatacattaaatattgtaatgtacagtgcagtgcagtggcatgacaatctacacaggggcgtattttatgttatgtgaatactatatactcatatcatttatgttttgtctttttttttctgggccttggctcacaggtgctcaggtaaaacagtttctgatcagccatgagttcaaggatttgatgatggattgtcatgtttcggccaaactagaccacgagggttgggtccaacaggaggattgtatagaaattctattttgtcgcttaagtcgacttgtatgtaaagacttgaaataattttacaataatattttactggaatcccgaatatgtatttctattattttattttaagtgaaagacaaattatattgttagaagttattttattagttaggttattttttgttt

SEQ ID NO: 200285 - DNA, 486 bp, Cannabis indica
tatatttttgtaaaatttgaaaatgttttaattaataattgacattaatataattttatattgatatttattaaaactgaaaccaattaaagcacgtattgttcccactaatgtagtgatcatatataacttcttcatttacatagtataataactaccatgctaatatatatcccgctctatggacgaagttaataatttaattttttggggacagcaattcatgatgatcatgcatagaggaaggttttgtaatgattgcgagtctcctacccaaaaaattgtacacatataaatgtatgtatatatatctagatacaaagttgtacttatgtctttcatcttcttctattacaaattaagtaatttaaaaagttatacacatatactccctttttttgcagacatggatatatatcgatatttttattttaatatttaaattattaaaatgaagccaagcatggaagctataccatggtttcg

SEQ ID NO: 200286 - DNA, 637 bp, Cannabis indica
cttaaattaatataaataaataaatgctaaaaaaacgataatagttgtggtggaaaatcctttttatttatttttaaatatcttattcttataattaaactgtgttcaatcatagtatctaacatcaaatggccattagtaacatacccgtcgcttccaatattaaaataatctcaaaattagagttgaattgagaaagaactacagaaattaaaataaaaaaatatcaaattaataagctttttcgttttggggtgttaggataattgaactccaacttccaaagcccaaaatatgtaacaatcaaaggcagccccccactacagaagcagactattctctctctctctctctcttctctctctctctctctctctatgacttttttagaagaaaacatgtggtcagtaattcttatcccacttcaccaatacaaagaattgaaaataaataaaagaagcctaaatctacaagcatacttagcactgtttcctattcttgccttataacagttgaacaatataaatgaaccaaaaaaaaaaaagagtaataaaggtgttgtctcctcagatcagaccaatggcctcttctcttcatcaccatcttcttcctgtttcccatttgtggtcatttgagt

SEQ ID NO: 200287 - DNA, 1116 bp, Cannabis indica
cccacttgccatataatattgtcccttgtttttcttttactctgttactgagttttatgattagagcaataaatcagtaactgactgacactgttttgtagaagtgtttattgtacggtcaacaatgaacatgaatgaattttggagttttgggaattggccggctggccggcttaagaaccaaaagtgggattgttcgctaattgcttagagaacatataagttaacaacattggtttgtttgtttttacaatgttggaacttggattgatcttccaaaacaaatgttgttttgtttggtttgtgaattgtcataaaatgtataaagaaagattgaaaactatgatgaaacattttgttgtaggccgaaagggatagacacgtgtattcttcatttgaaaaatgttaaaaggtaccaatagtgtttagcatttttcttaatgtcatatcattattaatttaattaagtatcatgtatgatataatttaaagataataaattttaaaaattattgataaccaatcataagatgctacttcagcatggtactaggcgctattgatatccaataataatgctctataaaattaattatgatgatgataattatgatttgagttcaaaatggacatgtctcaacccccaagtagttgatttaagtagcattagttccaaacttactcttattttacctttttagacatgggaacaaaatgtgatgaaacaaaaaaggaaaagaaattacatttttcatagtttttaaggaaaaaaaaataaactttatagttaggagtacattcctcaaaaattttgtaatttttttttaaattcttccactaagtagactttaagtataggtctagtccctctatgcttatgatcgggcctgcatcttccaaatagcatatactttggactctaaaatatttagctaacaaatgagctaacattagtataaataaaaaacacaaatacattattaattattgagcccccttaggccgaaaactcacaatttaaatcaaattcacatcatgaaaccctccaggtatatataacaaacaaattacaataatacaatcacacttttcaaaaaaaaaaactaacaagtcaca

SEQ ID NO: 200288 - DNA, 554 bp, Cannabis indica
ataataacaaatgatataataataacaacaacaacaaatgcaagattgtaaaacttagacaaattatttggagttcatgatcattgcaataatttaccaattcttcaacattattaatgaattcatcacattttttcccttccaaataatttcatttattttacagctaatctgggaggcaaatcataattgtaatactgatcatatataaatttattctctttgttttcataagccatataaatatattcttatatatataaataattattgtaaaaatacaaaaaaaaaaaaaaaaaagaaaggaccggtaaaaataaattaaactggtggttgacacatatgcccctatctagtttatcaaatttataagttagatataatgctctacccccaacatattttttgtttaaaaatttcaataaaaaaactgttacctactagctagtaaagtgacacaataagaattattacaattatttttagctgagaataaaagacacccctaaaaacagacttattctatatgtacatataaatagatgggtgaattc

SEQ ID NO: 200289 - DNA, 1754 bp, Cannabis indica
cacaaacagcatcggggatatggaatccccttgtcgaagacccttaactcccttaaaatattttttaacatattttaaatgatatattatagttattaggaatagtttaaaaaaaatgttttaaaatttattttttatactaatttaaaattttacaaaattttttgtaaattcttaataactacaatgtacattcttaaaaatttaaattaaaccttctcaagtgccctctaaattttatattatttaaaataaattagagtaaaactcatgaatgggagtttgtactaaaaaaattaactttatcttttgaataaaagatggatttcatgtctaacaatagattgcaatagaggtacctatattagtgcttgcggctaaatagtgttccatagggcagtgtggtccatcatatccagcgttgaaaatattagtatcttgtttgtctcttaagaagttcttagtatttaaagtctcagagggctaagtagctccaactttgcgagcttcttcttcatcctcaagagctcaatgggtaaaagcgaacgttgggaacttgtttaggacagtcttgtccatataagagaagttggtcattgggttcttttactagaaatcataaaagaccaaaaatttcagttgttcatagttttgcttgtctatctcatgacccatcttctcttctgaaagaagcttttgctccttgctcaaggacttcttcagcttggcaacgtcattggtcaaagaattgtgcgcttaatgagtagcctctctttcctcttccagttcctacactcttgccgactaagccgccaaatcttttaccaagacatcaatcttgtcttgatcggtgagttgttgttcaagctcagtgatcttttttcttagttgcatcgagttcaaaatttaactcacctattcgagcattctttaactcgaactccattattgcatctttagctttctttttggcctagttctttccttggtcaaattgaagacgaaggggacaacacttttaaaacagatgtaggcataaactaagcttggattaagcctattgaaaaagagagaagtgttagaaaaaattaaagcgaaaggctcagaaagaatgagtaagattgttacatttgtcaagtccttgttgaacgagaaaaaatataaaataaattattattattatttcttttaaaaaaaattgaaaaggaataattgattttataataataataataatagtcagtcaaattaagagtcaaatcaagagactctctctaatctttaactgcacacttccttattttctctcacctatcacgttacatgggtggtgaagttaatcaaagaaaaataaaataaattaaaaataggctctacatataggagtagttgagaacagaaaaggggattgacactttggaagaaaaatttgagagagaaagaaaagaaacacagagaaaaaaaaaactacgatactttttagcaacaatcaaaaagcttcaatggtaaatattcatggaatgctcttattcttatttcttttatatatatatgtttattttgttcctctctcattcctatttctctctattcatttatagaatgccttcattccataaatgaaaatggatgctctcatccaaggaatgccctcattccaccaaaatattagattctctcatccatagaatgccctcattccaccaaaaaaaataagatactctcatctatggaatgtcctcattccaccaaaa

SEQ ID NO: 200290 - DNA, 872 bp, Cannabis indica
taaaagaataataaatgagagtcaaaaagaagaagagactaaaagcactctcagaaacagaaatgcaataaatgcaaaagagaagaaaagaaatcaaaacgccaaaagatcaacaaacaccactaggatgaacacaaacaggaaagtaccagaagaaggaaaagatgtactcccctagagagttccagaagtaaaccattatattgattattatattttttagtaagtttttttttttttttgagattgtgcaatttgattatataatactttaatctttattttgattttatattgcatataataaattctttctctaattgttatttttagtcttatattttgaggttttaattattgtacctatttttttgtacaatttttttgttaagcactttgccagtatatacattattcttcttctttttagttaaggaaaataagttttgtttgttaattaaaacttgaggcacaaaaagaataattataggttttaaatgttatattttttccataaataaaatttttataaattttataatgtctaaaaataaaaaatgaactatgtaatttaatgtgcttgcaattatatatatatattttaaaaaaaaaatatgtttgcaaatttttccttttggttagaagatatgattcctttatatttttgtcttatagcttttttttcttgtttgtatccatatttatatgttgatttttatcttgccatggatgaaatttaacaacaacataataaaatcaatattttaaatacaaacaatgatttagatagattgaaaacatcatatgtagaaatggtttttgtgaaaataaaaacaaatattattgcaaagaaaaattatcatactcacatt

SEQ ID NO: 200291 - DNA, 1801 bp, Cannabis indica
attcatggaagacagcaaccatgaaaagttgatcttgaatctcccaattcaagaactctggattgaatctttgagcagttcgatctgtatctgaaaggaattgaggtggaggtgcaacatcttgaatgaatctctggagttgatgtcctttaatggcagccattacttgttgtttccagaggaggaagttatggtcattaagcttcacggataaggtgtgactgaagtaaattgggctgcgattgttctctgaatcacgagtcctgttccatggagttgcaaacagattggaagtcgattgagggacctgtggattggagccattgccagggccattaacagcaacgtttgctggcaatggtggaaaaggctctgataccatgtttggtctggtattgtacctggccattgaagaagaaagagagcaaagagagcaaagagagagataacgatgaagaagatgaaaaccagagaaagagagagaaagaagaagactgaaagagaagccttatccattaagagaggagtaaaggaatatatatacaaacttgttacagtagagaacagctggaaataacaaactagtaacaacccaactgctaactaccaaaacagaaagggaacaactaataacggtaataaccgaaaataacagactcagtttcctttacactcatattagtaattccttcttaccttcttcctgatcttcacattctttgcagcttaattcaattttaaaagtcccaagtataactaaaaatcttgttagtttttccaagctcactaaagataacaaagtttttcttgaatttcactcggccacttactgtttttctaaggacaaaatcacatggagagtcttgcttaaaggaagggagaaagatagtctttacatgctttctcatcatacctttcctcaccaacaagttcagattgagtgccatctagccacaaaacaatcatcacattctagttctagctctctagttttaattctaatagtgttattccagctactgatgtttttgattggtgtgttagttatttcttcaagtatttggatgcacagcaccgcaaccactattcaagtaattttgctcctatacacaataggcctttggtagcttcttctgagggtacttttcaggttttaattgatgttgtcattgatcataataacatgaaacatagtattggtattgttgttttggatgagttaaacagggttaaagctgggatacccatagccttatgttggcagtgttcctgctgtagtggctgaagcaaaagcaattcttcatgttgttcaatggattcaaatgcttcaccttcttgtggacgtgttatgaactgattgtaaaactattacagataaacttaattcttgtaattggaatgatagtctactggatgacattttacttaatatcaaaaacttattactattcagtcatagtctaactattattcatatatatagagacctaatgagttagctcataaaattatcaagttaggattatgactagataataagttgatttgaaattgtcctctaccttctatgtaacttgcttgctttgtatttccactgttttattcacattttttttttattgtcataattttagaaaaataaatcaaatattaggcatagacataaaattgtaatcactgctagtcttatatgatatataacgaacaagagataggttaattgagattcgcagcgaatcgtggaagaggtctccccaatcaaattaattaaactttggattgttattattttgattaatta

SEQ ID NO: 200292 - DNA, 1335 bp, Cannabis indica
aaaaaaattaaaaacaaaaaccaaaaaaaaaaaaaaaagagagagagaaagagaagaagtgtgatgatgaaataatgaaataacaaataccaagaaaagagagttgaaattcttccactagaaacgaatccatgccttgtttcttctgggttctctctctttctctatctctctctccttagtgggatttaaccaaagcggatgaggaaggagattcgagggggagggagcaagtactcttcttccttcttccccttggaaaaagattagacagagaagtattttagagagagaaattgaaaagtatacacagatatatatatatatatataaatatatatactactccaacagtggcttactgcatgtcatctttttcaccccaacgttctttatatttattatttattttaataataataataattaaaataatactaataattaaaattatttattcattaatagaaaatatacctaaccctagtaaaaaaaatgagtaagtgttatattattattcattgagttactcaaaatatatttatattttattcatgttttcagccttatgaaaaagatatatattttatgtggaccccaacaaaataattatgaccaattatgaaagtaatcatacttttatatatataagaaaattagaaactatttaaactaataataaatataaaaattatttatttatttacaattaaaaattaaatttaaatattaatattataagttattttttatatatattttcgatattcaaattattataattctaattacaaagtaaatattttcgatacttgcaaattttcagtaaatattttggatacttacaaatttttgaaaaaattaaaatggtttgcagccataaaaataagtatattgcctattttattttatatatatgtaaaataaattatttaaacttaattttagaaacacccaaagatatatataaattactttttttttataaaggaaactatatacatatatataaattaattaattagcacaactaaccaattaaaatacgatgactcaaatttactactacatttttgtgattctcattaatcaatgaaatataatcaagaaacatagttgaactttccatacaaagaaataaaatatttgtgattgttggttaagatatattttaatatatattctttttaaagtttgttgcttttttaatgcgagtatttgagtagtggattccttctcaactcattaaaaaaaaattaaatcaacatgtttttcttatatgtatatataaataaaaaacaaaaacagataaaataaaattatggcataatgatt

SEQ ID NO: 200293 - DNA, 873 bp, Cannabis indica
ggagaagtaaggttgtcaagctcaggaattgcagccaaatcgtgtataaatggttcgagaccaatgagttgagttaatgcaaatggggcgccacgacctctgttgtgaccgggaaagtgaaaagttgcagcattttgttgagcttttttcttcacagcaccaacaagtggaggaagattgttatctatttctattctaactttgttgtgtttttctatatcacttgttttgtgttgcttcttgcttgactcctcagtttttccaccctgcaacaagttatgcaaggacaacaaatttaacaaactatggagcaatttcaataaaaaaaaaaaaaaaaggaatatcgacaaatcgataccaaacatgggctttcagcttgaaaatataaatcgggaaagaaatgtatatgtatttcagttatttacaatatatatttataattaaaagtgatatattttaacgtagtgctagttttggtacaatacttaaactatctttcacaagagtactttttatattttttaatatttaaagtttacgtttgaacatttaccaataaaacttgtatttagtatcttaattattgaagttaacttttgttattttttttattttaaattatatttaatgttataaaaatataaagttatattaatttttaagatgttatatcatgtaaaaaataaagtaccttccttcccttacaaagagaaaaaagtagttgctcctcaaattaaatcatgttatataaattttattgagctctattcttcatagtactaaaagattgttattgattctaactttgttttattttcttttatgatcaaccaacaactgtaaggagaaaaaaattaaacaaattgaatcaat

SEQ ID NO: 200294 - DNA, 823 bp, Cannabis indica
tttgaaattatcgattaagctttcatatagtataattataaatatataaattaaaaaaattattagcagcaaaactacttaaatttattaataaaatttatattactacttacttttcaacagtattaaattaattgtacgaataaaaaataaaataaacaaaagttatatttacaataaatttaacaccgtaaagtattggatagatagtaacaaaatattattttaataaacttaaatagtcttgttgttaaataaaaaaaattgaattatttatccattacacttataaaaatttagataattttatcatcgataaattatttaaaaatttattataatattttaggtagtttcgtcacaaatatctttaataataatgataatataaaatatttggctttactattgtaccctaactttatttatttatttattttagtaggtggagtagtgaagagtatatattggtaataatattaaagtatattcaatcaattcttgatgtgtgttacacactttagaatcttgtgccctagtccacctataggaccacttgaaagagcttaatatcaataaataaatagtacaatattgaagtgtatattaatattatacattattatccatctctatgtaagtagattaattattagtcaataatatattaatactaattatttgaatgtgtcttaaaataataactattaaaaaaaaggctaattagaatttttgcccctgaactttgacatgtaccaaatcatgtcccctgaagttttaacatcgttaaaaataccccctgaactattgagattgttggatt

SEQ ID NO: 200295 - DNA, 754 bp, Cannabis indica
ttcattgaacatatctcggacaagctccatatcctacattctttcatcaaccgaaaaaagagaactggcggtttagccaacaagacccacatgagaaaaagttacatagggattagtgacaccagggagccaaggatggtgcaaaatattgactgaagagcctattccaatagtccgtctacctcccaagtggaccaaggcttgggcacttcaaatgcttcgccaaacaaagctaggatttcgtcccaaattagctgaaagatcatcatggggaaaataacgagctttataaatcatagaaaccaaagattctggatgacatagaaacctccagccttgctttgcaagcatagccaaattaaaacaggagatgaaagcctaaaccgccttcattctttggacgagagagatggtcctagttcatccaaataatcccattgcctttgctactcgtgcttttctaccaaaaatgagccatcaacttttcaatttcatcacaagtaccaagtggaatgaggaacacactcatagcataagtgggaagagattgaacaacagttttgagaagaatttcttcgccaacaccagataacagcttactcgtccaactgtttctgttaatcactttgttcttgagaaagcctagaatagcagttttgtttctcccaatgatatagggagacccaaatagagactgttttcggaggcctcatgcatatggagaatagaacaaatattgttacgaaggcgttac

SEQ ID NO: 200296 - DNA, 1217 bp, Cannabis indica
aaaacgagatattcactcacatatcataattcatatttattaaaattaaataaatctctacaatatatataaatcataggcgataattaaatctcataaataaactctaattacttgataattcaacatatcaatataggcggtccttacaaggtcagtgttacatacacactaggggaactcatgtacacaccaagatccagcgaaaccatttctgagtgttatcattcaaaaaataggttaccatgaccataaaatcatgaaccatgaagctaaggatgttacgtggaagtcccagggctcaatgtgggatcaacatcaatgttgggcacccaagttaaaatcatgtgagctttctcacatcagcttgggttcctatcagcttcttatgggcaatttgttcaatcattgtcttaagatacatgagaggcatgccttagccaagttttaaactttagagatagatctacgagaaacgacacccaagcaccataaagccctaatgggcgcgtaggttgacatctagtcaatctgggtgcaccgtggctagggtttaggtttttagggacatacttggaccctgattcctcaaatacatcaaggaataatgcaagaacatgatatttcatcaacaacatctcgaaggagtccattcacaactatgggctcctaggttaacattccagccttggcacaatttcgtttcatcgggcaacacccgtgcaaatttgacgaaattaaaattcatggagtacttttcaccaaaaaagaagattgaacatgaatgagaccaatttcagagatgttgacccccacctgggcgcacagtgtaggccacaaggccactataggcgcacacgtatctcaacctagggaactccaggacatcattccaaagaagtaagagcgttatagccttattttcgtccacaattaagatacaaaagctttcaaaaaacaaacaaacataaccaccccgttggtggttccgtcgatccagttattttgctccgagcatcgatcttattttacctcaaaaatattatttggatccttctacaatttaatatctccattatcatcgcggtatggagagtaaactactataaatatttgaggtgttctctctttagtttatattttttcgtttgccacgatcacttatcaaaatggtatagagaacaattttttagcatcaacaatatatattaaaagta

SEQ ID NO: 200297 - DNA, 1049 bp, Cannabis indica
aacagctccagcccttgagaatattataataaggtcattactcgatcaaaatctaagcgctgctgcagatattatgatcaatgataattataatcatcatcatcatgtagttgaggacaagcctgagcttatcatcgatccgaacatgatgatattatcatcagcttataatgatcatgagaacacgttaatggcggccccctccatttccatgccgaaactatgcgatgatgtggttgatcacatgggtaacttgtgttccacggcaccattaacgttagctgcttctgcttcttcaagatcagctgtggttgtctcaagtttccaggattctaattgtgtcccaaatgttattacaagtcaaacgtccgagtacaataatattgatgcaatgatgattatgtcgtcgttaccgttatcttcatcttcatcgactttgtcgtctccctcctcatgcatatcagcattgtcaacgccgttacctaacggtcaattcgtgaaccagctccaatcctagcttatatgactagtttgatatataaattatatatatgttattttacattattatatatggcagtatgtaatgtacgtagtagtacaagagtaagagcaaatcattcgaatagtgattaaggtattttttatatatgtatggagtttttatgaatatgcttgcatggatttatgaatagcacagtgcaaccattttgtttatatttagaaaaatgttataaggcactagttccttgttaccaccatttaatatccggtctcatttattttattttaaatttttttacataaaactattgcgtcaccttaaggtggtgctaaacatcttactacctcatattaacgctcttatatttatgtccagatcgatcaactttgaatagaagtaaatgcaatggccataatcacaacatccaaatgttgctagctatagaaatattaataattcaggctctctataatattcctagctattaattatgtacccatctttcacattttaattttaacagtcaacatatattttgtaattt

SEQ ID NO: 200298 - DNA, 664 bp, Cannabis indica
ataggagatccaaggccaaaactgaagtcaatagatcaattgttagtaattgagttagcccaattataatgtaggtacaatattcccaaatcattagatatttcttacttgagaaacatttatataatcaccattctcttcctttatatctactacaaatactatagtgtaaaatcataaatggtgtgggaatttagctaaacgacattttctcaatgtattaaaattcccaacaacccaaagagattagattaattgctttaagtgtaatattacaagcattgtgtattatattctcctaaaaagttcaagtacaaaagacatactcctcctcgtcatttttttgttagttttctaaaaatcgaatcaaaatcaatactaagtcgaaatgaaatcatttttcattacattcttttaagcaatagatacacaatattattatttaatttttattttttaaaaacaatagaatatataaactgaaaattagcatttttgaaatcatcagcaggtatttatgaaaagagaaattaaaggcagtaaaaatgtaaaatataccccaaaaaatgatttagttgagtaggcccaataggagaagcccaagcccaactataaaccaaattgggtttcacttcatcgttccaaactcattcttggctctctc

SEQ ID NO: 200299 - DNA, 2353 bp, Cannabis indica
gtagattgtcgtatgtattattttagtttttttttttgagtttaccgattatttatttttagtaattaattacttatttttaattttttatatgaggtatagttatttagtaatttattatttagtaaattacttagttaacttattttatttttttattttattttttttttcttttttttttatagaaaattaccttttatgatgagtgaagcttaagttgtattaatattgccaataaaaaaggaaaaaagcttgagtcgtaatataaaaaataataatttatctttttaaaaaatataaaaaatataatttatcttttttaaaaaaatatctaaattgtgaacatatctaaattaattaggagaatggaccctatataaagaggagactacagtgaaacaaaaactacaaaagcaaatcgtgttacaaaaaaagaacatgttattattagttgaacaataattaaatttagaaactccataattataataatgggtgaacattccaataataataataatagtgaaattcgaaagagaatatatttgaccattatgtctagtgttgactttgaagaaaccggccataagctcctcaatatgaaaattcaccgttctcaacaggtaagtataagtaatgtaattaaattaattggtcttgttattcataaaattacaaatattttattgatatgatatgatgatttgttacattgcagatggaaatttgtactatgattttgaaatgttgcagccaagagacaacttatagaaattattacggtcttctgggacaacgattatgcgccaataaccactcacatcaccacaattttgagaaatgctttgtaaacaattatgaaatgattcacaatcacaagtttgaaacaaataagatacgaaatttggctaagttttttgcccatttactaagcacaaatgctttgtcttggcatgtattggcttgcattagtttaacacaacacaataccactccttcatctcgaatctttatcaaatttctttttcaggtattattattattattatattcaatccattattcctttcctctcattcaaattcaaatttttagagtaatcggtgaataaacacaataatttgcaaaatattgttctagtcaatcaaaggtgtgtttgaaattagtatcataatcattttagggtaacatatagtatataattttatagccaattttggcaattattaaaattatttcaccataatttttgctgaaaaatatttctttgcaggaattatcggagcaacttggcattcgaatactgaatgaacgactttcgaatcccagaatgtatgattcatttgaatctatatttccaaaggataatgaaaaagatacacgctttgccatcaacttcttcaactcgattggacttggaggactcactgacaacatgagggagtatttgaagaagaatgaaagtgaatgtacaagaaaaagaaagcacaatgaaaatgaggaataatgcaatttagtagtacatcttaatagtgtaacaataaaaatgggtgtgatgagcatagcttaactctactttaaattttggtttggaccattagcttttactttataaagctctctctctctacttttttttaaaaaaaaagaaaattcaaattttatttaatccttcaaattcagcaaccatacaaggaagcaaatcagttgggacattctccatactgaatatacgatcaggatgtaacatagatgctctagcaaattcatgagcaattgcattaactgaccgtttaacaaaagtaaaagaaacatttctaacttgagcaagtaaactcttacgatcattaataaacagagagctataaagctctctcttatttgcatttgtaaaagtacttaaacttggagaaaagtctagtgttgtttgagtgactgctatgctattttatttttaaaggataccagcatttatttttatggataaaaaaaaagataatcaatgtgagaattgtaaataaaaaattcttttgttcgaaaaaaataatagtaaaataaaaatgttttacttcaggaaaccatcttaagaagaatcttctattaaaagaaagaaaataaaaacacgaatagtgaagagaaggaaaagcaaacaaggaattactttatatagaaagcaatatacacactatctactttcaacggttatatataatatatatgtacacaactaatgaaaattcagttaatgtacaattcaatcaagactaaagtttctgtgaggggcaatcaatttggcttcgaatgatgacatatatatgcatgcatatgattaaatcattatatatatata

SEQ ID NO: 200300 - DNA, 1806 bp, Cannabis indica
tttttttttctttttctaaaaagctagggggccatggccaccccattgatgcatgtaattccgccattgaaaatagtatcctaagtagaatttttgataattttttttagtactctctaaattgagttattatagagttttatttgggtaaaaaattagtacagggtactattttgaaaaatacaagataatttgtcatttaacaaaacaaaaaattcaatcagtaacttttgcaagaaaactagttcaaaaaaaaaaatgaaaagtttagagtttagtaccttttcttcccaattgataaaaattgttatgatagaaagcaaaatcatttgtaagaagcaaccacaacaaattccaatccaaaggcctttccctctcattttcaaccaaaatcccaaagccgcggctgtcggaatcccaaaaagatagtaagaaccaaggttgataaaggcccccaagtcttgccatccacatcctctaataataccctaattaagtaacaaaaaaggatcatacaaagaggttttttccccttctttttgcaatgaaataatcttttaagagtttttgagaataagaggaaaacctgaaaggattgcttgtaaagaatttatcataactgctgcacaaactagaggcgccatactcgtcacataatctacaacttctttctcattgctgaaaacataaccgaatgtttttcggcctagaaagagagatgaacttacaataaccgcctctatcactacaagacacaaaacaacccgaacaacaaatcgagctgcttttggcttaccagcacctaattcatttgaaactctagtgctacatgcccaaaaaaggaaaaaagaaaaacaaaaggagaaaaaatgttaaagaattgttataaaaaataaataataataaaaaaacctaatatttatttgtcatttgtaaaatcctattatttttattataagtttgtataataatctaataattttcacaaaataacattttagacaccctatcaagaattctgacatttaatgttgattcttgaaattattttgtaaagtgattataaaataattttttttcctgtatatatattaattttttattgagaagtgttacatatacatataatttataagcttataatttttgagcaaaccttgtagctgcaccaaatccatctggtattgtataaagtgttatgattgtggacaaactgttaagaaaaaaaaaaaaatcacttattgaaaagattatttgcctaaatgttatgatgaaactatttctaaaatctaatgtgcatattttatgatatagaaaaaaaattaccatacagataagactgaagtttcaagttgaggatttgataggaaaccagatagtaaagtaagaagctcaaatgcccaccactcaaggctagaataacagcataaaagaaaaagaaaaaaaattaacaagtttcaataacttcaagcatcaatttagtatattgtgtattatattgtattgtattatataatactatattaagtattaatttgtattacattatgatatatttttatatttatgtacaagtcaatactgaatatagtgttatataaaaatataatataatgtaataaataaatatttaaaaaatttgaaataatgtgaactctcataagttataaggtgttgttttggtaccaaatcattaaggaagaaggtatagcgaaccgcaagaactctccgacgccttgaaataggtttgaaaaaatacgaggcccgagttttttcacaagtaggagagaatttcatgaacaaaag

SEQ ID NO: 200301 - DNA, 1063 bp, Cannabis indica
taaataaataaataaatcaattataaacttgacaaaattgatttgcaactcacaaaaataagaatgaaattgtatatagaaataagaatagaatgaaatcaatatatatttttttaagaatgaaatcaaatttaaaatgtataatttttattttaacaaaattgattcagaattaaggtgatatttggttggaaaatataagaataaaaatgagaataataagaatagaataaaattaaatttaaaatacataaaaaattattaatttttttctcacacattgaaatagtatttcttttaattttaaaatggaatgtaattccatcaaaataatagaaaagtcattttattaaaatgtcatttcaaattctaatactttaaaatgtaactaaatagatgggtggaataaaaattattttcttcccattctattttattatattatctcccattaaaggccacttatgaaataatttaatgataataatgaacaaattaattagcatattactaaattatgtgacaattgccacacttaattgttattattatttggttaaaaaattatgattctcagaatacattgtactcagttagaaaattctaaagttttcctaaggttttgagtaatttacaatactaaaaaatatatattaaaacaacttgttttatatttgtattttagaactataatttatttttggggttttgacacgtattaatcacaaccccaaattttttttatatgagtgatgtagacatttagaatcccctacaaaaattttaaaaattctaacaaattattttaagctagtaaaacaagtgaaacaaattattttcagcacaaatttcatgaaaactagtagtaggtagtttggttgcaaaaatataattttaagttctaccaacataataattcaggtgtttttgtcaataaaaaataattcagtgccatcaacaataatttaaatattttggctgtttgaaaaatagaattttttggtgcaaatattccaatagagaatgagtgtataataattgtggtaagtacctttagttgaaa

SEQ ID NO: 200302 - DNA, 650 bp, Cannabis indica
atgaatggttgctggttacatgttagcattgtatggggtatggtcacatattggcagattgtaggaaaaaagataagcaatcagagggtaataaggggaggaaaaaggttaagaaaattgacttgaacacagacaaagggatgtgtagtcaagatagtgaaaaacaggttgtagttcaaggggcaagtgtagatgctagtgacaccaatggtggcaacttaatatcacaacctggtattagcgaaacctttgaaggtgattagaatagtagtgttattaatgtgaatggggaacagaagggttgtactcatgagaaggaggctggagatagtctgaggtcgaagatggaagggtggaaatcacctaaaacaaagctgagagggtcaggatcctctaagaaaacagatgacagccaagtgcaaatattgaggaattccttcgatcttcttaaggagaatcaaggaggaataaatggagacgagggatcaaatctatattgttgttgatggatagtaacaacatatgtagctggaatgtgaaggggttgaataaaaaaaagtaggagtctgtggtggatattttaagagttaataaaattggtgttggaactcttggtggagaccaaaattaaggggaataattgcatgaga

SEQ ID NO: 200303 - DNA, 2195 bp, Cannabis indica
ggtgaggtccgtcccgctattccttttgaggccaaaggcaatgagtaaaagggggtagctcgggtgctgccttattgtggctacaatgaaaatggagaacctgccttatcacatgttctcttactatggagggggtggagagaattagtccaagaagtgcagaaattctttcaagactcttagagattctcttacaaagggagatattaaaggggtaagattgagcaagggtggccctgccttatctcatgttctctttgttgatgacattattcttgttgggtgagccaatttggtggaggctaaaggtatatggaaatgtgtggataacttatattcctgatcaggttaacaagtcaacaaactcaaaacctccatctttttcagtagcaacaccttgaatgggatgaatacaggcattagagagctcatgggcattactgagccggatggtaatataaaatacttgggcatgtcccctgttcagatcgaggcttaaagagattgatttcaattttattatggataacttttcttctaaactccaaggttggaaggtgaaaactctctttaaggctgatcgagctactcttatcaagtccacgggtctttctatgccattgtattccatgcataccaccaagctttccagtcggataatggctaacatagatgacatggttagagatttcttaaggagttttgagaaagggaatcatgggctccacctcaaggcttagcacaagttgtgcctcccaaagtcttgtggtggactgtgctttcttaaactagtgagatgaatcagttaatcggagccaaatctctttgttccaagattttggaagcaaagtacttgcagggtaaaagtttccttaactgcagttacaaggattctgactcctggtttttgaaaaatgttgtaaaagctgaatcgataattcataaaggtgcttgtaagttggttgctgatgggaaggacaccaaaatttgggaggatccttgggtcactcacagtatcggtttttaccctaaatccattggtaatccttcacgcggctttgtctgggttgcagaccttctaactgagaacggggattgggatctctaaaaacttaactatttgtttgatcatgataccgttgtagccattttgaaaggaggaaaacctttagggaggggaagcgattcttgggttttgactaaagaaaggagtggtaacttttcgtgcaagtccgcttatttaatccaggcccttgattgggctcctcactgtgtagtctcgccctccctctagaataagctcttaaacagtaaaattctagagcatcctaagatattgtggtggagtatcctctcaaacgcgcttctagttcgttccattatgagcaatagatactggaagcgagaataaaactatggagcatcttttcctttagtgcaatctggcttatcacttatggcggtcctcctcgtggggtattttttatcttttagactttggtatccgtatgtgggactgggttaagttcatttggagtctaaaagataagggcattgatgtggatgaggagtttctgtatacctctattgtggtggacactatttagggggcgcaaaatgataaagtacataatgataatcagggtaacattaaacattatattgactttatttccttttgttacacagattatagagttgctatcattccaactcatgctacgacccgaatggatgtttggcatcctcccccacttgattggctcaaactaaattgtgatgttagagtggggatggagtatatgtacattgttgttgttgctagaaatcacaaggggatggtttgctgagcagttacgtcaagacttgattttattgatgctctttgcagtgatgcggttgcctgttgtttggctttggagaaaacaacagagaaggggtgcagttttgttattttttgaaacttgaaagtaactctcgagtgatgatcaactctcttaatggagtggagtccaaatgagataatattttttgatcttgtaatattgtagcctataatgtggttatgtgaatttttacccacaatctgtatatttgtttagatgttagcgacataccttcgaacttactttgtaatgatctagaggtctaacttcattgtttaatattaacaccttttcctcaaaaaaaaaaaa

SEQ ID NO: 200304 - DNA, 665 bp, Cannabis indica
ttcatgagtactcattccttctatcccttaaagaacaaattacaataggagtaagatatcataaggataaataccaattgtttcctacacttcttcttcccaataaaataattcattagctagtacagtactttcaaaattatatttggcatgacatgataagctagtctccaataaacctcagcaccaaaggccttcaattaagtaagcatacctagcaatgatttcatcttgaaaggacaagtctttgatccaattgactaatcttccaagggtaaaaacaaattggcagaagaagattctttcacgtacatgggctacctatgctgtcaagaacagaacaagcatcttagaagcagaccaggcaagattaagaccccaaactaagacacgagtactgaaaattttacaacaatcaaatgcatattcaaagtatctgttaaaatggtagtctaatgaaggatcacttagctattgactaaaatttcagtgagctactctaactgtattcaacccaccaaagagaaaggggttaagtatactcaaacaaaaataaataatttgaatgaagtgagagagctggaatcagatagagataagtgagcttctaacaatcagattgctgtgccattgaggagacgaagactttttcgagggtgattata

SEQ ID NO: 200305 - DNA, 1703 bp, Cannabis indica
ccaattgtgggagagaactaggctcaagaattcctgggtatcaatacaaggttgctgccatttttatcatccaatactctactgttattcttctcttcttctgcaactttcaattttttttcttgttggttttgcaattgagatcacgttgacgggggagatcctatcaaagtggtattaaagcatttatgatccaagacatgtggcttaagaaggacactacaatggagcagatggatgaaattatggagaccttgtgcctggaagttcagaaagaaatcgcagaggtgaagtcccagctgggcaaggaagtttttgagacacgggcagagatccagaggttaccggagctgttgatggcacagatgacccgatttgtagctgcgggtaaggcgcccatcgagactactacgtccagccatgatctccgtccaccgatcgtgcccatagatgggtcatcgtcaatcgggccgatggaacttgagattcgattctctcccacaccaccgcactcgaaattttttgccacaaccgcctcctcctccgaatccatattctccaacccagtatcctagtattgaatctcgaccaccgagattggagttaccagtgttcactggagccaatcccaaggggtggatttacagagccgaacgttatttcctcatatttcgtctctccgaaccactcatgcttgaaactgctgtcatcgggctcgacagggaccccctcccttattcaagtgggaaaatcagagacatcccatcacctcgtgggcaatgctcaaacatatggtgttacaacggtttcgcacagctccgattgggtcactgttggaggagcttctatccgtgactcaaatcaccaccgtgcgtgactataggctctgttgggaggcggcggcctctggattaccaggagtgccgaagtatatattggaggggagctttgttaagggccttaaggaagggattaagggaactctacatgtgttgcagcctgtgggcttggcacaaatcatggatacggcacagcagatcgaagagggaaaccaactaagtcatttgagccaaccgattaggagcggtagacctaacttaagcccaatcacacctccacgaccacatctgaatgatttccaaactaagtcactcacaaccgcaccaacatcaactccttcacagacaacagtggtgactgcagctgggaaaccaccaacaatgcgtcgaatgtcagagacggagtaccaagagaagagagcaaaagggttgtgtttcgttgcgacaagaaataccaccatggccatgagtgtgaacaaaaactattgccagtaatgttgtttgcggatgaggatgagccccaaccagctgtggagtcgccccctccatctctagcaggggacgaaacggattctactaaagaaactttgcccactctctcactgaattccatgattggaattacttcagcccacaccatgaagttggctggaagaattggtcaacaagctgtagtggtgttaatcgatagtggggctacacataatttcatctctctgggggtggttaatgccacgggacttgaaattaacccaactaatggctacggaattctcttgggcacaagggataaggtcaaggtggaaggtgtgtgtgctaatgtgaccttagagttgggcgttctacgagtggtgactgattttt

SEQ ID NO: 200306 - DNA, 1259 bp, Cannabis indica
aaataaagagtggttcaatgagctataatgtaaaaagtatagaaagatttattgatatatagattgtttaggcccgggttaggtgctaataggttgttaataaaaaaaaatactattttgagcaatataatgttctgatttattaaaaaaaaaattataaataaataaataaattaattatgatgtaatttttaagagttaaattgagtcattaaattaaataaaaactattttacccaattcctaccgtaacaaataaaaacttgcgcttgtttttggtaacattacatcaaaaacaaaaaaatgctcgatcatttctctaggcactttaacatatagatgtaaaatatatttgctcttagaatataaaacattttgcaaaatttttgaggtcaaagttgtcacatcaacagaatacaaacacctccttttccgatttcaccattctctttgcatttgatgttccaacgattctctccagctatgagtaataaaagcagaaaaacaaagatgaaagaaaatgagtaactaatatggaacaacatcaaccgaattaaacactactctcaaggaaatataagattataaacaaaaacttggagtgcttttgaaattaaaattcacctaaatcacaatactaaacccaagcttgggatacatttctaataaatgcatcgtcaattattactaatgccttatgctatgtatacgttctggtatattcaatgatatttagctataattatgcttaatgataaaatatattttatcaggcgaattaccctatatactattttttaactttttttttcaattttacggtttgagtttctaaaatgattgcaacgctagttgcaatagtagtttctgtacgattttttgttgcaatttaagttgcagcgctagttgcaataggagtttctatgtaaaatttcgtaaaatacaaaaaaaaaaaaacagttttgaagtgtaaaaataaaaaaacctctaaaatatattatacaagagaagaaatcttcagttttatccacatgaccacaggtgcaaatcgttagttatatatatctagccctgaaagaaatagagcttcgaattccccaattcataactgagttgtcggctgggaatttgggttgctagtgaaaatattacctaataatctagatagacatagtaaacttcgagtgagatcatagtaccatgttgtggttatctgctgctcaattgatttggtttccctttcccatgtacttgtatat

SEQ ID NO: 200307 - DNA, 713 bp, Cannabis indica
aaatagttaaatatattctaggaaaacttacaaaaaatattgaaatttagaataacttttacaaaaatactcacacagaaattttgttaaaagtactgtacttttataaaatatcagtagagcacaaaacagaatgactaaaaataacagtggaacaactaaaaaataacagtagaacaacagtaaaaacttaacacaatatacagtataaaacttacacagtatttttaaaaaattacgccccacaatataaaagtaagaaaattaaaaatttgagtatgtagtgttattatccctatattctatttaataattcatatatgtatacgtatatatttggagatttcggtgaggagtaggtagtagtagtgttatggtaagctcagtttggtatgtatggatgagtagagagaggaataaacataggaacgggttatggtggtagaggcgtgcgtggatgtggctgagctgaattgagtcttaaacccaacccacacacaaacccccatttggattggagcctacaaaacaaatgtactgcactgggctgggctgggctgggctgggctgggttgtgggcctttcttcacttgggagggacccccacatacacaccacacgtgtttactctctccgcccacctaccatcctcaaacaaactctcttggatctcatcacacatctaaccccactaaaatttaattttttttttt

SEQ ID NO: 200308 - DNA, 1886 bp, Cannabis indica
tatatatatatatgtattttttaatttttttttaattaggtaacgtatttgataatgcatgtattgtaatttacttattcttaactaaaacacacataattaaatttgagtgtgtctatatatgagttggatttgtaaatttgatataaatattttttatttgtaaactttacgaaaaatatggtatggaaattcaatttaaaatataaaatataaaataaataatagtaaagttaaatatatagttaaaaatatttataatattttaaatttaaattccttaatataaaatattttaataattttcattttattttaatttaatcaataaatttaaaaataagattataaatgtcattaatattttaagtattttaaattaaaataaaaaaatttatttatataaaatatcgatataatttttatttttaaatatatataatattataaaattaataaagaatattctgttatagttaatgtagtatagttaaactaaaaattctattacatagccacactttatcgatatagttttgtgctatattgttgtggtcttggacacaagtgaggtgaggagccgtacatataatgagaataaacggcctctactattgaattaccaaaataacattggtctcaaaattgctttaaatttaacaaatccaaaactacacaccttcaacattttgattgttcacgtttttgacaattgtgacaaaaactaactttgaaacatgggcgtaagtggtggagtagccgatactggttgttctttgttcttttgagtggtttcttcataacctcaacctaaaaaagcagcaaaaaaatttcttatacaaccaatctaaccaaaatacttcaagggggtagaggttagaaattaacacggctataataattaacaaaaaaaaaattacttaatacccataattaacaaaatattgtacttaatactcacaataaaacatattcttaatagtggtatgaaattgtgaaattcgccaaactacgatttaaagtattaaaatttacaaaataacttcacttaatatattctatacgatcataataattgcaagtctaaatttatagttattttgtgaccataatagttattttgtgaccataaaatgttattatttattttgacttgatcataaaagattattttattaataatatttttttataaagttattttattaaaaaaaaattcataaagattatttttacaaaatattccgtgcggataaaactaattttatttttgataaaaatatgtaaaaaaaagtctactaaaattttaaataatgattaaaaatgtataaaaatcttactaaatatataaataataaaatgcaaaaaaattattaataatattagtgagtgataaaagaataaagaaaaaaaattaatatttattatagtgtaaaatttaactcatattatattttatgttaaatttaaccgaacttttaccatttgtcaattttttcagttttatggacgtgttctggctacgatgtcaaaacctgggaactttaaaccataggaaatggaatattttttggttttcgttgggctgaacaattgaatcttcccattgattttgtggaaaccgattgtttgatgcttgtaaatgcattgaatggtcgtacatcacaatattcggtttttcatgatatggttcaagatgtatcatatcatttatcctttctctaatgtttgtttatcgggatgttaatcaagctgcttatggtttggctacacaagctttacagttagatactgattggatatggttagaagagatactttctaacattgttgtaagtgactgcgcttcatttataataatagacttttctacaaaaaaaaaaaaa

SEQ ID NO: 200309 - DNA, 1045 bp, Cannabis indica
cttagctgttagaagactctagtcttatctctctctctaaatatatatgagagaaatattaaaagagatcactgatgattaatactttcttatgtatcaatattgttatcgatctaactaaatatcaagtctcatataatttaatataataactttgaaaagtatcatcagccaatcgcaaagcgatatatctaaaggtactaaggtactcaataacaatactcaatgtatataaagagaaagatatcaatagtgtcttacaccgtatcaggtctcatataactaaaaataataacttttagataatatttctaaccgattgtattacatcacctttaaatagtgatagatattattggtgctgaataataatatataaatataaatatatttctcttagtgattcatcaaatatatatcttaatcaaactttatagtacatttttttccataagaatattataaccaaagcacatgcttttctctccatgatttatcatttagctactcacagctagttttggtacacctattataataattatattattattattattattattattatttaggtataaactaatattatttttatatatatgtggtgcaacttgtgacatatatataaatatatagaaaagaccaaaataaataacatgttatgtgtttgagagtagtaataataagtacctaaagaagaaaaaaaaaataccaatggaagctattattgataatcttcataatcatcatcaacaacaacaagagttttcttctggtcaatcatcattttcttcatcaattcaagatcaagatcatgatcaaacatgtcaagatgtagttattgattatgatcttttattagaagagtcttggttttttggtaacctactcattaaacaaaaaccaaaaatgttaaggtgtttttctgatccttgtccttcttcttcttcttcttcgatttcgaatattattgccctagacaaaaacacaccattactcgaaatctagctcgagctccttcattgccacctaatattggaag

SEQ ID NO: 200310 - DNA, 605 bp, Cannabis indica
ataattaatattatgtggaccactaaaaacgtgtcacgtgtacacttgtgtacatgtgggcagtccaccgtgacacttaactgaggtttttggacggaagtgtaaagagaatgtgagtttggtaggttttgccataaaaaaatcaatttatgtagttaagtgtttaaaaaaaaaaaaaaatcaggcaattttgccaccaatatccttaaaaaaaaaattatttagaaattagaagaacaacttaattatttaaaaaaataaaaatatatattatagttgtacataattttttaaaaaccgctcaacctgaataacttatccgcctaaatcaaaccaaaccaaaatatccatcgaaaaatataactaatctatttattgggtgggatgaaaataatttcaacccgtccaatgaatctaaattaatttgtctaacccgattaaggtttttttttaatgtttttattatatatataattatatataatataatttacataaataatataaagttcaaataaattatatttgtctcgtggtagttgatttgaattttagatttaaattatatttttcgcattattacaaattaattaaaatataaaatt

SEQ ID NO: 200311 - DNA, 622 bp, Cannabis indica
gtttacttcattgaatttatccaattcgtatttagctagtaaaagtcttgaatctttgagcttttccttgaacaattcttaatctattgagctacactagctctgataccattttttgcggattaaacctcatcaagaaccaacatacaaagattcaacaaaacaataatgtaatgacagtagctaaattaatcaacaaataattaaaaaagatttattcatggacaaagttgagaaagagaagagaacacacaaacaaattggatctcaactcaaaagtctaactcaattacaattcatctcacatgagagaagttattttaagagtaaacaatctctttaacatcccttaaagaactcactctaacaatcataaactaacaataatgatcttaatttattatctctttatatttgtatcttgaactcttggaaaagttggttgttgatgaaagtgatagtgaagttgtgtttatatataactatgtctagtagagttagtaacaaaactaactaaccttttgctgagctgtctgagaggggactaaagtgactctcaaggggtgaaagtaacaacaatctcttatttacgaggccatctaccaaaataaggagaatagtg

SEQ ID NO: 200312 - DNA, 698 bp, Cannabis indica
aaataaaagaatggataaaaatgacttttatgtcattaggtaataggttaaaataagaaatattaaatttaaaaatttaattaatagttataaatattaatcattagatttgatcaaataactaataatagaaatatttattcataggtaaagtaaaacccatcaagagtatacttatatttataaatatgtacattaaccattaataggtatattaatatataaaaaacgactctgaactaacacaaatttatcaatcacataggaacttatttttcatgtatcttatctcatcttttacttttatttaaagatgtgggataattgaggccacaatttattttgtgttagtcaagattataataaatacaaattaaaattagttatcattaaccgaccgatcactgtccgagcattatcatttttcgatacaaattttctaaataatcttacaatcatttgaattaaaaaatagagaaatcaagataatgagagagatgattagagaatagctgcaaagagcattgttaggttgacttcttcaaattttatttccaaattctttatataacttatgaccgacatcaattatatgaatgaatgggtcctcctgccacatatagttctgttttccaatcaaatgagcggtcaagatttctgcgtggatcatccttattttgccttttggtgatactgaa

SEQ ID NO: 200313 - DNA, 542 bp, Cannabis indica
tcaaacacttcatacttttttagaaaatatataaaataatgttctacacctgcgtattgtggccatataatacattattaatttattatgacaatatattatataatattacagtagttagatacaaataatcgaatgattatcgctatttatacttgattcaatgaatatatatagttagaccattatatttatgtaaaaccaaatataattatgtaaatatgtgtgtgttgtgtgtatatataattatatatgaagaataatcttcaattttaatgctccaccacaacgtgggatcttttttcttttgcgggaaaaaactctttaatagttgagtccacaatgtgtgatgtgtcctaaattttgttatatagggctttgtctctactctctcactcctagcagtagttgaccgtacaatgtatcaaacttcaattccttcttccaacttcccaagctaactatatataatttatatttatattatttatgtgtcaagataagaaaatattatttatcaaatacatatctaaaagctttct

SEQ ID NO: 200314 - DNA, 1326 bp, Cannabis indica
taatattatatgtatgcatacaaaccaccgaattccaagaccagtccaagttctctcatgatttttacatgttatatctacatactacatattacataatacaatatatacgcagacaaaaaaccacaaaataaacacaaagccatatactagtactttcacactacaaagacgactgagagaacaaaaagacaagagtcccaaagagaaactagccagaaatctcaatggtcttggcctctgtcttctgcttctcctcttctttgggcacaaccacagtaagaaccccattctccatgctagctttgacctggtccaccttggcattctcaggcaacctgaacctcctaaagaacttgccactgctcctctcgacccggtgccacgtgtcatttttctcctctttctctagattcctttcgccacttatatggagcactcttccatcctccacctcaaccttcacctcttccttctttatcccaggaaggtcagccttaaacacatgagcttcaggggtctcccgccagtcaattcgggtgttggcaatggcgacagtttcccgggcagaggaaggaataccggcaacagaggtattaaaagggaagccctccaaagggtcccaaatgtcgagcgagaagggatcataaacgttgcttcttcggccaccgaagagactgagagccattgtatcaaggttttcgatttgattggaattcggaaacggacaccaagatgtgtcaagggttatgattgtattttctgacttctgagtatggtgtttagtgatgataatatgagtagatgaatgaggatgggaagagacgtgtatatatactacggtttgcagaatggagatgagtgcctgggggaacttcttggcgtttcaagatgtttctagctatagttctatcacattccatttcctacacatcgcgcgtacgtgtctttacactactctttacgtggcaccaaaatggcaattcagttattttaagtaacaattatttttattgtgaggccaattttttttaaaaaatatatcgtataatggcagtaaaatgtttgtaaaacgttattttttagttgttctgctgttgtttttaattattttccggttgttttataaaatatagtattttgtaaaataatggcagtaaattataaactttgactcgaaattgaatatttttgttaaaattctctttttttttgagtaaaagttctgttattattaatgggaagcgtcatgtacaacaacagagaaaaatgtaaggaggaaaatcctcatatcacatacaatcattatctaacactaatgcttgc

SEQ ID NO: 200315 - DNA, 1560 bp, Cannabis indica
ttcaccatgtacaagaattcccactaggcatcacggctgaaaggttaaagcactactagatgcacgccaaaatagtgtttttccaatcttcatacacataaatttacaagttattcaaacattaaaacttaaaaagctggatgtgcttttattattattattatttaaagaaaaaacaaaaaacaaagtgcaaactgataccaaaatgatattaatttagatacaattttttttcactcaaaaaaaaatactttttttttcggctagaacagatacctaaaaagtgtgtacttatgtgaatcataggcatagcctaatagttttgggcttcttctcgcaaagtagatcccaagtgctaacttataaatgttaattaaaccaaaaatagattgatactatatgataattacgagacgagaattgtcaacatatagtgtgaaataatctcggcattgtcgatagtaaagcataaacttaactaataatcacttttgctcgattaatagaacagttaatagtaaaaatgagattaaattgaacctgaactgtctttgggaacaacaataacaaagaaaaaccccaattccctccactgaatcatacaacccaaaaacaacacatcacatttctcccacaagggatcgagaggccacttttccatcatcatccctactttatttcttctcaaaaatcccaacttttaaaatgccatccaccatacctggccctgcagcaaaaactcactttattcagtgccctgaatattcaagaatggaaaatgaggcctcgcctaattattagtcattcttcctgacagcaaatcaaatataaaaattgcaaaagcgtattagtaaaattataattaacatacaattatgccttgcaagaaagtcttgctcttagttcctccgatactgcatcaatgaactcctcagtattcagataatgttccctactcaacctgcaccatcatgtccatacacatatcaagcattggtcacgcaactatcagtgaatttattacattttataatacatacttagatccatggataattagggcaagatccttggtcatctttccagattcaactgctccaatacaagcagcttccagcttctcagtgaaatccagaagtctctcattgttatccagcttagccctgagcaaaattaaattagcttttattcacgaatgttttagcaagtatgaactaggataaacttaataaatatacctgtgagcaagccctcgagaccaagcaaagatagaagcaatgctgtttgtgctagtttcacctcctttttggtgaaccctgtaatgcctagtaactgtaccatgggctgcttctgctctatggtctttccatcaggacacacctgaacccaattgtaactaaggttagcatccaaacaaaccattcacaacaacaaccagttcaacagatattttagtgaaaaagaaaaaagaaaaaagaaaaaaaaaactaatttcctttcacaagggaccgatccatgataattgatcaattaaaaagacactggaaaaacataccaata

SEQ ID NO: 200316 - DNA, 602 bp, Cannabis indica
gagggtggtgagttttttattaggactttcaagtttatcattatgaggtgtaacactaagaggaaaaggcgcctcgttctgtactgattttgagaagcccttcatcatgtttgatatccaattcatgaatgaactatcttgtctggtaaacgatgtcacaccctgtgcacaatgaacttgtttcttgaatcctttatccccaacaaccaaatcttcttcaaaggttctttttctcttaccagttggaaataatccagcactattacaactttcaacactctcatggttgccatcctcttcatctttagaagtaatttcattgaaatccccatcagaaaaagctttttcctttcccttcctcttattcacgtgcactctttttgttggagaattttgatctcggaaaagtctcgtttgcagtgactattacctcattcttctgctgagaacttccttcaactccatgggacaattcaaatgctacaatcttatctgtggtcgcaccaccacaagcatattcacttttgatattctgcaaatcattctcagaagtcgactccattttctcaagacatcttatactgccttggaaaacctgatca

SEQ ID NO: 200317 - DNA, 811 bp, Cannabis indica
tccattccccatttcatgaaagggcaagtagttaacgttgaatggagcttttcagatgacatgtgtgatacttgagcgaaccactggaattttcgcatcttttgacgaaatcatatgaatctatcctcattgtcggccagtagtatccgattataagagtcttgttgcataggcttcttggtcaagagtggtttccacattcaccttcttgtaattctgttagtatgtactttgcttcagatggacttagacatcagcggtggggcctcgagaatgatctcttgtataatcgatcattatacaaggtgaacctagaggctttggttctcaacttcctagattcatacttgtctgtaggtagggtgccatggaggaggtattctttgattggtgtcatccaacactaattttcgaccatgttcattgattgttcttgttgcttctatacaactggccattgcatgtatattactgggattgttatcccattcttggtttgaattgtcgagccctagtttgcgagtgcatcagcatggttattttctaatctaggaacttgtctaattgaaaattcgatgaaacattttaccttttctttgactatatctaagtacgccatcatcttggaatcttttgcttggtatgatccattgaacttgttgactaccagttaggagtctgagttgactttaatattcttaacgttgagctccttggctaggtcgagttcggctattaaagcctcgtactctgcttcgttatttgtagctttaaagccgcatttgatggatcgttgaataatgtctccagt

SEQ ID NO: 200318 - DNA, 1066 bp, Cannabis indica
ctactccgaaggcattatgtgtgttgtgaatattttaattatttgaaatggcttctgatatggtgcgaaatgcatgcaataattatttttatttaaaattaatatatattgaaaattattaacccaattataagttgctatggtatgaaaagcacatgaaaactgctgctacatttgcatgagatatgcagtcttatacttatatgattcacacatgtaaatattgcagcacatactctctagagatttaacatctgtcaagatagtgcttgcttgatttgtggcttcgatattgaaaatgtgaaagacctattttttgattgtcactatagttgtgtgtgcttggagtctatcattatttggcttgggttggtaaactcatagtaggaacattgacaagttattgaaatagatctctagatcacgtctatcctctttttataagcaagtttattctatggttcttgctgcgattgtctaccatatgtgtgaaaaagagtgatcgaacttaacttgttggatgcaacatgttacatcaatttcagcttctgtaagttaattagttaaaaaaagaaattaaagagtgttttggattttgcaaagaaaaactaaagttttgtacgatagagaatgtttgatcaattatgattttgtatagatattgtgtatagaagaatttataagccagttgtgtggtgctaggttgtaaagatgtttgattatggagcaatacaactcacttactgatttaggaaaaaaaaataacatattgcagcacatgaaacggaagaaataacactaacttgcatatgacaagctaattatataatcaaagtataaatgcacccaaaagatgagatcttgctagtgaaaattttcactttttatcagtgcttaaagattattgtgtatagtgtggcaactggcaagtacaatgtttactcgatctagctttactaattggttttatttaattataatttaagatctttttctctatatacacatatatgaaaacccaaaaacttactactctagcgagcatatgtaaagtccttttttggca

SEQ ID NO: 200319 - DNA, 530 bp, Cannabis indica
aaaaaaaaaaaaaagtagtgatgcaaatatgacgacttttgcatatataaacaaacaacatttaatctttcatataatatgtatatttatatttatcaccccatcaccttaaacattgtgccactttatataaatattattatataaaaaaatatatgtatctatatatatcatatattcatatatggttgcatatatgtgttgttgtgggagtaaccttatttgatatgttttattgattttttttttttattaaaaggtctaggatatatttaaatttaatttttactacaaaaaagtatcaattacttgtaaaatgatactttcatcatatttatatttggttttatattaacaccactaatgtggcaatagtcctataagaaatgtggttttataattaacaccgttataaagtattattatattgctattaattaatagtaattaagttttaaatctaatgttaatactatcttaaaatggtcttagactactctacaatagatatagctaatagcattgcgatc

SEQ ID NO: 200320 - DNA, 486 bp, Cannabis indica
tattattattattattatttgaaaccagatattaaaactaatatatgtacataccaatggtttaattaattctggacataattttatatatgatttaagctctattaaactaacaagttaacctatatttagctcatatatattgtacatttttctctttaaatttggcagaaaatattaattcttagtttttgggttttgtaggtatactacagaagactaatgaggctcacggtacgcatggaggtattgataagtcttttggatttaccttcggaaagaaataaccaatcaacttaattaaaatattatataataattgataagaaaaaaattctaataaagttttttcatttctatatagttattcatgcatagtacttattatatattagtactcacactacattgatattttgtattcttttgttatatttgctacatattaacatattgtctgtttaaattaattcggtttttgagcaa

SEQ ID NO: 200321 - DNA, 506 bp, Cannabis indica
tcgctgccggttgggctaacacgggagcaggtctgacccagttactcatgccaattatttactctgttttaaacaattcccttaatttgccgtctaacatcgcttggcgagtggcgtttgttttcccgacagcgtttcaagttgcaacggcgatactagtgttgaccttcggtcaagaccgaccgatcagccccgttgactactcttcgaaacgtgaaaagaacaacacaacaaaagatgatttacgcgccgttctttttcagggcctaaagaactacagaggttggatcttggcagtgttgtatggggtctgtttcggtgcggagctgaccactaataatatcatagccgtctacttttacgaccgatttggggtgaatattaatgtcgccggagtgattgctgcaagctttgggatggctaacttattttccaggccggccggagggttactctccgacgagttggcgaagaggtttgggatgagagggagactttggggtttg

SEQ ID NO: 200322 - DNA, 1295 bp, Cannabis indica
ttgatatatatatatatataatttcaattgattcatagaaataattacaagttaaagtagaaatttaataattaaagagttagctttgcactaatgaagatatatatttatatatattaacttaattagcagtacattacacaccctcgcatgcagttcacttcatacaaactaattaattaataaatagtatatatatatatatatattaagcattaaattatatgaatgtatataaatataatatctaaccaccaatttggtatgaaagattcagtttgtagctaggcctaactttagtttatactacacagtaagtttgactaaattaagaaaccttggaaaacaactgattttgaccaaaaagggaatgagacatgcttgatacagccctgtgtttgctgtaagccatgacacacacacacatatatatatatatatatatgtttaatttgtgtacaataataagtagtctttgtaaaagtggcatatggtcttattataacaatcaaaagttaaaaagaaaagaaaagaaaaaagcatacagtatatatatgtataggcacgtgatatagggtagagggtgttgcaaatgggtctttaatttgcaacgccagccacgcacagctcatttctagtaccccatgatcaaaggctccaaagttgacaaaaacaaaagaaaatagcaataaaaataaaatgtacttacttggaaaaagataaaagaaaaagtcttaattatacagatatttatacaatatatttgatgctgcaattgcatgtacgtatatgacacacactccatattaatttattactatttaatttatatatatatatatatatatatatttacatggagctattgtgatatgcaattacggctacatactttccttacttggaaggtatttcatgagcttgtgagtttgctgtatccacgttttctacaaccgctgctgcagcatgcacatacaaattcatttatatatatatatatatatatatatatatattaaattaaacaacatataatatgttaatattaattaaaaaaaaaataaagaagagagagagaaaagaaaagaaaaaaacaagataataagttgaaggaaagagacccacacgcataccatatcccacgtgggcacatgggtaagagacattcttgtcccaaaatctacgccattaatttcttattctaactcatccagaactagctactactgcaacacagcatcctgcatgcaccgcccacatctatattttctctagaagtatatatatatatatat

SEQ ID NO: 200323 - DNA, 1247 bp, Cannabis indica
gatgttatgggtaaagtggcctcctgtgcaactaatcttgaagaattgggcaaggaattcactgggaatttcaaaagaagaattaatttttggaagaaaaaggctgctcatttcaaaaggggcagggatgctgcttctttatctgggttcaaagaagccgaaaaataattatttgaagtctatgctcaacgagaagtcttttggcgacaaagatcaaagcagctctggcttcgtgatggtgaccaaaatagccgatacttccatgctgcagcaactactcggaggaggaacaactcaattactaaactccaaagtgcaactggaacatggtgtgactgggatacaggtttgattgatattattaaagactattttgctgaattatattgctcctctcctgataattttgcttcggttattgctcatattggtccttcggtttcgattcaacaaaatcatgatttattgtcaattgtcacggaggaggaagtgaagaaggcactctttcaaatgcagcccgagaagtcacctggacccgatggcatgacgccgggattctttcaaaaatgttggcatattgtgaagaatgatatagttgccttagttcgtcaatttttcactgatgggtctacacctcacgggctgaatagaactaatattgttctggttccaaagaagaaaaatcctagcaacatgggagacttaagaccgatatccttatgcaatgttctctataaggttatctcgaaggtcttggcgaatcgtctgaaagttgttttaccacaattgatctccgaaacacaaagtacttttgtcccgggacgttttatgacggataatatcatgatttcgtatgaggtaatgcattaccttaaacgaaaaagattgggaaaagaaggatatatggccttgaagcttgactttagcaagggatatgacagagttgagtggcactttcttgaagctgtccttaagagaatgggatttgatgcaaagtggatttttcttgtgatgtcttgtatttcatccgtggaatatactgttactcatagtggtaggcatattggtccaattatgcccactagaggaatacgccaaggcgatccgctctcttcatatttgttcttaatttgtgcagaggctttttcttcactaattaaacattatgaagtctcgcatcagataagaggcattcgagtggctaatggggctccagtcatttcgcacatgctttttgcggatgatag

SEQ ID NO: 200324 - DNA, 1044 bp, Cannabis indica
ttaaaaagtctactttttcttgaacaaaagctaacataaccatcaagacaaaacaatacatcaccatcactatccataccaaacctccttaatcaagctaattaaagagattagattttaattaaggagcataatcacacaattaaaaaagaaaatgaataatgacgaactaccaaagcatattatagtagggtaataaaggattagtagggtatagaatagatgatgaagagtcagtgggaagaaaagaggggttgggttgggaacttgggaccattggaggttaggatgggtcacattctacttgtgattctatatgtccttattacctaattacaatttattattactattattattatttttaaaattatatattaattcaatcaccatccatcaaattcttgtatggaggaccagatatattgtattatctatatttttgtaccacacaaaaattattttttttttaaaaaaaaaatgtgttaggaacattaagcttaaagggtaatgaattttatttaacaaagagtaaggaaaatattgaacataaactcgaataatcaataattttgattttttattgaataacttgacaacatatcaaaacaaatgagtattggtatgcgacactaaagtgtctagtattactatgggatgacgttatataattagttagcgattttttatattttaattaaaataaaataagtaaggtgtgatattaaattgcacttatagcaatattatacctcgtaagggtgctagtcactatgggtgccctttatcatttctcaaaacaaatataatttttacttttatttttattttttttcataaataccattttttatatttatttacaaatttacggcctaaagtttttatttataaaaatacacttgtaaaattttaaaattaaaaaaatacactttggtcagcaaaaagtaaaaaaaaagaaactaaaaaacaacgagaaatcaactataaatacactataaaataaccaaaaagaactagtaaaacaacttcatgacaactata

SEQ ID NO: 200325 - DNA, 568 bp, Cannabis indica
aacataatacaaaacattattcaaaacacaaactctaaaaattataaatagccaaacacactacatatataataatgatcactactttggttgatcgaagcagaatcctccattgggtgatgaagagttgttattattattcaccggaaagagtaaactaggatcttcatgatcatcatgatgatgattaggaagaagtagttgttgttgttgttgttgttcatgatgatgatcttgatcaccattactagaaagaaaagcatcttcattgataatcgaattgaggaatgaagagaagagtacatcatcatgagaacatgagtataataagttcacatcatgatgatcatcttcattaatctcttgatcattattattagtactacttttaatcatcctcaaatgatcatgattgtataactgatcaccaccaccaacaatcattagatcatcaaagctactattattattattattattattattaattattggtgtaatagcttcaatattatgatgatgatgatgatgagtagttgttgtagttggtagctaataactcttcttc

SEQ ID NO: 200326 - DNA, 936 bp, Cannabis indica
atacaattattaaaagaataatttattatttaaagttatttttgtgtaaataaaaaaattaaaagaaaaaaaaattatattgatgtattttataaaaaaaatttaaaaataaataataaaaaatgatgtgtaagtgggtccctaacacactattatagacccgtatatacctattatcacctatgatgtatttctttttaaataggtgttttttcttttgctgacataataaatgaggcttttaatattttattgctttaaatggaaattaatttgatttggtcactccgaaagttgaagattttcttatcaaaattcataaagtagaaaagattttttttttttttttttgaaaaacaaaggagaaggatgaggagagaatgtggatatcatgtgatcaatttagttatgaggtatttctatatttctttttttatttaattttaaggcttgaaaagacattgatggacatgagatagggagagaaaataaatggttcgaaattcgaatccaattataagggacaaaaaaaagtaatgtgttaggaaaatgagtggctggttggaaaaaataaaataaaaatcaataatagaaataaaaagtatttattgatacacacaaaatgtagtagatcacagtgtagcaggtaagatttttaggagaattgataaagcaaaaataaataagagaaaaataaatgtggttttttttttttagaaagggaaaataaatgtgttttactagttatgaaatgttttttacagttgcatacatttattgaatttagctcgtaaagtccatttatgagttatgtaagtctttcagaataattaccctcaagtaaaatgatgataataataataatattagacaatataataaagatgcataacattacatatgtgaaataaaacgaattgtaatactaattgtttt

SEQ ID NO: 200327 - DNA, 1174 bp, Cannabis indica
tttgaaaatacaaggttcaaataactttttatatacttgtctattttattctatatacatgtgaattataataataaataattatttttttagtgtaatttttaatgttatgatttattgaaagagactataataccatatttggtattggtacaataccaaatttggtatctaagaacatcctcaatggaccatgtgtgctatatttaacacaagaagtaattttgtaatatatttgtattaatttttagtattttacttaaaatatataattataaatcttaatacaaaatttaatgtttaattaataattttatttaaaaaaactttattattagttttattactattttattatataaaacaataaaaaataaatgtaaatagtttataatttaatacataactaaatttaataataaaatattaaaattacaaaaaaagtaaatataaagacaatacatttattatgtcataatttaattttgaattaatttttttttatctagaagaaaacagctccaaaggaggaaaataagaaacccattacaaattattagtaaactcataaagaccacatctcacttgttcaactttctactgcctatactaagaattcttgctttaagaactatttttaatcaactacagagtgtatttgaccgtaagagctcatttggtacgttgtataagaattttattgtattaaataataaataacattatatttggataaatcaatgtattgtattaattattacgactaaaattattaatacaatatatattatattatttaatacataacaaataattcatattaacttatattataatatttacaaaggattcggggtcaacaccaattttcgacccagatccggattcaaacccgaacccaaacccaagacacgtgacccggacccaaacttgggactcagacccaaacccgaacccctagactcggatccgggacctagactcaagacccaaaactcgaacccagacccggacctagacttgggacttggactcagacctgaacctaggacctggggacctagacccagacctgggtcgtggacctggacttggaccccggacccagaccaagacctgaatccggactgagacttggacccgtgacttggacccgagacccgggacccgagac

SEQ ID NO: 200328 - DNA, 663 bp, Cannabis indica
aaaaaaaaaatggactacaagaaaattataggagtcaaataaacatataactttgacactgatttgaatatgctcttataatatttgggtttaaagtttaaactaattcttcacggcacctagtgacattgtttgtataatatatggtttcaaactacagagtagttatcatgtgctatataaccatatatcacaaaactaatcacagtcccatagccagagaatatgactaacaattggctgactaagctccaaatgccacaaaatttgtgattctttacagagagctttgaataaatactaaaaaaaatgctatttaggagtaaaatagctgcagtgcaagcattctatcatgctgtataataatattcacaatttctaaaactacaccactgatccagcttgtagagagaaatctgcaccacggtcagtggactgcatctcggggaaaagccggactcgcataaaaccagcgtgatttccggtctacagcataaaatttagtggtggactcccaaggcattctgatctatagaaaggctctggttcatgtgtgtgtggtgtcaaaccatgaagttgaaagttggccaaaatttgtttttggcaattaaatggagtgatcttgcaggcttaataattcatgatgtctaagtctaaaactcc

SEQ ID NO: 200329 - DNA, 1612 bp, Cannabis indica
ataattgaatgcttcagcgttatttgtagaatcaatagtttgattgaaaatctgaaataacattcattattaggaattaaggatgattgttgacagtggagattaacctttaactatttcttgaatatcgttgtatctcattctattttttttttgtttacgttatttaatcttcataattaaaaccccctttttaattcttgttactaatttttgaataataaattgataatagtcctcgtggaatcgacctgtatttattgttatactgaagtaattggtaatctagaaacaaaactagtaaatttgttgtggtaaacgacacacattaaatttttagctctattaccggggactattttattcaatttgttattaatttttttcttgttactaacttgttctcctagttgtggttttaattttcagatcattctttggaaacatggtgatgtacaatcaacaattctgtgatccacattatgtctcgccataagtgcatcaatatgatccatactatgacccaatatgaagatcacacgagcacaacatgcagtcgagcaaacgacattaaacaaagcaaaattacaggagtttttttacccttttctttttattttacattgattttatttgattgagccttgaggacaatgcttatattaagtgtgggggaagaataactatcgtgtctatccagttttttttttccttagttgtttagttatttattttattattgtttttttttaatttatattagtttttctagcttttaaaaaaattagtgagcatggtttgagtggaattctattgacaataattgcttgtgtttgatgtgtgtatttactttgatgtcttatgcatggtcttgatgataaaatatttgattgtgtgatagttataattctaggaaaatgatagattctcatgatttgtgtgcctaactcatgattaattactgtccaagcttgattttttttttttaacttttgcacatcagttgaattatcacatttgtcaatgtttagaaagataaatacatgtttgacttttaatatttgatctcaaccactctagaacttgtttgataatcctttgaggcaaaattgataaattacatatgattttgagatatgatataggtaattttttggatcgattgagcttttcaagcctatcctatttgtgaatttcctagttttacccaatttgagcctaaatgtttaaatcttgttttttctttttaaccttatacatgaaccttttgagccttaaaaaaatttattgttcatcctttttcacaccatagtatattgatgtcctatgtatttgtaaaaatgtgagagttttgttaggggaaaaatattgatggttatgtataagttgtgaaaaaaaaaattctatctctttagaataaatgtttgtaagttgcaagtattttattgaattaaaaaactaaaagaaaataaaaaattcgatgagaaatatatgaatacttacaacaatctaagtgttggggaatagtatgctagaaaagaaatataaggttgaattatatggaagtaattggggagtatagtataaataggaattatttaagagaatgttg

SEQ ID NO: 200330 - DNA, 1113 bp, Cannabis indica
aaatgtagtagaaagttggattttgaatctccaatttgaagccttgttgcaataaataccatccaccaaatgcttacaatcagaaaaatgaattatcttagatcatgcatccccgtctcaagcacaaagaggcagggtgctaaagaacaagagttttagcgtctagattagggagtcatgcacagttagactttttattttggattacattattttttattaatttaaataaaatataggttgattattatatgttttttttgttgtgttaggtcatattgttagtgatcaataattaacgggtttggcatctatattgtgtgtaaagtgtagttgaagtaaagtgtggctttcttagttaattgaaaccagacccagtccaattaaggttatgtagctaggtcctttccgtaacactataaatatatattgtcttatatattatctcatcacaattatatactattttgataatcagataaataaaagtgtttctcatcccaataatggtccaccgtttttctgggttcagccctaaaaaatcgatccactatttttatagtaccctataaaaatggtaggccttttttttttttttgcaaaaatagcttaactcatgttttacacttcaaacctaatcaaaactcctccaaatctaatcaaactttctagaatagcttagtaccttaaaaagaacaattccaaacattgagaatcaacaagaacctcataatcacaattttactattgttgagtgagttttgagttcttaaactctaactctctcaactcaagctaaaacaatcatccaagcatgatattaaaacataaaaactctaatttaaacctaagaacaagctctagaaatatagacataaatagaaccaaattcatcaaaacctaacctaactttgaaacccttaaatcttcaagaacaccaaagaaagcttacctcaagcttgaatcaacccctaaagttgattaacaacaagaaaatgaatgaattgggatgggaaaactctggttttctcttgagttttcttgagccgaaaagagagagagagagagagagagagagagagagagagagagagagagagagagagagagaga

SEQ ID NO: 200331 - DNA, 1126 bp, Cannabis indica
gggttcttcaaaataccagagcaactcagggaactagagttgtcctcagaagggtcatcaatcaccaaatccaagtcattttctttttgcctagtatcccagggaaaatcccggacgacatctggatacttgagcggaactttgtggggcctagaccaaagagaggccgacgcttcaaatttttgtttcttgaaaggtgtcgttctctcattaactttggatgaagccgggaccccaatatctcctcctatattccgaatctcatacaaatcaagattcccaaaatgtttgaggtcatgcaataagctttcttgagctttgaaaaattgggccaaggctttggcttcattagcatgctcctcgggtccattggtttctctaggcaaatttgagctaacccccacgagcccaatgtcattaagagagggagggttcgacccaatatcattagagcccatgtccaaattagacagcccctccaaactttttgtattattatcaattccaaaagtctccactaactcgggcccacactgcatgttttcttagaagaagaaggaggcccactaacattattattcaagtttaaattctggtacaatgggctcttccctttactcttttgatgatcggccagcccaacatccacaacaagcggcccatcaaaaataagcccatcattccttttatcctcaccaacggtcatcacattcaaaatcctttggtccatattgttcatctccaaaacaggtaagtcttcaattttctttccttcttgcagagtccctgcctcaccaccaaagccagaaatggcaacagatctctcaccaccagaaatgcgatttttagggaattacaccgcacgcgttgacttcccgaggccagcagcaccgtgagaagtccacatcgctggccgtctcgaacgaagagattgagaagcaggggagcccctctgttcaacagctccgtcttccatggatgccggcagcaataataaatctccaccattctttctcatggtcaaggacgcaggtaaacgacgggaggcaattgaattcggcccaggaaacacgcactggtatgaggataaggtagaaagccacgggccgaacatgggaaaagggat

SEQ ID NO: 200332 - DNA, 851 bp, Cannabis indica
tgtgggttgttatacggattttaattacgctttaaattactctgttagttcctataggagtgtctgtgtgaaattctgcaagaatataaaaataaattttttttgaagttttaaaataaaaaaaaatcttataaggctaatagtcatagctatctttacaaaaaaaaaatgttattattaattttttattttcaagaatgatatagagtttaaatggatattgaattgctataagatatttgggctttatggggtccaatcacaacatgatgagtggggtacaaacctaagaagatgtctccactccaaccaactgggccttagagtttgagcccaaagttggtgagttaagatagtgacaacaattaaagaagggaggcacacatgacacaacaaaacagaagagacccattgaaacaccaccaaagactagagttgcaaataaatatattttgatcagatatttacttctctctcgctctcaactatagtattgtacaatggacccccaagaatagcttaatttgcttacaatcccaaataaaggactactacttatgtatgatatctatatgcaacacacatatatagctatttcaaatgctaaacagatggagatgtggacaaataccagaagacctaataatatacatgctagagacccaccaccgtcccatgtgcatgtgaagttgtttcaattaatttaccaattcactcaactcaagaaatcaaaatcaatggctatgttttcacttaattctgagtaccttacagttttaacactattctactctatcattgtagtaacccccaaacagaatccacttctcattatataataataataatta

SEQ ID NO: 200333 - DNA, 2503 bp, Cannabis indica
ttaaagtttagtatattcctaagttgtaacggaggcctttccttcgtattaagaaaaaaaaaagtttcatttttaaaataaactagaattggccaatcaaatgggtacaaaaagagagacatgtcatttctaatgtgtgcatttcttgtggcccaaggccatggcctaacccatttgtcaatcatttgttgttattacaattttgattggctacagcctataagtcttcattcatttatttaaccatttatttattgtgtcctttttggtttacttcttcagaaagaggtggtacacttctgaagcaagcaaccattcccattaactaaattaaaccttttcttctattttttattttgaacttttgtatataattttcattcaaaccccacctctgttattaaacacaaaatcaaattaaaggatgggaaatgtaaagggaactttcctagttcagagaagtatttagtatatatacgattttttaaaacaattttttgggtgaaaaggaaagatatcttttttttagagtttggtgatttgattcggattagtgttgataatgtcaaagccactgaaaaccaatgaaatgtgctagaccattcaaagtggggtcacttctgaccctttttctcaccctaaaatctcaaatatagtaaggagagattccagcaacacactcaaattcacacattctatctcctcaattttttctctaatattaaaaagaatgaaaaaaaaaaacatacttttgctctaatacgaagaaatcccttgatagaatagagaaatgctaaagggcattagtggtgtataacattctcttatgtgtcagtatcgctattggtccaactaagtatcgggtcctaaataatttaatataataaattttaaagagtatcgctagctaatcgtaacgtgacatgtcgagaaggtaagtgctagacaccactagtgcctaataaccatgctcgatagaatattaccaaaaagaaacaccattaaataagactctttacataaattaattaataaataatgacatgagaaaatcatttctcccttaaaacattgttccaatttccaaactccacttaagtcataacacgttaacaaaattatgttgtacacgtcataaacttatttataatttgttatttttgataatgattatttataattaattgcatgtaccatttttcatttttataagatggatcgaatgcgttttccatcaagctacacataatctgagagtacattgtacctttaaaatagagatttaagaacaaaggagtaaaatactcattccaactaatgatgtaaactttttttattattattttaaagcatctctatttttttttttaaatgtttctacatgtaaaaaaatattattaattatttaaacatattttaataatatttaaatttcatttttgtaattaatatgtattatattatttatattaaaaaatatattatttaaataatatagagaagatataaaaaaaaataaagtgttcgtaaaagtcaatctaatttgcaaagtgcatatatctatatttggatattcttgtacgaaataaattggaaaatttaaaattttcacatgtgcggattaaatattgattgacatgtaaaaataacttattcaatgcaatctacacatatttatacaattaacattttaatataaaaaatagtaatttaaaaatctaaaacatgtaatacaaatatatttttaaatttagtagatcaaatatatattatatttttatatataattaacttttttattctacgtacaatttaaaacaaaattaaatattttttctacatacatttttttttttaattttcttttaaatttgttattggttattttatttattttaatttgttgttagagacataaacaacaacaatttgtaattgttgttttttttgttagttatgtaaaaaaaaaaaaaaacaaatatatgttctaacaaatattcaatgatataatattgaaaagtaactaatttaaaataaccaatttaatccgcatttttgtgggttgaatttgagctattgtgcggattagattgaatctaacatttgaaattcagacttagtgcagatcagatgcattataaacaaaatagtacggattgaattgcatgaatatctctaaagaaaataatggatggttacttatcccaataactaaaaaatgaatatttttatttaaaaaaaatatatattttatattaaattcagattttttttcatagaaaatgatgattccagttaatggataaaatatttttgaagtttaagtttgaagtttacattcctaaacttttaactaaaaaataaaaatttgatgttatacattttttttttttggtaaaagcacttccaacaactttataatacctaaagctatcaaaaatttaaagaaatgagttaaaaaggatctacagtccatgaggtatatgttggaattttatgccct

SEQ ID NO: 200334 - DNA, 682 bp, Cannabis indica
gtagacactgtaaactattcagaatttttaaaaaatttacagggatgatactgtaactataacgaataccactatgaaaaaaaattaaaaaaaaaatattccaacatgtgattttgaacgtaaaagttgactaaaagattgtaataagaagttgtaattagtactcctcaactttaaatacacttgtaatacatgtcaaccacattcattctacttgcacaaatttgatttattttatatttattattgtatcaatttatttgactcattaatacactatataaaaatatataaaactgtaaacaaacaaataaaattaataatttatcaccaaatattaatacactaataaattttttaatgttaattaattgccaaacataaataaattatgatatatatattccatgattttattcccttcaactttagatttctcttttgcaataaataaataatatatgaaaaaattacaccgtgcaccattttttggaaaagaatatattttgcggtaaaaaataattaattacaaatattcaatacttaattttttgtaaaatatgtttataacaaagagtgtttgtaaacatgtaaaaaatatttagaaactatttacaaacatgtaataattgtttacaaacttttatttcttattttcataaataaaatttatatttttata

SEQ ID NO: 200335 - DNA, 521 bp, Cannabis indica
ttgggcaaggatgaatgtagtttcttcgttacatcttcgaattcatggcagagtactgtcagaggctctgagactgagttcatgaaagtgactacttttttgtttggaaatacgtaacgtgtttccaatgccttcttccacattttcattaccaattccaaactacttctgagtagattttcatgatcatggctgttaagtacaactaatcctccttgttgaaatgaagcatggacaaaccagagatcgttctccagacgagacaagtaatcagcaacagtgctcttgtatactggaaactcctcattatctaagagacgcaaccattcaagcacagtatcagcaaggaccaacaagtaggtaagactaggattaggattaggagaagaagccatggaaattaagatcaaggagaataattaacaaaataatcaaagtatagtaatagccaataacacagagtaggtagatagctccaccatagtccaaaaatttaaggccagtctatttagatattatta

SEQ ID NO: 200336 - DNA, 573 bp, Cannabis indica
caaaaatcttaattagtctaaatttaaacacaccaagtgtaacatttacctaccacgtattgtgtggtgttgtggtagggattacttttattggcatcctcccttgcttgggtcaagggttcgaaatctaccccagccccctttggaaagggatttaagaaaggcttggtccttgttggaggtagtgttatctgtgttatgggaacccttaaagtgactaccgatgacccaattaaagaaggctgagatataagaccttattgctaacacatggtccccaaaattgccaaaaatgactaaaagagtgggaaaagaatctgcaccacgtgatccccttcttttcccaacaaaacaagtgtaacatttacttgactattatttttagttaagtgatataggttagagaaaaaacactaaaattgaagtaaagagattctttccataaaaaataataataaggcttttgatatggggtttaaattggatgaaaatgtgaatgtcaaataaaattaaattttaatgattggggtttgtatttttaatttagttctattttttaaattaaaatggcag

SEQ ID NO: 200337 - DNA, 671 bp, Cannabis indica
attctgaagaggtgcgcgcactatcgtggtctgatacatgggataagatctgatcctgtgttagaaaggtaaacgcgtcgaggggatgcccgactaccacttcgtagtaggcttcctgtattcccgtgcacacaacatccattttatactcttcaaatagctcccaagtatctttttctggacttaatggatttagtccttttcgggtcccgaaaagctgagaaggcttccggggcctgggcggttgcctttcaggttagcttagtccttccaggaccttctacaattaaagagacttaagcgataattattcagatcaccatcttctatattttgccgtttgtccctattccgaaaacacgaataacaatttacaatgtcgaaaataagatttaggtattttgttatatgcacgactgtttttttattacatgcgtagtaagtaacgatgtgaatcttaatttcggcatgctaaattatttaaatttttttaaaaatttacaagtagtcatatataactacaatgtacgcaatcattaaaaaaaaattaaacaaaaaaagttttcctaaaaaaattgttctcatgatttatattgaaaaaattattgtactaatttaaattaaattacgtgaacaaggagtgtcctttaaaactatacagaaaagatctg

SEQ ID NO: 200338 - DNA, 1323 bp, Cannabis indica
aagtgtgcagcagggtacatcaaattccacatgtaagagaacaataaattataacaaaatgatttgctcaaggcaagaatcaagtaagccattacattagccatccacatagacaacccaatcttagcaaaaaaagaaaaacattaaaagctaaacttataggattcacagtcttcaaacaacaatttatttatttacagactctctggagtgtggagattgaaaaattacctagagtctctagaggcagaatcacaagcctgaacgatttccaagcacaatttaagatcattatgattcttggtaacttaataagctttgaagaccaagtacgccgtcccaagcgtcccagtatacactgtataatcatgtattcgttttccactcaaaccccaagtctctctcaccacctgaaagtgaaagtgacaccaaaccaaaatagttacagaataaaaataccgacccaccaaggccacaattgagaaaaggctatatgggtgaatatgtttatggaagcaagtaccgtttgtttgaggtccaaggcataagttttgagagtgtctaaaagtgttttatatggaagagagagaaggtttgtgagtgaatcttgggctgtctgaaagggtgtagtctcctgtagaggtgcctctgctaggaaatacggcatggtgttatggaagaatcggtccgccatccctttctgttgctattatctcagactgaaccacttcccttttacttaaattaactctctcaaccttgctcctaagccactctactaaccagtaaccatctttcaaaaaaaaaaataataaataaataaataacataaaactgtaaacgacaactacaaaacaaatatcttgttgtcgttttttttttatttacttttctttttccattccataattgccacaatcctgttaacaattactgaattttatgttcaaaatacttttatttttcttaaaaaaaatggtataaaataggatttaaatttagttaaattaaaatttaataataatttaatttaaaagtattatgataatatttgttatatttttttttttactatctattcgttctaaaaaataacttctagttagttatatattaaaaattaaaaaaaaacttagagttcaaaatttaattttgttctattttaaaaaatacaaaagttaaattaccattttaaaaggatacaattaataattttgtaaaatacactattcaaaataatattataattaaattatctttaggataaaaagaaaaaagaatatcaatttaattagcatttgattttttttcttttttaatttg

SEQ ID NO: 200339 - DNA, 561 bp, Cannabis indica
aaaaacatcaagtttgtgagtcgctggccattgtaaaagtcccatatggttattcatcaaatattcgcaacttggtttcaataaaatatttaagacttattgggcttaaatcgcatgattgtcatgctttaatgcaactattactccctattattattcaaggaatttcccaaactcatgttaaatctgcattcatcagactttgtatgttttttaatgcaatttattcaaaaactattgatatatcgtctctaaagccattgcagaaagaaattgagttaacacgatatttgcttgaataattttctcctctatgattttttgatataatggttcacttaactgttcatttagttagggaagttgagttaggtaggcttgtgtatatgagggggatgtatggatttaagagatacatgaagatattaaagtgatatgtttgaaatcgaagtaaacccgaaggttgtatagttgaatgctacattgcagaagaaactataaggggtgtactacataaattttcatatgaactcatcatttgattttttttcaaaaaaaaaa

SEQ ID NO: 200340 - DNA, 1809 bp, Cannabis indica
ttctttatataaaatatttacatcatttttttttattttaaatcaaagttaaactaataaatttaaaaatataattaaaaatatgtctaatattttaagtattttaaatttaaatttatataaaatatctacataatttttatttttatataataatattataaaattaataaagaatattctgttaattaataggatattctgttaaagttaacgtaaaaatttaaaaagtatcgttaaactaaaaattttgttatatagtcacactttatatagaatagatattacgtgtgcttattatttacaatatattttatataatttgtgtctatgatataagagaaaatataaataaatttgcatatatatatggaatattatgcaaatatgtcatataattaactcaaatataataaaaaaaaaatgaataaatattcgtatataatgacaatgaaaaaataatctaatatgttatatagatttgtgcaattattttttgaattaaatattttatatttgtcaaaaatattgtatttatatgaatacaattaaagaatcattgaaatgattattattgatgcaattgaataataaattttgaataccaaaaaaaaaaatgataagaaattacatcaaaatatcgtaatatagaatatgtttaatatatacatatatatatatacatatatgagtgagtattcaattgttatagtaaaaatgtaaccataagatgctataacaggtcactaacaggtaaaatttctatttttagactcacattaattatatatacttaaaataaactaatttttcaactaaaatatttaataaaatcttttcaaaaattaatattggggaggatgctggtttggctcctagattacccgtgtcttttagtaactgtagtgtgaaaggtcgttgggaaacagatattgccttactggttcgaccgatttcaagtcctagaaaaaatgaagagaaccaatatcttttagtttgaacttgctgttaagtgtagtttaaagttgggtattggatgatcattgttgcttactacaataatgtcatctacgtatactaatacagcaaggaacatgtttggtgttcgttttgtgaacaatgggttatcagatgaggattgggaaaaaccatctgcaagaagtgtggaactcaattttgagtactatttcctagagacttgctttaggccatagatgctcttttttaagaggcaaactaagttagagggagcttgatatcctggaggaagtttcatgtaaacttcttcttgaagatcaccatggagaaatgcaatattgatgtctaattggtgaacattccaattgttcattgcagcaagggctaatttttttttaaggtgttgaacttggaaactggggcataggtttgggagtagtcaagtccttgtcgttgattgtagtctttggctaccaaacgagctttgaactaatctacaaccccatattggtcgtgattgacattgtatacccatttacaaccaatggatttttgccctggtggtggcttggtgataacccaagtgtggtttttttccaaggcttgtgtctcggtatccatggctttgagccaatatgtgagttgtgatgcttcagcatagttttgggcctcaattacaaaatatgctgctaaaacggcagctctgaattgaggactgagtttgatataggaaagaaatggctcaattaggtgagctgtggaagcagtgtgacaaacatagtcactaaggtgggatggttttttttattattctgccaactttagtgggag

SEQ ID NO: 200341 - DNA, 1486 bp, Cannabis indica
agtacttgacaagattgcttgcccaatcctctgggaggaaagggtttggatttcaccccttatgcaaacatttgaagctaactaacctgtgttttgcagatgatcttattattttttgcaaggggaatcttaactcggtcagatatgtgaatgaggcttttatgaatttttgccagagtacaagtctctcagcaaataagtccaaatcccatatttattttggtggggttaaggatggtattaaaactcagatcatcctggatcttgtaaaaatagaagagggttccttccctatcaaataccttggggttaagcttcgtccaaccaaatggaaggttgaagactgtggagttatccaagacaagataaataagaacttaaactgttgggcgagcagaaatctttcgtttgcagggcgctctcaattgattcactcggtcctcctcggcatcagaaactattggatgagtattttcactcttccaaacaaagttatagatgccattgatagaagatgtagagaatttttatggggtacctttgggaatcgctcaaagttgcacttagcatcttgggaggaggtgtgtctccctaaaaagtatggaggaattggctttcatgagggtaaaaagtggaataaagccttaatggccaagtttctttgggccattgctagaaaacaagatagcctttgggtgaaatggataaattctatttacctaaaggaccaaaatgtgtgggagtacccagtcaaacaagatgtgagctggtatttcaaaaaactaatgaagatccgaactagtactaatgagatatcctttttgcttgctgaaaaaggaggtaagttccatgctaaacttttttataacttacacgaggatgcgcaggaagtgaattataatagagctgtttggaataagctcattgttccaaagcacaggtttattttttggcaagcttgcaatgttcaacttctcacccgagatcacttaagcaggtttctatgcctcccctcgaacctttgtccggtttgtgagattgacatagaaacacacacacacacacacacacaccttttctttgaatgtgtgtatgcaaggaaaacttttgcagagataggaaactggctgggagttatagactggccaaaggatgcagagaatattcaacaatggtgttccagggggcccctcgattttaagagctgagtgataaactctgtttatgcagcaacaatctacatgctttggaaaaacagaaatggttgtgtctttgatttagtttgttcctctcctcttaagttgagcatggagattaggaagatttctcattatagaatcttgagtatggcttgtaattcccctaaaaagcatgataaattcattatagatgttataaggggctggtagtttcgttggtggctgctactgtgttagcaggcgggtggttccttgtttatttgtgtttgatctgtatgttttgctgc

SEQ ID NO: 200342 - DNA, 781 bp, Cannabis indica
gtaaaaaactgttatattttatgagaaatttttcaacaagtatattttaaaaagcaaaatcaaatagtgtcaaaacttcaggacaaaaatactaattattcttttttaaattaataaatatgagtatagttataatgcattgcactaagtaagaactaagaaataactcaatttggttgttctacttcttttccaacaagtgattgtttcgtcactaatccaatcgaatcagcaaagtgggaagagcaacactagtttgaccaagtaattgattgcaattagtaagaactcaatttggtttttctacttcttttccaaaattatcgtacgttgccttcacccatcggcaaccaccgtttcacctacttctattacagagctcattgcttctgatgatgaggttgtacgaattatgggcagtcataatcaccggctgatggcagaattcacgtccaaatcgctgcttatcacttatctttatggccttattagacatgcagatatctttctaatacttgatgtatcacccattcttccgagatcaatagtaatacctgattgtgtattttgtgtactgagtgtgtactctattttcacaatcacatcataatatcaatatttcatttcagtttctagttggtacttgtttatcaatgataccaccagcacattaaatgtcatggtttatccaaaacaaccaaaaatgacatacaagtctaaaggcttcttcaaaaatctcactttactaaatagggaaggattaaaaggtttccaaatccat

SEQ ID NO: 200343 - DNA, 716 bp, Cannabis indica
tgttagattgctaatgttaataagttaaaggacattatttgagttatatataaataatacattttcggtaattagaagaaaaaaaattagtcgcaatttatgttaattataaataaaaataatttttaaattgtaattagttatgtattttttaaattttaatagaatatatagtttataatttatttatgtaaaattaataattttattttaaattgttatatatataattaatattatatatatttactaaaaataattttattattgataactatattatcttaaatgtagccatataataacataaagtgtttttttaacgtgcaagatcaattttaaactcattgtacatgcatatctaaaaaaaactctattattatttttctttaccctatctacatatttaacaataaaataaaaaattatttatgtttcttacaggatcaatattgtaacatcattatacctattatacctattgcaattactaagaaaatatatttatattatgtttttaacaaaaaaaaagtgtatgacatttctaaaagaatgaaaaatagcataaaattaaaagtattaaagttaaactaaattataattaacaataaattttttaaatattattatattttatttttataaataacacttaaattagatattttttaattaaaaaatattgtttattgaaatataacatataaaaaaaaact

SEQ ID NO: 200344 - DNA, 510 bp, Cannabis indica
atgttacatgctcaattttccaataatgagaacctccattgggttgtaaggaagctacaaattctcttgtcatgtccctaattataagagattttagatttggtaagtgttctatattagacggaatctcttctaataacaagcaatctccaatatcaagctgctcaagatgtggcagtgctcctctatccattttcacaactttcaacccttccaactttctaactattagatgtttgagtcttttgaaactaccttcttcaaagtgcaattcctctccatcataagcctggtgcaaacggatgaattctaaattgggtaaatcttttatgtttcttaacggttcattgctcaacctagtgaaacgtaaggtcaatccccttagattctgaagcactgagatccagcttgggaactcttttaatcgacatcgcaagctgatgaaacgcaaagagcgaggcggagataaaatgctttcgaagtctaaaatttcctcatccctaaaagaag

SEQ ID NO: 200345 - DNA, 980 bp, Cannabis indica
attgaaattaggttgccatttcataccagcaagttttgttccccattttgaaccaaacctcgaaactcttacctccacttcacttctcagttcactgcccccacctccactcctgctttcggtttttcgtccaccacctccaccttgaaaacctttagtcttgttccctctcttaatcgtaggacagcgatcctccaccatgaaaatcccaacaccacctccatcggaccactcgagaactcatccttttggtgatcgacctcctctcagcgtcaggtataagtttatatatattttcagattagaaaaaaaaatcaatagcttggcatatttttgttgggtttgatattgtgtttgggtttgattttgtgtttggggttcaaacttactcacatccttcaaatcttttttctttgcttgttaagacgtttccaatcccaaacgaaaaaaaaaataatagcaggaagtcctttctatggtaaaatttaatattttgatgattctctttatttattaagggatttcagtcttggaagttattgtttgagtttgcctccgcagattcagtgaagatgagtattttttttattttacttttttctttttatttttttgactgatttcaattttcatttattcatttaatatcatatttcatgtttcatgatgatgatgatgttactttgtacagagatttccttcagaactcatttctagagttagttactaccattttctggtaaaaaaaaaccaagttttttcctttggtattgcaggcatacaattggaactgaaggatatattacaccagaggttctttcacgtaagagtatggtggcaaagtaaattttcgttttcctctttttgataatttaacttttagtcggacagtataatatttatcatattcttagatttactaacaagtatgtttgattaacaacctaatatgaattctaaaacaatgaaaataaacacat

SEQ ID NO: 200346 - DNA, 515 bp, Cannabis indica
atatatatttatatatttaattcattaatttcaaaatatattcatatatatatatatgtatatatttagatctatatatataactcagtccagccagatctataagactatcacattcatcatatataatcatccttccccacattcaattatacaatgcaataatttttttagcataataataattttgtatatatatttaaaataaaagaagaaaaaacaactaaaatatttaaatatgaagtatatctaggacgtaccgtacgtaacttatctgtaggcaaaataaaagcaattaggcaaacattaattaaaggggaaaattaatataatgcaataaaaataatattattataataataactaatataatgcaattaaaataatattattataataataattaatataatgcaattaaaataatattattataatttcacaaatgctatagttcggaggtaaaattgtaatttcaaaagataggttagcaatttgaatttccatgctttaat

SEQ ID NO: 200347 - DNA, 1905 bp, Cannabis indica
aacctaagtgtaattcttgaagaggtgtttcacaaaacgtgaaaatccactaaagctactaatgaggagtctagaatcaagagttcatatgagcacttaaaagtacacttatgaacttgagggcaagtgttaacctttaaatttcacaagttgtaatctcgatgttatgatgagcggattagttaaaaactaagagggcttcccttggttatgatatttgaaggttaatcacatagtttaagtcagtttgggtgcctttgacgcttatggaaagaaacaggtaaaattgatgaataaagctataaggcgtgtcataccagtagttttacacatctttaaattccaaattagatgaagagcaaaatattacagttgtagatctctttctcaactttctaggagatctcagatcactcaattctgacttatattacgaaagttgtggtcaatatactaagtgagagaaatgtaggaggctcaccgccatcagcaagatgacgcacctacatgtccccataataaacctgtggcccgcgggccatcccaaagcctcaaaactcaattaggatcattggcattcatctcgaaacttcctaaggagatatgtgaactaaagaaggtaactatctcatggccctttttgatcctggaattcactaagtaaaaatattgaggtcacgagaaaaaggaaaagccacgaggggaagagccacgagaaaaaggccttgttggtcatcattttaccccgcacctccaaaaggatgtcacgtccatcagagcctcgcctttgtaagggtgttgcctccataagaccgttggaattgcctccatgagggagtcatcattaacgaaagtgactttttgtgagcatcggagggaaagtcattagagatggaattaaaaggagaaagcaagtaccttgagatatgatgaggaattccaaagggaatcaaaggcatgcctaagaaatgactaattggagggtacgaccatgacacctgcaaatgctgagacaaagtagtggatgtacatcgggtgcaatttaggcgtgcttgtgtcagtaccacctgacacctaactaacaatgccttcatcttactaccacctgtaatcataatagtacatggtccatatagggaccacttacagctcattttgttaacaagaccaatagagcccaaatataaatacctctccattccattagagagagggttaaaatcttgtgtattgagagatcattgtttgaataaaaaacacattattcattttagatttcgaagacatgttcttcacttcatctttaatctctctctctctctctcaattatttccatcatctcatactcatccaacctaatcagcaaattgatccgagatttccaaccataacatcgtacacaagttcttgttgtcaacattcgctatttgttgtttaagaacatctttagccatgctctctatacacacttagctaaaatagagagtcagccttaagaaaatgagcgccaaccatacaaaaaatggctccctataatagagaattgatagaaaggtttttatttttttgctaaaattttttaatagtattttaatcaaaagtactattactttatcatgattttattaaattattttatatttgacaaatttaattataaaaaattatatttaacaaattcatattataatatattgttaaaataatcaaatactaactaaaatacggagcatgattagagcaagaatactaaaaataactatatttaagcaacaaaaaaaagtaccattagaatgaggcacttcgagttgctatttattttgttcttggattttttcacataggaatgaggcacttcgagttgctttcatacaagttgaagatggtggtgctgatggaaaggg

SEQ ID NO: 200348 - DNA, 812 bp, Cannabis indica
gatccagagcgttgccactcgtcaaagtgagccaacatatcaacatccatggtgaagttaaggataccttgaacactgtccactgtgtaatttagtttaaaaggaaccatctttactcccttggactccagcaccttcacaacctccatttcagcatcctcaacgtatcccactctcaactttgtaatgtccactgagaaaggatccttaaaaggcatgtctctagacgacatgtcgtttggatcttttcctctaataacatccaatactatagcacaatctgctgcatctctacagaaaggccctaccttgtcctgcttattggtcgtactatttgttaataaaactcagtatgatggcatactatttgcttgtgctaatcataacaaattatatattttatgggttttgtgcaaattcctaagttaatgtagaaatgctaaaaggaattaagtatcacctattgcatgattttttactatttgcatagcgcccccatcatagtgatactaaatattactgatgcctaataataatgctcttattcaaatatagattgaatagtcaagtattattacataccaagctttctgagaggctcatcactccagtccggccaacggagccaaacgtgggacgtagccctgtgatcccacaacgcgcagctggaaaggtgattgaaccggctctttcagttccaatggcaaagggtaccatgcctgctgaggtggacacggcggggccagccgatgagcctgtggaaaactcctcaatgttccaagggttcctagtgttagaatttattggggtca

SEQ ID NO: 200349 - DNA, 817 bp, Cannabis indica
tatctccagtgacacttaacaaaattttttggatgtaagagtaaatagttaacaatagtgaagtttagaaaatattgatcttaaaaaacgacttaggtggttaattataaaaacaaaaaaaatttgaataattatgccgtcaataacctattaaaaagtattaaattctaacaaatatttaaattaaaaataattaagaaaactaaaattctataattatgaaaaaagatattaagaaaactaaaattctataattataaaaaaaagatattctaacgtatctttttaaaataagatatttcgaaataaaaatgttaatatcactcttctatagttctatatatattattattttttttttgaaatgattttatagttctatataagtatggtccctttcaaaaaataaacataaaatgtattggcataaaataaaaaagaactctttagtctattttttaaaaacgaaaataaaagctttaataggctgttaacttctcctccaaggagtgtgactctccacactggtttgacgcttttcgctaccgagaccccaatgaacggtgggggtaacgcgccgccgtctcccgcggctaatggcggagagtttctactctctttgcttcaaaagacccctcctgaccatcttcatcataatcagcatcaccaaccccaaacacctcagcaaccgcagcagcaatctctgcccgttgatcctgccgtcgcagcagtcggccccagtcttccttttcccccacagatttggcaatccggtggtcaggatcttctccaccagcatcagtggccggtccactct

SEQ ID NO: 200350 - DNA, 520 bp, Cannabis indica
atgttcattttgaaaaataaattgcaataacgtaacttttgagtttaaataataaatggtgtgactaaaaaaactctttaatttttttttaaaaaaaataaagaatgaaagactataatatgccatgtttattgaaaaaaaaatccactaacccatttctgatatatcagcgaggagtgagagacagagtgagaaaatgtaacagaaaagtaagagagattgggaaaaatctcatgttttaatctcggtacgtgtgttaaaataatacaaaagattttaacggtatttgaaacaataaaatagttggagataatttcataaataattttgaattgacgttaggatgtgtaattaaccctatatattattaaatgactgacgattgctttaaaaaatgagtgacgatttaaaagtatatatatattattatatttatatatattgaggtaattttatgttaatacacatatatattatactatatatatttaagtaaagatttaaaagtatatatatatta

SEQ ID NO: 200351 - DNA, 1675 bp, Cannabis indica
tagtgagaactcaacagagaatcctgactcgactgtattctacctattcttgctcaatcaataaggaaggatttcggcagggttctagaactagagtagagtcatagatcacatcgatctataggacttgaaccagtgtatatcttggtgttaatttcattaatttctacatttactattttctagttttgcaatactctgtttggtcctgttttttatttgactgttattctcgatatattaatcttatcatcgctaatcgcttgattgtttaaaattttgacatcttgatttacaccattagtcgtaatttttccacaaatcaaagcttggtaatcgatcaagatcgaagaatcaagagtcattccattgtaatttctaaagaaactttgaatgtcatcaatggcaagatttaaataggagaagttcgatggaactagggactttgcactatggagagaaaacctaaaaggaatcctcaccaaaaagtccccaaggttcttgaagatgagaagttgttggcagaaaagaaaccagaggaaaaagtataaatggaggagatggcgtactacactatcatcatgtatctatcaaacagtgttcgagggaaactcatcgcagagaagaaagcaaaaggagtttggaataaattggaagaattatacttaaagccatcaattgctagcaagattaatttgctagaaaggttatacagttgtagaatgattttttctctttctttagataagaatattgatagatttaatgagattattgtaagtttggctagcataaatcacaaggtcgatgaagaaatccaggccatcatcctgttaagatcacttccaatcgcatatcgaaaagtcaatgcaaccatcaagtatggcagagatgttattgctttggaagatgttcatgcggtacctaaatcgaaagatttcgagttacaaatggagaaggaatccaagaaagaagaagtgtacctagaaagaggaagatcgcccaagaaaggaagttcgaagggtaaacaccaccactctcaatcaagatcgaagtccaaagataaggaagcaaggaagtgttacttctgtggaaggtttggacacttgcaaagattttgcaagaagtacaaggagcaataaagcttcaacaaatctcacaatggagataggaaggacttctggcaccatcaccacgggaaggattctgctataatcgcggaagatagtgacgactgctccaagatggagaattgttaatctttaatgaatagggagtggattcttgactctaaatgcagttgtcacatgtgtccgaatcgagagtcattatttaattatatacaattgatggaggtcgccatcaaacaatatgatgacaaaatcaaggtgttgataaacgtaaggcacatttcggatcttagacgaaacctcatatccctgggtgtgcttggaggtgaatggtacgaatacaaatccattcacagaagcttgaggatcaccaaaggttctttgatagtactataagaaaatatcaatggtttatatgttctctaaggagaaattgtcccagctggagaagcaagtatggtgaaagggctagaatcggacacgaagttgtggcatcacagacttggacatatcaattaacaaggcctcaaaaaattgcacaaaca

SEQ ID NO: 200352 - DNA, 1127 bp, Cannabis indica
aaagtgatattaaaaaaattatttgaaaaaaatataacagaaaaataattttgttatttactaagttaatagtattatttttctgtgaaagagtcaagctttttcattggaagattgggagagacattcttccctgtggtcaaaggctccagatctctttggaaataatcctggttgtatgttctgtgataatgagggtgactctctagtgcacttgtttttccactgccctgtggcccggttctgttggtttagaagctcctggggcattcgtagtgacctcctccacttcgattccccgcgggaaattctggcttggattttctctcctcgatttgcggatagagtggatctaactcaattcaccttgttcgcggctcatctctgttaccagttgtggatggctcgtaatcggtgctaccgtgaaggtgttcgtgagccccctgaggttattttcaagaaaattcttcattcggtgagctctaatgctccacaggttatgcgttgatcctcctctgctggtgccgtgcatctctcctcctgttgatctcggttcaggcaattgggttaatgtctttgtggatgttgctgtgagagttaattttaactattatgttgtccttgtgcttgattgtcggggaaaggttatcgaggcctacgcaggtaaggaggtggttatttcccctctcgacgctgagtctcgtgccattctcaatgcctcttcgagatgtgtctcttgtggctggtccgaggcgatgctcttttcagcttgcaaagtggcggtggatgcgatcctggcaagacaggttccttcgtggaggatttatcctacttttctgcagctttttaattttcttagttgtaatagttcttgttctatctgttgggttcctcatgtaaacattgaagcagctcataagttggctgcttgggctgcttctcagaggtttagtggtttctttaatttggagtttgtgtactctgtcttgtaatactgttgggtgtttgcttgcctggttggttttttaatgaagtttttctttatcaaaaaaaaaagaagttaatattatatttaatgtatacattatatatatttttttgttactttgtaaaaaaataaaaaaaaa

SEQ ID NO: 200353 - DNA, 640 bp, Cannabis indica
tttatctcaaaaaaaaaaaaatagaaaacaatttttaaagactaattaggtacctttggccaattttttacaaaaacagtttttgaatagtgagttatacaaaaaattaaaaagcaaaaaacatcaaattgttgttttctattttcaaaaataatttttattttttgtctaacatattcatttttatatttttgctcaaatatccacactcaaactcatagtatcataggcttttttaaagtcaagcttgatcatgcaatttggctttgatgatttccttccatagtgtctcactaagtcctagcatatcataatgttgtgggctatgatattgccttctatgaattctccttgattctatgctactatttcagataaaatttacttcaaacaggaacatatgggcttagtagcaactttataaatcacattacaacatgctattggacgaaaattacttacaatatttggacacttaactttggggataagtgtaagcactgtagagttgatttcttttagcaggtttcctgagtgaagaagtgactggattgcctcgcaaacttcatcaccaattagctcccaattatcttagaagaaatagatgttatatccacatgccctgatgctttgattccag

SEQ ID NO: 200354 - DNA, 907 bp, Cannabis indica
aagtataactacctaagacaaactagtaattgtattaaataatggtgtattatgtatgaagtgaaaataatgttatattttattttattattaggtgtttatgatgatggcatctgatatattcagacctatatgtgatcttcccaagttgttttggcaatatccaatgacttatataagcttcgcatcttgggcattacaggtatatattcataatactatactagtatttatattattatatatttatacatgcatgtgccaaataatatataattatttggattcacaacagttttttttttcaaaaaaaattattaaataattttgtacttatatctacaattaattattttaaattttatttttgaaacgaattattcaaaaaaaaaatcgaaaaacatgcatctttgttatgatcaatctagtggaacaaaagaattaaattatcataattaattatacatggtgtagttatgttgcaactaaccctaatctttaatatttcatgaataaaaatcataacatataattattattcatgatcaaagtacatatagtagagatgaatataatacttaattgtttgtatatgcagggtgtgtttaagaatgatatgattggtatagaattcgatccattagtagctggagagccaaagctaaaaggtgaaatagttctccaaacaatgttcaaaatgcatttgaatcattcaaaatggtgggatttggcagctcttgtgtgtttgttaatttcacatagattaatatttcttttggtcctcaaatataaagacaccatatcactacactctaagctatattttaacaaagtgatccaccgaattggcaatatgagaagatcatcttcttcaatatcactaataagtcaaagtttcaatgttgta

SEQ ID NO: 200355 - DNA, 949 bp, Cannabis indica
tttatttatttatttatttgctgaatgtacttcgagttgtgcacgtaaattacatatttaattatttatttcataaaaagacatatttattgattttataaaaaaaatatatatattgacacgtgtatggttgatggtgtggttgagcttattagttaaaagattaagatggtattggtgtcttatcaaattctttgttaatggtcaaatataacccttaatcttatgctaagtatcattaagattggatcaaaagagaggataaaaatgtcattttcagtgaacttagttcatctaattaattggtagcgtgtgtatggttgagaaaaaatatatattaatctcttaattactaattaatcattatgtaaattaattaaattaattaatgtcaatttcggatggattagatgtgtgattttatacatatagaacaacttcaagcacacaaataatgtatatatttaaagctcatcattttctttcacaccaatgattattatttatgattctttttttttttgtatggattattgtttataattaatatatgtatatgtgtatgtgaatattatcaactaagtttttttttggtatttaaattagaaacagtttttattttatctaattatttgaagtgtgtaattgtgatcaaacaatatgtatttatagagttacaaaaagaatttagctacataactctagttggattgagtttgttcatcgaaagcatcagttaataagaaaaatgcacacgtatacttcaactagactttacacatacatatgctaagctcaataactattgatcagtaacaatattagctaacacaacaaagaactatccaatcaactcaaattttaataaaatcaataaaagttaatataaactcaaataaaagtctagtacctctcatttgagctatattaattttaatatatattatat

SEQ ID NO: 200356 - DNA, 702 bp, Cannabis indica
tccgaggttataggaatgtaatctatgattttgtgcgatttggtagaaaatagaaaactatattggggcttttggaccacgttaaacgcttcttccagttacacagttatatgccttttggatgttgaccatgctagatggaatctcatttggacgggttgtttattatttactcagaaggactgatgactcttagatcttgccacttatgttaattgggcatgttgttgggacatagatatataagttgtatttattgttggaatgccacgagtttctattcgtactagttctcgagagtatttgagttttgatttggtgtggagagttctaagatttaaaaaatatacattatgattttttgcagaaaaaagaagtgtaatattcattttatttatcccactcagccctcacttatctaatcaaaaaatagaaaataaaaaactagatctaatatgatgtttagttgaatgtaatgaaattaaatgggtgcaaaaagaagaagatttgaagagggacagtagatgagaaggcgccttacaacgagaaagaagaagaaggaagtctggcaattgtgtagtttaggttattatagataaggataattacgataaaagtcttcaagaagttcacagataagtctttaaccttaaaaaataacaataatacccaatttaagagcaccttttaatgctaacaaaa

SEQ ID NO: 200357 - DNA, 1313 bp, Cannabis indica
atgttcttgtgtttttataaaatattgtaaaaatataaaaataaataactttaaatgtaaaaatatagttttttacaaaaattaatgttttatataattatacctttatttcatttccattattcataatatcaaatattgctcaatatcttgaattttttttatttccaaacaaacttatgtcttgaatttatttttttatttgctatgtatttacacgtcaaacagaaattaaactacataaatctcacaaaaaaaaaaaatgatcaaacaaatgaaaaaacatcgaattatagaacaaagttctccttacacttaatttatccaaaatgacacttaatagcttaaggtgtgtacggtgacaaaatagtaaattactttttaccaatttctttgttagggtaatggaaataaaataagaaaaaagtaaaaacaaaataatacaaaaataagtagtttgatagaccaaagaaaaatttatacaaataaataaaattaaaaatatagatattatacaaataaataaaattagaattttttatacaaataaatagaatttacaattttttaggttaaattttggagtgcacacttgtgttatttttaatgatgtatatattataattatttaaaatattttataattttaaataaaagtagttttttttttaaattaaatttttatcaacaaaaataagagtttaagacatataaatgagagacaatgaataattctcaattcaagctaattcaatattcccaggatggattctgaactttagtaggctatataaaaaagaaaaaaaatttgtcctcatttagaaaaaatattgtattttcaaaattaataaataaaatatgcgtctaaaaggaatttttttagcccatctatgatcaaggtcgccctgcattcacctatgtaattttatgaaaatttgattaaatatgtatttattagattaaaattaatcacttaaattaaagttaatgtgtaggttttctgtgccaacttttcagtataccccaaactatccctctcatttcaaaaagttaaaaaaaaaacaaaaatcttttttattttttattttttttttatttttccttctcgctctatcagtttctttctcacccaaccgaccaccacaaaccaccccaaaaattcaccaatcgcaccatcgcaccaccacccacgaccctccttttctctagttttctccgatgagtggccgacgacccacgaccctccctctctagttctctctggtgcgtgggtcgtcaacccacgaccaccaccgtgaaacggacagacaaac

SEQ ID NO: 200358 - DNA, 1189 bp, Cannabis indica
tattttttagattcttccatgggattgaaagttgtttttatttgctccctctccatatctcctcttcctcttgccaaacaaagaaatttattgatccctccatacaaacatatatagtaaaatggggaaggtttgagtgttagattgaacagatgatacaagcatgtatgtgggcgcctggtgcttttgaagttttttttagcttgtgctttatcactatcattcatcaaaccaattctcaatttagattgtattatcattctttacatacgtacttaatttggtgatttaaagagtatcaaaattttgttaccagattttatatataccctctaaaattttacaaatatattgactatttaaattaacattatatacaaatctagctcaaattaatttttctaaaaccaatatattattttgtacacttttttattaatttacattataaagaatataagagcaagtacatgcatggtgaaatataagttggagacatttatgtctaccctaattataatatgcaattaaaagaaaacacaatagtagtgatatattattcttttgttcctttcaattctccatcaattagctaggtttgtaaattttttttccttcctcctttacatctatttggtatgtttctctgattcggtctcgttttagcatcccgaaacatcgttttattacctagatggcgcttgaaaaaggctgaaaactaaaaatagactcaaggtgtttgggttagagactgatgaaatatgtccttgtgtgtgattgagatgggaaactcatggacacttaattaatgtgaatttagattggaattgattctcacaattacaattttcaaggtatcttgaattatataagaagaagcaaagtgagtaagtaaaaaaggaaacttattcttgtctttaattaactgtgtatatttcatttgggctgaaaaaaatagagccatttggtcacatgaggtgagaaccattaaagtgcttcttttacttgcaaaatatttgattaatgtaaatagattaagagaaacttacaagaaaaagatagaagtaaaaaagaccaagtttggccttcaaatttgtatagattttgactgttaagtctgttcatggatggagctactttagctccaaaggcggccatgacgcctgccaaaattttggacaaaaaaaaa

SEQ ID NO: 200359 - DNA, 1153 bp, Cannabis indica
cacccaagaagtattgtccccaaaaggacctatttccctattttttatgaagataaaaaagatgcaaaaatcagatagtcgatttgatacttggaaggcacctagattgacaaattgttaatcttagcattggggtgctcgggatttgaataccttgagtagtatactgaactcaaatgccaagaaaatatgagagaggccctaggtctttgagagcaaacatggcatttagttgttgagtaagatatgatacaacatgaggtgaactccctataagaaatttatgttccacatagacaaaagcatatgtaattgagcattagtgaccctgtaaaatagagaattatctaactttgcacacaaaaaaccaaaggagagtagggcacctgtgagtttaccaaaccaggcctaggtgcctgtttcagaccatagattgctttattcaatttgcaaactagatgaggtgaattcttgtcaacaaactctagtggagtcatgatgaattaataagtcgagaaatttacttagtagatttcaaattagcttattaggagcttacttacatagtcccatggtccccacacaatttgggttaatattatcccttaggctcagttaattgatttattaagtcaattacaattctaaaataagaatatatcttgtttgagaattttctctaaagttggacatatttgagaagtatagggagattagtgtttgtttgttaattaagactcgttgaaggtcttatcaataaatatattgaaatagaagtttttttggtaattattaataattgtcaaacagaaaaaattgataattaaataaaaatgattagataaattatattttggaaaagatagtattgtttcatttaaatgaaataaaatggcagaaatcaaagcctaaatgcgcacatgtagaactcggccaaagctttgatttatggtccattgttcttttctaaagtccatttaattctaaacctaacctagagagaccctataagtagaacatgataagcattgattgagtaagagttgaaaagtgttcttcagtattcttcagagagaaaaacactacaaccctagaaatcagaatagcttcctttgttctatggaatttttaaatccactatctctctctctct

SEQ ID NO: 200360 - DNA, 857 bp, Cannabis indica
atagaaaataatttttcccattttggaacaccacgaactatcattagtgatggaggtatacatttttgtaataatccttttgaaaaattcgtgaaagattatgtcattatacacactacaacaattattaccaatagtttcgaaattattagttgcgggaaaaatcagctgctaataatagtagtattagtggcggagtctagactccaccgcaaataatatgtatttttttttaatttttaaagtattagcggcggaacccaccgctattactcgcatctaatactattagcggcaaactccaccgctaatactgtcgctaataattaggcagcaaaaatcttgcccttccagttcaaaagtattagcagcgggacattagctgcggggtccgaccactaatacttattaaaaaaaaataaataaaatattatttttgttattagcagcgaggcaatagcggtaggccccagcactaataatagtctatatataccaccccaaacactcttcttaacttttgtctcccccctcttctcaaatttgtaactcccccgaaaccccaccttcttcaaccattcgtaccaccaccaccaccaccaccaaattctccaccttctgctagtaagtattttatttttttttaaaaaaaaatttcagatatgtagtttcttttttttttttttaagaattttagatatatatatagttcttatgttttaaatctatttatatatatgttaattttgtgtatatatttgttagtttgtgtatatgggtatatttaaatttatttctttggtatatatattttattattcattatttgtttctttttgttttaattttatattttt

SEQ ID NO: 200361 - DNA, 1954 bp, Cannabis indica
ctctctctctctctcttgaaatcattccctccccctctttctctcaatcatgacaccattctcctcctccttccagcttcttttttgtaactcaaaaaccctctggtcaactacaaaaaaaatgaggttttagagacgataatattagaggcgagtttcaggtattcttgtcgccgctaaaaatctcttttattgaagtgttcattcctatctcaatctcactctctcccttcacactagactagaccacaatgagaatgtcggcgcagtactatcgccagccctcctagcccagccagctctagtgtcacatccatgacattcttctaccactaatatgatgcttccaaactcctccagcatagatgccacatctaatcacacttgtacagtcactcctcccattatatttctaactctcattctcgtctctcttaatctttttatgtatttatatataattacatatttatgtacgtaactatacaaatataagcatattggcataatttatatattagaaaaagggtaaattgttacgtactgtttagaacagatgaatatacaatataattacatttatatatatatatacatacaatatatataattatatgtgtatacataccatacacatttaataaaatataaaatacgtacgtgtatactatatattaaagtttagatttttaccttattatcgaaatccaaccactaataccgaccaaaatctagttaccatgcacaaccacaagaacacaatcttaacaatatgggaaaatcctaaaaaataaaaataaagcaatttaaattcataaaattattagagattaaatttataccttaatggacgttgagattcgacgatttcaccaccaaaagcggtggccggagctacaaccaccacaaccaccacttctaagctcggtttactctaaaaaactaataaaagacaatcaaattccgatgatatgtttttggagtatgaaaaatgcaagtttttttttttaaaaaaaaaaaataggtaaaaacagatgaaaaatgaagaaatagggagaagaaaggggtggttgggcgagggtttcgtaggtttgagaggaagaagggctactggttattttaggttttgaggaagacgatagctggagagggttatataaagacatatgcgtcggttattacaaaataaccaatgccatatgtgtttttattaaaattaaaaaattacctacggagttagtcattacaaaataactaactccgtagggttatttcatcaaaattgaaaaaattatcacctacggagtcggttattacaaaataactgactccgtatgtgtttttattaaaattttattaatttgctgaaaaaaccatctctaaaaacttgttttgtagtagtacgtaattatacgataactattaattagttttcaaaataataaaaaatatataaaataattattatataaaaatggtagtttgttatattatatgacaacttattagtttctaaataaattttaaggttagctaaatgtattttaaattataagctaccataatataatttaaagataattaattaattgctaagatatatacaaacaagttttagaggtaaccaaaatgtatctcaaattatatgatataaaaatcaattttttttttctatgtaaaggtaattaattggtttcttatcaatattattattaattagtaactaaaaaagttacttttaaaaacgtaagaaaaaaaaaaaaaaaaaaccaaaaaacgttagatttagctgatgtgcacgtcagttttaataataacattattattattgtaaattaaattttttacatcaaaaaatttgaatttccaataatatgctaaatagcttatatttgttgtataaattaaaattatttggataccaaaaatataaaaaaaacatatcaatgcacac

SEQ ID NO: 200362 - DNA, 940 bp, Cannabis indica
tccagtttatcaactggattctccctttaacgagttaaattgaaaattttaaactgatttgactgagtttgaattgaaattatataaactcttaacacttaactaaaaaaaactatattcgaaacatgtcaaacaaaagatttttccaattctaaagattcaattctatcataaggtagcacaatgtgctacatgagccttttgttagccacaaactaatgaactcctacaatttgaaagtggtaaggagatcacttttttgcgtttggagattttttgaatgtttggttaaatggaaaaaaaagtagaaggaaaggaaagtagtgaagcatagaaaatagagaagaatgaaaagaaaataagttatggaaggaaagaatgataacagtaaaattacaatttaataaaattatataaattaatttttatcaaaagtaaggttaaataagtaatttgaatttttattatgttatggaatttttcttctcaattttttctcgaagtttagaaggatgaaatttggtggagttcactcatttttctcttccacactattttcttgcctaacaaatatacaacttttcctgcttctctttattgttctctccaaagtttttctttctttattgttctccaaattcgcggtaagtgaatcgtgtcgtatttgacatgtttttattttgtatcaagtcgagtcgacctgtgtctgatttttttgatctcagtctgtaacattcgtgttcgtattcgtatgtcgtgtcgaaatccttttttgccacccctatcctgttacaaattcgatatccaagtcactaggttgtattaacagtagctataaatgtaaatttatcaagagtattagctactacagtaatcgttcagaacaaaaaataaaactcactttttccactcctcgacaaacatgaattttctatgcctt

SEQ ID NO: 200363 - DNA, 536 bp, Cannabis indica
aatcacttgtactactccatacaaaactagtggttagcaccaacgtaagtactacaactttgatcatattgagaatacttttaagtggtgtgattgagataattatcttactatgggttaatgcagatctaattagttagattatatataaaaaaatgctattaaaaacaactcacctttttcttaattagggaggactttgaaagtcaattagcacacaacacaatgataagtttttattagttactaactgctagaaatggggaagtcctttgacaattacaattagcaatatatattaataatattaggtttggtggcatgtatgttgcacatggggatcattttagtatgttacagattatattccaaagttcattgcatgttcaaacccaagccatttctgtatattgagatttaattaaccactacaaaaccaactatctccccttaaatatagtggtctatatacacaattgaaaaaatagaagaagatggaataccttgaaaaccactaaattcttggctcacaacta

SEQ ID NO: 200364 - DNA, 894 bp, Cannabis indica
attaagaaaaagtctcaggatagacaccaacttagcagaatactgaatgcaacttgatttcttttaaagaaaaaaaaaaatccactgcaacagaaaaagaaaacaaaagaaaaaaacatcttcaggcccaaacgatatcacaaacaggagaatagatcaacatacagtcattgacatcacgtagtgcaatggcaaaatatacttcaatgagtcgaggtgctatcttcagtacatgctttagcctatcagactgagtggtgttgattgcagcctgcagtgccgcagccatcccaggggagttccattggcgttcctgaaatacaacaccaaacaatcaatgtgttatataaataagaatccaaaaagaaacttcacagtatgaataatccttaacttgtgtggattaaggttaatcaaacctgctgctttcaaaatagatgctttcaaaattatattttcacacaagacttgaatactttttgcaagctcagacaaataattcatgtttaactcacaagaacaaaattacaacatcaacgagatatacaagtgccaatccacaaaatttactttattcctcgtaatgctacatatattacaaatatcaagatgcaagaaaagtgaaaatgaaacattatcatagcacagcagaagtaagaaataaccaatgagtagaaaatagatacaggaaagagttatttaggaggcttgtttctgtaccaattcttgaacttcagaaaaacaaaaagatgggaatgataacataagactgttgatttcaatgcgagtacaagaagccaagttatataaaggtagtaaggtacttaacgagcaagtccatcatttcatcctttagaaggtcaaggacacaggatcagcaacatcaattgtact

SEQ ID NO: 200365 - DNA, 1035 bp, Cannabis indica
tttctctctcaattcatttcttagcatggtatcaaagcattttgttttctttatttgttctagatttttctctcaagaatcttcatcattattctctttgattctttgaagcttttttctctagatttcatggatgatcttcttctagttccagggaatttctctcacaaactttctatgaaactcgatcataacaattttcttctttgtcgttctcaggtgcttgctacagttcgaggtcatgatctctccaatttcatctcatccacctttcaaacgtcaaggcaatttctcacagaactggatgagattgcagtttctattaattttacttattctcacaagatcaattgttgtgtgtgtggttattgtcttcgatgactgatacgattcttactcggattattgatggatgatatgattcttaaccggatttttggttgcgagtgttgtgttgttgtttgataagttcttgaacaattctttgcttctcaaaccaatgccaagatcgatcagtatgagactcaattcaggaatttcaagaaaggcttatgtaacaatataaagctaacatgtgtaacaaagctagaatatgaaccggcttaaattatgcatctataaatgcattcagatgactcgcctcgagaaatacagttagtagaaatacttaaactcgttgtcatatagacaatggtgagacatgagtaataactactaattgatgagaccaacgaggtgaacaagtccatctcaagataaacataatcataatggtattgtttggaacgtattgataatgagtttacagctcattgacccacatactcatgagtatgttacaagaataaagacaacaacttcaacattcgctcttgtcgcgttgaagtaagcgttttgcatatacttcactcaacttttaaggaagggtgcgaaatatactataactatacacttagatattattccacggagatgtttaagaaaactgttaattgaatgacgaggacaacaaaacacagtcagcataaccgtcta

SEQ ID NO: 200366 - DNA, 893 bp, Cannabis indica
cagaggcgaattgaaagctaagtagtggtaattctaaggattccctaaaaatagagatgtctactaaaagaacctaaaaaacaaaaaaaaataccatataaattggtcaaacttaaaagtatcatatttaacataagaatttttaaaatctcataataagtgtaattttcccctttcttttcaatgaatttcttgtatcaagttactaataattatttacttctcttcatcatagcataattaacatggtgaagtcgaaaccttactgtatatctatatttccacttaaaattgttgaccaaagaccaagaaaagtaacatctcacatctgctccatttctaaattcaatagaaaacatgttgttgaaatccattaacacaatctgggtactccatgtcaaagaatttatcaagtaaaacaactaagacctcacaaacatcggggtaaagctgaaagctttccctaacaacagggtgcattgatcttggccaaactcgtgggtcgacaagctaaaaaaatcaaacagtctctgttagaattttggaataaaatgaatgaggttccgaacgacctttaagagaccacaggatcctttggctctcaacagatcacaaacggctattttggaccggtggcatttgggctcacaacggatcacaagtggctctgataccatgttagaatttgaggataagatgaatgagattccatctcgaaaccaattggcaatgggaggaatagctcattcatcatatatatcacaatttattttcacacattagcaatgtaggactaactctaatagtctctgcatatgtcccatcttaacaaaaatcttctcaggtttcatctcccttaatagggtcaaagcccgtttctcctctctctctct

SEQ ID NO: 200367 - DNA, 1292 bp, Cannabis indica
cttgaataatcgatttcaaaagaacctcatgccccagaggagaaatgtttcaatttccacccaaagagcttattccatatttatccttaatagattgaaagagcccactcttacttttccccgcaaagcacaggagacccaaatacttatcatggcaggacaccaactgaacacccaaatcatgagctggagcacacacaagtccctagacatacgaggagggaagcacacaacggatttattaaggctagctagctgacactaaaacgtgaccttgtggattattactgccaattttttagattggtgactagtctgcatcaatcctaaatttttgaggacttttgtcgcaattatcccttaaagaaaaaatcctaaatattatttaaaagattcggaatgatcattctatttactcatgacaaaattgaatcacttagaaaaataagagcattgtgtataatctctcccaacaaatgattttaactaaaaaaaaaaaaagaaactttgaagtcatctaatgtatttttcgagttatgaaaagaattaagcctttgacacattaagttgtagcaatatttattcagttttgatgagacgttattagatctcttttaacttttaagaacaatcattaaaaaagaacatatatataataagattattaattagcactaaaataattttgtgaaatatatattgggatgattctttgtaaccacgcaacatgtagaggatgcccaccacaccaatccccattcccaattggaaaacaatttataaagtttaaattatgtgttctcttctctaactagttgccaattttgaatcaaatttcaatcatattatggggctaatgtggcacatgattttagacctttgtgagggcctagctctacctattcaaaccattaaaagaagaaaaaaactacatcaaaacccccattttaacttcttttttttcttgaattttatataaaatttcactaatttgattagtttttgagtaatttgcggcataaatacttacgtttaattttcatttgcaaataaatatttaagtttatttttttggtgataataacacctaacttatatttctagaattctataggtacatgtccattaaatggcatgtcataatctacgtatcattttttaattggtatatttaaactaatttctttttttaaaaaatacaaatttaatgacttaaaccaatcaggaattgtcacgtggtaatttacttaacacctaacagccaggtatctacaaaagttttaaaattataa

SEQ ID NO: 200368 - DNA, 1775 bp, Cannabis indica
attagttatgatcatatccgagtttatacttgcttcgaatattgtgagtattttcttcacgaatcatgagcaagattttcataagaaattcaatatcattttcatcacttaaaacatgatgatccttttaccttaaacataaaacattaattttaaatggtttaatgataaacgcggcttatgtaacaaaagctacacgataatctttcacgatgtaacaagtgtagtataaatattacaagcaccttcatatgctaaatcctcactttttcactaaatcctgatgaccctataaacccttaaagataaaagaagattttatatgctaaatcctcactttttcactaaatcctgatgaccctatataaataacatcatttaaaatcaatctatcgtaatgcatgcaacatgcatacgtgagaacatcatcaaattaataaaattccaattacacaattcataatatagtcaaaattaaccctaatggcctccaaaaagtatttacaatattcaaacactttactctatatttattaatcctttaattttgttattattaaaagcaagtcaagaattttctttttcttatacatatgttcttttctttttctctttttcttttcttttcttttcgtctttgtaagttcagtcattttcgtgctttattattcatgtacaatatattgcaagttttcacacattttactcaaataaatagtcatgacatcaccatattagtcttaattatcaaaattcaacaacttaggtcttgtctcatttacaataattacaatttttatataaatgatttatttgttaattttgttgaaagatatatatgtagatgtgaaggaatttcaacatcaattttcatttggaaaaaaataaaagaacaaagaaaagtgaatgaaacttcactattaaaaaaagtgtgctagtaatcatttgaatattggattttttccatcaccatatgaaaacttttaagatacttactctaagaaccgaatatatcactactacaaaacaagcctttagaggtgtttttttcagcataataattaataaccgacgctataggattggaattttttggaagagaatttgacgttataaggccgggtccagtgtcaggtgttcaggtttcggggtcccaagggtcggcgtcctgagaatcaaggtctggatccccaacgttagaccctttgtaaatattataatacaaactaatacagatcattttgtatgtattaattaaataaagtgatggacatcatataaaatttttagttataataatttatacaattatttttttgatcatacattgttttttttttgtgagagattcatacatacatagtgtttcttgttatttaatacagtacacctcttatattatttttaagttacaacatttttatattttattttcaatttcattttttttactatattctgatctttcaatgcctataaattaaacccaacaatgtcttctcatttcatgtctcaaatttcttaatcttaactccctttcttcttgtctaatatctctctactccattctcatatggtgtggtgatttctcaggctgtgaaggttttcttttctttctctctaattaatattatatataaaaacttcattgagagtatcattcatcattttgttgttacaattaatgattttatcatatatttgcaggtgtattgtaacaagatgtacttttgtccaaacaaccacctattgttcacaaaatattatgattatac

SEQ ID NO: 200369 - DNA, 1207 bp, Cannabis indica
gtggtgggattagaattcttgtccttctaactatatgttatctagctagcttaaccatattacacaaagttaatattatatgcctatatagatatcatattttaatacaaaaatataacatatatatatatatatttttctaatttttttttatttttggaggcaactatcccgcctaatccatattgagcgtacattaatgatttaatcctaagaaataacactaacttaattattaattaggcctctttaatggctaaaccatgtaaagctgtttgttgtttttcttttgttaatttttatcttctaacaataaatttctctcaatgtagatgatgaaaccagcatcacaagaaatcttttttttttgtagaagctagataaacagaaaattaaatagattacatcgtattgtgtagttaattgcagaaggtgagttagttaggttatggaaagaaaaagaaagatcaaccatattttaaataattatttattggatacattgatcgctattaagtggacacttaattaggctttctcacacattaaaatactagaaacaagttgtacacatattgaaacattaactattttattcttaatcaagaatgagttattgttatattttaagagcaaaataaaaactaaaaatattaatattagagttttttttaaatattttatattttctattagggttttactcacgaaatttttagctacctcaggttgtttttttcagggcttagacgtggcttgtttagggttactgtgattatagtcttatctttgtgacatggttgttgttttgtctttttgttcttcattgccttgtcgttatattattgctagtggttgggataacaaattgtggctgaaggaattgttagtggtgcagttacgtagcttgcataatagttggatgctcaggctaagaggttgaatgaaattgctgttacagatggctcgttttttttttattctaattcttattgtgttccaaagaaaaagatgtcttgattaggttggatattgatattaataaaattgcacgatttcttacaaaaattaataatgtactttattaagaaaaaaagaaaaagaagaaatgacttaattcacgtactgctaccctatatgtaactataaaaatggatataaacccatattataaatatatatataggcataggcggacccacattgt

SEQ ID NO: 200370 - DNA, 1497 bp, Cannabis indica
attattcaaacagagaaggcgatgaagaattatatagcgtacctataaatttcaaacaactaatttcttctccgctgccgaatccaaatccgagttttgaaatttttgatagtatcgtaccaaatgcgtttccgttaccgaatatcgtaccaaatctgttttcgatgaattgtatagagccgattagtgttgatccgtcggaggagaagaatctaacggcggaaatgatgatgatagattcaacgaacaacaacacgaagatgatgatgacgaagagaacgagatcgtcttcgtcgtcgtcgttgggggaatcgattgagaagaggcaaattagaatgagtaagaatcgagaatcggctgcaaggtccagagccagaaaacaggtttttattttctttgaatttgaatttgaattttttaatagggaaactgttttttttttattttattattattattattattattattttatgaaggcttatatgaatgagttggagcagaaagttgaaaagttgagccacatcaatgaaaagttgagcaacatgaatgccattcttctacaaggggtaagtaagtatttaattacaatctttgaaaagttgttaaatttcttttataataatattcgttataattatagcatcatttctataatttttttaaaaattctgaaaataaaattttctatatttcagtttatcgcaaaaaatattctaactataatgaaaggttgatgttataatatatgatttgcttaatttttatatatattaaagatgtttattactaattattagtgtaaatgaattattaagaaataataattagctaacaatttgataattataaaatttggattaattatttattaggagaaggaggcagagagagagaggaagattggtcggtggggaggattacaaagctttctgctccatacactaatttccaaccaataccattacttaccaataccaagtattcggggttttttttttgttaaaaattcttctttaatatttgtaccaaatataatatgtttggctcacaagagagctagtggccaacacaatgtaaaactataaaataatatatattcttttttttttaatttattttacatgtaatttttttaaaaaattaaattattaagaaggaggtgcatggcaccatccgcctccattaccccatatactggttttttaacttttacggtataggtttttaaagtggttgcagccctagttgcaataaggtttctataagattttttgttgcaatttaggttgcagtcctagttgcaataagagtttctatgtaaaattttgaaaaagtacaaaaaaaaaaaaaattgttttaaagtgtaaaaataaaaaattaccccatatactatttttttaatttttttttaaatttacggtttgagtttttaaagtggttgcaaccctagttgcaatagaggtttctatacgtatttttttgttgcaatttagg

SEQ ID NO: 200371 - DNA, 862 bp, Cannabis indica
atatgaacaaagtttcgtacactctatgtcatgataattaccattgtcctatacattattaccccttcctcttcctttatataacaacttcattcctctcacatcttccttcaaaatcattctcaatattctctctttctctctctataactatatatatattatatatatatatatatatttcattttctctctcaatggagttggaaagtgtgttgaaatttcttgagaacaagaccattttggtgactggtgctactggctttctggcaaagagtaaatttatacatatatttaatatactatttttttttgttatattataaataattatatatttattaataattaattgtgtttttatttttgtgtgtggcgaaattaatcagtttttgtggagaaaatacttagggttcaacctaatgtgaaaaaactctaccttcttttaagagcatctgatgtcaaatcggccacacaacgtttgaatactgaggtacgaatttataaatatattatcaaaaaataaaaaaaaataaaatcgtaaaaataataatcatttatgacacatttgaactatcgagaatgttatttcgtgacagttttataaatattgagtcgagaatgatattattggtatttttcgattgttgagattaatttttttttcttaaatatattttgtaaataataacaataatgtatgcagattctcaacaaagatttattcaaagtattaaaggaaaaaatagggtggaaatttcaacaattttgttggtagaaaaaatatgtgtgatgggaggagacattacttgtgaggatttgggagtagaagactctaatttgagacaacaaatgttgactc

SEQ ID NO: 200372 - DNA, 1377 bp, Cannabis indica
gggcattactatagctattagctatagtgtatccttatccgttaaattattttttttttgttaataatcggaaaaccctcagccacaataaaacccaaaagttttgtgcttttcattgaagattcatctattatattgatgcaaaattgattcattgatcttatttttttatttttacacgttaaaataattttttttatatatatatatatatatttatagaattttatatagaaatacatattacaactaacaaagcaatttaaattataactaaaattcgtataacaactcacataaaaaataccgaaaaaaccatttaaaaaattcaaactgaaaatttgaaaaaaaaaaaattaaaaatagtatataaagtaatttttctttatttattcagttgttattatatatcataaaaactattatgttattagaaaaatattaataagtcttatattagaatatttttacagtataaaattataaattaattttacgtgtatgaatataaatatttattataattgattctaaatcaattatttaataaacataaatattttatatattgtaagttttcgattaaccaattaatttattttttggtttgatttttcgaattaattatcaaaatattcagacaattaatgtggcgcagatactgatggagtatctcacctataaatataaggtcttggtcctcgaactcctcactcattgtgtacaaacaataaatttcatctaaaagagtagagagagcttggaagctcaatcacccaatctgaagctacactgagattgaattttaaagattaatggctagagatattatgatctctttcttcgttcatatatatatatattcacttgatttgtctttattattctgcttggcaaatcgatcctatatgctttatttttcatataataatgtctaacagttacccagtatctagccatggtgatgtgggcatcaatgtctgacacgtggcaagaaagaaagcatcccaaagttgagtagtccctagtcatagcagtcgacctgggagggatccctagccctgcgcccattttgactttgggaactccagaatgggtatttagatctcgctaagttgtttctaactcaccatctttcagtattttataccatgaagacaagaagaatccaagtccaaggcctggaagctgaaaatacatgaaacagcacccccggaagtcagcccgggtgcctagtgcctaagttgacattccaactagggttttggtttctgggtccgtcttattgtaaatggattaaacttttttactgagacatgaattagacctgtcacgaacatatttaaggcaacagcatcagaatcggagcactttcag

SEQ ID NO: 200373 - DNA, 1220 bp, Cannabis indica
cttttgaatcatcttcatcaacagcttctaaatgatcttcatcaacatcttctaaatgatcttcatagacatcttcaccaaaagccagaagttgatttttagagccaaatctcatactaggacgcatgtcctcttctacgtcatagtcgatcagcttagtcacaccattctcatcaacaaactcagctgaatatgagtttccatttcgcctcaaactttccaagaacttgatatgcacaggatcatacacgtcctcttcatcagacggagcagcaacatcattatcattatcaatatgatcataatcaccatttttacttctaatgtttgaaaaactaggaggtttcaaaagctctgatttttctccagctatgttctttttgattgcctttgaagctttgctgcgagattttgggttgtaacattggttactcattctttctctcctcaaacgcctctcgacctcaagtcagagtcattatcaccagatcctaagctccctaaccgggcacttgttgcgttgctgttagagttttggttgaaactttggtgatcggtgcatcttctcgttagtcgcctctgcagcctaacatcagtgttttcatgactacactcctgactagttgtactcccaatttggacactccttcccttggctgcctttccattccctacctttctcttcgctgcctttccattccctgcctttctctttgctgccattccattccctgcctttctcttcgctgaagtatgacccattcagctcaaacaatctaataaccgtttctgaaatttttccaatcaaaaccaagagaaactgtaagagaaaaccaaaacaggaacacaagatcagttgaaaacccataagaaaaggtctaaacatgcagaatgatctaaacaaagctctaagctcactagattttcttttttttacaaagcataatacaccaaacaagaacatcaaaccgtcttacaacaatgaccatgccaaacacgcttattgggcaaagccaatgaataatttgatagacttttaccttgattaaccatttgtatagaagaaagacactgacatactaccacataacatcttatttacaacctaatagaggaaattacaagaaaaaggagagcacaaaattgagtatgaaacttaaacacacaacaacacaaagaagcttgaatacacattgctattcaagaaaaaaaaaaaaaaa

SEQ ID NO: 200374 - DNA, 1101 bp, Cannabis indica
ggccataaaagttagttcatatacatatatatgttataaaatacaacatatatattattcaattacagtaatttgattttattctaattaatttcaatttgtgtagaggccacaccaaagcttgttcttcaattaatggatgttaaaggactcaccatttcacatgtcaaaagccatctccaggttcatccatttctcttttaattttcctaaaaatatttaataattataattgatttttctttttgggatattttactcttttttgtctttgttcgctttctttaatcatatttttatttttggggtttttcttcttttgtttaaatcagatgtatagaagcatgagaggcgatctggttaaacaaggtaatatatataattttcttataaagacctagagagctatatgatacatatatctatatatatagactggatatacctattatatatatgtactttccattaaggtgcttctacaaagcttaaaattaaattgtatgacctttcccatctttgcatatataaacttggcttcatttatttattattattggttcattttttaaataatatttacactatgccaaaattgggtgagagaaaaagatcaaatatctctattcaaatcttctaatattagcattattatgatgaaaaccacatcctcagtcacatccatctttattattttatttatttattattattattaattaacttattaaatgttttttcttctatttttactaccaaattttgtattatattctgattggttttttgttttgttttggggtatatattcagacagaactagttccaaccattttcaaagatcaaagacaaaatttcaacgaggaatatgaacacaaccgtagaataataatagatcatcatgatgaaaatgatgttgttgatgatgatgatgaagatgaagataatcaatatgaatttgaatatgatgatgatgaagatgatcaagtaataaacaacaatgtgggttttttaaactcatcttccaaacgcattagagaatcagattctaatcactccatttacacttctctcccttacaaaaacggtaaaaaaagaaaa

SEQ ID NO: 200375 - DNA, 1856 bp, Cannabis indica
tactgtggtgcttttgagcatactttttctaagtgtgcttcttttcttaagcgatgtgatgatggtgttgctcctccttccctcccgtacaaggataatgttagggctcctttcaaatcccactttaagagggatcccttcgagctggccaactccattcccttcgaggagatgaaccttcccactctgaggcagaatcatgatcttcaagatgctgttaatcagttcttgtctccagctgcctccattcccttatctggttttcctcaatcaccatctcagcatcaaaactttgcagctactcttgctaaccaaactctggtctcttctcaagactttcttcctccacaagcaactgcctcctcgctcatttcgtaccaaaatatacaaccatctgcaccaccatgttctagtcttcagagccttctttgtgctgtctctcaggttactatgaacgaagctccttccatcactcattttgacaaggatcaggggactcccacccatctgccttcagcttcctcgactgtttctaaggataaagggaaaggcatccaagttccctcctcctttgtgcctcaggctccttctaggcctctgaatattggaggaggcacgggtaccaaacggtcttttgctcgtcaagagattgctgttggctcctccatccgtagcatgttgaagcgggcacgagctgctggaattgctgatcccaatcctcctgatgattctgaccatgttgtaccggcgggtgttgctgagcaaccccgccttgaaaaatgagtcttataagttggaatgcccggggtttggggagtccccgagcattccgtaatctctcccttcttgtgaagcaacataggccttgttttctttttgtttatggagtctaagcttggggctggttgtagtcatagtattaagtctaagctttcttttgataatgttttggaaattcctaggagaggcttagggggaggtttacttcttttttggaatgctgatattgatgtacatattaacaattactcctctaatcatgtggactgccttgtatcttttgctgataattttaatacaaaatggcatatttcttgtttttatggttccctttctgcttcggacaagccccatacttggactttactgcatcgtttatatgacatagccccaaatttgccttggttcattttcggggattttaatgattatcttaccatcaatgatagatctagtcctaacagccctcctgcttatgctatgcataattttcagaatttcatttctaagtttaatcttacccctttaccttacattggtaataagtttacttggaaacatggcaatctttttgaaagacttgattggtgtattgccaatgacccttggtttcgacttttcccttctgttaccctccatcatttaggtttttttggctctgatcatagggctctcaaagttgtgcttaatgaccctcttaacaagaaccctcgtagcagtcggttcatgtgtgaaaacttctggttttctgagcctgactttcttcatgttgtagaggatggctggaatagtaattctccgattcctagtaatctcagtcctcttcagcacttcatgcatagacaagagtcttgcactagagtgattaagtcttggagtacaaacaaaaataaatttaaacatcgtatcgcagaaatccaggatagccttgacagtgtcctctcttctcaacctttttctgatttgcatagcaaacaggctaaggagcttcaatcccagcttgactctctccttttaaaggaggagattttctggaagcagcggtcgagagttgactggcttagagctggtgataa

SEQ ID NO: 200376 - DNA, 701 bp, Cannabis indica
actaaaaatacattacatggcacatgcctgtaatcccaggtattcaggaggttgaggcaggagaatcacttgaacccgggaggcggaggctgcagtgagccgagatcccgccactgtactccagcctaggcaacagagcaagactccgtctcaaaaaaaaaaaatttttttttggagagttttctgtagcaaatggaagaaatgggtagcaatgatgcaagaaggaggtgacccaggagtccacgagctgaagggataaggcaaagtcgcagcctctctgttaccttacctggggaagaagtgaggagtgttcagatatcacgtacacagtcagggagccctccgcttgttcctgaggctcatctaacatggcttctgcctctgggggcaagaacaggtggtacaccaagagcaaaacaccattccatctccccccagccccaaagaatgcctaaccaccccttcactcacattcagctgacacagtggtcaggcttgggtaagccaatcaacctctctggccctcagtggactgggctgaatcccacagttcctcattcccagcattccaagagaggttttggaagtaagccaaagcatgggaactatgcacttagagatcagaaggaaaaagagggcttcacattaaaatggtgtgctcatccttcccataccttgcacactgcccgatgacagggcct

SEQ ID NO: 200377 - DNA, 2584 bp, Cannabis indica
aaagtcactctcttccctttcctttatccagtacctgtgcctcccaacctcttgccttgatccatactcacttgtgagggccctctcatgttctttcaaaaagatggtaataaatattatgtctatttcttggatgactatagcaggtacacttggatatttcctttaactctcaaaggacaagcctttgaagttttcattaaatggaaagccttagttgaaaagcaattcaatcttccaatcaagctgttcaggcagactggggtggtgagtataggccatttaaaagattcttactttatcaaggaattcattttcaaagtccttgccctcatactcatgagcaaaatggccgtgctgaaagaaaacatcggcatattaatgaaacgggccttaccctattggctaatgctggtcttgacttgtcctattggtggcatgtatttagttcgactgtcttcaccattaatagacttccaacaagagttctgaatgttgctactccttatgaaacattatttcacatcaagcccgattgcaacatcctcaccatttggatgtgcttgcttttcacatctaaggccctacaataagcataaacttgatttcagaactcaacaatgtattttcctaggctattcctctcatcataaaggatacctatgtgaaaataatgaaggacggatatatattgcacgaaatgtggtgtttcatgaggacttttatcctcaaaaagctgcttctgcatccacttcagcagcaccatcccaggtattaacctctgctcatacacctttttcttgcacttcatccttttttactcaacctagtacattttctaactctgattttaccactagtaacagtgttgctactgaggacatgcctgctggtcctatgcctgctgtttccagatcagaaaataacaggttgcagcctgttgatgctgctgctatacctgttattggtgctatcgatgccacacaagctgtgctacaaccacatagtcctattttacataacactccaaatgttgaaccacatattgttgttgctcatttacctgaaataccacaaccagctgtcccaaatgaccacatcatgcctgctgtccctatgtctgcaccacaacagaatcctgtcctcatacccgatccaccacaaaaccaagagttaatacctccaaacacatctccaacactctcctccatccctaatcaacctaccatcaccagagttcatcccatgaccaccagatcccaaaatggaattcacaaaccaaaagcatatatggccaccaaacaccctcttcccgagtccttactacccaaagagcctaaatccttgaaagatgctcttaacagccctcaatggtttacctccatgaatattgagtttacagcacttaagaaacaaggaacttggactcttgttccttatgaaccccatatgaatattattagcaacaaatgggttcatcgagttaaactcaacagggatggctccttggatagataaaaatctcgtttggttaccaagggatatctacaaactcctgacatcgattatgaggatactttcagtactgtggttaaacctgccactgttcctattgtgctaagcattgctgtgactcacaattggccagtcaaacaactagatgtgagtaatgcttttcttaatggcaacctccaagagaccatttatatgcagcaacgtccagggtccattgacaaagaaaaacctcaccatgtgtgtctattacacaaagcaatttgcgggcttaagcaagctccaagggcatggaatgacaagctgaaacaaactctttgtcattggggttttcatgtgtccaaatcagatacatccttattcatacatggctctaatgacactcttatttatctccttatctatgtgaacgacattctagtaatcgatcctaactcccctctcatccactctatcatcaccaatctaaatactgccttctccctcaaagatttaggatccgttcactatttccttggtgtggagatttacagagatgacacctccatgtacttaagtcaaagaaaatatattgttgatttgctaacaaagctacacatggaaggagctaaatcctgtccaaatccagctagctccactactaaactttgtctgaatgatggtgatccgtttgctgatattacactctatagaagtactcttggtgctctacaatatcttagcctcactcggcctgatgttgccttcataatcaataaactgagtcagtttatacatgcccctaccaatactcattgggaagcatgcaaacggttacttcgttatctcaaaggcactatatcacatgggttaagcttcaagtttctgacaatttaactctccatggatatagtgatactgattgggccatatgtgtggatgataagagatcgacaggtgggtatgccatgttcttaggaaaaaacttggtgtcgtagtctgccaagaaacagcaggttgtggctcggtctagcaccgagagcgagtttagggccttagctaatacagcagctgaaataaatggattacttat

SEQ ID NO: 200378 - DNA, 722 bp, Cannabis indica
actaaaactagataaatccatagatgtagaatttagacctatagaaactctcagagcatcggtttcggtatgagtaataggaagctataattgtagagcccagttaatactatgaaaaagtgctttagcctccattttatcttatcgaaaacatccttgcaccgattttgataaccggttttgataaagcagcaactacatgtccttggtgattccgaataatcgctcctacccccaatatttcatcctgtgcattgactgccacatcaatgtttaatttcagccctaaagaatgtggtggtctccaatttgttccatgtggctgctgtaaagaaggggagacattcaaagtagcttggtttctagattggcacgagtggggttggaacagagattgtttgttaccatttgtagctctcggaaatttgtccatgtatgtactggcaaaaagtataatatcctcttttcaaactcccccatgtagaaccttgtttcttctattctaaatcgcccacataatgtatattatcaattcaaaatctgattggaatgtagagtggataagtggatcaagtagtcaccattatacatgttgtgagcactgcgatagtcaatggtgaactttgttcgcttccaaatcgacttcgctctatggcaagtgaataaagcatatccaattgattctcaagcatttgtacacatggaacaagatgctgaagtaa

SEQ ID NO: 200379 - DNA, 2389 bp, Cannabis indica
taaaagtctaatttgtagtagtgcacccttaatcaaatgatcaggtcgaaggaataagacacttaaagacaccattaaaaaaagacttgaagaagctaaactggccagaggaactactagaagtattgtggtcatatcgaacaatcgagaaaataacaactggacaaacgccattctctatggcctatggttatgaagctatgttgcccgtagaattagaacctccgtcccacaaaatattggcctacaataaagaagctaatcatgctctcctattataatcacttgacaaaattgaagaaaagcgagcctcagcaaaccttaacttagtagcacatcaacaaaaggtggctcgatacttcaacaagcaagaaagtaaggaaattttttgtgggagatatggtcctcagaagagtattcctgaacacagaagatagcatagcttgtgtgctcagaccgaattgggaagcaccgtatcaggcggtcaaacttctataatcaggggcatacaaactttggatgtatgacaaaaatatgaagctcgttctagtaacaaggtattggaacggggaacatttgagaaagtattacaattaaatgtaccaggtcggatgaccactttaggtacacaaagcaagaacatttactcttaagtagatggccttctggacggatcccgtccaaagatttggatagaatagttaagtactcaagtcagatgaccacctttaaaagtacaatttctttttataagtgcaattattttatgtttaaattagttaaagatcagattagatcatataatagctttatgaatctaagttactacggtaacaagactttctgaccaagaaatcaataaagatgtttattgaaattctaattgtgtcaattgtattagcgagttataaatttaccataaaatgtgtacaaaggtctgctctacccaaacagctgaacagacgaaaaccatacttgtgaaatgcaaatgaccaagagtaataagtcttcttggtcacttaggggaaactatacccttacaaagcatcggtaatagtaaataaaaagctaaagaaaaacataatagtttgcacaaataagtatcaaaataaggggaagtattcattacaaaagataataaagcacggtaaaccaaggattaaaggctgctcggtcatctagttgtttcaaaaccaaatgaaatatatcccaagtttaaaaaccacttggccgatcatttttgtctctaataaaggcctaagggaagaactgataaaaaaagagaaaaatgtttcaaatagcagaggttccaggctccttgtacggatcagctgggtctgaaggggccaaaggctcaatatttttaaggtaggggtctcagtgccttggtcagttggagctttggaattggctacctcaaggctttctttggttgtttgaccctcatagtaattaagatatgcctctttggaatctttgaggtaaataaaattgcctgatgggttggcattccgaaattcatagaaaacatccaaggcaactgtttctaggttttccacctccttcaagagctcctcttccctcgtcttcctagacatgacgtcctcttccaactttgaaagaagagtgtggagactctccctctcatctttgagcgtattgacatccttggataaggcatcattgtctgcctcgagcttggcgattgatcgcatttcataaatcacctgatttagctcgtcgaccaagttgttggcggtaaggagcttattgttcacctctctgagctcattcctcacgtcctggactttcttgttggcggcatcctcctccctttgcaatttgttggtggtggcaaggttctttgccaccatggatttggcgcgagagtaggcgtaagccatcttcatattgacctacatagaaaaaagttaagacctgcatgggtaaaaagataagataaaaacaaagaagaaaatatttccccgagcttcctccttcaggactccatccattaccacccccaacgatagcccattgtcttccccaaacaactgatcgctcacctcgcgaactgaccgatcaaggtagtactggagcatgccctttcccttcttggcctctgagcttagcaccacgacgattgaagaggccttcgttggatcggatccatctgagctccccctttaaaactcttggacttagatactttctgggcttgagggtccacaacagacacagcctcagagacgttgatcccttctctggccggcaccttcgccttggatgaagccttatcgacgcgagattgtttgggcgggggagtttggcccgaactgtcaccagtcctcttcttaagagcttgcaacactttctaagacatgactac

SEQ ID NO: 200380 - DNA, 1186 bp, Cannabis indica
aacaggtcgttttttttttttttaatgcacataagaaacaacagttaatgtagaaaatcccatcactgattttttaatttcttttctcttttatgatttggatcttaggcttcatcagtatagattgtggaataccagagaactcgacttacaccgacaaaacaaccggcttaatctacgtttcagactcaggttttatagatcgccatgttggtgtaagtaatactatttcagttgagcaccattctgatactcttgagcagcaattttcaactttaagaagtttcccccaaggacacaaaaattgctacaccctaaggccagcagatgggaaagggaacaagtacttgataagagcaaggttcttgtatggaaattatgatggaaaaatgataaggccaagggtccaacgggaccttggagctaacaaatggggttctgtgaaattggataatgtttccatagttgtgagcatggagatcatacatattccaaaagcagattacatatttgtgtgtgtagtgaatacaggccatggcacaccttttatttcggctttggagcttaggactttgaagaattctacgtatgctcctgttgaagcggctgttctatatcggcgctatgatgtaggctcagcaagtaataaatacaccaggtatatatatacatatattgactatatcacatgcatatccatgcaaatgctatttagcaaagttaatttttatatatatctttatcgttatacgtaaatcagtaaatggaactattgaactgtttttgttgttttaaccaattttgttattcttcagttaaagttagaactaatatccttaaattaattagttagttaactaattctgtttttagaataattttttattatatttttgcttgaaatagatctaaattaaatgttttattttaactcatataattacttaatccagttaattaactttcttttttcattttccataaaatggtagataatatttgtttaattagaatacataaattaatttttttgatttatatatagttattaaaaagataagtactcatataattatttttaaaaaataggctagataattttttatttaagtctaaatttaaatatgaatagaattgaataagattttttttgttattatcgtttaaattaataattttttatatc

SEQ ID NO: 200381 - DNA, 1989 bp, Cannabis indica
ctataaatagccaactgctgcagtattcgagtagcaatgcttggggagttttaagagctagtttagtgtttaacatagagagattcttggtgagatgagttgttatgtaattgaagctttgcttcatgagtgaatgtgtcaaagaacaccttgtaaacaacttgtaatcttctcttctagcatcaataaagataatagccattggggctgttctggccgaggagtaggcaagtgattcataatcacttgttcgaacctcgtaaattgattgtgtttgatttcttctcctactcctattgctcttaattgctttacttatacttgttcaattctggttcttattgctggatttgctactggtttattgcactttgttcatagctgcattgtttaatattgaattgttcagttctgttcttgattaacttctttgtattgtgttgtttgcgaggtgagtgatcatgtattgatcacattaaatacaatacaatacaatctaacacagtacaatataatacgatacaatacgtcgtacaaaacgagtcctaatacatctcacattcacgctcaacgtgatgtataattaataaaatttgtttgcaaattctgggaagcatccatcctatatgcatatacaattaatttcttgactagaatactgttaataattaatgcactaaagaaaatctagatgtacgcataatttaaattgttataggtccgcaaattaattgtatcgcatatattctatatagatttatttcaatcttacggagtttgcttcatctaacgtgatatatgatcaagccgtatattaatataaattcatgtacttccatacgtacacaaacataacattataataattttaaaacccatggcaactaaatgattatcaagttgtatttggatccaaacacaaacgcaaaagacattaattgaagtgcacatgtgtattcatttcttttcatgtgtaataaagagaagtgttacggtataagaaagtgtcattatcaatgtatagtttctgtgtggatccgatacgaaaggtcttagcatgtgagctaacagactaactaatgtatatctattctatataaaattagtaaacattgtgtccttggcggcggcggatatatcaaatattttaaattatatataaaagataaattttgtattttaatttataataattatataataaaattatattgtaattttaattttactatttaaaaatttgtaacataaatacttaaaatattaaatttattgctaataaataccggaatttaaaaaatagtgacatatatcttcatttatggtttaatttttattctgatgtgtgtgttaagttttgagtttgaattttattgtgtatgtttttaatgtttgagttttagtattttactggggttttaatatttgagcttgtgtttatgagatctgtttttatttatttatttatttttatagattttgagaacttgaaatttgatattgtttctattgattattaggattaaaagtttgatttttcatacgtgaattaaagttggtcttttcttttcatagattgaaaaatattagtagaaagtttatggaatggatcaattccatttacttaaagacccaggatatttggtcttgtcctattaaaacaaacttcagctggtatttcaagaagcttttgaagatccgaaacgtgacaagcatgggcatgatgaacaaggcgataaaagggggtaagttcaaagttaacagattttatattgaactgattggggcagctaagattgactatgctgctactgtttggcacaagtttattatccctaaacagaggttcattttctggcaaatcatcaatgaacatctgctcacccgtgatcatttgagcagatttatgaccattccctcggatctttgtgtggtttgtgaaagagatgtagaaattcataaccatttgtttgtggactgcatttatac

SEQ ID NO: 200382 - DNA, 1335 bp, Cannabis indica
gagagagagagagaaaccaatataatcttggagagtagtgagattttcttttctttacttcttttgaaaaaggaaaattatgtcactatttaaatagtcaatattcatgcaactaatcccttgagttattatctagttcaaaaaaatgttgaattaaccattatgccactaagtatcatcattaggaaattaataataataacaataaatatgtataatatgagagaataataaaatatagtgtaaataattaaccccacatatatataattaattagtagatacattcacataatttgatcatgatatatacacatgtttgatagaaagaaaattaatgaggatacatagagaagaagaagaagaaaaatgctaatgagcttctatatatttaaaagagagagataggaattagggtagaaggagggagttttccctttaattaattgattaattaattaagatcatatagtaattaagtaataataatatggattaattaaattaacctttagttctaataatagtgattgtgcctctaccttgagtttgaatttttgtgagagcaacaacagctttaccagaaaggcctggaccatgtggagacacacatggtcgacaggcaaagtcaccgaccggatgcttgactggtctggtcggtggcatcagaattctctcgtttatatcgtttaaggtcacctcaccctctattcctcccggcttcaccaccgcgaatgggtatgccaccctctttatcacccttttctttctctcttcatcttcaccaccactactactatctgcacatgtttattaatatttatcattatggaatcatgataatcagattatatgttgatgaaaattattgattttttaaattaaaaatgagttttaatcagtacaatattttattttaactttttttctttctcttgtttccaaaaattcatgttatattattttttttattataatataacagtatttattatagttacaacattttaaaaaattaattgtatgacatatatattattattaatgtaatttagtattatttcatatatatttttctatatattagaagtggattcgaactttgaaacctctttttcaaacctgaaaaataaatgtaaaactactaaattataccgtaaaattaaaattaaattttgatgccctttcaacaatttttaaattaaaaaatactgtacctactatttcaaaatatattatgtatagtattcataagcaagtgaagactcctaacttaactagtgaaatatataactgtagtcttgtaaaattactagtttatatatttttcaaact

SEQ ID NO: 200383 - DNA, 861 bp, Cannabis indica
tttgtttttttttttttttctaaagtttccattttactttcttttgtgcattcttataatgaacttattatctttctttttaattaattttgcattattttaagttggtgggtaaggtatatagccgacatatattttcattgatacccacatcatctcattatataaaataatgaaagtatatatataccttccaaacactgcacatttttttagagattcttctatataacgccagctgcatggtgcttgtttacccgagtaattgcccaatttctccttatgtataatttcaataactgctaatcagaaatacttagaataagaatataaataattatattatttgtaataagtgaaccccgataaagaaaaagaagagctgaactctgattctgaactgaaccatctgcttcctgcatcgataaccattttttaataataataaaaacaaaataaaaataagatatgagtttctctctctacctataaatatatatgtgcggagaaaaaagaaataataatagaaaaaacagtgtaaggtgcggtctctttcaagtattacaaaaagcaaagggggagggccagtgttacaaatcatattgcatatttatgattattttttttttaaggtaaaatatattatatatgtgttattaaatagaagaaaattaaaaagttataaatacttaattttggtttatttgttgagtaaaatagaactttgggctttgtttatttttggttaaaccttcccccacttagatgatgagataatgatgtgcccaacctcatatccactgctggagctggacaccaaactgagaggagaaagagagaaagagagaaagagagagagct

SEQ ID NO: 200384 - DNA, 1658 bp, Cannabis indica
atgtaggtttaaatactcttttttgtaagaatgtctgtaatttgatctttagactttacaaataatatataaattattcctactttcatgttctcttttataacgtgtctgttaatttttatatgtttggttcagtcatgttgaacatgattatgtgcagtacttatggcagcctttctgtcacaaaaaaaagcttcataggcataccaatttgtagcttcagctctttaagcacactgtttatccacaaaatctcacataccctgttagccatagctctatattctacttcagcactacgccttacaaccacactttgttttttgcttctccaagtcactaaatttccccaaacaaatatgcaatatcctaaagttgactttctaatagtgatcaaatctgtccaattagcatcagtaaatgcttcaacacttctgccatatcacttttcttgaagagaagacctctaacatggttaccttttagaaaccttagaattcgataagcagcttcaagatattccttgtaacgacaatgcttgaactgacttaccatactcacagcaaaaacaatatcaggtagagtatgagatagatcaacctcccagctaggggtgcacatcgggtgggttttctgggtttttggagttgagtttggaatctttggaccgaacccgcccgtatagagaccagattttttgggttggctccgggtgcgtttggtctaggttggtcgggttttgagtgggttgcgatcgagtttcaggttgggctaggctattttttttttttttaaaaaaaaataatcacttttttaaaatttttgcatagaattacataaaatttcagcaactttattatctcttaaatttctattttttgtcatgttacaatataatctctgtattcttttaattttccatattatataaaagaaaaaatcactcttactccaaatccttaactactaataaacttattaaattttttaagaaaagttgatagtccaaactccaaagtccaaataacaaaagttcatacatattacatagtccaaagttcgaacaaaataaaatccatattatagtccataataagttagagtaaaaaaataataaaatatatataaattggtaaccgagttttgggttttgagttttcaaaattcttaaatctgaactcagcccggtgccaaaccggattacacctaaaccccaccccctatttttgaaacctattttttttcttcatgttttataggtttcaggctgggtgggtgggttttcgggtgaaaatgtgacgccctactcccaacaagtctttgatagtgtttcacatctaccaaacttccttggtaaatctcaccaagcttcttgttcggatcaataggagtgtctattggacaacacccactcattcctgaatcttttaacagatcaagaacatatttctattgagaaataacaatcccttgtttggcctgtgccacttccatagccagaaaatatttcatcactcctagatcttttatctcaaatgcctcggagaatctatttttcattgcctctaattgttctatgtcatccccagtgagaagtatgtcatcaaacatagatgattagagctgcaattttcccactattcgagtgaccagtgaac

SEQ ID NO: 200385 - DNA, 1096 bp, Cannabis indica
gtccagacaccttcatgaaattaaatttagtgagtcaagaaaaaagagcatagaaatttgtcacattgatagttatactgcataaactaaattatgtgatgaaagatgatttattatactacagttcagccgttttccaataatccaattgggatgttgtgaaagataatttattcaaagttttaaagcttttcaagaggaaggaagaatcccatggagcattaacgagaccttcttatgcttaatcccagaaaagattgacagctgtaagatcaaagattataggccgataaaccttatcactagtgtttataaaatagtagctaaagttttggctatagacttcgattagtgatggaagacacgatttcagagactcaatcggcttttgtacttggaagacaaatattggattcagtacaagtaacaaatgaagcggtagagagtacagaagcaggaataaaaaggaattagtattcaaaattgattttgaaaaggactatgagtgggaatttctcgatttagtactggaacgcaaaggttttggtgagagttggcggaagtggattatgggatgtatctcgtcaacctctttctccatttttgttaatggaaaacctaggagaagaattcggggtcgtagaggacttacaaagcaatagactcaaggaaggtgtctggtttctggtagggaaggagaaagtgcaagttagtcatttacatttcgcagataacacaataccttttgcaaatgatgagatgtcgttgagaaatatggttgtggtggtcaatgctttttgctccgtctcgggtttaaaagtcaacataagcaagagtcaattgctaggtatttgcatggatgagtctgtgattaatagttgcgcttcgtctattgggtgtgagataggagaatggccgatgaaatatcttggtatgcctttgggaggatccccgaatagaattgatttttggaggccagccttattctaagtgtgctaaaaggattgatggatggaaatgctcttttctttcggggaggaagactgactttaatccaatcagctctctcatctttacccatttattatctttccat

SEQ ID NO: 200386 - DNA, 500 bp, Cannabis indica
gttgccaaaaaactcggtcaacagtaacaaatcagtagaacagactccatactgaaggtacgatcatgatacaaattcgagactttagcaaaactatgagccactaaatttgcttctacataactcgatcttgaaattgagattagcattgtttgtattgttgaaatattctttttctaacaagagagccaatggtgcaacaggggtgccacctctccaaatgataagaaacaaacgggtaatattaccagaccttacccaaaatcagcaaccttgccaacagaaaggttgcaaacgggtgatagtccttggagatgtgcttcagttcttgtcaacaaatgcctctgggtactctggatacccttggatgatagaaaaacttggtaagggatgaatgttccttatttgcttattaattgtttcttgatgatgtttaatcatgtataataggactattattaactatcaactatcaatgcccttaatctttatcaaagaaa

SEQ ID NO: 200387 - DNA, 816 bp, Cannabis indica
ctgatcaattttaagttgttcaagaatattagcgttgaattcttcaaccttttgcgttatgatttttctattttaactaaggtaaattatggaacctttaatacataaaattttatttaaaactttagtatatatgaaagtgtgtatgtaaattgttgaaattttttgtatactctgttacttctgctgactttttttggtgttttttcttttttttttatctgaaaaactataaaataagtttaaatctatgaaacaaagactaaaacattaaaatttactaactcaattagtgaagaaaattattaatataaaaaaatattaaaacttaccagagaagcactggttccaactgcaaataatttagctccatttctctgtaaaaatagattaaatttaaacaaattaaaattaaaattattaaatttatgaacaattatttaacatgactaactgctaattataacttaaaataaatattaatccaaataaataaatatacataccacaattgctcctactctttgtaagaatgaataagatgacccagccaaagctacctatttaaaatacacaaaaatttagtatgaattacaacattttagtgaaacaaattaaattaaaaaaatggcattaattatgaaagattattgaaaagaagagttaataaaataattacttgaaaagcattttcagggcaagcatggaagaagttggcaagagttcctgcactgactgctaatggtgacctaagagatacagttggagctggaagccatactagcatgaaatctgctataattgccatcacctaat

SEQ ID NO: 200388 - DNA, 635 bp, Cannabis indica
tttttatatttaaatagtcaggttaaggatgacttcaacgtcttccacgtcgaatgggcccactccagcctgtaagaatctcacgtgatatttgttgaattcctttgactttttcatacaataccggaacgctactcttctcactcgccccagtcctcgcgtcactctcaccattccatccgcttattgataagaatttcagtcattcagttgcaattaaagggaagatgctcattacattgttgaaacaagttacgaaacaaacccatagtggataaatattagaagtagtcaagacagcttactataacaccatatccaatgatgtaaaaaaaatagttaaatttaacacaaaaaagagtaaaattgatatgtacattgacaattaatgtaaaaaattattattattaataataatagttaataaagtataaatgccttttataaaatagtagtaatattgtaataaaaaatatatatattaaaatcacctactaatgctaaatagaaggaaatatcatattaaaatcacctactaatgctaaatagaagtaaataacattaagaaccagaacataccacgaacatatattgaggcatctgagaggcgccccataaataataataataaatta

SEQ ID NO: 200389 - DNA, 1073 bp, Cannabis indica
tttttcttggcatacagcctgaaaatctccttcttgattcaaatggaaagttgaaggtgtctgattttggtttgagtgcattgccccaacaagtaagttagactgccttctgtttattactgtgcatcaatttacccatgtatatggcccttatatagtttttatcagatatttttcatatatttttgagcagggggttgagcttcttcacacaacatgcggaacccctaattatgttgcaccggaggtactttttcaatagctcattccttccttggattttctgatattgtctgccatgccattgatgtatttttcttataatttgacttctgtattttctactgccaagtgcagttcattttattactttcggtctataattgttttgaacagttcatccattgtttaaccatattctctattattttctggtacaaagtccccgattggtgctgtttcttccatttttcttcaaattatgtaacagccaatttttggaaagacatcatgtagtttatgtataatctaagcactaagcagacgtgaggtgtaacagtgagaagccaagccaacacaacattatagggtggggactggggaaggaaagtaatcgatgcagagaggtgtcatgaaaggtcgctaaattttagctgagggaaaggcagtcaataaagagaaatcattgatcattttactcatacagtatcaatctttgtgtttcgtgtacatatgctaatttgttttcttattcaaatatttctaccataaaatcttattaaaacgtgacaaggtagaggcgttttgagtatttccttgtttttagctttggtttcctatatatgaccggagaacgaaaacagtgcatggtaaacctttatgcatttgaatttgtactgcaacacaggtacttggcaataaaggctatgatggtgcagcttctgatgtatggtcatgtggagtcattctttttgttttaatggctgggtatcttccatttgatgagacagaccttcctactctgtacaacaaggtagctaccctgttataccttgccaatcccttgtattact

SEQ ID NO: 200390 - DNA, 532 bp, Cannabis indica
tataatttaatttgtttagtaacatcaataataagtaatacattactatcttatatatgataataatgtgttctcatatattatcaatgtgaaactctggttgaattttatattttaattacatgatattaaacaaataaaataaaacaaaatgattagttatatatggttactacttgctaaaagttgctagaaagatgaacccacattaaggctcacaaacatgaattgttccccagtgtgaagatattattattacagaccttcaaaaagtgtcatatttataagttttatgtaaaaatttataataattcagtctttcttcttgactaatattatatataatatatagaatacaatttataagttaaaatttttgatgagaagatgtaattggcagtgggtgaaatccatgacgaagagtggcttcccaaactttgtgaatatcattaatggtatggaagccacactcatgctcattccaaccttctaatccatgtactattcctgctatacgccatgcactcatcac

SEQ ID NO: 200391 - DNA, 2250 bp, Cannabis indica
attccagagtggatccacaacctcaaatcacttaacaaagttattcaactgcggcgatctgacatattgattcctgtcccatgttattgaagagatgcaaaaagaatacatgtgagggattgggataagatttctcatattcaacacttgtacctaattccataaactgattttactgaacaatggaggagaagaatataaactctcgatatttctattgattgaaaagttttgggtgtttccatgatgatgagttcatcgttgttttgaataatgtaggtacttcgaattattttttgaactggggttttgttaaattagtagaggaaaaaaaaaaggtttattttgagtgggattcaactactaaattagcatatgttaagtgaaatctttattcccttgtatttttctttgtttaattaattgattctaaattatttttaagtgaaggagcaagagagagtgaagaagaagaggaagcaaagtatgaaggaatgtaagggtacttaggtagatgtgcaactgaaagactgattgtttcaacagtaagagaaacacaagagcaagagcattatcaaatatgatcagttgagtgagctaagttgttcaaggtaaaaatatcgtaatttcgtattgatttgtttcttccaaaaaacattcatcatctaaatcaccattaattgcttgaaggattaaccaagccaaatgaaaactgtcttcaataataagaacttgatttctcataaaatggaataggtgagttgtgttttgtttaccaaggccaacaatgagtacaaaataggcaaagcaatggaattttttaatttgtttgatgaatttgtatggtatatgttaagcaatggctgtcttagatgttataacttcattttcataataaatcccgtttgctgtatgaaacagataaacttttgcctgagaaatggatataatggcgaagcaagaaatgttgctctctcgtcttgttattcacaccagtttgctcctctggtatacatatatgtgtagttttacattatcccttttatgatttctgataattttggctatgtttttatttttattcttttatctttttttaatatagaattaacagaatggattggcacactggggtgcataagaatttaacaaaatgttaataattgatggtcacattgaggacttgttgtgctgctccataaactgtggatgatttgcaagtttacaatcatttgctgagtgaggtgttttcaatgtttgtatgtatctctggtgaaaagcttgtaatatatacactgagattgcataatagaaagagaggtctcaaatggtgtgtatcttagtagttgttgttgttgtttttggtgaggatcttgttgtatgttttctatcaccattcttagtttttgtcttgtaatctatgtgtaactcttagttaattaatagtggactaaacatggcaaatttaggaggcacattgtctctgaacaaataagataaatccctcttgcatattttgtttgttgctgaacttggtcatatgtatttgtgatttagtatatctcaacagactaccactcactactctgtcttcaattgcctaatctaaaggaatggtagagaagttgatcattccacttttgctgcaaatgcaaatgaagacaatcacatctccttggtcgttgccttatttcccttcgctttctaaatgaagctgacttctatgccactttatccacatttggaagaagatttgattctggtggaggagactggcttgaagccattcaaagagacattaagaagatttgttttcttctttctctcctccacacttacctaaatcaaactaaatctgtttcagaatagacttaatgtactgattatgtgactcttatttgaaggtaaagaaagctcttttccaaattagctaaacttttcaaaaattggattgacagtggaacttttagctaagttagcatacgttaatgaaatctgtaatcctattgtatgtttctttgtttacttgatcaattctaaattatttattactgaaggagggagagagattgagaagaacaagaagaagatttttagcctaaggaaaatgactgttccaacagctagagaagcacacgagcaagtgagagcaagaggtgttttagcctctgcatctgtaaaaaaatacatatttccttggatatcattgagatggaaacttacttgtcaatcctacttcacttcattgta

SEQ ID NO: 200392 - DNA, 1445 bp, Cannabis indica
catcccatgacctcagtagttatgctttctgtcatcgatccataaaaccaacccatgaggagtcggtcatggacaatccactactcaaactctggattggtttcaaaaccaaaccctggttgtccatctatatcaggtactagcataaactcttgcggcttggctcttgtccctatcaagtagccattgagtctatgccctcttgcaatggccataaccatttgtctccacaaggaattagtgttcttatctagtttaagggcaaaaggttgattcaatgtgctcccaaactgtggaacaacaacactcgaggatgaagcatcgtttctaaaattttggttagcaacattgctaccagcctaccagttggtgatagagctgctgctctatacccatgagttggtgttttatctcctccggtggccatgctgccgagattgctctgataccaagttgaaaaaaataaggggaatagattttgggaaaataacaactcaaagagctatgaatactttgttaactttatatagccactagggcaacaaaggtacattctagaataaatggcacctcacccaaaaggtgggaatgcacaaaaaacaatggaatatactttgacacaataattgaatagaatgagaaagaacaaccctaaataccatgccacatcaactgttttaatcaactatggtatttcatggtggaatgctatcgcacaatgctttaacattgtcttgcaactacatttaattttctaacaatcgtattttattttttaaaacaatggtctcaattaatagaaatacatttaaacaaaactataacattatgtgaatattagtacaattgtatttagtcatgatcgtccatatatttcatggttttcaaattgtagatgtgttaagatactaataaatacaattacatcataatccatgacatctcttgtaaatagtatacatgcaccttactatacactcatatattcttatttcttcgaccacgcaatcttaaattctaacatgaatcatagaaatacgagaaaaaactataaataaacatcatttttagaccttgttcaataaactaagtacgtaagtatacacaatcaaatcaagtaatataatgatgaagtagaatatcattcccatgagaattaattatcaattactaattaattaattctttgtaatcaaatctggattcaaaagaagttcatatgattgatgtttctatgtcaaggctgcatgtgtaaagtcaattgtctacttgttactttatgtggatgacatgttagtggcagagaagacagaagtagacaaagtcaagtcagtgctgagtaaaaagtttgaaatgaagaatttgagtccagctaagaagattcttggaatggagatagttagagacaaaaaacatagaagaatgaggtactttaagggaacctc

SEQ ID NO: 200393 - DNA, 631 bp, Cannabis indica
aaaaacattatatatataaaacttattcaccactgcctttttggtggtggaagcttgttgtcgacaagtatcattccttcatctccattttctcttcattccattcaacgatcccgtgcgaaaaaccctaaaaaacaaattcaaaaaaaaaactccaaaaaatcctaagtagctgcaccttgctctgaccctctccttgaatctgttccgctaatttccatctccagtgggtggtgggttttggtggcccctttttgatcttagtttctctagttcaaattttacttagattttttttttttttagcaaactctcttgttcaaaaataagtacatacagactaacgaaaatcttcaacttgggctagtactgtcacaatattttgaaattgaagactaatctacatcaaaataaatttttatataccgtattatggtatcaacgcgtaatatttaaggagaaactaatagttctgttaaaaagataaccaacagacttataagaatatgaaacttaaaaaatttttatgattaaaaacttatctccattaaaataaacttttaaaaaaaaattaataatggcaagcttttctctatattcataaaaagattaaaagtactttcaatacttg

SEQ ID NO: 200394 - DNA, 1218 bp, Cannabis indica
tatttttaatttttttttttttttttttttataagtggccaccacagaatggtggaccttctataaaatcttaaaaaaccacccaattaaaaagtccaacatacgtatccaatatcaaaacctaggctatataatttcaccaatttgagatgaaaaaaaaaagtgtttgtgtctgtgtttgagttggattaggattaaaagtgtttgaaacaaaagtataaaacaaagggtacgttcggtaattttccgtaaaaagaagggtaccgttgctacctcgttttcctcgttcgtctatatataaaatctcacttccttcttctcccaaatttcaattccattctctctctacttcttctactgctctctccttctctctctaactgtctccgatccgccgctcacggctgatcctagacggccaccgctgctgcttaccgatctccgtctaatccagatctatctatctgtctttcgtattcaattttcgttatcgtagtttttccggtgccggcgctcgtttctggtaatgcaaactctctttcttctgtgaagttttgtttttttacgatatgcatgtcctttactctggtagatcgcattctggtccgcttcaatttgaattttttctttgctaaatttgcatgactactctattttagtcgttagattttgttttcggatctcagtcgatcgattatatgtttaaagaattctaatttttttcaaattggtattggtgcaatcgagttgtagatccagatcgaaattattatgctttagctattacgcgttttgcatgctgttttggcagtctttttttacggatctggttctcaaaatatggaaccaagtataatgtatttgtgcatgctatgatgattggtggacatttattagattgttgattgttaatgggttgcatttaagtgttttgttgtgggtgtagatctccatacaaggagcgtgttgtgatggcgtcctccgtagctggggccacaggatggtacaaaggaaaggtcaaagctgtcccttctggggattccgtggtgattgtggccatgaccaacaagcccggaccaccaccggaaaagaccattactttagcttctctgattgctcccagactggtaaacaatccctactgttaattgtcgtttcccagatagtaattatcattatcattatcctgaaaagaatactgttttttttttctttttt

SEQ ID NO: 200395 - DNA, 649 bp, Cannabis indica
tcaatgttatatttgttaggcatttactttgatgaaggaaggcaacatatttgaactaattgagaagggcttaagggattcatattataacatggaagagataatccgttgcatacacattggcctattatgtgtgcaacaaagccctattgataggcctaatgtgccatctattattatgatgttgagtagtgagagtgttttgcctcagccaaaaccaccaggctatttcacacacaaagatttgtgggaagatcatcattcctccaccactaaacttctaccatcttacactttcgatacaaacatatcagatgttgaggcacgataaaatttgattttgaaacctatgaaacattacaattttcatttttttttggtttaaaattgtaatattattatcctttcatgtagtatcaaatcataggtaactctatagtacatctctttaaaatggatgttttaacctatctatgggtcaataattgtttacattgtcgtcttaaaattttttatttattcgagcgtcaattaatatatctttcgaattccaagagtgacaacccttcctcttttcaaatatttcaatacatgtgattgtgagaatttggagttgaaactttttactttaaagatttttcaatattat

SEQ ID NO: 200396 - DNA, 576 bp, Cannabis indica
aaaaaaaaaaaaaaactactgcaattgactctgtggtctacattttctgaaactctcttggacattgcacactaaagtaacggagaagccctaattacaggaatcagcatgctaagaaataaagggaacaggggaaacataaacttatgtggcttagttcatagtgctaaattctagctggatctttactcagtacaagtggcaatacataaagtaaatttcctcacatgcttttatgtgtgagaagaacattaagttagtttctagtcatgacttgtttaacaaatacgtggaagacatttaaaaaagaaacaaaagtgcgccacaagagaaattggcatcaaagattactgcctgaactttgaggactgaagaatgtggacagcctgggagtttcagttgttttataaaggagttaaagttatgacaagaattgattatccttcaatcaaaaaccatatcatagatttaatcaatgccaaaagaaactagtagtaaagtaagttaagttgatcatggactgcaaacaaactgtcattacaagagtaaagattccaccaaatagaaaataaaata

SEQ ID NO: 200397 - DNA, 1529 bp, Cannabis indica
tcgaagattttttttctaagaatgtaagaacttataattttgttggcccataatgttgcaaagtgaacgtttactaacaagaggatttgtatagtggatatctcttctataacgagaaacattttatataatgaccgtgaggtctaaaaatatttattttgtacataattacgcttatattctatttatttcaggtttaaatgataaaatttataatatgaaataaagatgagaataaagatgttaaatgagacagaaatgatgaacttattatggaatttggaattataaaatatgtaagacccagatgttatttgtggtaaattatgctgctttggtcatttgtctggttgttagtttaatctaactatgttgtctattatttctctttgacaggtcagcttagtaatcttaaaccgtggacagctgtccttctctagttgttgagctgttaaagtttgttaacttgtgagttattagtatataaacaaggattatcggttttctaactaactcttcttcggtgattagtagttttgctctgttagggcaaaattgccttctttgtatttctggtttttcttccaagtcaactgatgggatcttcttggattgaaggtgaatcagagatcatgtttgtctgaagggagttcagattacattactgaagagagttaagctagatagaagcaatggaatcttggcttctgaagtctaaggttactttgatgattttctgatttgtttttgtttctaaatcagtagagtaattcgtgtatgaattaattgtagattacttttggtgtaattgtaatcgaaattggatagtgtatcctttaattcatagtgaaagttattaccctggttcaagggaaccaaagcaatagtcgcctgaaatgagttttcagggtcgaataaagcttgtaaatctgaatgttttcagtttagtttcttgcactctgagctaagtataagtatgttaaaacaactataaagaaagtaacactgttagacttttcaaaataatagtagtgtgaaagattttaaattttggatgttcaaaacgctccgtttgtaatcgaaaatcaaatctgaagctccaagtgaatttttgattacgattcgttcacttacaagaaaaatattgtgaataaactcttttagttttttaaaacatcttaaatggtcaaattatgagcaatatcaaaaaaaaaaaattattatccctcatcgcacaagaaaacttactgtgcaaaaactaagtattcaggccgcggcacttaaatggctatatcgttgcgcgcctgcttttagaggtccattagagtttttaaattctgatttcaaaaattcaaaagagcttttcaggaggtaactttgaagaaacgaaattgaagagaaaaaatagaattttaagttcaatcattgttgttctcttctatcttttatttgatgttttcaatttcgttattttcaattgtatagaatgataattattaggtagtctcatatctagaggttttaatgaa

SEQ ID NO: 200398 - DNA, 1035 bp, Cannabis indica
taacaaatattgatagtttgttactaaccaagagtagaaggccaattaataaaattatgggttatacaacccatctcatttccttagccatagattgacaaacaattatatggaggaaggggtagtaagggcgaaagcatgagggctgatttgagtgtataattaatgacccacgaaaataagtttgagaacccatagcatagatagggaccaactaccacaagggttccattccatactcaactggagatatatggttattgcaactagctagctagaaagtgggtgtacgtacagcccacaacaacatacagtgggttagtcatatatatattctggcaaattaaggattatgatatggatgatgattatgaaatggctgagtgagtgatcttcaagtgatgattcgaatgagtgttgttgagtgtgtgaggaagtttgttagtcctctcacgagctgaagttaattaattgtaattagctaggcttgagtttaggagagagttgagttaatatcatcactctgctgatcactgactccatgattcaaatgtgtacgtatactaattaagcttttatttttaaagtgaaaaacatataagaatgtctagtattgattcgccggaatatatactgatattgacataatcacccctaataattattcaccattattttcataattattttacttttattcactttagattttaattaccataaaaatagaaaatcaattacatggagattataattacaatttctttttaatttgattcttacaacttcatcaaatttatagttattgtgcatgattgagttttttttattttttattattatgttttgaggttatttattacttagtgtatttggaataataataatgtttgattttgtgtttaaaaagtatttagaatgttgttttattaaatttatccaaattaaattaagttgttataattattttttagtaaaatgatcactatattaatacctgtatcatcacgtactgatggttattgaaagcggata

SEQ ID NO: 200399 - DNA, 551 bp, Cannabis indica
aaaattttaaaaaatttacaaaactgatattgtaactataacaaacgtacttttttttagagaaatattcctacacatattttggtcgagtttttatactattatatataattttacaagggacatgcttggcccactgtatgaatttgattccttcattgtcgttcacgttatcacatcaagtcttgtgatgcaagagattggaacacaaggagaatagcataattatgaattatattactggagtgcgatactgtggaaagcccttgtcaatgattatccaggtagtgacacttaaaaaaagaaaaaggaaaaagtagaaccactttcttcatttcttattcttaaggaaaaattgatgaaattggttagtggtccattgaatatataaaatgactatttagtaaatcttgttgtgtctcaatccaaattaagtaaacagacttaaagagaggtttgactccttagttgcaggactcagtttaggccttgcattaaatttgctcaaccttaagtagttcgtggtattacttctatatatatatatatat

SEQ ID NO: 200400 - DNA, 1148 bp, Cannabis indica
caaagctctgctaagattcctctaagctttctcttcttcaagagaaacaagagagcagagttagggtttcttgcaaaattattgtaaaaatatacaagcctcttaagaccaataatgctaacacgtgcactaggattttttaacatccgaatcacgtaaaaattctcgtcttctttattattacaattataatttctaaagttcttatttatttaatttctaaaaattcggtaaatagtctaaatatcattatggactgttaatatgattctcaactgtttgtgttaaatcaaactttctttctttatattagtcattctccattagactaaaaataaataaaaaacatttaaaaaaaattacctatctatggcttcaattatttggctaataatcaaagccatataggggttgtatgtttgcagatacaaccccatatggcttcagttattaaccaaatgacctaagctataggatcccttttgccttctgtttttttgacccattttgtttcgcctggaatgcctttagttgtgaatttaattaaaatcaaagctaaaagatcgaaaaaaactgaagccacagggttattttgccgtagtgtttggccattaaaaattttccttcaactattgagatttttgtatccatttaattttactaccggttcgttgatatggacagaaatttcgagggtaaaaattagtacatgtcaaaatttaagggacacacaatttagttcatgtcatattatttataacatgatgatatgtatttattttgatatattattattttcataaataataaaataatgtatatctaaaaatatgcacaaaaaatattaactattttctaaaacattagatcagagttttttttaatgttatttgttaaaatatacatgatattttagggtgtgttataaaaatttgggtttttatttttatttttttaaaaaaatataaataaaagcatttttttttgttattttctttaaaaaaaattagtatcatatcgattttgtttttgattttacaaataaaaacttatttagtaatttttttttgtttttctttgcttttttttttaaaaaaaaaaacttaaaaggacttaagaaagaagaaatagagagaaagtagggcgta

SEQ ID NO: 200401 - DNA, 1175 bp, Cannabis indica
acccaattttctagtagtgtatccgtatttccgcaggcatgacatgtggacattaattaaagagaaacaaaaattatttaagctacctaagtgtctcgccttgcgcttcagcaagatagcagcatgaaccttgcagaataagtcctcgcaaaagaagtcatcctagaaaagaggccatgaaagaaatgtccgcgagctagtatcattccctattcttgaagacaggaccctttgatcctgcaaagaatatggaccgtccatcaggatgcattggtttagggaactcttttgactcgaaccatcagcccgcaaatgccaggttgcaggcccactaatcgcgcctttcatatgtacgatatcagaggttgtctcccacaccacgctaccatgcaaagtatgcgtgtccttgtgtactgtgaaaaacaaatgcaacggctaggaatatgggaaattcaaataaggacggccctagaatgatacgcgtccaaagcaccgccagtacaaccagtccaatcttacattgataaacaccatatggaaaatatgctacctacaagttcaaagtgggggttcaaccttatgaaaattcatcaaaggtgacccaggcaaggggatcggcttataaaaacccttgaagacacgcaaggcaggggattccaaggcttgacttctcttttcctccttcaacccttcatcttgaaaccgaagaccggttctctataaaacacattactgtaactccattattaactccagaatattcctactaagcttcctcttcttcaagaggaacacagtggtttggagtaaagtccatcctttttgtatttgcataaataattaccgaccaaagagcttaataaaatggactcacggactaagaataattaatgcctgaaccatgtaaaaatctattgtctatatcttgctatttacgccttcattactttcctaagctctataaatatttggttgcaaaaaaaactcagtaaacacttgattataggttaatggatcatcatcaataccatcaccaatgaccatattgatttcaccatctaagccataacgagatggttttatagtaaccctcccactacaaagagaagccgtgatcttctgaacaagagcattagtggtagtttccttggctgtatcaacttgcattggttcaa

SEQ ID NO: 200402 - DNA, 562 bp, Cannabis indica
gatcaatattaactgatgatgacattacaacaatactaaaaaatagggtgggaagagtccgccgatattaatagcaaaatcggtcagtatttggtattaccggcagggtttcgctggaattgtccatcggtattactcattaatgagttctagctcttgcatagacttttaatcaactttattattacaagttaattagaggcttcataatatagtagctatgggagaatattatgaagaaagtactgccttgctctagcagtatatatatatatatatacatatatatatatataaatagtttttgtgtcaaggaaaagaaaacatcatgcatgttgtacattaatatttatgtagctagcctttttctttttttcgtttggacttaattagtctagtaaatatactatataccaaatgtctctatccattgcatataaataaataaaatcagtttcaaattgatcataaagtcatgacataactacctatataccttaactaattctagattaagagtttaaacggcatagaactacatttgaccatttcccaaaagaaa

SEQ ID NO: 200403 - DNA, 677 bp, Cannabis indica
gtaatgtgttccaaggtacgttcactacaagaatgattagttctacaggcgttttacaattgatgcgcctgcaaaagattagcaataaaggcgctgaaagctgagaaagcgttcataaaagtatacttttgtgggggcttttaataacgttactattttttaaccctaattatccctagattaaccccaaccctcagatcaaataactaccccatctaacggctaacgtacatcacggaatacattctgtgaaaatacattaacgggacaaaatcgtgtccctatatttatttatagatacatatgcacagtccttaaatattacacgtttttcatttcttcatatagagtgtactctgtaaaaataatatatttcttcttttaatgttttctctttttaataagtcattgtttttagaagaattacaaagctgagatatacctcaagctttcaaacttattcctttacatgctccaaaaaaaactatgtaattgaaaatttgtatttttttctatatggcaataaatttgtttaataatagttgattgtaaagatctactaaatctgattagaaacttgttgctgcagaatacagatttgtagtcactactacaaaattgagcattcccgggcctgtcggtcctcaaataatttttccgtagaatcatcgctcttg

SEQ ID NO: 200404 - DNA, 730 bp, Cannabis indica
cttcttctcgttctctctctctattcgacccttaacttccctagctgccacaccccgtacgtaaaaaatcgttaaaaccaagttattaaatttttttatacaaaaatagcagtttgtataagttgtacttttataaatgataaaattgttgttaaattttgtgttaatcaagcccttagagtaatcctatcagattctttactccactatttaaaatacatcactaatttaattatttttgaaatgacaaattataacttttaatattagcgatctgttggaggatctctttattttgatttaatattttactagcattagatttttcatgatattaattagttgagcttttaaggcttgttgtattatttaatatatttatataatatttaataatagcatatatagtttcgaatatttttcttatttatagctttagcatatataccgttagttgtgcgattttaattacaagactattaatattattatgtatttatttagtgttttatgtgataaaagtcaaattatttaggttagtttgtgtaatatcctcattttttagtttattgttttgaaatgatagttatatttagagattattagtattgattttacaatttaaatttttgagattatttatatttacttcaaatatttattttatttatacttttattagtactttattagcattattttggcatcatttttttgatggtttggatgc

SEQ ID NO: 200405 - DNA, 519 bp, Cannabis indica
aaattgttgagttcaagaagcctttgtagtctagactctagagagctaaaattgctcttaatgaattcgtattatcttgattttagatacaaaattgagtttaaaaggtataagaagtttaccatctagaaaggttataatcttggctaataaactaggaaaaatgaattaagaagtaattttatgatcggagcataactgacaggtgggtaagacggtttagcaaagtgggattctctcattagccaattttatttctgttgagctttacttctaggaagagaaccaggtctctctaatgcctgggaatttactactatgtgctgctctattttaatagaacacactccaatttctctctaaattctgcatattatgattgttggtacctcaggatctaatcatgtgtttgggtatgggttgaagacttctaatgctgtaaaaacaaaataaaatacaagaagcgaagctaatttgaacaaacataccagaatgacacaacaagtgactcacaacatt

SEQ ID NO: 200406 - DNA, 774 bp, Cannabis indica
cattaaggtgattattcacactatactgagaaatgtgagtataaaactaataatattattgttgtataattatataatatgtgtgggcatgagattttgtttattatgtgttgtaaaaactaagtagcaatttttttaaaggaatgagttgccattattgtctccattaattaccgataagaatttcccgcctcatctctggaatagccggagacaatgcggaaaacatgataggggccggggcggaaaatgtattccctgcatcgccggccccatgtgttcatgtgcatatatatccctagagtcctcctgttgaatgattcattacgtactcattggttacttctagaagacccctcagaagaatagtcctctcgtttattgatggactgtctgtctcgtgtcacatgacaataagaattataattttctcatcagttgaatatatattccttgggaaagtgattaatttgatgagagcctcagtcatcacttatttagtgattaatggctccaattggtccaaccagatgtttaaatgtggcccgagagctgtttatggacacaatctgagtcagacatttttggctcattttataatattccaacaatcattttgggctgatatgaaattgtataagagactttgcaatacgaaagcgatgccacagaagaaaatgcaattaaatgaagtggagagaagaatagtcagattagatagatggaatagtaacccacccagataactactttttacattgatggaattgacta

SEQ ID NO: 200407 - DNA, 1198 bp, Cannabis indica
  modified_base (88)..(88): a, c, t, g, unknown or other
tctctctctctctctctctctctctctctctctctctctctctctctctctctctcgctactgttctctctctctctctccattttcncttgcgcggtggcactgccacgccatgatggccatttccccgagcgatggtcgtcaaataaacccgttctattttactatgtttttatttttttcggcagattcgaacgaatgtgcttgagcttttgatttttaattcatttggtaaatttgttttctcaaatttgaaggagattgcaatattgcatcacagactggtgtgtatgtgagaggtttggagaattgtgggagttgtttgcctgaccatggcattgaggcaaaagttgaaggcttcggtgctcgctgtgttcatcaatttcgctcttactccaggatcggaggtgcacaactcgttggtataattttaatgaattatgatatatatttttttagaataaattctgtaatgaattatgacatttaaatttagaaatatattaattccatttattttaattaatataatatttttttataaaattaatactattatatatttaatatttcaaaaatatatattaaaaagaaattaaattaaatttaaataatatttttgctaacagttataaatagtcatttaatgtgattttttccaacagttgtaaaccgtcatttaaattgacttttctcaatagttataaaccatcttttaaagttttgtatttttatgacacccacatagccaacgattttaggaaccgatgagaaatagtataaaagacagttataaaccgttggaaaaaaccaattttgtagtattgataccttggaattcgatcgactatctaagtttgttggtgatctggtaccaacagacttcacccgaaaataaaagtatgtgagaggactgaatgccacaatcagtcgggacttgaaaattatcaccgctcacaacactttatacaagaaaatggtcgaattagccttgatagttgaagagaaagagcaacatgtgatgaaagagcaaactacaaaggatgtcgccacggcatcgaatcctcttgtgggtggtaatgtcagtaaggggatcgacggtggtaacgctgatcacaaacgaaaggctaagcttccggaacatcagggagtaatgaaaagttttagaggaacaaaggtggccgtcaaggctgcgggt

SEQ ID NO: 200408 - DNA, 1072 bp, Cannabis indica
ctatagggagcgtctgacttgaactgtaaaagaaaagataaaaaaaaacattaatcgtataattaaaatacaaactaaatcaagttgtatttatgttcatcatgatgaactgtaaaggattatgaaaactaataggagtcccacaaatcacaatatacataatatatatatatatataaatttctatgtgtgtctgaatatagatggtccacttagttaataatcaccacacaaagttgtccaattttgtctaagttcatcatataattatgaggctatagctaaaccttaaatcaatgaatgcaagcaacaaagtaacttggccttttcctttacattgtttcttcaaaaattaattattagttttatgttataatcaatagttcaaattgatcttctatacaataattaatttaaatatatagagtacgtatactgctaattaatttatgataatatatataatgttccaaagttatatatatgtatatatatattgacctgattcaactacagcaatcttcatggctttggtcctgcatttgccacagcttatccgcacactcacagttatcttttgctgcaaaaaattatgtacatataatattaggaaaagaagaacctacagtgatagatttacaaattgaacaatcgtatccgagatttatgagtcggttacatacctctcttcacataagaagatctgtaggggatagacctaatgaattaatgattgctgtaattcattgtaatcttatagttaaacatgttgaatctagtaatgaaaattttcagaagagtaatgacaaaaacaatgggtctgacatctatttagtacaagaaaagaaagaaatgatgtttaatactaatcttcccaagcagctgattccaaagcatgtaggttcttctgaagtgaataagataacttcaagagacctcttaagtttcaacccggacctgcaatactcccagccccgtagcataaacaaaaagagctacaactacatatatatatgtagtaaattgtgaagaacataatatatatggtgcacttagttaataatcaccacac

SEQ ID NO: 200409 - DNA, 966 bp, Cannabis indica
aaaatatttttaaataaatttataaaatatattttttgataaatgaaaaattagtattttaaattaaataatatctaataaaaacaaaaattctaaaaattaagtcaataaaaaatgtttgaattttcatagtaaatataatattattttttaaaaaaacattatacttgaacggaactgtaattccgcctcctttatagcaagcattcctttccaaaaaaaaaaaaaggaatcgaagctaggacccacacgaattgcaaaccccccatttgtgaaccaaaaactcgataaatcgaagaaaccactgagacccttttcgctattgttgtttagatgtttgatatgcggtttctttgtgttgtttttgcttattttttgttaaaaaatcgagttttggtacgatgaggtacgataatagtgtaatctgaaagttagggatgaaggtttgataggaaacgatagtggtatgatggggtacaatagggtatgataattaataaaatacgatagtggtacaatggtgtacgataaggtatgatatggtataaatttttacgcacatatcgtactactatcggaccactatcagactatatcgtttctttatcaaccatcgcaccaccatcatatcccatcgaacatttatccctaacctttcatcatattacactaccctattgtataataaccttaatattatcatgccattaattttaagtcactatcgtttcatatcatactctaaaaatttacagaaaatataaatttcacaaaaatttgaattttatcaaaaaataaataaagaaatacaaagaaaccacatatcgtttgtgtgtctattcgacggtggtggtcgaaggtcgtgggtcgttggccactcaccagagagaactatagagagagggagggtcgtaggttgtcaagagttgtgggtggaggtcatcgatgttcaacggtagtttcgat

SEQ ID NO: 200410 - DNA, 2282 bp, Cannabis indica
ttaattaataaattaataattgtatcttataatatgtttatgggatatataagagttcattcaaaatgtggaataatggcaaagtgttgattagaattttttacttgaaatttagttatgaaaagaactgcaaacaaggcttattttatgttgcatatatgctaggcttgtggatgacgtactatagacatgtaaccctcctcaaaatattgttataattatatattttactttcatcaattataattaaacaattattgaaaaaaaaaattatgttaaataaggcatagtgtcgtataataatataaaaaattgttaactaattattaaataaagacataatgtggtataatgttcaacattttaaagtgtcaaataataatataattataaataaaaaaactcaaagaagttgtaaacaaaattgtaaataaacactatgaaaggtaacatataataataataataaaaataattcattatgaaaaaaaaaatgtccaaaaaattataaataaaaaaatctggaaaagttgtaaaagacaagcaccataaaatataatatattgttattggtgcatttcaattcccacaaattttaatgtaatatgatttagaaaattgctaaccaattattgtatatatgaatcgatatagtattgagcaccttaaggtgtcgcataacaataatagtacaaaaaaattaattaaaaaaaatatacaaagactattcataaaaaataaaacaacaaataacaaaaaaagaattactaactaattattagatactacgtcagtatggtattaattaaacaccttaagtgccaataacaaatactaaaataatatatatttatatatataaagaaaaaaaaaaaagtcgtttctctttgttttaattatatatagaagttattaatatataaatattgtaaattaaaacttagttgaagatgatctcactgtaaatttaggttaccacaattttttataataattttttacttttttgtttcttacactggagatcacgaagaagaaacaaatatgaaaatatattatcttagaaggaaaaagaaagttgctataccaaaacaagttcttaaatcaatttgtatttctgtgattatatgagtctaagtagtaataaaaatttgacctgagacgcgtaattattttaaatgggacagagattacctaccttaatggataatgggatggggtggggtgcaatttatacatccaaagtaagtttgggattgggttaaagtgaaacaacttacccatattcgacctaaatatataatttccaaacgttctatgtaatttttcaattatcacatattaaagatcattaattttccttcatttattgtgtaataaaaggtttttaataaatggattatttgttgagattttgttttatggcgctttttatgaactatatgagtattttgatgtaatactgtattggcatttattgtaaattaattaagaaaaaacatacataattggtagtacattcataagaacaataaaagatctctggttttgaagagtatgattttggaatggtgataaattattcacaattatatccaacaaggatgatgatcctaaattcttaatgttgaactaagacaaaactaacatgttatactaacaaagcctcaaattttcaaaagaatcaaagtgacatgattatgaatatgattacaaatactaacaaaaatcctaagaacaaaacaggcacacatcttgggagctctcctcctctgcacatccttctcagctgttagaaaagttagttataagaagagtcatcaccttcatgccctacccccggtaccgttaagtaagctaatattttgccatctcaactctagagaactaaagatctgaagccttgagtttcctaggccgtttattcgattgggctggagatgatggagcttctgatcctcttccaggtccctgaaaaagctcataagtttaaactattggatgcacttacattccaccatatgagcaagcaatatagtttcaaatgaaatcgacatgcatgtaccttgcgtttctggtctcttttgccaggtctctcccctgaaactaatagaaagttataaacgtaagcaactacacaaacactactcgtctcgtaaacaaaaaaatgaaagaccccgcaaaagccaagcaactgtacaaatcattacctccaaagttcatcgagtcgggaacaaacatccggtcctgataaacaccatagtatgaacagtttcagtaga

SEQ ID NO: 200411 - DNA, 888 bp, Cannabis indica
tatatatatatataaatgtactatgcaatgtaaagaatatccgtttcaaaattttaaattagcgatattatacaatgaaaaatatacaaattaaaatagcttatgaaacaaattcataacaaacttatatacattatctgttttatatttttgaacatgaattgatggacaaatcctaagggttgtccatctgtgctcgcagatgctggcgcacgagtggagttggctgaagcgattgcctcaggctctatatgatgatgccatcagaggtagttttcttcctattagccccctttttcttctagggagcatcaggttgtggctcggaagtaacttccttagagacactcttcttcttttcttgcttaatagggatactgagactgtagaggagatcttctaaattatccatatctataagggtaaaataaaagaagttaaaatctgcacaaaatgaataaacttgaagtggcgagatcaaaactcccacctaaattattaccaaaagtgctagatgactgctataataattactaaacttcctagaaccagtaattatgaagagaccgtagtggttaagtggagacatatcccagtctagaatagcaaccctattggtgttagtactgtattgttcgacaatcccataagacgagctattacacattagttgaacgtgaaacttgagttaccaagtatcaaatctatgggctattacacaaatgcaattctagatgtagaaattatattgactatctttaaattttacaaaacttgtacgctcgacctaaggacagtaggagaccatccataaaaacaagaattattacctcgaggagccccttcgttaactttggtggcttcccgagttgttatattttcaaggta

SEQ ID NO: 200412 - DNA, 1564 bp, Cannabis indica
gcttaagttgggatttgaagtgggtcatattataactctacgttatcaagtatagaggcttcaccattgattccaacaagttgtgttttatcttcattactttacatttcacaaccaactagagtagcaagctatatataatttataataaactttgaaataatataatttataattaaataattaattttgaggaatatggaattagaattttgggttatattttaattagtttatcttagataacgcaataaccaaggttgagaatcttacaaaaataaaaatattcgacaataattgaacatatataaaaaagaaaaagaaaaaagagcttaacaaaaatcagatgttgcttaattaagctacacttatcatctatagctaggtcataattaatattaattaaaaacacacatgcacactcacacatatatatataaatataaatatatacatacatatatttatactagaagaaaattacgtgctaagcacgtatacttagttttattctaggtgtaatgatacgataaataattgaacaaaaaaatttattaattatattttgaaattatttttacccaacaaagcattcacacataaattctattaaaatatgcccaaagtagcaatgaaagaaaaattatgctaataaacaaaatcagtcatataaacgagaaatgagactgaagtagaggaaaaatatcaaatttaaaagaggacattttctaaaattggtaagcttacaacatgtaattgattcaaacagtaaaagatagatcgagagccaaaaatcaataagtcaaacgaagaaagggaaagagtcaatcgcaactcaattggctcaattgttgcttactccagcaggcgcaaatcgacagaatttacattgagttcactaccttgtactcaattgcaaaagaaacttgttctttatgtcgagcaaaatcatacaagaatcttctgtagtcctacttggtacatttttaaccttcacttcctacacacacaactcaaactcttttaattaaaaataaataaataagagctcaacaatagaacctctaaatcatacaagaataattttcttgcctcgttatcagaggaaccactttctgaattaaagctatcacttgattcaatttcatgccaatcacaataaattgtgcgtgacagactctaaccaaatagatatcagattcaggtagaaacaaaattaatggggtaaatacctaagagaaacatcaaaagaagaaaattcaaggtactgccatcgcaaatggtggaaagctcatgttgattcttcaccatattattgatcctaatagaaacctcctattcctcatttcaacatccccataacgacattgtattattcgtctccattgtcctcctcaagagagtttccttgtagctaggctccaaataacccttatgtgtatgaatagataggaatgttggttaattcaaaattcaagttttttctaaatatctatttgtaccatttcaatatcccctggatgtttgattgagaaaaaaaggtcctccaagttagctaaaagat

SEQ ID NO: 200413 - DNA, 1372 bp, Cannabis indica
tacctgaaatctacaaacgtagtagtcatcaccatagacggctctcaaagtctcataaggcttccttttagggttcctagggttaaaagccacactaaggttcaccaaagccttaacacgatctggtctgaacaagcaaagattccaagcaatgacagcaccccaatcatgtcccaccacaaaaactttctcttcctcagcagctatggcatccaacagcccaatcacatctccaaccacatccatgcacgtgtagctacccaccgaaggcggtgcatcggtgtccccgtagccgcggaggtccggggccacagctcggtagcccagggaagccagtgtgagtatctggtgacgccacgtgtaccatagctccggaaagccgtgaaggaataagatagttgggccttgtcccttctcggctacatgcatgtttatgccatttacttctatggttttatgctctatgctctccatcttgctttagctatctctatctctctaaaaaacaactattggatcttatagggagtgagagagtgaatagtgagggaaagatattataaaatattttggccataatgcacatatatgtaatgtatggtaagtatgggacgttataaattgataaaatgggcattttgcttttccacatatcaagaagaaaaataatggtatataaagattgaataaaggttaaaaatacatggtagttttgtaaatattagtttgaaattctcttaattaagatatcattttggaattgcttccatgtggttactttgtgacctggcccatctatctggaggataatctgctgtcccaaaagtgtgtctctctccaatctccatatcaaactaataaaattgttacaactatcatttgttaacacaagttggttagctctagataactttcctttaaatagatgctatcttatttttgctttcttttctttaaaaagcctatttgtttttttttatcaaagcagagattttataaaccaaaacaaaacaaatgctacaaagatcaacatccacacaataataaaagatagacttacttacatgttacaaatctattgatccctttaatttcgagagattcctcctataaacaacaagtaataggcaataattgtgtgatttaatgttattatattatttggtataatgaattgcttgatatacatgtgattattggtattaaattggcttgcaaattgatagtgaatttattgttatcttgtgattattatgaattatttggattgtttttgtgagaattgtttgggtattttattacttttttttttgtttgagtctttgtggctcatggttactttattgtgtaagtaaaaacaagaatatttctt

SEQ ID NO: 200414 - DNA, 721 bp, Cannabis indica
attttgacagcaattagtctcatccgaaagcacttgctcaacagaatcagctaattgggaggtagcatccataataaactgaactagatttttagagtgcagaaaacaattccccaccactatagccacggcatcaccttcttcacacaaagctgcactttcatcctcaagacctttaattttatttcttttctttctggagctccccttttgatgaaagtgtattatattttatttaaagagcaacatacatctttgatttcttattttaattttatttttccaaaatcaatgtgtgaggtatggatgtttctttatggtagtcaatggatattgtttctgtattttgtttgtcacaatccgagttgtcattgtcaatgtatctgaaatggtcatcccgtttgtctttctatcaggttcataagatggtggatctttcagcttttccagatcgagaggcaatgtggtatttggaagttatggaagcatacaaactattctatgaaacactgatagatgattttgtgtaattgcatttagcacaaacatagccctgataaattcaaattactaacgtttcatttggaaatatatatgttagaaaatctgaaatttggcatgaacgcttcaactctactcttatgttccaatttcattagagttataaaaagcacatctcctagtactccttgtagctgttatttaattataagtattttag

SEQ ID NO: 200415 - DNA, 548 bp, Cannabis indica
ttattttattaaaattgttattgtttccagtacaacaaaaaaataattgaaaaaaaaaagaagaaatgattgaaaaatgttataaataacaaattttttttttttttgcttaaaacagtaatataattaaaaatgggctttagaagttggttcgaaatatctaatgacaagttattagtcctttgaaaagttgaattcattaaaaaaaaaaactagaagatattaaagaaaaaatgtattaaattttttatttttctggaagctggtacagtaacccaacttgcacaccataaaaaccgccatgacaattgaatatacattgaatgtatattcataataacaatgattaataataacagtgatttgaagaattgatcacttttataaatgtatttgaaaggaaatatcattacctaatttgatattacgggtgttccattaattcgggaatgaacaaagaaggtttcgggattgatcaaaatctcaaaaccaaacaatcttacctaccaaatttgaaaccaattgagagatacattcattaattcaac

SEQ ID NO: 200416 - DNA, 1870 bp, Cannabis indica
aggttgcagcgctagttgcaataggagtttttatgtaaaatttcgtaaaaatacaaaaaaaaaactgttttaaagtgtaaaaataaaaaagccccttattattattgtttatttttagaaaatatataaattttgtactatgataatttttaaattattaaacaaaatagatatatatggtatcatcttcctcaacgactccagactccagtgtcaatctatctaatatctatcctatatataagtgtacaactaaattcataaattgtttgataacattctaagatttttacattatatattgtcacattctcaattttttatttatttattagtaaatctaataatttaaattaaaaaaaaaaagaaaagaaaaattgaacaaacctcaaatttttacagtaatagcagctgtatttaataaataataaccaacctctttttacatatacatatataatttttgaaagatttttttatataacacccaatatatattaatgcagtatgtatatattctcactcttttcaaaaatatagagaaagcaatgcttccaattaattatataaactctattagttatttatttaatattattatttatatctttttttagaagcttcattctttattatctatttttttattcgtattaatttattatttattttaagaaaataattaatagaaatgtcatgtaataaaactaataataataataataataataatactaagcttttttctgtattttaacacctaaaataattcaacatactatttttcctatcttcaaatttattgttttttaatcatcccacttaatcaattttttattttttttgttggaatcacatgtcatttttccaatttatcaattaggttcgataatttagaaaaaaaatttaaaaaaaattaaaaaatatgtataaagctaattaacatcaatattaattgtagaattcaaaagtttataaaaaaaaaattgattgatgtgtggataaagaggtatcatgtagatggtagttattaagttcactaagaataattcatttctttagttaatgtagaaacatgaaaggattaaaaaaatatagaaatatctacggtggagatattggttttgtgattatggtagagataattttttagtcataaaattgagaaaatatatagtaatagtgaaacttagctattgtatttttacaccttttttttgtttttatactattgtcttcttcttctttcttttttctagaaaactaaattcaataattattttattttatttttttaatagatttcattttactttttagtacacttaattaataattttttactttttaattttttagtatgttactgtcaaaaaatatttattttagtaaatttgttgaggattaactttttctaaagattattttatgtctttttcagatttattttctttataaaatttaataagtacaataattcataataaaacataaattaatatgtatacattaacatatatttaaataagcatataatcaaataattcatattaaaataaatgagtaatttgcccattagtttatcgcactaaagtgtactaaaaataataattatatactagtttatccaagcttgtgaacaatgggagctatcttgagagttgggtctgagaattgaggagaaagatcttaagggttggatttgtacatttgagaggaagaagaagcttttagtgaggttgtgtctttgtattaaaagagaaagaagatgatgtaatgaagaaagagaagaaaaagttattttttttattttttatttttgtaatgcgttaaaaaaattattaactttttattatctttagtttttttt

SEQ ID NO: 200417 - DNA, 702 bp, Cannabis indica
gttattttttctttaatttaaacttttatacggttatttctttaaattttatttttataaacatttttaaactaatatacaattaaacttatttacatattatacggaggatgtatcacttatctccattattttctcttttttatttttattttccccattttgcattgttagtctttttttaatctttattcctctatttttctgtgattttgaataatgattattagttgttctcgttcgaatttgtttccatctccaaagaaacctaaaaagagtaccaaatcatcgaaacccaaaatagttgtacagaaacaatttaattctcctaataaaaaaacaaaaattggtaatgataatggtgagccatcttttaagtgtcttttttcctatgtttgatgatgttaggaagactaagagaaataaaattgataatgatgataatgtagctactaataatctccaggtatttttggtttttagatttaaagcaaaataaaaattacataccgtggtctcttgcaatttgcataaattcttcaaacaattatgatatctgcttagctcacttgccacttggccatttgcaaccatatcatgacacgtatactcatatgtctcatctgatacacgtggcattaacccatatcactacaacaactgccccaattttccacaaaccataaagtagctcttccaatc

SEQ ID NO: 200418 - DNA, 1452 bp, Cannabis indica
actgttgaacttaaagagcttcaccagtttcgggatcagactcgtaaggagactgccaaggctgcgagggatgctttgctggctccaattacttgtcagcattacgaaaagcactttgatgacggggtgttcatgtgttggaaggctaataatttcgaaccccgtcttcctttttatcccaatcccaaggttgttctagctcagttttgggagaaaaacaagaagttggatgttgtcctagctgagcgcaggggtccccgtcttcctccttgagttgattgattaagtccttttcgtttgtcttcttgttcttttgtttcactcttcaccccacttttaagacaattctatttttatgttttctatgttttaagtaaggggagactttttatggcccggccccaagccttttgttctttatattttagacaacctatataagtttgtttgttttgttttctttatatttggcctatttttgcacgcatgttatgccttagtacccccttaagtgacataaaaacaaatttttgggtcacttagcttaaagttgcatgggatatctcatatatttgtccaacacaggttatcttacagaataccaactaacattctcataactattgatggtacttgcaaaggtgatcagcattctaggcccaaggtactatggatctatccatcctttttaacttatagttcccgaagcctatttcatcttctatttcatatgggccttcccaatttggcccaagtacctccactcctggctcttgggtggctgggaagacccttcgtaggactaggttcccaatggagaatttcctatctttaacttttgagttgaagtatttggccacctttctttggtaagctgccatccatatttgagattccttccggagcttatttatttgatccagtgcctcttccagcaaggcttggttcgttgctggatcatacgtggcccttctgtgggatgggatcagggtttctactggtaccacggcttcgcatccgtacaccattgagaatggggagtgtccggttgtggttcttatggtggtccggtaggcccataatacttgtggcagttctttaggccagttgttcttgcaggccagcagttttttctttagggtgacctttaatattttattgacgaattctgcgtgtccatttgtttgtggccttgcaactgcatagaaacttttgatgacttatgaattcatcgcagtcaaactgctttccattgtctgagactatcttgtggggaagcccatatcgatacacaatgatttttactacaaagtccaaggctttcttggcagttatggtcttcatgggctctgcctctgtccactttgtgtaataattcaccccatggcatactttaccccaccctttctcgtaggtagggagccaatgggatctattccccaaaccgcaaag

SEQ ID NO: 200419 - DNA, 1257 bp, Cannabis indica
ccctccattcctcgacttctttgtcaggtttgccacaaagctggacatactgctgctatatgtcattacagatttgataaaagctttgttacaccaaaaatgagtgagccaaaggcctatcttgctgagattgatgatcaagaagctcatcaagtttattctagctctgcccttccagaatttatggatgattttgagtggtatgctgataccggcgcaacagatcatattgctcaaggcatggagaaccttgaatctgaaatcccctattctggacctgatactcttgccattggcaatggaaaacgtctccccatcagccatgttggtaaaccctctcttccctcctcctcagttcctttacatcttaacaatattcttaaagttcctcaaataacaaagaacctaattagtgtgtctaaactcactgaggacaataatgtttttcttgaatttcactccaaatgttgttttgttaaggacaaggtaacagggagagttttgctcaaggggaggcttaaaaatggcttatacacactatcccatagttcttttccatcatctcgggtccagttagagtgtcatcttgcctcaactcaagccaaagcagaatcctcatctttgtctccaacttcagtagctgtcaagtcgttagagtccattacctctattcttgatcaatgtaataacaatgttgttgacacagcaccctcctcatgtaattctttacaaagtaataaaaatgttgatgtttttcctactgaagttgctcatccttctgctctttttattgctgaaaaatcaaatgttaatctttggcactcaaaattaggccacccttccccccaaatcttagccaagatattagcttctttaaatctttctgccaatcttaaagatttaaaattttgtgaggcatgcaaaagaggcaaaagcagtaaactcccctaaccccatctctgcctcacgagcttctcaacctcttgaattggtccacaccgatttgtggggaccatctcatacaccatctaaagaaggtcataggtattatatccatttcattgatgattacagcagatacacttggatatttcccctatcccttaagtctcaagcctatagcactttcctccaattcaatatctttgctgaaaagcaattttctttacctataaaatcagtccaatcggattggggaggagagtacagatctttagcatcatttctaaaccaacatggtgtccatttccaacatcc

SEQ ID NO: 200420 - DNA, 977 bp, Cannabis indica
  modified_base (892)..(892): a, c, t, g, unknown or other
attcgagtggcaaaacctgcggtattctccatatgatctctgagcctcccaggtgtagcaacaagaatctgcaaataataaatatgtaatgtgcaccattaattctgcttgaaacaaacattgccatttgtttattttagtggcttcacagataattaaaattcaacccaaacacatccattgttaagttgacaaacaatttacaatttgaggtgaaagtaagaaatggaacagctggaacgtgacttcgacaaaccaaaagtttcgtaacagcatacaatgcattattcacacgctttgatgtttgataagtgaaaaaaaaaacataaactttgaactagtgttttgctgtgaagataggacaaacctgacaagggtttgcttgcatgcgcttctgttccagagcaagtctgtacctcctattacaactgtacaccaatagttcaatcgatggaagctgagagagtaagcagagaaagaagaaaataagatacttcatgatagtagactgataacttggatatacaaaaaataaatagagaaagcaaaatccagataaacctaaaggacattttctgattttcacataattgatatgtacaaataagagagagtatgagagccaaggaattaaaagacacttttcatgttttaagtttcttctaaatttttcattgtactttttttttttaatttttttaaaactacatgatatagaaagtttaggattgattcaagatgccaaagactcaaagatggaaattgttgtggagcaagttctactattaaactctatcaaaacaagccaactttaactcactgagttttgcatatgaagcaagttctactgataaactctatcaaacaagccaactatcaccatcccccccanaccacacacacaataaataaaaaaaaaacgtgtactaccaaaaggctacagtttccgtgcctgtttagccttggcaagactatcc

SEQ ID NO: 200421 - DNA, 2448 bp, Cannabis indica
gagattgaaagaatgtaagaagctagccctaaaattaattgttaaatcaagaaattttaaaattagatgagggcaattgggtcaagtgaaaaattcatcaaaccaaaattgtagcttcccttaaaaactaaaatcccaaagctagggtgggccaacttttcctaaaagctataaattacacttaaattttaaaaaaagctattttttaaattttacaaaacacatactaactcataactttttccaaaagtgtttttacctaacgaataattataacgaataatctaaatttataatttccccaatattaggaaatttattggcttaattaatatcctttattctaataagaataataaataataacaaatataattagccaaaaaaaaaaaaacaaatatatgatcagcacacaataagcttatagtggtttagtttcaatctctatatccatttgcggcttaacaatttagatctttaattaatttaattacagagtgttttatttaacgtattaatatataattaattatatgtatacggtcgttctatatgaaatctaataataaattaaatcatgttataatataccataaatcaacttaattatactagatgctatttatatattcatgttataaaataaacataaaataattaggccaatcctgaaatatatatatagtaggtgatgaaataatttttgaactcttatttagaagaaaaaatgtagtattttttctaaaaatagtaaaaaaaaaagtataaaaaaaaaaaaaaaaggttaggctctaattaaacacagacttagtctgcttaaggtactcaattagtatataatcaaatattttatttaaaaaggtttttttataatatatatatatatatatatatatttattacaagtaaataattaaattaagctaggacaaactgctctctcttattaacaataatttagtgttaattaattttttttaatgatatgtgaaaaaatttcttagaatcatatatagtcttttttattagaaattaaatgttgaatgcaaaataagaaattaagacgaacatgactctatgggaatcctaaagcacaaaaggttctcaggaggacctaacaattaaatttaacaaaagaaatatattaatattaaactatgcttataattaaaaatatttcataaatattcaaaaataataaaaattatataaagaatttacaaatattcaaactatgctaatattttacaaaatttattttttatacaaaaaatagttaattttctattaattattttcagtaattttaaatactttaggtaaaaaaaattatataattaactacataataattaatgtatattctaattaagatgtaagttttttcaaacacaaattttattttacaccgtataataaataatgtaaattaatgaactaattaattaaaattattcttttgtttaattttggtggagaacatgttagaacgatggtagtggaagattaggagatgaataatgagaataaaaacaaaaatcatacaattattgttattattattattaattaaataattaatttgtttgtatacagtcaaagtcaacggtctcatctggaaaaagggtcatggtctttacattccagtcatcaaaaaggaccatatgatataaaggaatctaccaattttaaattaaaaaataaataaaaagttggcataaattgcatgcttatatagttaattaatgaattaaaattatgttctaaaaaagagtgcagggattaattcatttgttaataagattaatgtattaattaattagacaattatgtatcattattacttaattaaacaaaaagattattgataaattaattctacaaattaaaaattttaaaaaatactaggaaaatatataccaacatgcaacataatatatgaaagaacacactcaaaaattaacatatatatatatatataatttggcagttaactcataaaaaaatcttactttttaagccaatttgcttgctcagaatagctatcgggttttttttttttttttaattaagtttgagatttcttaagaaatcatgtatattattggactaaattaattagtgaccacagtattaatcaaattaggcatctttcaaaaactaattaacatgataatatatattaatggagaaataaataaccaattaattaattgaaaattttacatatagtagaccaaaaatttttttaaaaaaattatagatcagaaaaaataaaaaattatattttagttgttttatagtttatttataattgtcatggggttattttttattgttttatagtgtcctgagaggttgattaattttttcatttttttagttgtttttttttattttttttctgattaaagtgtatttttataattttaaatattttttataaat

SEQ ID NO: 200422 - DNA, 900 bp, Cannabis indica
aaaaacaataattgtgtgagtaaaaaaggagaggattgatggtttttacagctcaaatgtgtgaatcagaattaccatattcagctaaaaaaaaggtgtgaattaccatgtaaggttaggtgggacccagcgcacctgaatgaggtcctagctgattcaaagctgacttatcactaaccgcacctactaagaaggaaagaagttgtgggtccgtttcaagacagtgacacgtgtcatgattctagacgggaaacctcacactccttcaactttttatcctacactctccaacacgtgaatctatcccaacttcccaagtaccaacaagagaatattcctatcgctctctcttcactacttgctagagatattcaatcttcatgtttactctttatttactattttaccctcgtttcaataattaactctgtttacttttgagtcataaacaaaacgacacacaccacaccagaacattgggcccgaacgactattaaaaaccctacaaacacgtcagcaagggcaagatagtaaaatcataccacgagagaaagttcgacggtgacgatcaatcaccagaatcgacgggacccacaaacgtggcgaaaatacttgaaacccgaagattcaaaaatcatacaaacttaatcaaaaaccaggaccacgggagaatccgccacgtgtacactatgagcgaagttttggtcagaggacagaatggtaatttgagtttcactagaatggtctatataaccttaagcttcgttagagttcagaagaaaaaaaagaagaaaacaaaaacaaacaaaaaaaaaaaaaaaaaccgaccgcctcttctcgtcgccgggaagggttcttcggtttttgataagagagattcgaaaggaagaggaaaaaaaa

SEQ ID NO: 200423 - DNA, 937 bp, Cannabis indica
ccttgaaattgttcgggattgttgggagaatgggggtgatgagaacttgcctagtaagttgtctcggtgtgctgataagttaagtatttggggaaaggaggtgactggaaacttcaaggttcgtatctctcgctgtaagaaagaaattcaaaggctggccaataaaagagacccggcctctattcaacgtcacaaagaagttaaagaagagttgtttcatgttcttgatcagagagaagccttttggaagcagcgttctaaacaactttggttgaaagaaggagatcataacagcagttacttccacaaggctgccacaactaggaaacgacacaacaaaattgtcactttgaagaatgatagtggagtccgtgttggatgggataatgggcttgctcaggtgatgattgactatttctcaactctatttcaagcttctaattcatcttgccaagaagtgattgatagtgtcaatagctcggtgcctagtcttgttcatgaggagttgagaatggctgttactgaagaagaggttaaaaaggcgatctttcagatgcatccagataaaagtcctggtcctgatggtatgacacctgcgttttatcagaaatgttggagtattgtaggccgtgatgttgtaaagactgttcagagatttttttcgacgggggagttcgatccgggttgtagcaaagctaatattgtgttgattcctaagaagaaaaatccagaagatatgactcaacttaggcctattgctttgtgtaacgtggtgtacaagacaatcacaaaggtaatggtgaatcgtatgaagcctttcatggatgctattgtagccgacactcaaagtgcttttatcccgggacgccttatttcagacaacattctcatttcgtttgaggtgctccattacttaaagcgaaagagaaaaggaaaa

SEQ ID NO: 200424 - DNA, 507 bp, Cannabis indica
aaaatgtttcccctaacttttctctatttatttccctcaatatttttctgtgcttaaatctgagatccaaacataaacaatcataacacaatatttctcattcaaagagaatagcagaataaataagcatggagaagattaaatatacaacagagtctatgatacacagggatgtaaagtaagatatccagcgttgttaaaccatataatgctacgcaaatataaaagaacatcactcctgacttattacagaaccccacatctcatgctagaacagatcacatgaagccaataactcgaaacgggagtatttagcgctgtaattagagaactgattctgtttttaaggatagaaatcatagcaattttttctctaaaaaaattaagcggtgttcagcactactgtgagcaaacaactttataaaacaaactaaagaaaacagattattagagaacaaacattactttccgtgttctttttaaaatggatatatatatataatctac

SEQ ID NO: 200425 - DNA, 1289 bp, Cannabis indica
taaaactaatgcaggaaaagaaattggagaaaatacaagtttttctgccattaatggcagaaaaatatgtattttttttgtttttttttacaatcccgacgatttaaaaccatcgagaaatccacattaattagctacggttttgacccgtcgcctattctgcctgttttacgatggtcgtataagcgacagttatagaaactaacaagaatactttaaacgactgtttaaaaacgttgagaaaacccatttttgtagtagtgtcttgtgctctttctctttctttgttatagatcagcttaaaaaaacatgaaacattgaagaaaaaattttcaaagacaatatactacttaacaatgttcaccaagctcattcgtgaataatagtgtctaacatcatcacaagtgctcatactattttttattgagatattggcagcaaaatcttatgaattttatttttttaacacttaattacctaaatcaaaattttgacgggaaaacctattaaactcttattctattttgctctgaacactttcatccaaagacctccatcaaagtgtcatggtagactgtctacgtgtacactaatatacacatgaaacattttaagtggtccacataatattaataatttaaatattataatttttaaaaaattataaaagattttcctttagacgtgacgcattttcctttcttctggctgcgagacccaatgccccaaccctaattccatctcttcttcctctctctttctttctctctcacccttctattgcgcgatggtcgatacggagatgaagcttgtggtgatattgtattgtcatccactccactctgccataatttgaaactatgttgatctgatatgggcatcgcgtgttgtacgtatgacccaatagcattatactgtcgtgctccttattgaaggactgccacattgatacaacattagattcttttagtggatttcctaatgataactagctataaccaattatatcatcacacctcttagagcaactccaatgctctatatattcatgttgctcattagagcttgccaggaggtgggctacatttaactgtagctatagcattggagaaaaatagttgagcaactacagtaacttgacaagagcaatggtgatatctgacttttctctccttcttttttttaatttcaaataaagttatttgtttaaacaaaagaaagtaataaatagaatattatagttaaaatgaatgataatagtatatgagacataattttttagagtttgc

SEQ ID NO: 200426 - DNA, 862 bp, Cannabis indica
cataagatcataaacaaccgtaatcgaaacgcacaaaagacaaatactaactctcaaacatgtcacaagacaagactgctatttatatatttaaaataaataaataataatccaacatattaaactcatgcggtctttacactttgagttttcttaggcgttatgaagaggctcaatctatttggatccaactgctcatgtgaagccgacggaaactgtggttgggctctctagtggctcgattgagactttgaggttaggtaattttaatctatttgtggatatgggtattaatgaggaccacgattgtatgtgtctcgaggcggtggtgatagaccgtgacatggtgattttgtgttcatcaagtgatccagtggcagcttcctttcatcctcatgtggtggaggcagcaactctcttaaatgagttgatgttgtgtcgccgtttggggtacaactccattactgttttctcagactgtattcatcttgttcaagctattaatataaggataaatactaaattgaatttggtattattattcatgatatttacatgtttgtttcttttttttatttttttttttattttcatttactcattataaaaaagcttcaaatggcagttcattctcttatacgtttagctttattccttaactcttctctaatttggtaaactaattacctccttacctctaatccttgacttttgtgtattgtcctttaattttagtttttcgccttttaatgaaaattttcttcggttaaaaaaaccatgtataaatacatgatcaattcaatatacacatatggatgcatgttttgtcggtgctctcatgttatatatatatatcaaaatt

SEQ ID NO: 200427 - DNA, 1317 bp, Cannabis indica
taatagagaacttaagatcattatagaatgagtctcctagagaatgtagagactaaagttaaatagttagattcctccaaaatgaggagtcctaagctaagtaactaatctaatgccaccataacaatgtcagcttaaataattgtgaattgtcctacaaaaatagcataataatgataagatgaacatatctcaacttcaccacacttagaagaaactaatctatggagaaaatgcatgcaaagaaaaagcctacacataaagaataaacatcagttcagttgctttatagaactaaacaaaactatcagaaatatggttaaaagcctgatcataaggataacactaataccaacaattggaaatcatacttaaataacaaattaaaagtacgattattgggaaacttaaccaaaaaaagaaagtttaatatcaacaaatatttgagtttggttcctcccaatcagcattggtaagcccaaatgtttgtcaatggaattagtcaatcgcattaaaaaagtctcaacataaaaggattgcaagtcttccggagtatttgggaagaagtacattgtagacttgaaaaatttataagttgtagttaaaaataaaaaataccagtcagacacaaaaagtcatactagaaaaaagtggcaagaaaaataaagaaaaaaaaaaaacatataaagtatatactaaaccatactcttctgaatgctgaattaggttagatttacaaaaacttaaacaatagtataagcttataaaataaaatattgctaaaatggtgtctattttaaaagaattgacaactctatttaattggtggtatctttgattctcgcctaccaggacactagtattatttggttaaaaactatagaaatatttgagatatatgtttgttttgtattttttttttcatatcttcataaatatttataaatcttttgaatttatgtgtgtgaatttatattgaacaagcaattgatctctatttattgatatttgtagctttcactatgtgggagacttgagctaaaccacttaagttttgttgatgatgttttattgttttgcaatggagatttcaagagcatatactatatattgcagggtctgaagctcttctctcacacatcaagattgttccctaacccctccaaatcggctgtatattgcagtaatatggcggatgcagaggtgcaaagaatacttgatgtctctggattccaaaagcaagatttgccattcaagtacctgggagtgcccatttgcccaaagaggatttcttcaacagattgcaaggtattggtg

SEQ ID NO: 200428 - DNA, 1143 bp, Cannabis indica
atgaaaaaaaaattagactaaattttttttatcgaatgttgaaacagataagaataaaaaaatttctcgaatgctgaaaccgataagagtaaatcagtgcatcatttctagaggtactttatataattttcctatgtacatgtgacatgtttcaactaaaggtgcattaattatttattttatattaggtgagtaaacaaaatagtgcattcttacattgatactagacacatttttttattctctctttcaaaaattacaaataaattgatgagttttctaacaccttattgaagcactaatcaatactaaagttctatttttattttcatttcttgattcatattttttagtttattgtatataatatttataaaaattaataatgtgatattttcttccatcaattatacttaaaaatgagttttagtcatcagaatatttaatggttttgttggatgtgttatactgttattcaatattggcccccctacaatctagttctggctccgcctctggcagccaccatgccatatcagccaattatgagcctgccaaagagaccaacaaatcatggcatcatgacacaactccgacttagaaaaactctccaaaacttgatgaaaccaacttgagaaaactaataccgacagaattgccataacgccttatcaaccctcctaacacgtattttctaatgggcaatcaaccaaaatgtaaagaattgattcggccctatcattacacaccggacaagtaacagaaacatccacatgcctaccctttaaccgagacaagataggtagacacctagaacaagctcttcaaagtacgtaaatcattgactttcgacgggattttgagattccataaggttctccaaaagccatagttactatcttttaaccatcttccatgcaataactggagatacttataagcacttttaacactatatatctcagaagtttcttaaaatcaatactaatgattcgaaccatgattatcattcaaaacaatattcttaattagataacggtcaactgcattgaataaatcattaagaatttcgtcatcccactctctagcccctgtcaccataatttgttgaaccttcactccctcaaaactcggatggaaatt

SEQ ID NO: 200429 - DNA, 1014 bp, Cannabis indica
tggaaataccccaaatatcataaaaatagtagaatctaaactgccccaactggtagactagttcccaacctgaaaaccagttctatgcggtcttcttggggatgaaccggaattccagttctgacaggtccatactaaacttgtttacctattcattatagccaaaaccttctaacaactcaattcaaccccaaatcatcccaaactttccagtgtacctaataaggccagaataaacataatccaagcaaaagaactgaataaacacctcttaaacaaaaatcacaatgagagagaaaagtttgagctcttatagttcaaactttcctcaaacacaaaaaaacccacaattcagacctaaaacagctcaaataacaacaaaccatcctctcaatacaaaatcaaacatctctaaaagctacagaaccctaactccaaaaatcaagcataaaaacctaacttataacttaataaacaaagagaagtcagctagggagttttaccttgaattggaagcaccaaaaccttactactaagacacaaaaaaatgtagctaaaaccctatctttcttttggtttctctaaggtggtcgagagagagagagagagtttaatttgtcctaatttttctaattcagaataaatgaattattgtagtgtttatctaacttattttaataaattttatattataaaacataatataactccactaaaggacgaagaattcatatggcaaaagaccaattttcccttacctaagcccaagagcagccttgccacctagggcaatttcggtcaaatctaagaccacaattattcccgacattccaaatttctatctaatttgccccactattactaaaatattaaatcataaggaaatgtgactctactggccaaatgtcgcgttccactgttaccaggcataaaatatgaaaaacatgaaatttcatacataacataaatagcacacctaaattcaaatgtatcaccacaaattcacaaatcata

SEQ ID NO: 200430 - DNA, 1021 bp, Cannabis indica
tgggagatcatatatatatatctgaaatcataagacattatagtaaggatttgaggcgtgggagtgttgtctattagttaggctctgctagttttgggaggtcatgggtactttttccgccctatttacttgctaagttttcttcccttatgtttccatggggaggtttgttgttaatgttatgactggatatggatttgtaggaagtgacataaaaatatttactatattcaaaattaatttgtagtagtttatgattatctgaagtgtctgaactaactcagttactcaaggttcactttgctcatttcttcatgcataaacattagtccctaccaacaacaaactcactcctatgaacttcatatctttcactagtttctcctgattccattaatctctttctttctttctcttgagggcattattttgtgttaatttcgaaaacatggaaataaattgttgtcctttattatgatattgaagttgttccctccttttcatgactctatacagagatgatggaccttaaaagcttattaaatttgtcacggcttgtttgttgtccttattctctctgctgtaaggctttgtcttcttctattgtatattttatttttgttattctctgaatagaatcttttataatgaagtttgagatatagaccaagaagaagtcattctgaggtttgttaaattgctaattgaattgtcctttcattgctttctctgtacaaatccttgttatctgtctcacaaacagtaaactgaattttctcagtttcttgttacagtcataaattcagatacctttctcaatattttactaaaaaggttatttaggattttccctctaaattattgccactactaaatgtaagcaaattgaaaagaagaagaaaaaaaaatccaaaacagtgactagttttgtagctatccaaaacttcaaccttatgtcatttctcaaaattttggtgcaatcaaacagattgtgttgtattacctaattattaaatgggat

SEQ ID NO: 200431 - DNA, 905 bp, Cannabis indica
tttttttttgagggagagaaaatcgtttatatctagattataaatttataactccgattaaaaataaaattctagatatattgagatattttatttttcaaaattcgtaacttcaaatttgaaatatttattctatccctacctataaaatcaacctctcattgattatctcataagtttccaaatctactctcttcttttttactctctaaaatttacatgatttagaagagaacaaaatcaagtagtcctccaaaatccatataatattatcatatacgatacgactaataatgatgatccagaggttacttccactgctccagaggtcactttctttgttccttcacaagttacttctgttgattcagaggttatttccactgctgctccacaagttacttccattgctccttcaaaaatttcttctactcttcctccacaacttacttccaatgatccataggttactttcactattctataggttagtaattgaactataacatattgatattattattcctttcattaaatctttatttatgttaattaattaattgtttgattttattattgtatgtatagaatggtgcatgggaaacaaacagtaataccaacgatgattctattttttacaagaataacatctttatttgaggtctacatcaccagaaggaaacagaactaaaaagcctatttggccacatatggtgatgtgattgtgagaatattaagcgtgacatttttactggaaaaggaagaggttttgtgctgtcacttttagtacggaaagaagctgtagaagatgtgttaaaatgaacctttttataaactaaacgataagcatgtggaggttaagagggccatcaacgagaccaatgtaagtgttgcacagcccaaca

SEQ ID NO: 200432 - DNA, 1589 bp, Cannabis indica
ctttaaaacagtttttttttttcttatttttacgaaattctacatagaaattcctattgtaactagtgctacaacctaaattgtaacaaaaaatcgtataaaaacttctattgcaaccagcgctgcaatcactttagaaattaaaaccataaaatttaaaaaaaaaataaaaaaaatatatagaataattttccttctttttttttaccacaaatacgtaataaaaagtttatagagatacataattttacacagaatacttatcaaaactttaccatatataatttaaagtaggaattacatcatttttaattgtaccataaaaaataagtataatttgagtttatcatagtcagtattttataaattacatttttacatttattacattttatttgcttacaatttttagttttaatgtttctttaagagtgcctttagaagtaatcgactaatcgtgtaattaatataaaaaattgtatataattaattttttttatatttgacaaatgaattagtaattatatagtttaataataataattatctaaaaaataataatatttcatttttaaataatgtaatctaaatctctcaattatttctaattacataattatcgtgtaattacttaatccaacaaatagaccaaatcttataattagacttcattatacttattccaattgtataatagctttccaaacgaacctaacaaataattttcattaaaaaaaaaaaagaataagttaaaaacaaaaccaaaaaagaatagaaagggtaaaaatgtaataacagaaaaagaaagaaaaaaaagggaagaatttgagattgtgaataaaaggagtcttatttggtaatttcacaaatttccttttcaggtcctttcgtcgtcgtcgtcgttctcctcagactttgttctgactatgcaacccaacctctgcagagagagaaactaataaatcaaaaaaaaaaaatacacttgtgacgtttccaaaagtcaagaaaccctaaaatcttctcgttttcatggaaaatttctcacattcccggcatccaaacagggctacggcggcgttttccaagaaaatttgtggcaatgccgccggtggctttgcgccttcaaagtccctttacgatgatgtatacggaggtccaccgaagttcggtgtttccactctatctcctcgaatggaagactacggtgagatttttggaagttttcaggcttctcgagcttcgtcgattccggtgttggatcttccggcggtcgatgaagcggaggtttatttcgatgttaggagttctagttttgactattccgaggtttttggtgggtttaatggtctagatttcgctgtctcttatgaggagttggtcgatcaatctaagggtatggatggtgattcttccgacgaaccttggtatgatcacgtattcatattccttttcttaaacttcttagctttcactttttccctcattttgttaaattgtgagaaatattttttgtcaaaatgtctgaaaaatatgtctatttttaagttttttgttttcttccttcagaaaaaaaacaatttttttttttt

SEQ ID NO: 200433 - DNA, 1606 bp, Cannabis indica
ttttttaataaccaaacaatggataaacctattcatgtatccaaacacccctaatgaagtagagagtgggccatgatgtgggcctaacacgtcggcagaatccaatatggatgtatccaagcacccctaaggaaatagtgggccatgatgtgggcctaacacgtcggcagaaaccaatatggatatgtatccaaacacccctaacgatatagtgggcctaacacgtcggcagaatccaatcttcaaagtccagttaccctttttggcaagcccatcacaataaatttaggacaaataaagaaagaatctttcatttcagttcagccgtgacttgcaacttgtgtttttttttttaattaattatgatttatttaatgttcctatttcatacaacttaaaaattaaattaaaagaaaaaagtaaagtgaataataacttattcataaaaaagaaaaaattatatcaaagataacataatacctagtgatagaaatttgacttccggggatgggtactcatgcagtacagaatgattacacactttaatgagtaacggagagtgggtagagtgcaattttatatacctcaagcagggtaaaatcggaggtaatactatccaccccaaattcgacctaatatatattttccaaacttttcatataattttcatctaattatattattgattatacttataaaattaactattaatcttttctaatttactctgtaataaattttttttaataagtagaatatttattgattgtacaatcaatatcttgttttttagtttttattttgaattacattacttcatttttttttcttattaaattgttctaattttaatgagtattcaatgggtattcatactcaatgaagatttttgtactctaaacttatcatggattaagcgggacaaagacgaaaataagaaatatgataggaaacggagacagaattaaaaggtacattactcgtttattacctacccaatttctatccctactaatacatgttgcattatgtaatgtactcaaacacacatataatatattaaatagcaacttgtgcttttcttgtaattaatatagaatatgcaacttgtagttgagcacactaactacataatgcaaccgcgtttggtttgcaaaactagtgaagtacaatcattcaaacttcactaacacaaacactccacactactcatcttaaattaaaatataacatagtgtcaagaatagttcatttttagaataactgaatccaaggaattatgggaatgaatttattatataaatataaaagttggtttggttggattttaatgcctttatatatatatatatattaaatataggcttttgtatatctgtatatatctctattgtaagcaaaatttgtcatcaaggatgacccaaaaaatagtcaaataatttaaattcttgcattgttcaatgcatttaaaaactatatactcttaatagttcacatgtatataatatcttaatatgaacacaaatgactttgtggggtcttagtcttgccaattggccaatattttctatatatattgacatatatacatataacaaataaatag

SEQ ID NO: 200434 - DNA, 517 bp, Cannabis indica
ttttttttcaatctacacagctaaaatataatttgtcataattgtattgtaataattttaatcacgtgacataaattttgtggtttgtagtgatcaatacaattttaataaatcaagaatcatggttgtggtttcaaaatttatttaaatttatatttcattttataattttaattttcacaatattttattgattttttaacaacacaatatttcattcattatatcaacttaataaacataaaataaaaattaataaataataaaaataattaatatatataatatttaaattcaccgcacgaagagcggctatgttgcctggttcatgactaatggaattttataacgatttgcatgatattaagcattgtttttttctttataaaatgaggtaccctagttcatgaatttttgtgggattatttttgaatttactattaattgtccaaaatcttataaacatgaatattgttttctattctttcttattaggacttatgacatttctgttaat

SEQ ID NO: 200435 - DNA, 857 bp, Cannabis indica
cttttaaataatatcgctaactataattgtgaggcaccacctatgaaaagtgcttgtcaccactagtgctcaataacaatactcctctctttttctacacacaaaggactaaattaagttgtcattttggctgcaaattaaagctacagcaaatcaatatttttacatatgttacatgcattttatcgaaaatacaaaaatgactaaagaaaagaaaagaaaaaaacaaataagcatcttattacatagtcttagttatatatacaaatgctatattagggagtctttatcctatctagtcgatataaaacctgaaaaataaacacataattaaagatatattatacaattatatatgtgtaagttatatgaaagtaaaaaaaaaaagacatatagaatgaagatttttattatagtttggaaatcaattattaagtggtcataccagaacagagtggatttcttctagaaaaggagcaaataaagaaatcaatgtctgaatttcttcttttagggtttcatatttttcttcttttgccaagagcacactcatgaaaactttcttctcaggcactagttttacagctacctgaaataaaaatacaactaattattatatatttagttatgttccaaaagtaataagtaataattaatttacggtatgtactttataagcagcccatgaaatccagccatgccatgatttgagagtagtattataagactcttccactgcttgttccatgttcagctcagaatcctttgtcaagttttgtaacaaggccactgtgaaatccaatgatctgggaaatagtacgtaattaaatatatattcaaaattattgttattatta

SEQ ID NO: 200436 - DNA, 550 bp, Cannabis indica
tatcgctcctaggcctagccagataatgacccacaaatctacgaacctgcttgtcgtggcttgtagaagtagaattactagacatatacaacttaaaagagaagaatactgtatggttaaagaagaagaaagatatataacttagtgttaacagtctgaacttgttaacgatataaatagacctttttaactaacgcttgacgataattctatgaaaatagagttatttatatctttttaagcattaaattagttttgttctcaagtatttttagtttattttagtgacttttatttaattttatttagttttccataaatattaattttagtatttttagattattttttaattaattttgtaatattttatcaattttatttagtttcccatgttcaaaatattattcacaatattgtgtatttttttttgtagaaagtttacatgcacattttggatttattacatgggtcaaaatatggagcaactatcattaaaatgggctcacaaaatgaattaatatttcttattgggctcttgtttaagaaa

SEQ ID NO: 200437 - DNA, 1395 bp, Cannabis indica
aaaacttcatacaatgcatcaagaactctgaaggagggcactggcttcgggatcagaaggaaattgcagactgctttttaaagaattttaggaactctttagaaaaaatcagaactgccctactccccaactcaatgacatcttccctcaagtcattacacatgaagaaaatctgatgctcaatgccatccctagtgctaaggaggtggctgcggcaataattgaaatggagaaggacaaagcaccgggaccagatggactcccaggaagcttctattcccaccattgccgcacaattaacagtgatcttcatgagatggtaactcatttcttcacccactctgaactcccacaattcataaatgacactgcaattgttctcatacctaaaaaggatacacctgtatacacaagagactaccgccctatcgcattatgcaatgtcacttataaagtaatctcaaaaatcattgctacaaggcttcggggaatcattcaaaagcttatctcgccaaatcaaactgcatttgttaaaggaagatgcatagcggaaaatacaatgattgcgagggaagtggtgcattcaatgaaaaagaaaagagagaagaggggattcatgatgatcaagattgacctggaaaaggcctatgaaaaattggattgtgattttatcattgttgtcctagatcaattgggcttctcccaacctttcacaaattggatacgggcatgcatctcagtcaaagaaatcaagcttcttcttaatggttcaatagaagggagagtaaagccagaatggggactaagacaaggcgatcctctctccccgtcgttgtttattattgcagctgagactttatcaagacttattttcagcaaggaaaaaattggtatgatcaaaggtttcaaaatggggagagacggtaccgcagtgaaccatctaatgtttgctgatgatatcatcttattcgggcaagcaactctaaaagaggcaaaagcgtttaaagattgtctatctacttactgtctttggtcagggcaatctataaaccttaaaaagtcctcaatacacttctcgaaaggggtatgccgtgggaaaatacaagcgatcacacagtattttggtatgaaacaaatgtcatcaaatgcaatctacttgggtctacccttgttcaaggcttcaaaaagaacggaggactacaaccaactcatcgataaagtcttgggtcgagttaaaggttggaaggcaaaactcctatccaacgcaggtagagcatgcttaatcaaatctgtaggctcttccttgtcaaactacatcgcttcatcagatactatccctacctctactgctaataagatagacagaactctgagggaattctggtggggtgatac

SEQ ID NO: 200438 - DNA, 2384 bp, Cannabis indica
agagttttttgggctttagggactttaaaaaaaataaataaaaaaaaaaagatagaaataggactgtaattaaatattttacctttatatgtttgtgtctttattttttagtttttatttttaattttaccaccaagaggagaaggttgaaaaatattagaatatagaaaatattattggtgcttattagtaatttgcaaagaatgtgaaagtctataaatatatagttgtgtagctattattagatatgaaatgagataatagaacttttttcaattagaagattaatgtacattttactattaataacatacattattataacacaattatgttttacttactaaatatactgacacatattttatttttataaaacaaatcgttcaaataattatactattttaattattaattaaaataaaaaactaaaatattaaataaaactaacactacgtggcttggcacgtaacaatcacctagtatatatatatatatatatatatatatatatatatttatttatactgaagtaatgtaagtttcatttactggtactattaagattagctaacttactatttattttaatttggaataattacagaaaaactcccataataattataattgttatacatataactctaactaaaaatggtaaagacaaaaatagtttcttacaagtttattgcaatcatatccctttctgacaatcaaatatcaacccaaaaacatgttgcgacatattattagactacgtattaaataagttaaagaaatatgtcatcacatgtttttaagttagcacttaacaaacttaattaacacttaacaactaaaaaaaagtacgactgcaacaaaatcgtaagataaaatacttttgccgctacttttttttattaagattatgtgtaacaattacaaatgttaatagaatttccccataaatatccctttttattttcaataagacttttattaacattataagcaaaaaaatttaaaccgtgaagtggttggtttcctagtaataataattaaataaactaattttggagaatgttaaatggaaacacaatatgaattaaatattattaagattgtgaattaccaaattcaatgcgcaacagcttcaagtcctcagtgccaaagtagttagatgtacctatgtcatccatttctatatggatttgggctgtgtctataaccactctacatggtactaatttctcaccaacaatcagataacaattctcataaaagccctctttgggtgctagatttaacaaacaggatttgggagcagacagtttatgtttattgtaagtgaatacctcctgattctttgccttcaatatgagtcgatgtcggcgacccaaaagctctgacacatatttcatgtctccgacagcaagggcacgacggacacgagtagacgacacttgtcctctgtcatttggattgctggagtttatgctaattgataattgatttttgtccataactggatttataatgtaagcccccataccatattcttcacaaagctttactagctctgctgcatcaccagcagctttatatccaaaccggtaattttcacctgttgcaattagctgtctgatttaatgattatcatcaaggcttttaatacacacaaaatgtaatgtgaaagaatcggcaataactcctgaagaaatttacctgccacaactccactcacaccaagatctttggctaacttctcaatgaattcttgaggggagagacatcgaacacttgaaaattcaatctcaaactccctaggggccacattaccacaataaggggaccaagaggaaaagacccgcttccgatcacactttgcaactattggaggcctgtccatttaaaataggagggaaaaagtaaattaacaaaatctatattccttaaacttggaatatgattatttttttaatgacagctacaacaaacaggaattacatagtttattcagcaatatatagaatagattgccttaatttccattgtggtgcaaagtattgatacttcaaccataagatataatcctactagacaatttatattataaaattatatcaatgcttccataaactaaggaaaaagatgctttgaatgaataaaacaagacatgaggcaatattacctggattcccaacccagaacttctgccatcccaacaaatgacaagaggaatggtgttccaacttttgaagcttgaattgcaagttcacgatgaccaatgtgaagggcatcaaactttccgagcgcaacaactccacctaaaaatgatttcagggaagttaagagttacttttctgagataaagaatatatctgccctaacttagtaataaa

SEQ ID NO: 200439 - DNA, 458 bp, Cannabis indica
taattaaataaaaaaaaattatatttataaaatattaaaagaatataaataaacaatattttgtgtatattttcaatgagtattaatggtaatattaaattttataactaatttacactttctactttggagtacaaactcaaaattaggctaggctaaatataagtttatggtatatttttaactaaattgaacccaaaatatacactatcaagatggtcttatattgtttggcaagaataaatgacacccaaatcagctaattgatttatattatgttaaataagatattcgtttccatttataatggtaatagaaaatgaccaacacaaaattaagaatttgtattaaccttaaattaacacaccatccacactaatagaggacattatgaaaaattcctcaatcacaaaaacatttcaaaacgttaatagtacagtccagactggtcataatgc

SEQ ID NO: 200440 - DNA, 1788 bp, Cannabis indica
taattttctgagttatcaattttcatttttttttttgcagcttttcagataaataaatgataaataaaaatgttttgcagtatagatatttaaatgattagttatattaataatttaatatggccacttgatttattttagattcatacataggtaagcatccattaaattttctattattagacatttttaaatgttgtaactaatcttcaaaaatcccatcaacatataataatactgtaaaaaatcttcaaaaatgtcataagattttttcctttttgaaaaaagcaacaaaaatacgtacaataatatataataccactaattaacccatgcactcacaagaccacgtgattcatgcattcacacctcatattagtgttgtaagtttgtgcaaaatgggctgtgcgtgctgtgctacgaaaaaatatgaatcgtgccgtgtcgtgctaacatttttaaaaggtaggtattatattcgaaattcggctattcattagaagctgacatgtgcagcactaattataaattatggttcctatgttgtgactaaaaggttcgtgactaaaatattagtcacaaaaattacaatatttttagtcacaatgtttattgtgactaaaactaaattagtgacaacttgtaactaaatattatattttactattttagtcacaagtaatataatttgtcgtgactaaagtcacatttagtcacaaaaaaattacattgtgactaaaaagttgtcactaaaagtaatagttttttatagtggtgtcctacaaaaagaatacgaatcagctcaaagaatataataattgagttctattattaaatgcggtttaattaacttgttccaattaaataaagttgatagaaatattcaaactcgctgactacgtaagcatatgcgagataagaattaataataactattaacagatataatttacgagacgatttgtccacctcgggataaacatagtatataataaaaacgtacaagacgagatatcaatgagtttacaactcattggcccacatatctctacgcgtggataactacattcatccatctcgctctatctgaaacggagttgtcacctcgcgaataactttacgatatgatgaagaacacgggaagaagaagcatatagcatttttttctataaagacaggatgactcacatttagagagaaataaccttcttagtcaacataaccgttcaaggataaatacaaaagagtagttggatagttattagatattatcccataaaaatgaaacgtggagaatgtccatgtttcatgaacagttgtaaatgaataaatcccaataaaaacaactgtcatcctatacatctatgaatagggacagaatttatgaaaaaaggaacgacaacttgagagaaaaaaactattatttataattattgagaattgtactctatgtccaacaaatatcttgaataagaaggactcgtggagtatataaattttaactgcaaaatcacgtaaaatatttggagttcatttattattattattattattattattattattattattattattattattattattattattattaaattctgtagtaaattaattacgtaaaatactatatatttagttaacaaaaatttacgttaacagtaggcttggcatgactcgtaaatctgatatttctgtaccttgttcatgccgaccagaatttctgaaccagcccagtccgttttcatattcaggcttaaatttatactttactttttcatataa

SEQ ID NO: 200441 - DNA, 1532 bp, Cannabis indica
ttccaacaactctcgccacaaataggacaattttttttttctcattatccttccaaaacaaggcacaatgatacttccatacatcaattgagtcataacctaaaccaaggttacgtaacttcatttttgactcgtaatgggacttgtaattttgtgcccttcgaaaataactcaatcaatatggagagtaacatatcaaaagaatggtcactccacttattgagaactctgagtgcatcaacttcaccaaagcattgagcactgattttttgttacccgagtacagttcacttttcatatccttaaataaatcgtcgtacttaccactacaatttagcaaaggctcattgaatgaatcaacgatagtacttgtatcgtcaaaaccatgatattctcttaaaatatcagtgatcatcacatctgccatttcttcttcatcgttgtctactaattctacagccggttgcatgaatgactccccatgaaaatatcaggtcgtgtacgatcgttggatgccatgcataaataaatgtacccagatattatccggggtctcaaagttcacatttatacatctcatgtaagggcaaggagtaagtccaacataatttatttgcatttgagaaactctaataaactcatccacactcttatgaaactctacagaccgtctgtttaaagtcatccaacttttgtcgctcgccatatttctacttaatataaaaagagaaagttcaaaacaaagttcaaaatgtgcacgtgttctaatccaccttctcactctattactaaaagggtaaagaacttatcccatccaaatttgtaatatacatatagtacaatctatgctcttaagattgcttctttttttatcaaaattttggtagcacctccccacagttctcataagtaagcaaactattaataagtctgccaacttacaagaacatgcgaggagacgacgtaccaaaatctttaacaaagaaacaatcaaatgaacaatagatcacactataggtatacaacaagcccaaactatctatgtggacaaaaaaagtcctggataatttggagaagcgtatttaagagtctttactgactcagtctctccaaacaggtctaaagaaaattgtgcgcgtaaaaaaaaaaattatcactaggtgataatacatatacacaattgttctatcctatctttggtttataaccaaagagatcaaatcatgataaaaattttattttatgctatcttacaatattttatgctattttattttaccacctacaaatttttattatgaatagtgttcatataatcttattgctaagtaaaaatatttaccaacttttaaaaattaaataaaattatcattttaatattttcaacttattatttaaattcacaattattttttcattttttcattttcaattttttaaaattaacaattcttattttaatttttcaagtttctaattttttaaaattaacaatccttatttttatttcatttcaagtttctaattttttg

SEQ ID NO: 200442 - DNA, 582 bp, Cannabis indica
ctggtaaaatattcccaacatgaaggttattaaagaaaaggttctcttgtgtatttagagaaaaatgagatatagagatcatatgtgaaaatgtaaggtaatttgattgaaaaaacttatggtataagtgagccttaatgacacttttcatctacccttacctaagcctaacgttaaaactcgttaaagtcgttttgatttcaaaacatatgttgttgacgttagtggataatcgggttgatatgttggattaactttgagcatgtaaattaatttttaatgatttttgacatttgtgagttatatttttttcttttccaagtttgagagctaaggtttgtattgtaagcaattggattgaaaatttggttttggaacagttgagtcatgcaagtgatggcagtgtggtgtgaataaaagttaaggcttaatttgtttgtctctattcatttgtttttagaaaagtttcaatcattactggagggcgagtaaaggttaagttttggggagtttgataggctaattttaggtgcattttatgaagtattttagaggtgtcttttagttgattataattatttt

SEQ ID NO: 200443 - DNA, 709 bp, Cannabis indica
gaagagcctgagagaggatacactcccgaagtccagcactctttctctttctctttctatataaacccaactccattaataaggaccacaaccaatatgcatttatttaaagtggggaaattgaaaatgaaaactaaacatgcacaaaaaataaaagattatatatgcttttgtttgtcaacaatatttatgtaagaccctactcttttaagggatgaaaccccacttgtacaaagcacatacatatattatcattgtttattattatttaacaactggccaaatacagtgactactgctactttgcaccctctccactctctttaatttatattattttacacatttatgttttttttttattattttatcaaattttatatttatccaattgtattttgagatattcttctcgaaattggtatggtatgtatttatcgacattaatatatatataccctcaaatgatatttaaacagttgggtagaattataggatgacggatgaaataaaaataaaaataatagttagctttgcatgacacgtaagtaacaatttgatgtcttcatcctcatctaacatatttacaatataagagacttcataatttcaaataagaaatatatatccatttaatgaatgtacatgcacacataaaactcacattttatccctcattcctcattcccataactgtgtagctcatgct

SEQ ID NO: 200444 - DNA, 1419 bp, Cannabis indica
ttttttggttataacataaaccataacaagtacaatccacagagacatattctttattatcattttaaacgtgtagcagtataaaataatattatccaataattaattaaagaaactactaaatcacagcacacacaacaacacattatttaactgaaatcaccaccagttccagacagattccagccaaaaagaaacataataataataataataataataataataataataataataataatttctgagtaaagctaggtagctagctagggctgcagggctttcataatgaagacattgtgactaggttaatcaaaaaaagtagatatggttgtgactaggaaagctaggagaagtagtttccatttgagctaattattattgaacctactcaacaaaatcacaaaatagcataaccccatttgagagtaatctatttttatgaataaaataatatataaaatttaagataattagtatttttttatttgaactttttatttaattttttttaactattaaaattgtttaatttaaaaaattttgtctaattttattcaaaaaaaaaaacttgaagtcaataaaaatttaagggtcacaatttaatacattggagaacacagataaatatcaaagttcaagatagaatttaataaataaataattttctaaaattgaacaaattaaacataaatctttaaatttaacaatctaattaattgagagaatttttaacagccttaattagcttataatttaacataccaagtttacatattttaattcataattcaagattcaaaagtacataaaacatcacaaaattcaaactttttctctaattgtaattttcttatatttctagaaactgtaattttacgacccataatatggccaaatgggcttttgccaataatgtttctggtatggtagaaactactattccgaatattatattttgtaatgaccgtgaggtctgactgtattgttcttctaatatattaacgctttatttcaaaaaaaaaaaaacaattcaaacttatataatatgatagccttcaaaatagtttagctttggtataaagagtgtgattagccaaatattgactgagtaagtctacccctatttataaggtcaggacatgcaaccaaggtacaaaacaaaatgagtagtaactctttgcatgtagtcattgactcattgttaggtaaaaactaaaaaccaatggaatttcacttgtcgttttggataactacaatacaaatacaatgcatgtttagggacagatgttaaatacagaagaagaaaaacatcataagctgatgaaactcttagtgaatatgatttatttggtaaggtggcacttggctttctactaattttagatgccaaaggcaaacaacagctttgatcaa

SEQ ID NO: 200445 - DNA, 731 bp, Cannabis indica
aatttataattttgattaattatgataggttggagaaagtaaatgttggaagcttaaggggaattgcaaagataataggaacaattatgtgtattggaggagcaattgttatgggattagtgaaagggccaacactattaaactcaccacaatcttcatcatcatcatccatagcacctcagaatttgctcttgggttgtctattcctcttcatttgctgctgttgttggtcattttggatcattatgcaggttaatatctaacctatacatatatatatatatacatatatttaggattggctaaaagatagtttttttagtgggctcacctagtctagtacctaaaacaatattttaaaaatacacatattttttaatagtttttgaaaatactacatttttttttaaaaaaaaaaatctaataattttattggtacctaaagatgctttttttaattattgagtggcatgggaatttaggaaaaggattaaggtggagagtaatgtgaaactcatgtttgttacaaaaaaaatgatatgatattgttgtactaaaatcttgtagtacccaccacattcacacctttaaaattgcaccaaaagtgtgatccacttgaaatttccttccatcccaacacttcccactataccaaacgccactaaaagtatacaccactaacacaatatgactttattaatcctacatttcttaaaataaattaggtcata

SEQ ID NO: 200446 - DNA, 881 bp, Cannabis indica
gaggacaatgggcaactcacactcacatcatttggtcttattacaacaagaaaccaatgagaaattttgctgtgatatatgtgatgaagatattttcgaaccttctttctataaatgcaattcttgcgattattctgtccacaaaaaatgttatcaaatcaatcatcacttccatcctccccacccacttaaattatctaccataaaaaaattcttcatatgcaattcctgtcacaagcaacacaataatcaaccttatttcacatgtgagaaatgtaatttctacatggatgtaaaatgtgttaaaatgcctcctatactcagcaatgatgatcatgattttgaggattctaatcatcatggtggtataaaacaacattttacacatcaacatcctatgccacttatttcgattcgaggtgaaaatcctcgaatcaaatgcattgcttgtagccgtacatgctccaatgaagcttacggttgcaaatactgtgtgtgcttcttgcacaaaacatgtgcaaatttgcccgaacaaatccaaggtcattcttcttatccaaaccacactttatactttcatatttctagccatcgatgtagtaaatgcaaattatgtgaaaattcatctattatcttctctttcaaatgtcgtcagtgtaacattcatttttgtgtaagttgtgtcgtagccatgtttaagcccattaactttaagtaccacgagcattctctttatttcgttgagagaatacatggtactaattttgactattgtgatggctatgattcttattgcaagaactcagcgctcaaaaaaaagccagaattcaatcaaaataccaaattatctgggtttttttgtgtggattgcggtttcaaag

SEQ ID NO: 200447 - DNA, 1212 bp, Cannabis indica
gttgagttgcggactaggttgttctctttaagatgttttgtggctctgcctaaagtatacacgacagtctatcaatcgtggcgttctcatgataacacaatctttgtatacaaatcgttttgcatcgaatgatatcactctattgaaccctaaaatatttgctctgagaaatcataaaagtttttgaagagaatcaaatttttctttgttgaagagatgtattctcttgttgttcagatgcgatttatatagagaagtcgatccaaatataaaacggtaagaaacgggtaatggaattgtgagggaaacgttggttcatgttagtgaaaagtggagcattgacggttgcttttactgcttcagttaattaattgttataagattaattgcataataaattaaaaatatttattttattaaataattcttttgtaaaaaataaagtgacaccacaaggtttatttttatgcattttgtagagtctattttaatgtgttttagtatttttattactttattgttcggacttatgtttaatttttgttgttgtttgtttttcaggagaaatatttggagatctctttttttttaattattttggtgttcttcaagcctttttgagacaaatttatatatatatataattataaaaaataaaactccaataatacttagttaaattacttgttaactcaatttggtcaaactttacatttttatcttcaaaattcatgatctaaagccaagagtgatcacttataaaaaaaataaattgaaaaatctatgttttggatattaaacacgcttcgtttgtgactaaaaataaagtttgaagcttcaaaccaaaattttactctagaccacgaattttgaagataaaaatgtgaattttaaccaaattgaggcaacatgaaatccaactaagcattattgactgattgttcatgtcattaaaaagtggatcattgagtgttgcttatactgcttcaattaattaaacgttataagattaattatataataaataaaaactatttattttattaaatatttttccttaaaaaataaagtgacaccccaccaacctgctcactagtgtgtgagtcctcacctatgcgcacaaaactcggtgactctaagggcaacaagaaatccaactaagcattattgactagttgagtccaacaattggtgtgtgagtcctcactgata

SEQ ID NO: 200448 - DNA, 2855 bp, Cannabis indica
tttatataattttacatgtattgcccttgctaaaattttggtttggtttggcttggccattgtacatgtaaattatttgaagggtaggtctaaataaataatattttcctagttaataataataaataaagttgtttagtgtagtggtaaagattttttcaaagtttaaagaggtaatacatttaacacttcaatattttattttcattttttttaaaaataaaatattattattgagaattgaaccacttgtaaataaaaaatgtaaaatgtatataaaagttactttaatacaattatgcattattttacatatattttattatatctaccacattgaaaataaaatccaacataaaatcaaatccatgtcggaagaagccatcaagatttggtgatgagcttcataaatacatgattgattaatccatgttgacagtaggatttagtatttacacatcgaatcattgctaataattccttaaacttttgattatatgtataaatataatttaagatttcacaaccaacaacaaataagatgtgttctgagatcactttagagtattattgagtagtgtaaccttataaaaatacatttcaggactaatgaatttaagcaatatgaatttttgtacatgtatatgaaaatatattcttgtactgagacagagaatacaatacaaggtggagttaagctattgttcctcaaaaaataggattaatgatgtctcattctttcaattaaacctctggatttgatcaggatagcgatgaagatgacgaagctggccacgaattgtttagtacttttcgataaaaagagtggttgaaatggcgataccatcttgtgttcatgtcaaaagctgtgcttatcccttcagtgtctaattaaattttgtattaagagcaacttataaggggattagcagctaaaactattgcctggacgcggcggcgagcctcagatgatcaagtcccatgcccatgcccatgtccattccattgtatgctaggggagcatacatccatagttcatcagagctcaaaagctacaaaattcagaacaacaaacacagagttagcaactaagaactgaaaatgtaagtaatatgtacatatgttattattgtagtttttgaaataattaccttgatttgaagctgcaagaacttcacatactggacagcttcttcaagcatagtgctaatgtcaacctgaaatgtaaagtaaccaattaattaacaatcttgaataaggtatgaagttttgaagagtattcaatccattcatattgtgtctcttgtacatacctttgttccatttggtacaaggttttgtagtacttttagcctctcattgattttctctcttctcttctgcaagacaaaagttggaaatttttcttaagcaacaaagcaaaacaaagtactaaaaaaccaatgtgcgaaaatggtttgtaaaggatttaattaccctggcatagacgctttgaggatcggttgcagaccctcttgaagctcttgctttcccactaaggttcaaagctgtaggttcttttggactcaagcttaaagctctttctcctagctcttcatcaacagaatcattcgagtgttgttcctccgaaagggagctgttcgagtgtcctttatctgtgcctgcactattgccatcttcttcattgtcactcatcagagcaacttgttttttagtactcttccttgactttacattcctcttgtgttttggctcctaaattatattataaaatgaggagaaattaggaaaacatattccaatacaatacatctctaattagttacaatttattaaggtacttacttcatgagatggactgatagacctcttcttagaattctcagatgtgactccacttgccacagttgaagattcaggtactgtcatttgatcacattcccatttgtgtggagaaaagtgatcaacaacagctgatgtagttagctggtttacaccagattcttccccattaatggttccattattgctcacttcttggttctgccattcttggctgtgatcaggatcaacaagaaacaagttttcgttttgacattcttcactgaattcaacagagacattattgcttgtcagccaagtaactgggtgagaataaggactagtattaatcattccttgtgagaaactacaagggtaattgtcaatttctgaaacacttgaattatgtgaataagaagttcctggccaaatggtaaatgggatttgatcatctaagcttgaggtttcaattgtcaagtgatcatcatttgtgaccccacagccagctagaaaatagtgatcagaagccatgaaatgatgatgatcattgtgatcagtttcttctgagcaataaatcccattgaagttactccattcaccagctgaaatagcacccaacataggctccatttgttgaacttgattaattaggtagaagagaaaagagggcaattaatgtatttagaatgagagagggctgtatttgcttgatgcttatgaacaaatgacagaagctggtatttatagattagctattacataattaatgaacagagcatttcattgacttaatgaatagaatttcattttcattctttaataccaatcattagcagagatataaattaaaagaagtctcattgtttttaaccaatcacttggtctttccttatgaggcaatttaatagtacaactaagagagagagacaaagaaaaataataattgattattaaataatatgtatccttacttggggggtggatgatgcaatcttcaaaggactaaatgtgtaattaagaattttattagttct

SEQ ID NO: 200449 - DNA, 558 bp, Cannabis indica
aaagcattgctttgaggcactaaaaccattatgaattgacgccctataaatggttagcagttttcaatattttttattaaagtaaaataaatgagacccgatatacaaacagtgacataacaccgaacaattatgctaatgttcaaaatttagatagcacaaacaaatggcaatattattgtttggatttatctaagcctgcaattttcagaataattgaacaagatgctatgttcctattgataccttctttttcacggactatgctatgttacattcacaaaaacaaatagaaaatttaaaactatatgagagtgaagtgaggacacaagttcaattatcaagagatcaacttgtaataagatccaaattcaaacagtggaatggaatcaagtatgtgtcgaaagaatagttttttaataaacataattgactggatgagtcaataaggacgaattttgtcccatgttctaaaagttatcaaattgttttattttattgagctcattctccaaccactttcataattcatctttgaaaaaagctttgaattttttt

SEQ ID NO: 200450 - DNA, 633 bp, Cannabis indica
aatatagacagaacaataatgttataccactcggattggcagaccaacaaagttgaactctagaactggtgctaatggtgctgcagaagtctttcctctagtgtggttatatttacacgcttttccaaatttacacccccctgacctcaaataatactgcaagaagctcaaggtttatagcaccacaaatctattattagtctgaaagagatacattgcagtcaaatatgtggttggaaggtaagtgaaaaaacctcctgaaatcttattatatataacttttaacattcataccagttatgacaaatggaaataatcataactacgaaaaaattcacaaaacaagagaaacgatcaaattataacattttgaatcgttgaaactataaaaaaccttgcattctgactgcccaggcttttccgtggaatcttccctttcttttactttctccctagcacccttcaaaacgataattcaaaaatggaagacacaacataagcaaatataattgaaaatatataataataaaaactatatcttcttataaataataaacataattaagctgcaacaaaaatatcaaatccagcaagaaagagactaatcctccaaaagctagcataaatacttta

SEQ ID NO: 200451 - DNA, 1043 bp, Cannabis indica
ctttaccacacgactcaatttttgcagtcacagaagaagagttactgaattcccaacagtcgctaactatctgcgtacataatggctccctcagccaggcgttttcgaacctgaatctcttcttagcaaaagtgacatcaggatcgtaaggggaaaggagaatgggagaatgatcgctgctggaaaactccaaattgaataacttagctgatatgaaagtatcaagccatttttgattaaccacagccctatcaagtctaacttcaacctaactcgccgtgcctcttcccttctcccacgtataagggtgtccaattagatcaagatcacacagatgcattcagaaagaacattattgaaaccttcgataagccaacttggatagtgattacctccctttttatcttcttgactcaccacattattcaagtcacctataacgcaccaaggataatcgtacttagtagcaagagttttcagcaaaatccaagtcttgtgacggaggcttctgttaggttctccataacatccagtaagacgccaatcaccttttttatcatcatgaatcttgacatctatatagttgttggagtagcctagtaattgaacttcttcttgaaccttccatagcagagctataccaccactccttccacaaacgtcaactgttataagaccctcaaagtctatagcagttctaactttttcaagagtatccttcctacttagagtctcacacaagaaaacaaatttgggcctcttttggatcacaaggtccttaaggaactgtaaagcccgtgggttcccaagcccacggcagttccaactaagaatgctcataatcctaggtgggcctggaccccagaacccaccaaagacccattttttgaaagcccattcaggtcaaggcttgccacctcatctttgtcattttctaatgcttgttcctcatcaacggttcttcttcgttttgaatcagcaacaattaatgttggaggattcacagcaccttcattatctgtcaccataggttgaccattgta

SEQ ID NO: 200452 - DNA, 985 bp, Cannabis indica
aaaaatataattaataataataaacattttataaattcatgagttaccaacctttctatctatccataaccccctttagttattttatcactatataaataaatgtatttttctcttttgcgaattatattttaattattacttgtgctctactataattttcttattatgtaaattcatataaattttttttctttgttgtgttgtttttagtgtgcatatataaatataggaatatgattttatcccgtgatgtactttcacggaatgtattctgtggtacattagatgggtctcagggtacattaaatgagtgtcaggtacatttctactttttaactctaattactcctaaatcaatctcagccgtcagatcaaataactccctcatttggcggctgtcgtacatcacggattacaatccgtgaaaatacaataacggacaaaattatatccgtgtaaatatatatgtatgtaaatacataaatattatatactgatgagactataaacaatcttcaacttttatagagtctaggaatgattccttatatttgaagctctttttttttcctcaccaaccatcatgatcaccctacttccatgtaagttattctttctcacttttgttataattttaatgaaacatataccttgtttccattctcaccagtaagcacaattattttgagttttttattggctcaatagattgagatatagtatggttgtgtgtcagagtatggagtatggtagcatgtagtatattatttttatggtagtatggtatctctctatatataaattagtaaactaagaactttcatgatttaattaattttatatttgtgattttttttaagattgaaataatcttttcttttttattttattatttttcaagagataaatatatcgtatatagtagaattaatagaaccatattataatatgttagaaccaaaattatcatattcaattatat

SEQ ID NO: 200453 - DNA, 1968 bp, Cannabis indica
ccccccttcaaggttgggttttcggggggtcacccaacgatagtggttgtaacccccccggtcaagttgggtcttggaggggtcacccaacgaggatggttgtcacccccctcaacgagggtcccaggggtgttgcccccaagtatgggcttcatcccaaaggtggttgacgaccatgtcacacccataagggaccctcatcatcagtagctccttcaaatgttcaaatcccacgaaaggctcaaaaacagttgtcaacccacaaaaatagcagattattatcataaaaatcacacttcaactacctctgaaaatcaaggagatggttgaaatagttccgcgttggtcgcgtctcctaaagcgagaagtaccgaccccttcctctatataaggggtcacccataacctgggaggtaaacactttctcattttcttttgcagtcaagagcatgttcttgacttttgcaactcagatcaataaaactcaaggggagtaggctattaccgatatctggggccgaacctctttaaatttcggtgtcttttatttacatttattgcaaattccggtgttattaactgcatttattactgtgagtttggtttaaatctcatttattacgactccacgtcggttggctaaaaatttagtcaacactaatatatttatgcttatgtgtcgtgctttcgtgcttatcatgtcgtgtcatgcttaagtctatatttttcgtatcatgtcgtgcctaagcacaattttttcataccgagtggtactcatgccgatttctactcgtgtcaaaaggtttcgatctatttttacagcactttaatatgatgttcaagaaaaaaccttaattttaatatgataattttctccatagatgggaatatcattgttgagatatgctaattttgttaaaggcttagttaaatgcggtccaaattcagatatattcaaaacgatttaattctatattaattgcggaagattgaaaacaaactaaattaatttctcaaacgatagtgtaatatttgattaggaaaatatatattttataggaaaaatctgtagtttaaagataaaaaggaagaaaatcttcttatgaagctgacaactaatttacatttgggcccatttaaaataatttttattttatcttgacaaaaaaaactaaaattttgtttaaaattaccaaattatgttatttcatttgactttttttttaaggcatagcttaaagtgtctgaaaacatctcctaagaataggaaacgtaacgaaagaaaaactaaaaaaaaaaaagtaaaaaggttttttttttttttttaggtaagtaaaacaaaaattaatagaatgaatgaatgagcgaaaaaaagtacaacaaaaaaggacgaaaaggacaaatcggtcatttcataacattacccgggaaatgacgtaagcacaagcccggtgacgggcgaggtctactacgtaacattttaaatgtcataaaagcgaaattggtggttgcacactgctggatggctctaccattttccattctaatttctttctacaaaatatagtgagagaaaaacaacaaaagaaaataactttaagagagagaacccctcgaattgggtgaatcccaatttaattcttaacttctctctcactaaaagctttaaaacccatcatcagttacaacttacaataattacacagacagcaaatacatatacaaaataaaaataccatttttttttattaaaaaaaattaggagaaaaagaaaaataattgttgagtcatataataaaatatatatatagtacactgatcatgtacatatataaacagtgaaaagtttgcaaactttgtatactatatagtcttctatttccaccagtacacacagtctaatcctctgctctgtggggtaggggaagagattatagattatagaacctggctaaattttttcttccc

SEQ ID NO: 200454 - DNA, 1219 bp, Cannabis indica
ttttttttataatataataacggcataattaaatataaaaattaaaagataattagtagtttagtagtaattaaattactagatctagatgattatgtgtgcattaggatgaaaataagtctaattgttataaatagttatgtgatgttgattttatttttagctgatgaattttaattgaagtgatagaaataaataaataatagaaaggaaagagtaacaagtaaaaaaaatactaaaatttatagagattcgatctcttataccttttatgattagtaatagcctacttccttttttgttgtattcacctgtgagtagagaacaagaagaccttgatctctctcaaaagcttttacagtaatatactcttagatcgaaatgtctcttttgtattttctctttgaattatgtcgtctccctgaatagtgagatgataccactatttataagagctaattacataggaatggtttcccttaatcaataagaaataaaataggaaactatcatgtttctataataataataaaaaaaatggaaaatctaggttgattgcctttattctcttaagatacaaattaatctcataaatgtagggattgttttgtgacatgtaagtttggcgatgacattgaacacctctaaaattgtcaactcacatcccctggttggtgcatgcaagttcttcatgcaatcaagatggtcggatgtctatcagtgaccttgctcggacatcccactatataggtgtgactttgagcttcatatcaatcttcatgggtttctaagagtaaaaccatctgcccaggttataaaatgtgaaacatgtctcatccagtcaggtgccacgtcacggtgtacaaattaggataatatttgcccccaagtgtgtgcgggaccttcctagtcacacatggacttcattcggttaggaaactatccgaattgatgatgtgtgtctggttgtcaaagttgatctgacgtgacttaatggagagtctcttcggtgtttggacattaaatgcctcttaagagttgtacctcgaatcatgcacagacggttgagtgatactgcatgcgtgatgtctgtaattttataatgagtacataatgttcacttttggagaaaaaacccaaatttcaatttttaaaacaaattaatttcctctttaaggtacttataaaaggggatgtagtactaagtgtgttgcaaagg

SEQ ID NO: 200455 - DNA, 1252 bp, Cannabis indica
gttaattgttaagtaaattaccaactgggaattcctaattagtccaagtcattaaatttttattttttaaaaaaattaattaaaatatactaataaaaaatgacacgtggataataacataatattttaacggttaggtacctacagagtttcaaaaatataacttaagtattattagcgcctaaacttaaacttagatatttatttataactaagagttaaacttaagtatttatgtcgtaaattattcaataaaaaaaataataataaagaaaaactgtgtaataaacccttaagattctacatcacatgctttatttatgagagataaaaaatgagacatcgagaggtgtgttaataacccctcgagagaggagctgcggcattattgtgtccaagccacggcactaaaagaacctgaactcatgccggtcaaaccgggttatgacctctaataataattttaaattagggtaatgcacatctagttataaatcctcacacttacactagaggcagaagaaaagttaactaacatctaaattgaaatgatacttttctatctcacctacaatgtacaaacctcttaataacttctttatcaaaaagttaatggtgaaagaaaaagtgacccccatcatcctatttcatgattcccttaataaaatacatggggacaaatgcatttacattttaaaaaagtataggaaatatatgtactatatcttttaaaagagtattgcggtagatacttttatttattttagtatttaaaatatttttttagtctattttttcatgatcttagtacattttaattaattagaattatctgtaaattttttttaaaaaattaaatattttatagtgctgaaattaaagttcaaataattactttctacttgaataaatatttactttatttttaataaactatttcaaattttataaataattttaaataattacaatatactctatcataaaaaagaaattaaactaaaaactctcatgaataccaaaggggtctactagaactctcatttaaaaaaaaaaatatagtatagacttatacatacttttataaaaatgaaaagttcacttaatttaatgttctgctaagaacatcaacaatgcataatacttaaaatagtatcaataatttatacaccatcgtgaaatataatattcaattttacttttaaaagtattccaatgctaatcactatattctcagacttccttagatata

SEQ ID NO: 200456 - DNA, 1600 bp, Cannabis indica
tcattttatatatatataaaaaaccctattttttaacataaatatatattttactattacttaataatatatatacatatatatatttactattacttaatttgaacatattttgaaataaatatatttttattgttacaagtatctaccatctagattattgttgactgtgaatttagtcaactgacgcggagctgactaggatctaattttatttatgactgtcacatgcggaatgataataaatatatagacacaagaatttatgaaggttcgatccctttgatcaggtaatgacctactccccttttgttgtatttacttttgaaataataccatgcagattacaggttgaaatcttatactttctagctatgactctctttcagtattacaatgagaagacttctgaagtggtgaggaaaaaaaagagagcttaatgccttagtgcttttgagctcttaagtgcatgtgcagaatgaaagaaaattaagttgaggtccccttaacgtagggttaaagccctttttatatagtgttaggattttacaagttgttattcaagatacataacagatggaaaatattcctagaaatagggcagttacattctgacgaagctttcctactttgtgggcagctcaagtcgtttctgaagttgtaagagtggttgtagatgatttgggatctttcggaaggcttatgggaaaaacacaattgttagagtgtaatatgtgtgcttggtcagccaaccatatttggaggttgtctggtacatgggctttcttccctagccggctagctagtggtacggccatgatcttgcaatgctttgtgtatctctgttttcactagtgattctgataccaggatgaacttgctttaggaccttgaaaatgtggatcttgtaagtctccatgctcttcttgtctgaatccaccttggaaccctgggatcttgagggacagagggttgcacggcactagcctgattggttagagctgacctatctctcatgtgtcttctgcttttggtcacgtggaggtgcaacgtaaggtgggcaaaaattgggataatattttcccccaagtccatgtctaaacatctgtcgagatagggactttacactatgcctggtattgtgatgccctttaccgtgcaggtatgcctggcaaaatattggtctttttgggtgacgtgattttatgagagttaccaactttatgttgatgtgtgggaaatcgtgtgacggttgtccactttcccatgtttaaactcttggccttctctttcccatgcatgcctacttgtggcattaacttcccattaaatttttttgggggaaaaataattttccagaacctatataagtgcctcattttctctttttcatttctcacttttcaagatttctctctgaacaaaaaaaaattctctcaaaaacttcttaggagccgaagctttgtgagcccaaggttctttgtggagtttgactttcttaaagcctacactcgtcgtgcagaccatgacgatcttatccgtatcttctcaatgggtaagttcagagcttctaccactgttgagtttcaagctattgaag

SEQ ID NO: 200457 - DNA, 1152 bp, Cannabis indica
tcaacaaatcaaggggttggaccatttatatttcctcttgcaagtcactattaagaaaagcattgttaatatcaagttgttttatggtccaattatttgagacaacaatggacagaacagttcttatggtggcatgcttaacaacaagacaatgtttcattgtagtcaaacccagcttgttggtgatatctttttgcaaccaacctgactttaaatttgtcaagggagccatcagcattttctttaatcctataaacccacttgcagccaatgagagtccttctaggaggcaatttcactaagtaccaagttttgtttctcacaagagcatgtttttttgtttccatggcttgaaaccaccttggatcatttagagcttgcttgatgttggttggttgaagagaagccatcaagacttttggtttccttatccctaatttttcttttgtttgcatgtgatgcttgttaagacctacaaaaaccacattagaaattgcatctgtagcaggttgagtaacaggcattggtgctggttgggaagtgactgccaaagtgttagttattgtctcattcactgtatgtataggatcagattgtcgattggaattttggttaggaaaatggggttgggaaggtacagacatgtggtgagaatcatgagaagagacatgtggggacataacaggagtagaggatgaattggtgggggaggctttggttgtggtattggtagatacaacaacttgaggagtgtcagtattcatgagagggacaggaatggattttcgtttggcttgattagctgttgtggaaaatggaaagactgtttcatcaaagagaacatctctagagatgtacagtcttccatctttagataggcatttgtatcctttgtgggataggctatactcaaggaacacacatggaatggacctatattgcagcttaactctattgtaaggccttaaattggggtaacataggcagccaaagaccctaagagaggtgtagtcaggtctagtgtcaaatagcacttctaaaggtgttttgtattgaagtttgggattagcattctattgatgagaaagacaacagtacgataagctttatcccaatacttaagtggtaaagaagcttgtgctaaaagagtaa

SEQ ID NO: 200458 - DNA, 581 bp, Cannabis indica
cctcgcctttacttcaaactcctcaaaagaattcttattccttcgagcaaaacttaaagcgatcatagcgcaaaccccttacctacatagccattcttgcgaattcaatcgtggaattgaatataacaataacaagcaataccaaggtatatgaccaaaaaggcattgtcacgagctgatgagtctaccgctttctttcataacaaaatttttttgcgcgcaaggagatgctgctgctggtaaaatctaagtgaggtgatacttttcctttgaagtagcggatctgggcccatccataggtgtgactaaactcgtcgatcactgctcttcgggacagtgaggtggacaattccttactatagcttcaaaggagcatctttgcatgaatcaatacttggtgtgtatgtcttacattcaaactgttgaatataaagagaaatttggattactatgcataaatgcaaatcataaacctaaattaatccatccattaaatattaaacacaaatatgctattatttcacctaaacccataaatacccatctcacttaaacttcccccattctctctctctctctct

SEQ ID NO: 200459 - DNA, 671 bp, Cannabis indica
taaaagtattggctaataagataatttaaatgccgtttattttgataggtttattttaaatatagatgcatctctttttgttcaactaatgaaagggacacctcctaaaacttctatcaatccaaacaagatcaaatagaagaatacaatagcattttttgagataatttatatacaagatacccttttgaatggtgagtaaaatttattgtgcaaaacataatgttcgaatattgttataagtgttttgcttttttttataaattttttgaacacaaatcaaatatctactataactattacatactctcattgaaaaaaaaaaaacccttaaaaattaatttttaaaaaaattaacagagaaattttcttttgttttaatttttcttcctttattttacttttatttttttgtggtaataaccccttaagttaacttttatttacaaatttgaggtattagttacatttcaacattaaatacgaattgtaattgcctctgtgaatatgtgtacacgtgacactaaaatcttggatccaataaaaatatataagtatacacaatggcaattcaatatatatttaacggtgaaattcaactggcactttaaatttacaaacaaaagtatactcaaagggattttgctgccaattataaaaaaaaaaaaaaa

SEQ ID NO: 200460 - DNA, 1879 bp, Cannabis indica
agatgtaagataatagccagggatgatggtcaagttcggagtacacaataccaaaaatttaatcctttgcgatacagatagtctcaaaagtaaacactgatttccaggccaatagcaggccacctgcaccaccaaccgccagaacaataatattaaaataaaagtgtaaatttttcagagaccgtaccaattgagcagtatatcttttgagttcagagatgaaaatgaaatcaggtgagcagaccgaactagggctttaacttcaagaactgtagagatctgccccaaccctctacaattccaagaaatgcctctcatgacgcctgtggaggagggctgttcacctcctccacaggggtaaccaagttcacagaagtacccacagcagagcctacatcctcaaccaagccgacaactcttcctaggcatagcaatatcggctaaccgagccctcgccttcaaggccgtgagtcgcttggattggccagccgagataggtttgtccacgtgttgggatcctccattggagtgattattagaggacaaaggaatactttcatcatcaaaagacggctcatccgagtcacccgatccatcatgatcatgagacaatcttgactcctccccctttgggtcaacaccacgagggaagtccctaaccacacattttactcttctcatattccatgtaggcacaatcttcagtgaatgagactcaacatcgattctcctcttcttcaccggggtggttctttcattggttttggaggttggttgcacgcctatatcaacttggcacgcttttcttttgattggcccttgtgaagcaaaagcggtcagctcatggagatatccttcttgtgcttgaaaaaacttggaaagagctctcctttcatcaagatgatccgagagatcctggccaacaattgacaacttagatccaccttccccattagaagaatggccatcattaaccacagtattaacacaagtgtgttcaagaggaacctgctcctaataagtcgtactcggcaccaacccatgcacattcaacttgccataattactagaaaaaggcccatgtgacttcggcccacacaataaatcactaactcccttctttgtcccacgttcctcctcataaattccaggtaagtgtttattattcccaatggacagctcactactcggcccaatagcaccaacatgtgccttaggaataggcccacaaaaccttgtccccgacccactctttttacacgtcctctttgaaataagagccccacccgccagctgtcccctaaaagaagtcaaaggactacaatccgtacctctctcttcaacaaaattcaaattatcttctgaagagggtaaagttccagtcttctttccaatattcagagtggaggaaaggggattagcattgaaaacgacaatagaaccttcagccgcaccaacagatctcggacctcacgtcttccgtacttgatctttgcccctacccctcggaaagcgaccacacatagatctcgaggcctgttcgcgagtcgccggagcatcgacaccaggggggagtggtgatttccttctccggcaccgaactcacaccaacaagtatcatctctcctccaaccactcccttaccattcttagaatcgcctacatgtttctctgcaaaccaagacaaactaccacccttgccagaaaagcaagaggcataggtcgagcgtgtagtaagccacagtccgaacagaggatagggactgcctttgtcgttgatcaccgtaaccggagacgcaaggctacactcacggggttggtgacccacatcccacacaagtaacaaaatatatccagcttctcatatttgagttgtact

SEQ ID NO: 200461 - DNA, 628 bp, Cannabis indica
catttgggcgttaaataaattttagcgctgttgtcagggaggtaatttttcaaatacaaccaagagtttagtaactttcttggtaccttttatcttcttatgaatatttttcttatattgtgtaaatatttgtgaaataaaaaattatcaagaaattcaaagtatgctctaaggttacggttttgttcgatcttctttatcagaaatgatttcttgattaagaaaaaaaaaccacacacatatatataatttttttatttgcttttcttaagaaaattatttaatttctaaaatagttattgttgacctcaaaaagtgatcaactgacagtggggtcatacagatctgatgcttgccacgtgttacacaaacaacaatgaaacacgaagatttgttatagaggttcgaatcccttgtgattagcaggtaatgacctactccccttttggttgtattgataccaagagataacactattcaaatcgctataggtgagatctgatatagctctctataaagatacaaaacatgaatcaagtaggcaagtctctaatgagaaagatgaatagcctcaaaggcgtgtgagagatgaagagaagagaggcagagcccttggggcgtgtagcag

SEQ ID NO: 200462 - DNA, 1307 bp, Cannabis indica
aaaataaataaaaaaaaaattgagggattgaacttttttctttctttgggaaagattgtggaattaatcattattttaatgcaaaagagattgtggaattgatcataccaagagtgaagacaaaataaaatataatgttatttcattattttaaataaataaatcaagaggttaaaatatgaaatattttaatttttaataatgataaaattattactatcataatcatataataataaataagagtaagaaatgtatgataaaacaatctaatattttagatactcaacattcattctcaaaaaaaaaagacacttgctttaatattttttaaaagctatttttttaagttatatgagactcgatatttaattacaccaataactagtgacggacccagaatttttattaagtgggggtttaattgttattaattttttttatgtttactttatttatttttgttggtttttttctttacttttttgtgctataattatcaaataaaaagaaaagtatttaatttttttaattgcaatttcttttactatagccccccacaagtttataagtgtatccgtccgtcactgccaataacaatatgatacgagaagagtactaggcacaaagtggtactttttaacaattctctcaaaaaaaacatgtcacatattattaatatatatatatatatatatatacttaatctatagttgcttcttaaattatttttgttgattatgtgagtattttaataacttgtttgagccacaagagtttatggttgaaattttcttgcacgaatctaattgattttaagattgattcatttgcgtgttccaaattgttgattaagtttgtactctttcacaatagaataaattcataatgatgtgaatttgtacttaaatactcaatcaaaaccaaaaactaatcaagtgttcttttaattgatccaaaattgacaatatgtgaatgcagtaataatgacaaactagaaaaaaaaaaatcattaacaataataatgacaaactagaaaggaatttgtagtagattatagatagatttgttgatcaaagaaaatgcacttttttattttttatttttttgaattactagctggaaattttattacataatttctcaaaaagagtaactcaagacatttattacaaaaagagaaaaaaagattaaccaattaataatatagtagtagtaatattattgagtaataatagctcaataatgaattatctcatgaagttgtagtagtagtagatgctttaggcattatttttcacttcttg

SEQ ID NO: 200463 - DNA, 868 bp, Cannabis indica
tctgagcgagtgagagtgcgtagatgaaatgaaaccctaggaggaattagagaagagagcttcgtcaaatcagagcttcatcgtcccaatcgaatgatttgctgaggtttttgggcctaaatcaaggtgcttgggcttgggcttgggcttgggcttttaactttttttctgaattttttcataaatacccaaaaacaacaataaaatttacgtttttacaaaaattttattttttgataattgtaccaattttttatttcttacaaaaattttattttttactaattgtaccaatttattctattattgatcaatttatcaatttgattaacctgcatacaaaactaaaaaaaaaaaaaatagagaaagcatatatacgtatagtctgagtctcccgtttttttttctctgttattatttatttattttttttcaaatggttttgttctgtaacatatatttttttattaaaatatttaaataaaagataagtcatttattcaagtagttaatacttttttatcggatgataaaaatataaatacctcaaactaacttaagatatttcatatattaaaaaaattattaatgattatcaaataaacaactttgtagctagcatgtagatattagtcgtagaagaattattcaaccaaaatatctacacctattcttcctcctcttcatttttaatataaatttaagtaatattaaaatacatatatcagcattcaaatttaaaatatttatttgaaattagttattaaaaagatgtatacatgccaaagtgaattgagagataaaaaaaagaattgagagacagagagaacgtatgaacaactatggcactaggagtatcattcatgtc

SEQ ID NO: 200464 - DNA, 520 bp, Cannabis indica
tatatatatattagttaaagaatgtatctatacattcatattgatgaagtgtacaaaataagagcaatttagttaaaaaaactgtatttagttttaatatatttataatatgttatatatatatattgtttttttttgaaaaaatatatacatttgcattcgattagacccgacccgatttaggcggttcggtgttgactatccctgattcataaagcttaaaagggactgatccgccccatttacattcataatacctacaaagaggcagtggtaaataaaggttttacatgtgtagattatttttcttattgtaagcaatttgttttttcttttttaaaaaaattgtacaaataaatttaaatttaaaatgataaaatgaattaatgtataatgttaaaatattttatcacattgaaaaagtgataattaatattcttaaatatttgttatttcaaaatttattattttaatttgcgtaacaattagtttgtgactatatatatatttataaaactaa

SEQ ID NO: 200465 - DNA, 719 bp, Cannabis indica
aaccaaataatcacaatctcaaaaaaggtatacaattgctaaatgtgaaagatgccaccaaactaatttcaggaagcaatggttttaggcctcttccccataatccactcattcaatttgatggaaccccaaaactccaaggactttaggcctgcctccatcaatgtatggaataatgaaaacccaacatgttttgtttttattcatatcaacgctaacacttccacaaccaataaaataaataaataaacaaactccattttccatttttaattattacaactcaatatattgttacccaaatcaaactatgtcacaaaacatataaataaggactctttacacaatatacataatataaaaaattaaataaaagtaataaaacactttaattctttaattaccattatcctctttgacattcccaaactttattttatttttaattttttactaatttttattttcttaacttgtcgacggagatcgtaaaggcgttattccacaaaagtacatttcccaaaacacccttgcgatttccccaatataaacacccaaaccaaagtaatattgatatttaggagggtaaaatcggaacacattcaatgattcattgtcgcatttaagcacaaccagtctttctctctctataccaacggtccaccctttgactcagtttctctctctacgccggcggaatggtcttcttcttcttcttc

SEQ ID NO: 200466 - DNA, 802 bp, Cannabis indica
gtgtaaaacgcacatacatttgcttgaataatactcaaaatatcttttggtacttgaactattcaccaagtaataaataaatttggtgattttatataaataattatatttattgtgggatatataagtgaagactttatccgaaactctgaaccataaagtatgcggactgttacaacttagcaactcatgatcagactgtagagcacacagtagggaatccaaagtgatctttgctttcttatcactcttctacaaccaatccatatcctctacaacctcaactcaactcacctcaaccctcccttttgctatactattatatatatatgatatcttgttttttttttttcttttttgaatgaatatttataggtgtgttgaggtttgatgataagattcgagaattctaaactcaagtacacaataaaacagtagcaaatagctcaaaatagcaataatagtaataaaagaatagtaacaaaatagtagccaaacattagagatctatattgatgttatgtgtatgagtaaaacaattataattgggggagcccttaggcccctttgatgcatagattcatttactcaatatattgcatacctctaattctctttggaaaattttatgcatgcttaataatagacttattattatgatttagactttttcactattttatataaaataatattttaatttatctatctttttcattttagccctgaataatttaaaagacacaaaacttaaaaataatctatttctctcaatctctcatgcagttctctctctctctct

SEQ ID NO: 200467 - DNA, 1529 bp, Cannabis indica
attttgttaaagttaatgaaaaatataggcatttcacatcatcatttgctttgccacttgcatcaatctgatatatttggaaagattgggcctggagtccattatgcccttatataacttcacttgtggcattctaaagttcttagacaagagtgcttctataattcttctgacacatggttttgcatcctcctctttcaaattagatacaaccccacttttttctgaaccagacaatcaatgagcttagttaatgcagctatctaatctttcaactgtctggtatgataatccaagaactcacatccacggatttcgtcattgatgttgttcctagggtcacctccggaaggcttgccctttcccctttggctctatctcttttggtattcactactacaaaacaagatttaagagacaatttttcagccgagtaataaaataggaaagctaaagcctccaaatagtttttgggtttccaactattgaaaattgacatttaaaggcagttatattctaaaaaccacaattataaagtgtacttaattgctatactttttttttcttttagtcatgactggggaaatgaaaatagcatgtgacatttatgtcgtcggttttttcctaataaccgacaccattggtgcacgtgatggctgacgcgtgtcacctatggcattgaatattaggaaataaccgacgacataggattttataactctcttattcgtttcaactattcatcttcatcattttgtctaacaactagcccatgagagaaaaccaaagcaaactcacgagaaaacctcaaaaccctcgtctaaaagccacattctagttattttaggactatttgggttcatttttttaatctctcattttcaatacccaaaaatatattgtcagtgttggattattttttttaggattttagtgtaaaacaagcttttaaggtggcaacttagggcgtttcttagctctaagttgaatcttaatgttcattgcagtaaaaatctattctacaataagtttattgatgattttttttttattttgttaaaaaaatatgggtgattttatttttgtattttattaatttaattactatagtatgtaatgtgttaatgattgtatatattatatatgtatgtattttgtgttgtattgaatatgtattgtattgtatgtataaaaatattgtaattgtatttatatattttatgtattgtacatatattgaatatttcaaactagtagttttgttaaatattttgatggtaaatgagatatgagagtattaaaataatagtttagaaattagtttctatgaaatatatgaaactcatgttttttgctatttagtatctagttactaatttaactagttactaattttcattcttatttatgtattttataactaattagtcattagtaactagtaattagttaaaattattgacttaactaattagttactcaaaagttatataactattaagtagttacataattaaatttttaatttt

SEQ ID NO: 200468 - DNA, 1384 bp, Cannabis indica
acaagactcccatttttttaaggctcgttttttttttaaagaaaaggcccatttttttttcatcttttttcctattatatatacataaataaaaatttataattgaaaatttatgaacgaatcttaaaaaaaaaagctagtaatagaattatagtcttaatgtacactgtttttttttaaaagagcccaattttaaaattttgcacaaggctcccgaaatgcttgagccggccctgttagcagctatcaatagaacatattttaagcattaatttctcattcacacattaacctgaaatagtaatttattatatattaaatataatttttctaacacttccaaaatgatacaattttttttaattcttatttttctcaaagaaaaaataactgaaagtttaataatatgtatatgatatagcatgtgttaatcttcttttactctcataaattattttaatttttaatttttaatgaaaaatataaattgaaaatatatatgatgaaaaattttaaccgtttggaatttgacacataaatctgagaagaatatgatcaatgtgtttaattgaattaattattcctctgacatatgaattattttttaaataaaataatgagtttttacaaaaataaaaataaacaataaaactttatcaaaaaaagaaaaaaataataaaataatgagaatatttctaatagaaagatatggtatatgtgtataaataaatttttatggaattatttttgaagaattgtgtataactgtacagagaagtataataaatttgggcccttaattttttgggccctgtgctactgctctgctcgcacagcctttgagccggctgtggctagacaccacagatgcttataataacaattaatattcatttaaagggaaatttcactttttgcccttaataaaatacctcatatcaaaatttagacccctttataatttgtacaaattgattccactaaatttataagattcttaaaatacccctaaattaaactttccctctctctctctctgactttccttctctctcagactttccctctctctctctctgtcctcctctcttcacgcgacccacgaaccagtcgacccaaccttctccaccaatctccaaccgacctcacccctcaatcacccacgaaccggcctcacccctcaatcacccctcaatctgtctctccccatttcccaaaggcgaccgacaacgatgaagagaaccacgttgatccacgatgacccacggcgacccacgaccaccacgaccatgaccacgaaccactgagggaacccggagtcaaacttcgccaccaccaatccaagtgtaagtttttttttaattaaaaattagaattttcatag

SEQ ID NO: 200469 - DNA, 891 bp, Cannabis indica
ggtagattaagccgtggcctgtcgacgggtgcgttgtcctttctcaaacaatttgtttgtgtaaaggctgaactcatataaaaagacaaaattaatggtaaacgacattatttgcaagaaatgacaaaatatgaaaacaacatattctgcaaaatgtcatttacaacaagaaaaaaacaaaaagaattgaaaatgtcaggggaaacgacatgaacatagaaaaactaaatcggataaacgacatacaattgaaaaaacaagatcaagctgaaaaacgacatcaatacgacatgatttgcaaaagccacagccacaatattcacgaataatgaagcttcaacaaagcccatagcgttgtcttccagcccaacattatgttcacgagagaaatactaatactaataacattttataataatgagtttttatactatttaagtaaaaatattaatatattttttttatgaaattaaaatattacggtaaaagactaaaagtaatatatgataatttattatttaggtaactggttaccttaaattatttaatttttttaattttccgacaaaataatttttaaaaatttatattttagtaaacttttcataaacaaaaaaaaaaaacttaaaactaaaaattcttcattaataaattaatgaataacatgtatattttactaaatttctttttgctgtgataaattgaatattggctggaataggaaaatgatgaagaggaaacaattaatttttattttactcttattagaagtaggtttatggtttaattttgaattattatgtatgtatgtatgatccacttagattgtaatattcccaactcacaagatcagtgttgtatctacagctagctaaggcccgcatatatata

SEQ ID NO: 200470 - DNA, 769 bp, Cannabis indica
cacaacactcttacaatctgaagttataatagaaaccgatagcttgactacttggatctaggaaatagcaacaagaatcgctttagcttcagctacttcaggaagagccactcctacaattggaacaacaaaatcagcctttatgttatcacaatcatcacttgctacgactctaaaactatgtcctttggatacagtatcaatggcagcatttatattaactctcaattgactggaagcaagtcgaggtacctgttcgcccatttctttcccttgtgttgacaacttaaagttttgatagtgggcattatcatatttagacaaatagtttgcagcataatcaaaaagcttcataggaggaagaccccttttattatgaaagagatttttgcgttgattccatattgtccaaatgaaacaaaacaaaagagccaaattatgtttatcatacaggtcaaaagagttagtaatgaacatgtcaagatcatcttccttatgattattataataattaaagaacacagaatatttctaatctttttttgcatgacgacaatcaaggatagtgtgtttcactgtcttcgtttttagttggcaaatggggcaaatcaggaaaggaatgatatgacgagagaataatgaaaaagcagctggtatagagtgagaaagtacacgccacatcaaatgcttaactttaggtacagcaatagacgaccaaattttagactagaaatgtttgcatcctacaattaaggaagaagaaggcata

SEQ ID NO: 200471 - DNA, 679 bp, Cannabis indica
aaaaaaaaaaaaatcattttttaggggtgatagttctttgtcgcctataatactcttattattagagacgactttaagttgccccaaacaacatcacccctaaaattcaaaattgtcgtaatgcactattttataaatattcagcttatagatatattgaacaagcatatatattattcatgtgaaagtaccaatttaagtatacatcttatatttccacattatgtatataataacatggtttaacatgcatcctagtataagtacttggtttgacattattcataataacatagtttgacatgtatcctagtataagtactagaggtactttcttgttacaattcaaaaacgaacaacaaatataattattcatgaacatgaactagtgaaaatattgatgaagtggtagaagaagaagttctaggggccaaacattttgaaccaggggaagtagggaagtagtaccactgcaacgatttgggtaacaacaaggggttaaaagagaacactccgcctttcccaaacggagaacaagagacagagagagagagaatgagagacttgtcatcgttgtcgagtgaaagatttggagcaagggaaagcctccatcgtcgtgagcaagagaggccgagtagattgatgccagagagggataaattgagagagagagagagag

SEQ ID NO: 200472 - DNA, 788 bp, Cannabis indica
gaattaagagactggaaattatatccttttcggctttcagagtggagcttgacatgctcaaactctatgtttcttcgagatgctaatcatatatagtgtgacttatgagattgtctccctcctccctaatcttgtttccaattactgactaggccattgacaagcttcctgtaatcccaagcgtatttgaagttgtgggcattctatattcttcagtaagtatcatgatacatacatagttattcttcttctatcatgtcaagttcttactttgtctaatatatatttacattcaaaagttgataagaacctctctgcttattttcagtggtttatctaccgttacctcttgttcaaacctgataggtaagtaaatttcaccttatgactactattccttgaatcctttagtgggtcattaatcctaactctttgaataatggagaatttaagttttaataaataccagaaaaaatcaacaaaccagtgaaatatggtttgtttctgtataagattaagccaattgtatgaccattgtgtactggtgaaaaacacttagaaattatacaaaacaaaacaaagcagcttctctttcttctaaggaatatgactttgtagtgacttacttttgtgtactctgcaatgacttttttctctttcttatagggaagagctttttcaaattgttgacaaaacagtatcagacattttgggcaaatgaaatgtgcagtcaaatggtaagggtttggcaatgtttatatcataagtgtatttatttacaaaattga

SEQ ID NO: 200473 - DNA, 2078 bp, Cannabis indica
ttttttatcactttctaaaaaaatagtccaatatttaacaactttaaattatgcaaccatacctaacacaatattatttaatatttcatttattttcaactcatacttttattggtttcagttttcatttttacgttgaaaaaaaaatagaaggtgcccctgacattatgtaacgtacgttgtaattaattgctccaagaaggtgctagcacccgtgtgcttagcatttctctattaattattactattgacgatgagaaaaaatatttgtatatttatttttagaacaatgatcacgttttagaacaatgatcgaaaaatattatcgagtttttgtagaaatgagtatttatgtaaactttcccattttgcttgttaaaaattgtatgattcttattttgattggtgatatgttttgattttttttttatttacaaactagaccttaaataatttctttattactcccccaatattaatagcaatcaataaagaagttttaatcaacttatattgtcgtcaacaggctacaaacaagtacactttaggaatatgggaattgagccataagttatagcccaattattattgaaaatacaagtacataagtcactttataattccttattcataaaaagaggataattatagatatattatgataaattgttcccaatttggtggaacaaattaagaggagatggatcatgcatgattcaagcgagtgtgccatcaacacaaagccattggccaacgaagagagcatcacagttgaggtttgggttgagggaactgaagaaatcgggtgccagctgcaatccttgtgtcactgaaaaacaagtgtctccatcttcaacaccatgaactgcgctgcaatctactacgactgccttacccgcgaattcttccattacaaaaataaaatattccattattatattataatataatatctgtgttatgtatataaaaactttgatatatattaaatttagttaattaattatagatgttgttaaacacttacttccggacaatcggctttcagcaatggagaaagtgattacaagagagatcatgaaaaccaagtaaagagttttgctgttagagttggccatttctttcttcttagtaattttactttgagaatagcctaagtaaataatatatattttttttgtgagattgattatgctctttttcaattcttagaacgtgtttatataataacatgagttaataaaaacaaaaacattgttgctctttcttgtcatggattgagacaataataaggattttcaatttggaaattaactattatcatcataataattaattaattcttatatgatttacttagcatttcacatgatacaacatagttacataggccaacttattaatccgaatttttatgaatttattattatgatttgagaggccggccaagctagataggtctgacaaaattattgtgataattttaacttttttaatcacaactttatgtttattgtgatgatataaattcatatttatattgaaaatgattcaaaaaaaattaattgaacaactaacctttatatatagataaaaattaggagaattacccaatattatcttttaacgttttttttttttttaaatttaagttttaagttgttccggtagtttctatgtgggttgctatacagattttgattgcgatttaggttattccgttaactgctataaaaatttctgtgtgaaaatccgtaaaaatattaaaaataattattttgaagtgtaaaaaaatgagaaaacttctaaaaattaatgatgaatctgcagaatattattttattcaaattatttttcttttattaatttgaagctgtaacaatgttatggttcatttttttttaacaaaaacatgaatgttattgttcaattttacaacataattgcaaatgttgtattaaatataataatttttttataattttacccaaacaagttagatcatatatattagagatcgtctcactaatatatatattttttttaaataaaattttttattaatagataaattaaac

SEQ ID NO: 200474 - DNA, 2226 bp, Cannabis indica
aaatcaaaggagcaatgagacagccaagattaccaaaaactgtcaatatatgtatcagaaacattacgaccgccactgttataggcccctccagactctccaacccatgcagatgcccaagcaccattctgtttcaagttttggtcaagatcaatgaatgtggttgctgtcttgtttaagtaatggggactcaatattctactaacaagtctgggatcatcacctgacaacaagagttgtgttgtaaatttgcaaaagtagacaaatatggtacatatctaagagtctcattctaagatcaaccactgactgtttacttatacctttcttatgttacagtgtataaaatggattgaacactaagataggtaagatatttcatccccccaaaaatcccatgctaggatctatactgatatatattatttcacacagatatagatgttctgcattgtcatgtgtgtggaacgagaagttcataaattaatggtcaggagaatatttcattgggtaaatttgatgcaagtcatgtgtcatctcattattacaaattattttgcagttgaggttgatacaaattcagttccatcttacgaaaagggaataataaacaatgaaagtggaagataaactcgtgaaattagaagcacagaatatgtgaacataacaattatgtctatacatggtaagagattttggaagcaaagtgacctacctgcacccagattgtagaggtgatgagtaatgatattcactacacctgaacctgtgacctgtagaagcttagtgaaccatttctcatcataaaagcctccaggtgcaataagtgcaggttttatctcagaatttaagtataactcattgattatcctcctgagattaatcaagtcttttccatattgttctggagaaactcttgctccaacgccatttccacacagctcattacctacagtggcttaggcatgagagaagaaagggagaaaaaaaagtacaatgaaagacaaaatcaacaagattttggccatttgttctataccaaactcccatgaatctatctggtaaccctttaagacagtatacttcataaaatcataagcattgctagaatcccaatctccaccccaagtactcttgtagataatgtgcctcccatgaagcgcattcaagccaaatgtcacaatggctctgaaaacataagagaaaaggaattcaaaaaaataaacatataaaggggaaaacgaagaacttcagtggaatcatgtccataaatctaaatcttaccccgtcttactaaagaacaggatcagctcatcccacctattcaaatgtaaacatcctcttgaaaatccaaacaatccacctttccttttttgaaatggatggcatggatcttttaaactttctacatcatacaaaactcggtcttgcaaagaacctccaactctaatacgcaaaggcttgaaggctgtcaggcaaccagtttccaattgaatgagaatataataacacaacactgatcctaaaccccttgtcttcaatttgtcaaaaagaacattttagtgattgaaaaaggtttgtatattttaaactaacacactcaaacacacacttataaatgtaagtggacaaacctttgattgcctggaaaagtataggatgggataaattctgaaaaaaggaaaggaaaccacaaaagctaacaacatcaaatgcaattcttatcatttgataccatgaaaagattaaaataaggaagaataaaaagaggaagtagatgaaagattgaagagttcttaccaaattgattacggaggcatacccccatggacattggttgtagttacatttatcatgaggccaccaatcaagtgtggcacaaatatagtttttatctacttttgcagaagctctagttccatctactataacattacaatgtgcagtatcttgcacttgggcaaaaatagctgggaaagaaatcagaaagacaactaaggagaggaaaaattccattgattaatctaagacggcaattcgaccaccagctcaactagtttggctgcagcataagaagatataatttagaaaaagtacctcatctactttgccatgtttataaactgaattaagtactacaactaaaaaaaaaagaaataaacaagtgaataaaaacttttattaagagctaattcaaggtcaccaggagtcacacaaattcaagct

SEQ ID NO: 200475 - DNA, 617 bp, Cannabis indica
tgatgagaatctccaccttattcttatctgcatggattttgtgtggttaagggtttcaactcctcctcgtcttcctcgacgatctcacccataccagaacttcgccggagaccgtacagtatacagatgcaaagctggttctgatgactgaaacagaatcccaaaagtgtcaccgtttcattttagtgaaaatactaggcaaaattttaataaaattattgtttatttggactttggactttttattttcgctaattactatttctgttctttgaattttgatgtatatttattattttatttatttttgctaattgctagcggtgattgtctgtgtgctaaactgtgtttccctaactttgatatctactaaatcatactcccgaactttgagaggatccaaattgtgtctcctgaattattatccacgtgagacttttattagattaattggtcaaaagtctttgaattcattaatctcaatagttacaaggtaatttttaatgatttgaaaagttaaagggcataatttagtattatcaaaatttagagtataaaaattttaattacccttttatttttacacaaattacctgtagttgtatttttttttacat

SEQ ID NO: 200476 - DNA, 1305 bp, Cannabis indica
aatcataccttgagtagagatcctaaaaccttgctgaatttcttaggttgaataaaaaataaccccaaattcctactacttctaggtggctcgaaagagagagggaattgaagagagagagaaaagagattctaggtttctctagtttttcccttaacataataatacaacctaattaaatctaactaaaaaaaaacaatgaaatagaaagcagatcctattgtccacaaaatgccaaaataataaataaaaggcaaagtccttttttacccctttgaccaaaccaaaagattattaatattcaagggtatttggtcatttccaaacccataaattccaataactccaaagcctaacaacaacaccccgctataaaaataattctataacatacaaaacgtgactctctaatggcccaacgtcattttctaccgttatcaagcacaattatagaaaactagagatttacatatagcataattattatatattaaaatataaataaatctccacaatatgtatatttcaaatataatagttatatcttatgaataaaccctaattatttaataactcagtataataaacttaagcggtctttacatcattacttccaaccaaacatcatctgaatgtggaaaaattgaccttattttctcaaagaatgttgatcctcaacttgttgccgatatcaatgatgctttgggtttttgacctctcaatcttcaatataatttgcttggcaatcctcttcttttttctaatagcaagaaaaaagatttctaatttataaaatatcaagtgtgtgcctgtttgttggaaaaacatgcatagtgagatcaatttgtaatttatgtagattaatattgtgagattattttttaataatttaatatgtgggcttacaaatttataaaaatatggttttacagaattttcacatatttttattgatttttttttattttatttatagaaaatatggtctttttatgttatactctggttgatttttttgttatatgtatattattttttgttgttattttaatgttatttagatattattttcatgttacttttattataaattttttgttgtttttcgtgttgtttctatgaaaaactgtaaaaatgtaaaaaaataaattctttaaacgtaaaatgtaatttcttttacaaaaaaaatgtgtcttatgtaattatccatatcataaggtaatttatccaataaatatcacatatgggttttgtaatgtgtaattcgatataataaacctaattagagtttgctcccaaacaaaa

SEQ ID NO: 200477 - DNA, 1472 bp, Cannabis indica
attctgttaaagcaaagaggtgggtgtccctgcccgacttggaagtgtggaccccacgcctgaccaccttgttgacctgggcctgcccaaaactcattttcactttcactttcacacgcacaggcacagctagcgctactaacttgacgtgcacaccccccactgtgaatttacaaaattacccccacttcattctttcatataaatatatatatttttttattttttaaggaagcattcttttccattggtgttattttttttttatttaaattgattttggtctacataaaggtgtaggattgacaaaatatcccactaaatgaatccattttccaaatatcccacaaatgaatccattttctttattgttggatgatattttgattgaatgaagttgctactttattttcaaaatggattgacaaaatatcccactaaatgaatccattttccatttcaaataaataaataaaaaaatgaatccattttgagtttagggagtgaaaaatgtgaagtgaattattatacaatattacaatgtaatatcacctagtcaagtttgcattaatctatataaaatgggctaccaatgtgttaaaaaagttgaacatacacacgtcatcatcctcatttttgaatttttttttttcttttctattccttctctaaaatccttccaaaaatccaaaaaccaaaaaagattaagatggagaataaaaagtcattactcattagccaaattctggaccagaaagaggaagtgaatgcgcgtagactaaagtctaaagagaaaaagaaaagacccacaattttaatttttcgtttttttatatatatattttttatttgttggaattactgtaaagctgaatattcaataactaatgtacctgtattatacataatccaagtgtggttcagtgacttgattcttgaaccaatatatatttaaatagagataagaagtaggggtcaattttgagacggtgacaaacttggggaccaattaatccactcaaaataataataataataataataataataataataataataataatagtaattacttaattaatttaaattgaggacaaagtttggaccaagtttgaaagcaactaataatcaaacttttccattaagctatagaacatgtgaaatcaaattcatcttcttatagctcttctaaaacctggtttttagggggatttttgatgagacaacaatgtaatagtattttatgtttggttaatatgaaagaaacaagttaagaaattctaggaatattgttggctttaacttgataaaaaagacaagttatgtgtagtctatttttttgttggcatatatagttgtaaaatatatggaaggaacatacatattttggtggtacttgaactcaagaacaaatccaataatttagtggaaaccaaccaaatgaatagaattacaataagaataaaaag

SEQ ID NO: 200478 - DNA, 933 bp, Cannabis indica
ccaatatcatgtgcatagcttgatcaaatttattttgaattcttagaacgagttagattcttaggagagcttaagtctctagaattgcttaatgtttcctttgaggcaaaatcctagacaacacttaattgaggaaatgatttaggccattttcagaatgtttgagccttttgagccaaccgatatatatttctatccccttgtcaccccattgagcttaattgccttcttcattctttaacccatgataagcctccctacacattatttttcctatacctccttaaacaccttaatatatctaggatacgcattaatttgagagaaagtgtgaggagtgtgagattcgtaaagtctttggtgccaccatgtcatatattcatattcttagtgataacattgaggacaatgttgggtttaagtttgggagagagtgtatgttgtgtttcttgccacttttatatatgtatggattcattattaaaagagagagagagagagagagagagaataaaggacaaaaagaaaaaaaataataaaaaagagtgctccccgtttaaaataaatgtagccaagttgtataaatagaatttgaaattaagtttggaatagtaaaataaataaaaaaaatttctctttctctttcttgttttgaaagtggcaagcgtggtattcaatgtttgtggggacattcttttggggaagtgattatgtgctcttattacttaatcctagaaagattgaggtgtttaaggtaatttgagccaaaaataatatcttttatcctaccttcaccttagcctaacaatacaagcttgataaagtcctattcatccttagttgagtctttgtctacattagtggagagggaagcattgagtcatcttatggaggcaaaatgttaggcttcaggattgaggtcgagcttgttct

SEQ ID NO: 200479 - DNA, 568 bp, Cannabis indica
gaaaagaaaatagcaagggtacagagggaggggacgagtgagtgaggaacatggatccaccccattggaatagagcacctatccaactaataaaagcatgtgatttgcagccaaggcaatagtctgttgtcatttctctcaatggtaaagcagcatataaaaggtaggtaggacccatgaaaagtcccatcaacactagaatgcagattagtaggtcccacccaacccatcctctctcttactcgtagaaaaaaatatatcccaccccagtttctcagaataagggcagctaatgatttctgcatcaaaagacacacttgaccatagcccacagctgctttcactctactccactccactccacaagggaatctcagtaaaatgttttttttttcctcaacactattctattccatctctccatttctttttccaaatatggccgtgcttctacggtgcggatacatctcctttagtattttcagtatccagataattaattatataacagggtatggtttatttaagttatttgagatatcttttaaattttaaaaaattcaaaaaa

SEQ ID NO: 200480 - DNA, 959 bp, Cannabis indica
cttttttagttttttttttttttttttttttttgaaaagtaatttatgctaagttttttttggtatgcaatttttctagttcctttgagttagtataaaaggctaaagcttattatatcattatattttttaataatagctaattgatactttcataattttaaatctaataataatttggtagtttgagtttaaaatttaaccctttgagtcagtataaaaggctaagacttatatcatatatttttgataatagctatttgatacttcataattttaaatctaatataatttggtagtttgagttaaaatttaacccaaattttatgaatattagtaaaactttaatgattaaatttgagtatagaatacttacaatttttaattacacaagattatatgggtgattaaaaatataggtcaataaaatatttaagtataacaaatcttgtactaatgttattaaacaccaatagtatctaacaagaaccctagtcagcttcatgattaagaaatttctataagttagtgaatttgttttaaaaggaatttaatataggtcactctttctgcacacattaatgtcattggtagtgaactcgcgattagttaggagaaatgaaaatatatgaatagaaacaagaataagaataagattaggaatgaaattgaatggaatgtaataaaatttaaaatgggtaaaagaaattgatataagaaaatttaaaatagaatagtcattccagcaaaatagaagaaaggttattccattcaaaatacattctagtactttaatatacaactaaacaaagaaatagaatgaacattattttctttccattcaattttattttattacctctaaccaaacgctacctaaaattttattagagtttttctttttacacaaaatacacttttgacataattttaacatttatacagtcaacccaactttt

SEQ ID NO: 200481 - DNA, 1530 bp, Cannabis indica
aaatcagcctcggtatgcagatgacgtcgaacctatgtatggaaatgagcgtcaacttgatttagttgatgatgctcatattcagcatgttgacgacatttgtactctagattcacatggctggtgggagaagaagagaagaagaaggaaagagagagggctggctgggcagaaggaaaagaagagggaaagatgggtggacggcggagaaggaaaagaataaagaagaagagggaagagagatggcatgttttggggtatttttttttttgtagtgactggatttgtctctatattttgtttttgcctttttcagcttcaaaagaaacaagtgttggtagtaatggtaattctaatgtgaagaaagcaatgatagttatagctttcattctctttgttggattagttttgattggctattacattcagaaggaatacattaatggtaacagtctctatttaaccctttatttttgtcatacaatacttttggcttgaaattattttgatttgaacagaacagagcatttggttttgtaaaatttaagtgcatacttactaaatttttgattactgagataacattaattttttgatttgtgtagttgtatctttggtggttaggaggggttgtgttagttgataggattgcatataactgtttctttcatgttttctatcttcttttatataaaaattcttgggtataaactagctttaggtatgttagtatttttctgtatatgaatatgtggtgaatgattatcctctaaacaccattgttacagcactaacagtatccaagaaacacaattttaaaaactaaaccaatcacaaaattaaaactttaaatgaaaacaaagcacgaataaaatttagcttgagaatgaatgaatcgtgaatctttattgatagaataatcagtattacaaaatcagatatgtccaaaaataatctttattggttgttgtagagtttaacatatatgtttgttagtgagtaactactattgtttcttgtaaacacttaggctatttttaaaaacttttgacattgaatctacttgtctatcataaattataaaagaccagaaaccaagttttgttttataaaatccttatcgtgcttcgatagttgttatacttgtattacaagataaagaattagatggcgaatgatgatctccttcccacaaatttgtgttagtgaaataggctggttgtttaggctgagccaaccctttctcaccactcaacattagaataacagaagacatgttaggcctatcgatctgcttttgttgcacacataacagaccaatgtggatgcaacgcaatgcttcttccatgttttcgtatggatctctcaacaagcacttgtcgataaacttaaaagcgtttccttccttcatcaatgtccacgcctatcaagtattataaaaatgttgtcaatctacacttaatgtgacattgtaagatatcgaataaagtttttttatgtacacttacttaccaatccaatgagattaag

SEQ ID NO: 200482 - DNA, 632 bp, Cannabis indica
aaaaaaaaaaaaaaatccaaatcatcatgactggttttggatctccttgtggagcttgtaaatttttgagaagaaaatgcattaatggttgtatatttgcaccttatttttgccatgaacaaggagcaactcattttgcagctattcataaggttttcggggcgagtaatgtctctaagcttcttgctcacctccccgtgactgatcggtgtgaggcggccgttacaatctcttatgaagctcaagctaggcttcaagatcccatctatggatgtgtttctcatattttcgctcttcaacaacaggtattatatatatatgtttatatacagtctttgagtactatataaaatctttaattccgatgaagttttattttatcagaatgaattttttttttttttttgattaatttaattttcttctaatgattgattcaacctctgattaaaaacatatattgtgttaaattttgtaattaatatttgaaaccctaattactattaaaccttttaatttggatgaagttttatttaattatgagaacatatcttaagttttgaactaattaattccctttttcatttgtccattcaaattctgataaaaaagatatatatatatatatatat

SEQ ID NO: 200483 - DNA, 1597 bp, Cannabis indica
aggtgtcgcataaaaaatcttttttcgtcccaaatctttgcattatgtgaatcttcagagctttttccttctaatacgatcaatataccaacaaggtcgacagtgaaagtttttaccgtcaccttctggagtcataaaggaatcagaggcaatttttctctgtcttggtagacttttgtgctaaggagtaagctgaaaagaagcaaaaagaagttagagagaataatagtaaaggtgttggtaggtgtgccttgtacaatttagctgaccaaacagcttttttgttattcggcctcaaaggccttacactattcagccaactaagcagctttttagctcatctttttcattattttttatgcagacatgcgaccaagtcttaaccccaagtcttaaccatagtctttgatatctgataaaacctttattatgcacatacttaagtcttaaatttttgcttaagtattttcacgtgccattttgtgtttgtcgtactgcgtgtaggtgcctcccaagtaatagagttgactgaaatcttcctggttacttgcatccagggtatatcacagtagtctgtcttggcctctataactaggcaaacctgtttgtacacatgttagacaaattattgatatgaaactcactaagtgcaagtacttaataattgacatgatttgaatgataattaatcgctttattcatttattggtcttgtatgtgtggttagttaagagtaacttacatttgttaagtattagaaatgctttaaagtggtcataaaacttgagtctttcaatcttttgaaacttctaatcaggggttttgccctgaagtcatcatttaagaatgatgttttaaattggaatgaaattatgtgatcatcggacctttttattacaactttttgaaacttctgaacgggaattatgtgatgaatccaccatttaagaatgatgttttattttattaagggtgcttttaatgtggtcatttgaccttagcacaaggatttttttgcacttctaaacgggtgttccatccagaagctaccatttaagaattgcattttaaacatgaatgcaattacgtgatcatttgacctttgcattcactggtaataccatgggctagcttgatttctcttctctttaggttgattgagagactctaccaagaggttatcattcatgccttggtcagaattgaactttttgaggatggaggttcatttagtaattttcctaaagcactattgttatggtgtttgggattttgctgtttggaaggagtacatcatccaaacaggtcatctgtttttcactcaaatggacttgactcctagattagtagtttcgacccatggtcttagttggcccttaaactgggctttgcgttggccatccttaactgaaaaatgccatgtgtccccgagctaggaactcagtcgactagtcttatgaattggcaataagagagggtatgtgactttggttagctttactctagccgacattgtccacccgcttgaatgcttcctcaagctttataaatgcatcaaccagttccaagaatttttccattgagcctatagtgatgt

SEQ ID NO: 200484 - DNA, 976 bp, Cannabis indica
tggtcattgcatataatatagaagtataagacatattgtcatgggcataaatgaaatcttggaactagtgtctgtcaatagtatagtaaactaatttaatctgattatgaaacttgtcttcactacaataagttcatttcccactattttctttcttgtttttttttttttggggtggtagtggtggggcaagacaataatacctgtgagtcactgtgagcatgttgattcatatggtcccaaatattatacatgcgcgcgtgcataaatatgatgtctgatctgaagtgagccatgaaaaactttctgagtagccacatacatggcctgccgtatgaactaccctttgtaaaacgacgccgtaaatgtcactgaacacccaatacgcattctggtttatttatataaatggcacgcaaatatcacattaaagcatccaattaataatgactaaagtttaggcaaacatcgatacggccaaatcaaggaacaaaaatcttaacttgactggtaaaagaaaaaaaaacaaaaggattagaaagggcttaaacttaaaaagcaccaaacatggggtactctagtactactactactcctaggccaacggctaggattttcctctataaattgtgtatggttggtcatcacatgtgaaagcactctctcatcacaaacacacaaaacaaaaacatatttaaggcatgtgaactagacacggatatagttgagtacagaaccttggctactgacctcattgctctgttctccttgtgaccatcacattattattattattattattattattagggttcccatttctcagcctcaattaactcaggcctcagctgtttacttcttactttcactcgtactgatcaatcgtagtatttttggtattatttactcctatgaagatgggattgatcctggttctcttcttattcaatatgtgtccctttttagttgttgcttc

SEQ ID NO: 200485 - DNA, 1052 bp, Cannabis indica
tattagtgcaaatagttttaagattataatattaaagagacatatatatatatagatagacaacataagtacctgaaagagaacaaggtgaatgagaaagagcattaatttaggccgtccgaaccagaagaggtcatctcctggttgaaccaatggtgcaccctttactacatctcctctctcttgaatgcttaatcccatctttgttatgattacttgaagttttgttcccaccagtaatattatctgcaatttgtaaaataacttaattagaataatatgattaagcatgttagaatttggagataagatgaatggggttttatcttaaaactaattgggtatgggaggagtagcccattcattttatatatcacaatttatttccatacattagcaatgtgagactaactatcttaatatactctcctcacgtttgggcctgaaaagtgtgggtataacgaacgacctttaagagaccacaggaccgaacgtgacatttgaaagaatctcacaaggccaaatatcgggaaatttgtgggtgtacacgtcgagaaatttgtagattttgaaacaggtcaaaaacccaacactggacggaagtatatttggctcacaacggatcacaaatggctctgataccatgttagaatttaggaataagatgaatggggttccatttgaaaactaattggctataggaggagtagcctatttatcttatatatcacaatttatttccacacacattagcaatgtgggagtaactcttaataaaacatatatagtatctctatcaattattcgtgcattgtgttgtacttacaatcaaaggtagaaatggcagccacaaataagagtatattcctgttattaaaaaagaacaacatttcagtcactgaaatggtaatatataataagttttaataataacagaacaaactgtctataacttaccatatgtgttggacagtagaaacaatactgcaacgaaccaaattactgggctgcatatataaattatacaaaacaaagtttagatattattatca

SEQ ID NO: 200486 - DNA, 990 bp, Cannabis indica
agtaccactacactacactacactatagtagttccccatagtcattgaacatctgcctatctacttgagatgactcaataattaacacttgtgatatgatcctgaaagcccacttagccaaattgtggacagtgatattatatgctaatcttagagagtttcaacagatcacaccactctcccaacaaccatagcctgatacaggtacagccatgacccatgagtggtactagtagtcttccctttcggctcttggccggttcattcaaatcactcctaacaagaagtgcatcccttactatatgaaattacattattgtaacatatttagcttcactgactttcagtcaagcaatagcccaaatctcttttggcattaagaatcaatgctgccgttgttcaccatattgacaaaccttgaaacccaaggccttctgtcaaaactcgacctacagagcttttccaaactggtaaggtgcgcaaaatgcctctgattctctcattggaatgatgcatatttttcatcaccacaaatactattcttattaattacttttgtaccattttttttatggctaattaggattcgtcgccttaatcatgtccctcgaacttttcagttaactgccaaaaattctctctgataacttgagattgttggattcaacaacttcggtttaattttactaatgaacacctgatgcagacagaaattcaatcacaacgttagacgtatattagttagattgaacaaaattagacgaaaattgttgaattcaaaaatattaatagtttggataaatttttaacagcatgaatattttagggagcaatttagtaattttttactttattttttcagaattattatatataaattttgtatgggtgcgtaatatacaatgtgcaatttcactataagaaaaaagagatataggtacgacaaaattagtgccaacaaatgtagattttagtgcccatagttatttt

SEQ ID NO: 200487 - DNA, 851 bp, Cannabis indica
ttctatggttggccagcttgctgaggatatggtcggccagccttctaaaggctcaatcgatgttgtggttggatctcgtctgcattcgataggctttggcccccggcgtaagagcctttgtgcacttctgtcattagctagcaacttctttcttggaaacactcttggtggtgttggaataccacttctgtgtgttatgttgtgtaggattggacaccttgtagctatcctcctagtccttactctctgccaaggtctttgtttgaaggtatgttattgtaggtgtatctgtgttggttgtctagcatatctgttctttttggaacaagacttagttctttgaagaactgagcaggtgccaagtttgccttggttgtcaaggcgcaactggctagttgaatgagtgtgtctgttcactactacaaaaataagtattttcatcagtttctaagtgacatttaaacattttgcgtcagtttacaaaactgatgtatatgttagtcgcaaataattttttatttacgtcattttataaatgacgcaaaatcatttgtgccatttaaaaactgtcactaaaaacttataccgttaattttgaaatgacgcgtaagtttttgaaatattttttttcacctattacgtcggttaaaatgaagcataaatgtaggtgaaaaaaaattacagatttctatataatttttcctacctatattttcaaattttagaataattttatataactaagaatacataatacaaaaaataaaaaataaaataaaataacgtttataaaatttaaaattagtaataaattttatgatcgttaataataaaactaaatattaactaat

SEQ ID NO: 200488 - DNA, 1401 bp, Cannabis indica
ctgctaatgtggcggagttgcttaccatttgtctggtcttggttcttgcgcaacagtttggtttcaatatttccattattagtagtgattccactgtggtaattggttggattaatagctttatatttattttatttttagtctattttattagatatcaattttttattagctgttgttggtggtaattcttgcagtgtcatttcgcgatcagcaaatggtattgtccatatactggcaacctctactactagtttagaagactatgtttggataaatgcttgtcctcgttttttgagttcttctataacaacaaatttatcttaataaattttacatttctttcgaaaaaaaaaatgtatctcattttgactcgttaggtgtataggtatttgacatttgagacatttacctcttaatcaataaactttgcagggcaaagaaaaattatacctcttaatcaataaaattgttttccgttttttttctccttaaaaaatcctacttattgtggctatggagaagcatataatgttggaatcgactcatttattgtaattagttgaaaggtgagagtccatcatatagaaacgagctctctctctctctaagtgtcgtgttaaatcccattcggaaccacaaaggtcaacccttctatgcattatattactctttttcataatgaatatatttttgtattttcttttataaaattgcacgttctctctctctctctctctctcatatcaaattttaaagccttagttttcttgtggcccctactttcagattctaataatattatgaatatggggtaggttttgctctttttgatctcccttctttggtcttctatttcagttataaaacaactactctctttagaaaaaccctctctctagttttctctttcttcatcatattttcttcttccttcttaatttgatatggagaaatataatagcaactcatcttccatgaccaaaccaattaattcctctcctaattcagaatattacagtgaagagagtggttggacagcttattttcaagatttctccaacaacaacaacaacaataataatattgatcataaaaatgatgatgatgatgaagaagggagtttgatctcatatggctcttccttggtctctgatgctgcttcttatgctgcatggaaaatctccaaccaaagagatcatcacaatcttcaattcccagctgggaccaacccgtccatcgctgccggaggatcccggccgccgcccaagaagctgacttttaagagaacaagaaccaaagtaatttcttcagatgattctttagaagatactgctagttccccagtcaatagtcccaaggtcatatcatatattggttttcttttcttttatatcttac

SEQ ID NO: 200489 - DNA, 1151 bp, Cannabis indica
tttcttttttttttcttttcccaaatattagtccgccatgtgtagaaatttttagttggtggagtatacttaataatacccccaaattaaaaataataataagggaattaagaaaagaatatgtttattattttgtggttattataatataatgaatatatttactcaaaaggaaagaaagaaagaattgaaagtcacaagaaaagttgatcatatatagaaattgagtactaatatatatttatgtatatatatgatatagattctgcatatatattatattgatgtgggtcttgggtgtttataactgatgcttattatctttaatttcctacatcattaattatcatatataattatcagctcatatgttgaattacattaattgaaatatattaatgattttaattaactaagctaattaataatattgtagatgagtaattataagtactatactctttgcaaataatcaaaagattatttaaaggggtgatgttttataatgtaggatcgatatcaccaaatttcaaatttctttcttgtattttttttttcttttttctaattccttgataggaacatatatatatttattgataacctaaatgaataataattaattagctacttttctcttcaagcgatgattgatcctccttaattattttggttgtatctagttgttttttttttttttttttttttttttaattgtgttttattatgagatttactttttttaataacaaattatagagttttacacagatcgttatattttcattatacaaggtgtgtatataaatatgcctagcttatttaaatttataacatgtataagttaaaattaagacaaactaattggtgctcttttttaaaaaataaaattgaatttataaaggttattatatgtatatatatatatatgcgcccctatagaatgtaaaaattcgtccaaacctttataattatttcaaaactataatttcttttcttttttcctttttgacttttagtaaaacttatatatgtagaaattaatcatttgattaattttaccatctattgctctatttgaaaaagaaaaaaaaaacattttatatatttttaaaaccttttatgttatagtatgccaatttattataagt

SEQ ID NO: 200490 - DNA, 716 bp, Cannabis indica
ggtcaggtaccagattacacaatactaaaaccctttggttgtgcatgttaccctcacctcagaccgtacaacagacacaaaatggaatttcggacacaacaatgtgtctttcttgggtactcatcatctcacaaaggttatttgtgtgaaagtatggaaggaagaatctttattgcacgccatgtaattttcaatgagcaagtgttccctgccacatcccaaaatcagccaacaaaggtacactcatctattccctctcttgtcccatctgccacatttgttactactgaaaatatatctcaataccccacacagtccactgttatacaacctatacctattattcaaggacattattcacgtgttcctgtgcaccccactcaacaccctactccattaaacaatgaaggacatgtcactatcccacatacatcacctattgcccatcctataccagaaaacacggttccagctgccccacccacacttaaccccataccacatcctgacaacattttcccaccattatccacccatacctctcatcaacctacccctgttacacctcatacgacttgtccttccacaaccaatacaatcctacccataccaccaactacctccactcaacaccttaacaatgaccatatccttccaccaactaccaccagaactcataacatggtcacaagatctcaaagtgggatatacaaacc

SEQ ID NO: 200491 - DNA, 1028 bp, Cannabis indica
ggatgtttataaagcctattccacctaatttttttggcgtgcatagcttggtccaagctacataacctgatctagacatattgctctgtcccttccacagaatacttctacaaatgtcttctatctcagtaataattcttttaggcaaaatcatgatttgactccactatgcatggatagttagaactaagagtacaaagttgattagtgaagaccttccaacatatgacaaattcctagggccccataatttgattcgagctatcatcttctcaacgatcaatctacactcaattgaagaaattctcttggcacaaattggaataccaagatatttgaagggaatttcagacttgctgaagccagacatatctactcctctttttgatattttttttttcatccatgccacttcaataaatggtagatttgatactatttggttgcaagcaagaagtgtttgagaatatttataagccctgtaacatacgatatatgattttaaaatctcccttgcagaacaacagcatatcatctgcaaaacttagattaaataactttaaattactgcatctttcatggtaagagaaatcaagttttccccaacattttgcataattctactaagatattccatcccaaggacaaagagcaaaggagatattaggaccccttgcctcaatccacttcttgcttggaaatatccattcatataaccattgaacatgagcgaaaaccttagggttgtagcacacttcattataagagcaatggagtttgaaggaaattggaaagcattaagcatctcctccttagtatcataaactttttaaagatcaagtttgatcgtataattagccttgattgatttccttacatagtgccttatgagatcttagcagatcattatattatgagcaataaacctgcccttaataaagccctcctaattttaagccactatatctggtaaaatacttttaagtctactataaataagcttagtagtaactttataaagaacattg

SEQ ID NO: 200492 - DNA, 1210 bp, Cannabis indica
aagggttagaaatctgagtgaaaagagccattatattttgctgcaatcaatgtaaggtatcctaaactcttatgtgtttaattttattgttttagagatattcatatttaggatattaattcaacatacttgttagtaaatctagatgttggtaaattaatattcccaacatcactataggctcaatggaagaattcttggaataggtagatggattgataaagcttaaggaagcattaaaggatggccaattcgtaagactagtcgactgagttcctagcttaaggacacatggcatttttgagtcaaggatggccaaagcaaagcccagtttaaggcccaactaagaccatgggtcgaaactactaatctaggagtcaagtccgtttgagtgaaaaacagatgacctgtctggatgatgtactccttccaaacagcaaaatcccaaacaccataacaaaagtgctttaggaaaattacttaatgaacctccatccacaaaaggttcaattctgaccaaggcatgaattataacctcctggtagagtctctcaatcaacctaaagagaagagaaatcaagctagctcatggtactaccagtgaatgcaaaggtccaatgatcacgtaattgcattcatgtttaaaatgtcattcttaaatggtagcttctagatggaacacccgtttagaagtgcaaaaaaatccttgtgctaaggtccaatgaccacattaaaagcacccttaataaaataaaacatcattcttaaatggtggattcatgacataattcccgttcagaagtttcaaaaagttgtaataaaaaagtctgatgatcacataatttcattccaatttaaaacatcattcttaaatgatgacttcaggcaaaaccctgcttagaagtttcaaaagattgaaagactcagggtttatgaccactttaaagcatttctaatacttaacaaatgtaagttactcttaagtaaccacacatacaagaccaataaatgaataaagcttaattatcattcaaattatgtcaattattaagtatttccacttagtgagtttcaaatcaataatttgtctaacatgtgtacaaacaggttggcctagttatagaggccgagacagactactgtgatataccctggatgcaagtaaccaggaagatttcagtcagctttattacttgggaggcacctacac

SEQ ID NO: 200493 - DNA, 991 bp, Cannabis indica
tttgggggtttttaaaaattggttctattttaaaaattacatacactaagtgttatccaaaccaattttgtattaaaacaatcataataattcaaatttccctttctgttatatgactacttttggagaaaagaaaacccatcttcattcctcgtgtctctaatgcattgattaatattgctttccacaatctaatggggtcgacatattttgtctctaacgtcaagaaaacaaacgaaacccttttcagatcaattgaaagcccaaagaaaattgaaagcaatatacaattatctaactagataggtaggtgtacgtagtatggccaattagaaaaattatatgtagataaatatgatttaaaagattcctaccacacgtcaagtatatgtgcaataatagaataaaagggcattattgatttgatattgacctacataaaaaatgcactaaatagttttgttcataatattcattttattgaatacattttagcaagttgcttttacaatctattagacttatatgtacacgacacacatatggataaatattgttttgtgaatgtgtaaactccatatcattagcttggtattagttttttcttatatatttattttacatctaaatcaagataaatttaccttgctcgtgccattttttacattctctataaggaaaagatatacgaaagttctaagaaggagatagaaattagcctcaccttttgaggatttttattcttttattctcaaactaaaataaaatctcacttttttggatatatatacgtatacacatataggtagagactagatagacaactttgggaaagggaaataaattaatatcagtatcatgaaaagtttttcagaaagctcaaataagattatttttcttattggtatagaaaagtataataaatgctcttaagcaaaaatgtatagaattatttatgaaatgtcacacaagcatttcttttttttttttt

SEQ ID NO: 200494 - DNA, 2016 bp, Cannabis indica
tatttttacaaatattaattattatttgtttagaaaaaaaattttaaccaaatgtaagcataaaaaatcaaatttcccattgcaatttctatccttaagctctttacattttaagtttgctatttgtttatttttgttattacattaaacttgaatgtttgtataaattgcctttgaattttttaaaattctaaaattaatttaaattttcaatttacctcctcttggaacatattttaactaatatattaaattaaataaatggtaatatttagtttttaaatatttctcttcaatttttataagttaatattaaaaattaggtatccaataaacaaaccaatgattagattagactttgaagtttagattggattatatacgaaatcataaggttttggtcaatatagtttttttttttttttagtaaataaattaggttcgaatatagtttgttgttatataaattagtttgggtatgtctatacacaagttgataataagtaggttatgtaattttacgtgttggtgttatccaaatgtttactataatgtttttgactttaggtgtggcgtttccaagtacttatttctgttaaattattgataattcaaagctattgtctatgtttgttgtatctattgtacctagttgtttgttgagggtgaaacctacttgtaacatattgtgtttactagctagcttttttctaatattaacataaagaccgggaaagaagaaagctcccaaaactaatcaaaagacacaagtggaaactttcaaagttggacaatatgcttgtaattctaaattatcaaatattaccaattaatacttgtaattctagtttatcatttctctaacgacataatgtgttattaccaatgaatacacatattcttcattactgttgggctacttggcttaggattgtataattgggctttgaccaaagcccactttagttaactatcacagattttaacctaaactcaaaagagttccatagccaaaccttcaccattagaaataagtcaacaataataaaagaaaaaactatttcttattaaatttctagggcacaaaaaaaagacactaatttaggccatgacaggtgatccaccaaatagtaagaacatgaatcaaaattagcttaaattgaaaatataatattaatcttgtaaaaaaccattccaatcgtttaaagccaaagttaaactattttgtttcgataggaaaagaaacttcaaacaatttttaattataattaattaaaaaacaaaaacaaaaggctttctcctgaacatgtactaaatcgtaaccctgaattttttttttggccctgttgaattttttttttgccgttaaaaattcctctaaaaaaaatttaagggggacgtcaaaattaagtacaaaattactaattagccaaaacaaaataatataatgaaaaattaaagagaagagaatcatcagaaaccaaaattttatcaccaaaagctgaaacagctgtacggtccgcatcatggtaaggtgaatatagaccccatcacttgattactctattcttcttcaataatcaattttcaaaaacaaatcaacaaaatatttatagaaaggcatcagaaaataatgggtagtaggagagtctcagcacatattaaatcagagtggtgcatgacattctcaatctctcatcatagccgatcgaaatacaaaaacttaaaatagaatttcactttcacaataatgaaaaataacaaaactaaaatcaagaaaatagagaggatagaagttgaagagatccaagagaaggcgattgatgatttttgtgagttattcttatgtgtatttatatatgaaagaagtaagaaatggagagcggcagatgcaaagaccaactaatgcgaaaccctaataaatttctcctccaattattgggccactactacaagtccactattaaaatttgagcttaaaatgaaggagcttttagaaaaatattagattttgga

SEQ ID NO: 200495 - DNA, 815 bp, Cannabis indica
atatagatatttatatagatttattacgaaagaatttcacatttgagatttttgtttttgaaaaagaatttattatttgagatttacttattaatttgcactaacataaagcataaaaataagaaactcacgaattgatgagcataaaaataagaaattcaccaattgatgtttcttatgaatcttatcaatcatttcccgttcatgtattattattattattattattattattattattattattattattattttgttcattatacgtggacgttgattttacgtacaaactaataatctgttttcttttttataaaaaaataataacaaaggggactacactaatgaaaaaaaaaaatagaaaaataatatgttcaattaattatagtcttggtagtaggcaaaaagtttctacactcacaaatctcaaaaatttgattaatatattagctgaacataaaaaaggtgcaagaaaaataatcaaacacaataataaaaccactctacaaaattcattccaaattattagtgtataagggtagttaaagtttgttattttttgttactgttgggacaagttgttctatctgttattttggttatgcttttttctctacccttgtactcaaagttcagtataaataaaggccttgtcaatgccaatcaattaatcattgagcattccattcttcgtttcactcacagttccttctctctctcgctcaatcacactctgtttctacaaagactttcatggtatcagagtcatatctttagtaggctttcaattcacacctatcaaagagttagct

SEQ ID NO: 200496 - DNA, 1035 bp, Cannabis indica
aaaacttaagaggtatatcaaggctttgtcacctcagcctactagtagtaccgacacaagtggtctaccttctaggggtgagggaccctcgtccatccatcctcttaaaaggttcctggacccaccttttgaagtatttcatatgggccttcccaatttaggccaagtacccccactcccaattctttcaaagttaggaatactctcctcaagacaaggtcttcaacatcaaatgtatgattcttgactttggagttaaagtgccaggtgatcttgccttggtacattttgaattgcacctgtgatttttctaagagttcttgattaggtccaatgattcctggagcatggaatggtttcagaaagggtcataggtatctcgttgatgagagggtgtcatggcctcaacttggattactgcttcacacccataaaccatcacatatggcatgtgtcctattgaagttctctccgtggtcttacaggcccaaagaattcacggaagttcttttggccaataagctttgcatgcttgcagtttcttcttcaatgttgttttcaagaatttgtttatgtcctacactagtctattggcttgtggctgggctcagttgagaaagtttttcacgattccatgttgggcatagaattcggtgaagtgttcactttcaaactgcttcccgttgttagagatgatcttttatggatgtttgtaataatacacgatgttcttgatgacaaagtccatgatctgttttgaggtgatagtgttcatcgactctgcctcaacccacatagtgaagtaataaactgcaaatatcgcatatttaactcctccttttctcgtggggaggtatcccactaaatcgatttcccaaactgcaaaaggccatgggatactcatgactgtaatttcagttggtggtgcacgtggaacttttgcatatctctcgcactgctcacacttccacacatactctatgcaatccttcttcactgtggtccaaaaatacacttggcaaaggattttctttg

SEQ ID NO: 200497 - DNA, 521 bp, Cannabis indica
tataatagtagttttagagtaataattgagctattttacacatagattatgtgaatgattcaaattctaacaaaaatatttttaatttttttaaaattttattgtttatttcttgaagtcaacatttttattgttattttttaatctttaaattatatttaatattataaaaatataagtttgtatcaatttttaatatttaatttatatgtaaaaaaaatacgctctcctccctcaacaaaaaaaaagttacattcctctcaactaaaatcttaaatttgtcataatcattatataataataacaggaaaaaagaaatgtttacattgcatataaagatcatttcatataacaatataattatagagtaatattcccacattttgaaaataaaaataatttaatcaaatctctgataaaattctaatggtataaatttgaatttcaacttatttattaattatactgactttttcaaataaatatgctagaggttttaactcaaaaactataacgtgtta

SEQ ID NO: 200498 - DNA, 1163 bp, Cannabis indica
aaaaacttgtaatctgggagatgaaaactgcgtacctgttttcatttttgccaaagatggctgaacaacaacatgcatggtgattactcctcttggaagctctccgaatggcgctttacactgacccacagtcttgttgttttccaatatcttcccagcgttgatcaatttaatgtcatttgctccttttggtacaatctttttatctaagagaggcaaaataaataatgatataataaacagaagacaaatttaaacatccccaaaatgtagtagttagaaagggagaaagggaaagaggagttttacaaatgacaatcttgtagcatataattaagcctactccatagatactcgggatattgacagaagcagcgatgtaaagctatatggacatgaagcatgtccaagtccaacaacatagcttcactctgatgccaaactttagtcattatcatgttgacaaaaatgaaacttttgggtaaggaaagtaggtgacctatgtacggtgcttatatgtccacttccaaccaaatctattcagaattcttttcttaaaaaaaaactaaaattccaaaaatccacaacagggtctttgagctaccacttaatcctataatctattctctgaaaataataaaactcagcagctcacagttaatcaaataggggaattggaggaacagaacaccagataatgtgaaagcaataccttaccttataagcgccataataaaagtaaactaaacggtgacagttaatagattgtttacgcaataattacagtaactcgcaattagaataataagaatcaaacatatcatgcagggaaacaaatatgaatataagaaagcaagttgaacaatttaatgcaccgtaatccatgaccgtttctttgtttccataactcaagtctcaagatcaattaacacaagtaaaagttacgatttccataattgttaaagaatttcggaaggaaaaaaacttacagcggattttactaagaaaagaaaaaactgagccaattaatttcttgacgataatttcaaaggatcattaccatttttggtctcacacattgtcagcccatagagtaagcatgtatcttataatagaaaataatagcttttcaatttcgggaagtactgtaataacaaaaacta

SEQ ID NO: 200499 - DNA, 830 bp, Cannabis indica
atatttttatagagtattaaatttaaataaattataatatttatttttacatatctttatgttaatattaaaaattaaatgtataattagatatccaattaaaaaatcaatctaaactaattggattgaattaaattaaattttaaggtctaattagatcggatcgggtatgattttttaaatttagttactaattagattaaatcaaattaagagaaatgttagactatattggatgtggctatatagtattatgtctatgtaagaattttttgtagtttaaattactttactattgttgttgctaaaaaaaataaggaatgttaactttattttttgtagtttaaattactttacgattgttgttgctaagaattttttgtagtttaaattacttttactatagttctttgtattacctttgtaagttggatatatagctcttctagtccaagaggatataacttttgaattaaacaaaagaaagatgccatcacatacattagaccatttacaactgaattctaaaacatcaaatatacaataatttcacactatatttaatttaataaaacactaaaactatactcgtaaatagatttgtctaccgtagtcccactaaattttagtggggacactataaaccacactattttattttaaataaagtttttaataaattaaataataaaaaaagaaaaactaaataattatatatatttagtattaaaatattcttattatattaataaaataataaaagaataaagaataaaaaaattagtagtaatttttaatattgtggttggaattgaaaaaaaaaactagta

SEQ ID NO: 200500 - DNA, 1094 bp, Cannabis indica
agtgacaccaactaggattaccaaggtgtacacctatgtacacatggcgtactattctattggccaaaataattttattttgaataaatttcaaaattattttcataaaattcaaaataattgaatttctaaacttatattacctcatacattaatttgccaatttatcaaaaaataaagtttagggatcaacttgccaatttaccaaaaaataaagtttgagaactaatttgccaaaaaaataaaatttagggatcaacttgccaaaacttatataatttaaggacttacagtataaataagctttactataaagtatcatactattattaatgcaactatataaaaatatatattgatttaataacttatttttaaaaaaaaaacccattaatcaatcatatttgtagtgatgttaggtagtgctacttattaaggagttttattaatactcaacaccaattactatatttttgatttattggatggatatctcaaagagcttcaactataattgggtacttgtttcttggcattctcacaagtgttggttggacagagtcatcctcatcaagacctctccatctgcagggatcaaacaaaatagaaaatcacatcaaaattaatctcaaatatgaaaactactcaatacaaaaattactatgaaaattgtttaaaaaaaacactagttcatgcctaataacaatactaaattactagtgatgatatccatctaaaatagctatcctagcctagccccacatcaatcttttttataaatgtttaaatttagccacaaatttaccaaaaataatgaatagacacaatttaatctccagaataaatatttcaaatatattttgtgaaacatactagcaaaaatacttcttttttagtgcattaaattttacaatatgtgtaaccacggtcgtcttcaggttagggtggccgagaccgttactcaaagcccctcagtccaagagacctcgtaagacctttaaagaaaaaacttttgctagaaaaatagtttaaagaattatttgaattttattttattttgctaaaaaaaaggggagaagttgaagaatactttt

SEQ ID NO: 200501 - DNA, 2142 bp, Cannabis indica
aatatgtcaaaattacagcaacaggcaatctgattaattgagaccattgcacagctagcagaagccctttggcttcagcaattgtgggtgagacattgccaacaattggtttaataattcctgccacattttgattggattcattaattaccacaatctccaagctgtgctttttcttggtattgtcaatagccacatttgtgtagatctgatagctaccatggaaacaatacaccaagtcagatggtgacctgttcatcaagcttgtttcaagagtacaatgttgctgagtatccaaatactttagcaaaaaactgttacagcaagcaaaaatttttgaaggatccatagtcaatcgattaaaaaatatattattctgctgattccataaagcccataagaaacaaagcaaaatatcaatagaagggttatctagattagttaatacattctgtatataatgtaaaatgccaaaatgcttatgagaattttaaaaactaacaaaatttgatgccttccaagcttttctagccctagtgcaattgagtaaagcatgtgaaaccattttagagtgaagattacataagagacacaaagaagaagaaattatatgccactgagaaagcacctcaatcacaggaatagagttacacaccaccctccaaataaaatgcttaactttagggaacaacctagaatgccaaatcttggaccaaaaggattttgaggtttgaaaggatgaggaagaggtaaggtcccttcctgataaagcaaggtgatatgctgaattaacactaaatagacaagaattctccttagctcaaataagctcatctttatcgcttaatctagagataggaacatccaaaatctcatcaaccaggcagttatcaaaatgggttttaagtttatttaaatcccaagccccagaatcctcaataaaatatgatagcttggaagaaggaggctcgggatcttgaacaaaactttaaatctttcagttgggatccagtgttcctgcaaagtatttattgtttccctgtctgcaactttctagatcaatcgtgaagccaacagatcccttccccaaaggacacttctccaagaaaatgagggattgtgactagtattagcctccagaatagaggtgttaggaaaataacaagctttgaggataagactaagcgatgagttagggttgttgaagattctccaagcttgtttagcaagcattgcttgtttaaagtgaataagagacctaaatcctaaacctcctgcaaacttagattgacaaacactttgccaacttttctaatcattcttttgtgccttagatgaagttccccatcaaaatctagccatcgcagcctcaatatccttacaaagcttgacaggcaattgaaaataggccatgacattggctggaatagcttgtaccacatcttgaagaagaatttccttactagctttaaagaagtgttttgaatgccaagactgaagaatagaagagaccctatcttttaagaaagaaaaggagtgatactttgaatgcaataggcattgagggagtcctagacacttgctaataaaaggtctatcctgtagattgaaagtggtaaagaaatcttttctaatgtcaaggggaacatttggggaaaatagaatggatgattttgcaaagtatatgacctggccagaagctctagaataaactgagagagcatcattaagttcagcacaagaggttctctcagttgagcaaaaaatgaggctatcatcagcaaaaaataaataagtgagttaaagaaggggcatgtctagaaatagagattccctttaaaagattactatcttgtttaactctaagaagagatgataaaccttcagcgcagagaataaagagataaggggataatggatacccttgcctcaagcccctagtcggcttaataggacctttgatagccccattgattagaaaagaaatagcaggggtagaaataaatttcataatcaaagagacaaaatgtagaggaaagttaaaatgaaacatgatactctcaaagaaatgccattcaaccctatcaaaggctttggtcatgtccaatttaagcgcagtccaaccagttttgccttgccttc

SEQ ID NO: 200502 - DNA, 854 bp, Cannabis indica
gtacatttaacaaaatacagggtaccaattaataactcttgacaaaacacagagtactaaaatgatatttaaccctcaatttatttggtcgtaagatcgaatgctaacttaaaaaaaacaattacccttagaatactatttcaatcaactaacatttttttaattattactttttagtaacaataaaaaaattatttttatcctgcaattattgaattaccttctcaaaatattaattcactcttattacaccattaacataataattaaccactaaccatccaatacaaatcgtttaattattgagtaaagataaaataaaatctccactttatttgccttattatatatcaccctatatataatgatgtgaataatatattgtcaagaaaagaaatgggaataacataagtttttttaaaaaaaaaatgggaaaaaattaattaaacatacataagcatacaaaaatatacattaaacactcattaaattaaggtaattcctctttataaatattaaaatttatgtttatgtaatttcatatattattttttaatttttttcttcatttttacagtgtaagttgccctaataattgttgcgtgagttgtgatttagattgctttttgtatttccgtataagtgcaattttttttttttaaatgtataaataaaagagaaattactacatatactattttgtaattttattttttttttctaatttacggtttgcgttgctccggtggtttcttcagtagtttctatgtaaattgctatgcaaattttggttgcaatttaagttgctccattagttgctattgttggaatattatattttactaggacctaga

SEQ ID NO: 200503 - DNA, 1555 bp, Cannabis indica
gcattattgtaattgagatttgttaagttatttttgtagttagattacattttatgtatatttttgaaaaaatcccaattaaaaatttgacccttattaaaaaaataataaataaataaataaaataatgattatgtgcattagaccacaaatctattactaacttttttttaagatactttacaaacgtaagtcaattataaatatttttatatttatgtacctacaatagaaaaataataataaaaaaagaccttttctttaaaaaaaaaaaaaaaaaattgagtcttaaaaattgaggcttacgcaatggcccaaactatctaatgcttagatcggccctggcctctccacccataatcgagcttgattatcttttgttcacgaattaagcttaatcaccattttaattttctacatccttaaacgaagaactgcacgtaaagcttaacatgaaatttttagatctcattctgagattttagaacatcttgaatcgtcaaattcttaataatattaaagaagctatgggtaaaatactgatctaagcactcgaaagtgaaaatccaggaagtaacacccaggcaccacttaaactctacccaagaactcgggaccgtgcgacgtccgtacaatttacgaaaaaaaaagtaattttaagtttaaattaggtttatttttagagttctatatataagacttttagattttacttcagcaacgttttgaatgagagaagtcaataaaagaagagaatttatccacatctagtttttcttcttaaagtcttttgattttcaattataattatacttataattatgttttagattatgaagtagtccttttttaggttgagagttatttcaaaacccaatacatgatttcttgaatgctttgattaatattattatcttattccttcatattgaattgtttatattttcaatgcttagttttatgaatagtattttgatcttgtttattaagttttacattatcatcattcttagaatttatatatacctaataatctagaattttaagtttaagtgataaattacttttaatgatattgtgacaggtattgttaattaatgatgatgaagaatataaccgaagttaaatgaagtatatgctaatttaattttttacttagatatattaacttgtctccatagagattttaatattttcctaggttaaatagattgcatgctttatggatctattacttagtgaaaatatttaattattgagcgttttgtcgtaattaattgtaatggggtagttgggataagtaattatctgtgggactagtagttcaaactaagaataaaatataatatttatcattgttcatgattgattgttggagggggagaataattcttaactatttttaaaattgtaattgttattcatttttgttttcttttcatgctatttaattgcaatttaaaatctctctttaatttatgtttgacagtgaataataaattaatcataatccttatagaactgactcgtagttacttttatattgaaataatta

SEQ ID NO: 200504 - DNA, 962 bp, Cannabis indica
aaaaaaaaaagattaaactaattaaggttgttgtcgtatcgtggagactatatatatataggtaataatcataatatgtatatgccaaattaaacaaagctacaagaacttttgcatgcattctaatacaattcgtgacactcatatttaacaatttacatattttattaattattttacaatatttattcatgattgattgattgcgtccacatacccataccatgatatcttttccttgttcttcttatttatcgtaccatagataccctctcatgaattttaaatatacaatgtccaccgatataaattttgcaccaataatgtagacattaaaagtatagatattgaaattgaatagaaaaaaatattataattaaagaaatgcatctgtgacattaattaatcagcaaaaatatataaagtaaaaatggtgtgatgaatacccatttaccgagtataattgattcattttgtctgcattgtgggaatctaatagttaattacatactgtattaatttatttttttaatgaaaatatggtaattgtcaaactacatatgagtctaggtgcagtcgaatttttaatctatttgaaatttttttttttgagaaaatttttaaaaatatttttttattttttatttataatttttacgatttaaaatttttatttataaaaatatatatattttttctaaattttataattataaaaatatattttttccagtaaaaaatataaaaaaaaaatttaataacaactataaataaattataaaataactcaaaataataaaaaataatattataacaactatattatataactataaataaagagaaatttgattttctatacttaaatatacataatattttatccctaaaactcatacatatcaccattgaaaatatacgactactttatctaaaactcaaaaatacccctctcataactc

SEQ ID NO: 200505 - DNA, 1623 bp, Cannabis indica
taatactcataatacccttcttccttctcttctcatcgaactcacaccattcatactctccattcccatccatactgatggtggtccgataagagtccgatggtggcccgatgctacccattttttttatacataaaaaatagtaatatcaggccactatcgaaccatcatcggactaacattagaccatattttacatttatagatgttaagctccattcattaagctcgtcaggaaggcatcagacaactatcgaaccaccatcggaccatatcatcgggccatatcatcgggccaccatcggaccactatcaaaccttcgtctacaacttttactcgacaacaagaaggcagcggaccaccaacggactaccatcaaaccatatcatcgaaccactattggacattcgtcttcaacttttactcattttaacaacataaaagcattgggtcaccatcagaccaccaaccatcgaggctggttttttttttttttttttgcctaaaactcagattcagctatttttgaccctaaatctaacatttactcacaaaaaatattaatcatacaatttattcttttaataacattatcgatggtgaagccgtggttgatggagaactcattaagtttgtaggttgttgggtctgtgttcgcaatatatagtcgtggagagaagggatcgaaattgtagatggtgggttgtgagtaattcttggggtgagttcaaagagcaagagagaggagaaagagagaggattaagtttgaaatgggagagtaaaattgaattttatgaaatattagcttattctactaatttcagttaatttaagtttagaaaagtaattttaatttgataaatacatagaaaataaaaagttaaatttcccttttaaaaaactacataatattctaataagtacattaatgcacattgcacaccatcatatgaaaattaaatttataactattcacaaaccaaaaacataaaaggtacaccaactatatatacctgtttttaagaagtacaccaatacatctatttttgagaggtacatctttataactcctcttaactcttccattaattatacttttcttccattcaaatttattctactttcatttcacctctctatcaaaaaacaaacttacatgtagtaataatttttgtagctataagttatactaatttaattttagttacaagtcataacataatttttttgtggctaaatgtaatttttagtcacaacaaaaaattaattgtgactaaaacatactatttaaatacaagttatcgttaatttaattttagacacaacaaattatgatttttgtgactaatattttttagccagaaattttttagtcacaatgtttttacttttagtcacaaattttattgtgacaaagtaaaatttttgtaatctttcttttttcaatctaataataaataaataaaattaattacaaatatctctctattttttaatttagttttttgtttttgtgtactcataattattgcgccttattccaagaggatcaaagttacaattttggcattgttgcaagggatgcttattcaggcaaactacttgaagctatagtcgtcta

SEQ ID NO: 200506 - DNA, 632 bp, Cannabis indica
tctctctctctctctctctctctctctgtctctctcggcaacggcgagtcacccaccacagtacgccgacggcagtggagctcagctaatctcagtcttaagcatcatattcaggtcagtattattttcaactttggacgaatcagatttctcttctattgttttgatttgatttcatatttagactaggctcaaactccgattgttcaatggtactatctattaaattcaagatcaaacattcataatcatatgaaatgaaatgcataacaataagtaatacatgttatgttaatgaatgagtcttatttgggaattttaatattataccacaatttgttcactactttctattcctttaacccattcataaattaaagagagaaaaaaatcatcttttaacttttttccagttgatttcttctgtctgttggagagtcacaccttgatataatatataatatgtagaaactatatacatagataagattaagatgtatgtgcaactcttttcattgccaattaattttgagatagaatcccataaatcttacacgtctaacattcattataagaacacccacctaagagagccttgagccatagtctccagaattgtcatgtgttgtgtt

SEQ ID NO: 200507 - DNA, 628 bp, Cannabis indica
tccagggatgtcaaaagcagcttgtttaatttcttcattggggtactcagctagcaaggcttcagcttgtactctagttaccacaggtccctctgtagtgactcactggtgcacttttttcctttgttgcatttttgttccaagtagttacttgtagtattgtaagaaggcctctactacctcttttgggttgtcaactctgtcacctctaacattaacaatagaaataattctcatttgaactctcctctccctcaaactagagtgatataaagccgtatttgtatccccatccttgatccaattcattttggatttttgttgcatgaatgaaatgtatgctttatgaacctcttgataattctctctggcctcatgttctctttgttgcagaacccggtccctgggattcttttgtatatcttcttgacaaacctccaaatgagccttggcctgcatatctaaagcctgaatatccgagaaacactggtggtttaactgcttgagaacaatcttcaaagccttcatttgggacactacttgaaacatacttgttccctgtaccataaccttccaggcatcctccgccttttgtttgaaagaaaggtgactagaccacattctaaag

SEQ ID NO: 200508 - DNA, 1007 bp, Cannabis indica
tttctgggtattcctttaccatttcgtcgaagaaggattatctaatttgagaacttcatcatgtaacaccaaagcagagggttgattagacaaacatatgaatcactgaattagattctaaataattgcatatacctttggatttttgttattgtttacacaactatttagacaaaccaatgtgtttttgatgtcttttcttgttctggttgattgcttaaatctcacagcaaggctatagagaaaatgaggaacagtcaggaaattaaagatgctttaggagagcctattgtaaagggtccatggtacaatgcctcacttgcagtagctcataagaggcagtctgtttcttgcacattcccggtttccggtccacaaggcacaggagtcttgcagttgaaggctgtacgtaatggaggtatttgaagctttacaatgtaccatccattcacagatgacatattagagacttgtgatgcactttccccacacacacactaagataacatatacgataagataaataagatatgtattttgcaaaaattactgactgtattctctgttttgtcaaattttagataacataataatattttgagccaaattttagtaaaaatagaacataacttgatttggagatgttatgatcatgttgattacattttttgtattcctttatgttatagaaattgatttcaggttagttatataaaaagggatgacaaaaattgagctcgaagtattattttacgccattttaaaaaatacagggtccgaattatctttaataaaagagagaatttgaatggtaacttttgtaaaacagagagagtgcaccgtgttccccctctccttctctctttgtctctctcccctctcttgttcgggagaaacagagtgagaaagtagtacgcaaccataggaaatggggagcaccatagaagctccctatatcatatagacagatagcaaaacaaggcaaaatttttctgtttttgttacat

SEQ ID NO: 200509 - DNA, 978 bp, Cannabis indica
tttttggggatggctgtcaggaattttttcttaagctttctgttttggaattgtttaatcacttctattagtatagtccttggtaagaaccaagtaaccaagctcaagaaaatcaataacacagtagtcaaccagtagcaacaacaatagcaacagtatcaaattattagccaaacagtaggaaaattatagaagattgatattgaatgtaagagaaaacattactcaatacattgcataccttttctttttagaagattgatattttctcctttaagactacccttccacacaaagacccatataccctttttatttaatatatgctagcacaccatactaatcgtagggcctaacagtcttcttttttccgtttgtttagacttagtttgatccttgacacttaaatggaagggaattataatctggatttttgctataattttagagtctgattggtaggatggagaaatggaaggagcaagtgagatgatggaattagtggatggatttggaatagagttgtttcattttattggtttttatgagggggagtcgggattgatcagtttaatcttttctgtcttcatatttgaattgattatctaaatcttcttgtaccgaaacataacaaagaaagagttctccccttcactctcctttagtcctcctctttactctcctttagtcctccccttcctctcctttagtcctcccttaggctttgtagctctttccctaatccttatcttctctcccgtttactgaatataatcttagtttaggagtgtttactcactaaactaacacttttggttctttacttattgtctatgaacatgctgcaacgaataccgaaacaaaatgaaatatctagatttctggattgttcattaagtactctcttaaagcatacatccaaaaattggatgtcatactcatagtcataattatgctttcttcttcttctttcttttt

SEQ ID NO: 200510 - DNA, 1207 bp, Cannabis indica
atattattttttaaaaaattatactcattaattttgctctacaatatcaacattgaatattatttttttataaaaaaaaaaactattgaaaaaaattacaacttctaaaaattaagaaattaaaaaggaaatgagattattgctggctctttaaggaattgttatagtgggtccatatttgtaatattcttttccctcaagaaaagacaatattaatttgttattaaaacataattaacttaaattaattttttacataggggtgtataatttaaattttcccattttaaattaaattataaaataaaagtgtaagatactaaaaaaatgaaataaaatatctaatgttgaggtgttaatttcaaattcctcacacaattttaaaatcataccataaagtattttcacagtgttttgttctttctgattaaaagaaaaaagcaactgcaaatttatttatataaatattttttaacactaaaaaacaaaaccaataaatttatattttatatattataaaaaaattgaaagcactcattaaaaagaatttactaatacacttttatttattttcgcatttaaaaaaatttagtcaatttttttttttttataatagtctatattatagttatttaagatattttacgaaattttaaaaaattttaaaaaaatttaacacgccaaaaataaaatttaaactgtctatttcacaagcatataaaataaaagagttacgtataactaacggtttgaatcctattttttagtgtgttaattttttttttcgaatatctcaaaattttacaaaataactataacatatacaaacatacaaacaaaattaaactctcaaatttgatttttatttaatcttatgaagtaaatattatgttttttgtttgaaagtaaacgaaagtaatggaccaaacgtgttacaattttttttttctatatatatttcaagtcaatttgatgttaaaataataccatatttattttttgtaaaaaaaataacaataaaacatttacaataattcccttaaataaaaattttacaaaaatagtatttactttaactcccaacaaaatctattttattttccacaaataaaacccaacaaaactaagatttgtttctaatttttggccaaaaaattattaattattcaaaatttcaacataaatatataaagaaaaaaataaataa

SEQ ID NO: 200511 - DNA, 578 bp, Cannabis indica
ctattctattagaatgacaattttaatactttaatatgtaatgaaacaaatgaatagaaaaaaaattgtttcttttccattttttttttattacctccaatcaaatactactttaatcatgtattgagtttgatatacatttagatttaataatacctgagatcttaaatttgatacgctaaaatagtagtggtatttctttaatttatactccaattgtattactttttataatctatcgtatcaaatggcatttgagttaaatttcgaataaaaagttactcattagttagtttcttatttggttgctatttttaaaatgaaaagttattcattttttatttagttgttatttttgaaatgaaaagttactaataaatttcttatttgctttgtatatataagagttaattttaaaataaaataactacttatgagtttcttatttgtttcacataataaataaccttaaattaaaaaagttaattagggtaattgatataattgaaacatgtctaatttactctttgtgctactattttttctttggtagtcttagagttgctatatatgtgagc

SEQ ID NO: 200512 - DNA, 1838 bp, Cannabis indica
tatatttatatatatcaattattataacctaactcaccaccataaaaaataggaagtgtaaaacttgaacaagaaaaatggctgtgcagccaaatttcgaactggagagggatttttgcaacgacgacgggcacccgattcgaaccggaacactatggagttgtgtggcccatataataacagcagttattggagctggagtgttgtccttggcatggagcacagctcaattgggttggattggaggcccaattgcattgctatgctttgccataatcacatacatctcttcttctcttctttctgattgttataggtcacctgattctgttactggcaaaagaaaccaatcttatattagtgctgttacactccttctaggtaggtataatctttcttttttaatctaaattaaaaaagaaatcaccgagaacgagtccagattgagtcaggtgattctgtttaatgtttattgggccgaaagactctttcggcccaataaaaatgagaaaccacctgatgatgatgattctggactcgttctcgagcttttgagctatattttttttattcgaaataaaaaatttggggttaattattcaggtagtaaacaagcttgggcttgtgggttacttcaatatttgagtatgtttggaactggtattgcttatgttattgctactgcaacgagtatgaggtaatatatttatatatatatatgttataaatttattgtgttatttaatgtttttttaatgagttttatttatttatttttttttaatgtagggcaattatgaaatctaattgttatcatgataaagggcataaagctccttgttcatatggaacaactatgtatatggtgctatttggagtggtggaaatttttatgtcacaaattcctgattttcataacatggcttggctttctattgttgctgctattatgtcttttgcctatgcttttattggatttggattaggttttgcgactgtcataggtgagttttcgagtaatactgtaatttttttaaaaaatactgtgtaagttttatattatgtactacgttaagttttaacagttatttcacggttagtttttagttgttccactgttaatttaattgttatgttttattgttttacgattattttataaaacgacaatattttattaaaaaaaaaaatccatataacagtaaaattgtaaactcttactcaaaatctaatatttttttaaaaactcgtttattcaattactaaaaccctatctcttttctttattattattgtcattttgcaaaatagcattcttgatatcaaaagatgatttttttttttggcctatacgtagttttggacttgctcaactaaatttggtaatattttttggtagaaaatggacaaattcatggaaccctaacaggagtaccggcttcaaacaccgcgaacaaactatttctagtctttcaagcgctcggggacattgcttttgcctatccatacgcgcttatccttctcgagattcaagacaccttaaaggctcctccagcagagaacaaaactatgaagaaaggttcaatgattgcaatctttgtgacaacatttttctacctaggttgtggttgcttcggctatgcagcctttggtaatgaaacacccggaaacctcttaactggattcggattctatgaaccttattggctcatagacttcgctaatgcttgcattgttttgcatttggttggaggatatcaggtaataatctaacacatttttccaaactttaataattattttttttcttgtaataaataagaaacataacaaaatat

SEQ ID NO: 200513 - DNA, 529 bp, Cannabis indica
ccaacttgggctgcaaaagttatcattgaagaaggtgatgcgcttagcctattggacccgagactggagcggaatgcagatgtagaagagcttgtaagagtttgtagagtcgcttgttggtgcatccaagacgatgaagttcatagaccatcaatgagtcaggtggttcaaatccttgaaggagttatagacgtgaatctgcccccaattccaaggtcacttcaagtttttggtgatgatcaggagaatgtagttttctttactgaatcatcgtccacaagccagagttccagggtaaggagcaacacgtcaactacttcttcccagaccaagagcattacctcaactacatcttcaataagctgaagaacctaagcacaatcaagctcaggacatcctgtgctctgctcttcttttttatcaccaaatctgtacagtaattttaaagcgatgtaaacaaacttcgctcatgaattatactttcttttgcgtaaataatcttgtgttgcatttgaacacacatgtctag

SEQ ID NO: 200514 - DNA, 583 bp, Cannabis indica
gtataagagtatacaaagtagtccacagaggcagttaagcagatgacacattacttttgctaacaattcagtagtttaaaaagttttactgtctacatttaagcttggagagttaagtgcaagtaaaacgatagttgagagtgtttagccgccaaaaactcaatttttttcaagaaagcaaggcaagaagcctacaagggcaaatttagatggggtggtactgaaactaggtaaggttgtcccttcccaatagctatagtctccagttggtttttcgtgtttcgcgacactgacctctacctctttatgctattaaaattgtaatttttgtcgatacaaattctattagtgttttaaacaagatacacgtaaggctagttcgtattatacattattacatcaagacaaaaatatgtattataagttaggtttaaattttttttaataaattcaaaaattaaatttaattacaaatttaaattattggacctaaaaagaaacgtgtagtatataaattctttttaaatcttcttttattaataaatttaaaatggtagcatagaataataatatgaaaattgta

SEQ ID NO: 200515 - DNA, 1041 bp, Cannabis indica
acattccaatagaaagtaaatttgacttctctgatggttttcacagtaccatcatccaattggatcataatagatccaattccttgaatttgacaagctttgttatttcccaacaacacagttcctctaggcttaacttcatactgacataacatttctttgcagggtgtcatatgaaaatagcaaccagaatcaaggatccaatcaccatatgagtcaatgcttgacacagtaagcactccattagactcgtaactatcattggcaaatctgcctctctttttctttctttctatggccaatttcttttgtaataaagtacaatcatctttgaaatgaccctccttcttatagtattagcaagtcttccctataatatttatgttcttggtttttgactgatgattggtgttcttcccatggttgtttttgcttcatttctgatttttctttacatatattccattaacataaagcccttcaccattgatgtcagctccatcttatgatcttttctgaatctcttttgagttcagtgtagccttgacttcaaccatagtcaaggtttctttaccataaagaatggtatccacaaaatgttcatgtacctttggtaatgaactgagcaaaataattgcattaatcttcttctttcacttttactccaatattgttcagatcaagaacaatcctattgaagtcatctaaatgttttctgagttccttcgagctatccattcttagggtgtagagcttcttcttcagattcaacttgttagccaaggacttcttgaagtagattgcagccaactttctctacaatcccagagcagtttcttcattagatacctccctcaatacctcatctctaaggctcaaaagaattgcactgtgagtctttgtttctgtgtctctcttgatcttctcatccttcaatccatcaagcaatttttcatcaattgcttctacaattccctggtgcactaacagtgctttcatcttgattctccagagacttaaatcgttggagccattgaattt

SEQ ID NO: 200516 - DNA, 1206 bp, Cannabis indica
aaacttaatagtgtaattgctattaagctagttttgtagagcacagcacctcaaacaagcccaaaataacaatactatatgatgcattagccttgaggcgccaagggatgcctccaacagggaagcataagtctttcttttccctaaggcgtaaaaaggcaagttttttttttttttaaaaaaaaaacttaaggcaatttttgaaagcctcaagccttatgaaaggctttttaaacattgagttatttaacgatgctctagtaagtagattcttttgtgagatgctgtactgcgtatttttttcatctcatcattatgtggtacattatctaaagtgtgatcacttcctggtacttatgttaactaacagatattaaatcttgtacagtatcttgtagtctgaatatacttatttcatttttttgtatgtgtacattgttcatagaggtcatctacttttcatgccatcacataaattatataaattatctgatgtgtctgacctcttttttctttttcttttcttgtcaagcagtagaccagatttacttgatgctgcacttttaagacctggtaggctagatcgccttcttttctgtgattttccatctcaaggtgaaaggctggagattctaagtgttctctctagaaaggttagtaagattattttcaataaatgtatctttaattttttttgaacaatggcctcgatgaatgtatctttattagttagttctctatgtcaaaaaatgacttaaaaaaagaggtaaaagactaaactctggtgcaaggagtgaagcttctatttccgttatttgtttgcctgtcataatggctctgtttttaaaattgatgcagctaccactctccagtgatgttgatttagatgccatagctcatatgactgaaggttttagtggagctgaccttcaagcattgctctcagatgcacagcttgaagcggttcatgaccttctgggtggtgaaagcatgcatgaaccaggggaaaagccagtaattactgatgctctcttaaaatccactgcctccagggcaagaccatctgtttcggaagcagaaaagcaacgcctcttcggaatttacagccagtttttggattccaagagatctcttgctgcacaggttctctccggcaaacacatcttcacacctcatctacacaatatgctcgtgtttgtttttgtt

SEQ ID NO: 200517 - DNA, 1934 bp, Cannabis indica
taaaattattttaaaattatattccgttaatgtataataagaagaatagttttcaacttatcctagattatatctgagtttattttttgataaagttcacaaaattataaaatacatttctttcgtaactgaagtttacaaatttgtaagtttataaccatatatttacaattttataagtaatattttttttttttgagaaagttcactggtgttataaattaaagtcatttacaacaacaaagaaaataggatagggaatttctcctacccaactaatgtcatcatccaaccctaaagcatatttagctaaaccatgttctgcttgattagcagttcgtttcacatgggtgactaaaacctgaaggaaaaaagataaaagacaccgtacatccataataagatcagaaaaacatgataaatcagtatctaatacatttaaagcattggagactagagaagcatccgtctcaatatgtgtaagagcaaattgtgattgcaaaaccctgttaatagcatgaaagagcgtttttgcttccatttcattcgatataaaacatccttgtactgcttttgagagtgcgacaaccactgtaccatttgatctctaagaatagcaccaatgcccatctttttgtgctccaaattagttgctgcatctacatttaatttgaatccattaatctgcggtgtcctccatttttgaacctgctgatttgtaatggaacctggcctagcagaagcttgattgctgataacaacgtcaggtggaaccggagctttgagtttattgaagtcttcatagaatcgggtagcatactgaataatagcagctggttgtcttggatttccaccatgaacaactctattcttatcagttcatatcccccacaacacacataagagagactcgaattcatgttgctggtgtgtagcagacaaatggtgcaaataatcaccattaaacatgctatttgcttgtctaaaatcaatctgaaactttgaaagtttccaaatgtccttagcatgcttgaaacaaaagagggcatggccaattgattcccaattggaagtgcaaagtgagcattcccctgagtctaacaccttccttttaaataaagcagcagtaggaagtatgttttgaaacactttccaggcaaagattcttatcttagggggcaatttcaggttccaaaaaaaattccaccattcacagtgctggttggatgttgaggaagaatgttgttcctccaaggtagtagctagatggaaacctgatttgacattataagcaccattagttgagtggtgccagactagatggtcaaaaccagcaaaggaagtcaaagggatggacaaaatgttgttcctccaaggtagtagctagatggaaacctgatttgacattataagcaccattagttgagtggtgccagactagatggtcaaaagcagcaaagtaagtcaaagggatggacaaaatgttgttcctccaaggtagtagctagatggaaacctgatttgacattataagcaccattagttgagtggtgccagactagatggtcaaaagcagcaaagtaagtcaaagggatggacaaaatgcgatcaatatctgttgaaaatagcagttcagaagtggtacattccaaacatgttcttcagtgatgaagcttgatactggcattgaattagaacccgaaaaattgactggtctgaagtcattgtgacttggtatccaggggtcttttacaattttattgttacacgaattttttttataaacatactgtttttttttataaaataactgtaaaacgataaaataaaataattaaaaataatagtggaataattaaaaaataactgtggaacgacagtgaaaacttaacacagtacacaagatttttggaaaaaaaattcgccccacaata

SEQ ID NO: 200518 - DNA, 1070 bp, Cannabis indica
gtatgccaatgactggaactactctaagaagatgctgcaaagtagaagatgccaatggttattaacactcagctcaaaatgaaggaatgcccatgattcagatctctcaaaggaatccaggtctatgtaatagaatctaaccttccaaaaataaaaaaaatccaaaatagatatattcatcaacctttaaagaatcacatagtggcctgtcaatatggttcaaccgttttcacataaatatatctttcatttccatatttagtgcatttcctctataagactgaacaccaagcaatgcatcaaagttatgttgttgaatttgcatttacttggaacgattagaagcacataatacttcacacattacattatttcaataatataaggtttttagaaaagaacagaaaaaaccttggaaaggaatggttcaagaactgtcacaacattcacaagtgctggatccaaaccaatttcctcatgtgcctccctcgtagctgtgtcaccgtcatccttatcaccctcctctgcttttccccctggcaaagcaatttcacctgcaaaaagaaaaacgccatcaaatccaattagccaactattcaacaattttccatctcacaaacatcttccccaattttctcagaaaccaaacatagtacccgagtgagtagacagagtggaggaccgcttagtgagaattactcgcagatccccagcttctccttggaaaagacagattaagacagctgctctctttggtctgaatctttgtgggtctcggctaattggggtagccgattccacgacacccacttgggacacgacctttccggcactttcttcgaaggtggcctcctctgaatcgtcatcaaagggcattcgcggtgccttgtagtgtcgtagctgttgggccaaggccacgaggctctgagaacctccaaacgagtttgctgctgaatccattagtttggcgggggttgcggttagaatagatatatacggaaatgatgttgtaattggtaatcgtcgtctaagaattgaaatcatcgcgtggaaattcggcgcattgatta

SEQ ID NO: 200519 - DNA, 782 bp, Cannabis indica
aaattccttaattactctttctcttccgctcctttcttcttcttcttcctctatcttcatttgcagacaagaccaccaccaccacccatggcaactcaccactgcaccacccatggcaactcaccaccatcgcaacctagtaccaccatctcaacccagtagcaccaccgcataaacccagcgaagacccaaaaaccccaaccctctctctccgcacccctctccttagatctgtctctttctccctcactgctctcggctcaacgtcgatgagccacctccagtgacgctgaccaaaatagagaccactacgagcctccctaactatttaaaccccattgccttagacaacaatgacgtcgatgcagacgaatccgattcttgcaaccccaactggccaacctatctctaaaccatatgttcttacaccaccttcaaggcctttcgtgtttcaaaacacatcaaatgtttccatttctccactgcagttgccaccaatttctagctcagtggacaatgaagaagacacctcaaaaccaaagttgaagcctttacattgggagaaagttagacctaactctgatcgtgaaatggtgcgggatcaactaagatcaagcccatttaagtaagatatatatatatatatatgtatatataacttggtagattttcttttatttggtttccatttttgcttcaattttcttatttggttttaggttgaatgaagaaatgattgagacattgtttgttgtgaacacccctaattcaagaccaaagga

SEQ ID NO: 200520 - DNA, 475 bp, Cannabis indica
gatttattctatgtcaaaaagtaacttcattatactatcgtacataagtcgtcttttgtcgattcttggtaaaaatatcttcagtacagttgcagtaactctcatatttttcatccattttttaatattaatgtactatttgaaagattattccgttgtctataacatttatggagaaatatttcactaattcagaatatttctgccttaaaagtagacctttcatcttgtatctcgaaatttttttatcttttttcaaaaaaactatttcggtaaaatagttatatctcttccaatataataatctttgtatcattagaaaggtcttccaattatataaaaactttgtgaacaataatctttctaattaagacgttttatgagttaaattgggattaaagtttctgtatagtaaggataacaaacatactaagcttattattggtctaagtgttaagaggtctattatagacta

SEQ ID NO: 200521 - DNA, 1420 bp, Cannabis indica
cagcagcaacaacaacactagcaccaacagcagcaagaacaacattagcaacaacatctgcaacagcaacagcaacaacttcagcaacaacaacaacattagcagcagcaacaacaacactagcagcaacagcagcaacaacagcaacaaaagagtacgaaagttttaattcaaggagggtcattctggagggcataatgacagctgttagagatggtaataggaggaggattgggttgcatggaatgggtggaataggcaagactatgcttgccaaagaaatcgctaaactagctaaggaagaggagttgttcagtaaagtggttatcaccacaatttctcaagcaccaaacataaaagagattcagcaacatattgctgaaatgctagacatgacaactttcagccaaaacgaaagcatagacaagagagcacaactgcttcgaacgcgattggaacaagatgaaagcaagattttgttaatcctcgacgatatttggaaggaactcaatctagaagaaattggaatccatgacgggtgcaagattctagtaacctctagatatttgcatgttttacgtaactccatgggtatggctgagagtgatgtgttctttattggagctttagagtcgagtgaagccatcgatttgtttaagaaaatcattggagacactaaagttgaaaataatgcatattacaaagctctggcacttaagatcgttgaagaatgtgcgggcctgccaattgccattgcgacagtggcgcatgctttgaagtgttatacggacgactcatccatgtggaaggatgcattgcaaagactacggagttccaactttacaggaattgagggaatgcatgacaaagtttacttgagtattaggttgagttacgattttcttggaagtcaagaggaggaggccaaacttttgttattgctttgtgctttacataaggaagatgaagaaatacaagtggaagacctgattagatactttgtgggttggcgatcacttcaaggcatctatagagtggaagatgcaagaaacagggtgaattcgttggttgttaaattgaaagctcattgtttgttgttggattgtagggataaaggaagagtaaagatgcacgatgttattcgtgatgtttgcataactattggaaaagaagaccatgggcataggatgatgagtaacattgttatgtatgaagatgaaagacctaaagcatctaaagcaatttcgtttgctgattatgacgatttttataatcttcctccagaattggaatgtcctaatttagaattgcttcttctatccagtgggtctactttggaatctattccagatgaattttttaagcaaactgggctgcttaaagttttgattatgaatggtacatgcctgagatcattacc

SEQ ID NO: 200522 - DNA, 935 bp, Cannabis indica
aaaagaactggtattagggtccagtacctcagctacctttgtaatagtttcaatcaatattaaaaaccatgtattaccctttctcacaggctgagggtaaaaagaatttttacctgatgttttgaaaaatctttggtttttgtaattttaaggtgataatgtttgtcattgtgattctttctgaacaaatatatgtcatgactctgagtcaatgcagagatacttatggttattgggggttggcaaatggcaacagaattggatccaaagcaacattttgattcgaattcattacataaaataagtcaactgtttggatagctagagataaggcatgcatttatgccttaaaggccttaactaattttgtttttttgttgagttctttgttttttcacactatctttcacattgccttaccatactaaaacatgaattaattaacccagttactttttaaaaagtggaaaggtatttttactcttcccttttttttaaaaaaaaaagaaaagaaaagcaaggtattttaactctttaacaatctaccccaatttctaattccttcaatgatatccaaaatatttgtttcacatgacaatcaatcaactttggaataaatttcagaaaggagaaacatacttacattattccaatttccaaaaaaattccaccaaaaaacaattcaaaaattgtcatctttgatattctgttcttgcatttaagcgtgtcctttatgccaaatattatcaaatcaatatgtgttatgctagcaaatattaactgtgtatatattattatgtaactataacatataaatatttaagtttctgttccatattttggtgtaaaacaaatcgtggagggaagaaatttcaattgtgttgcccaagtagtggctggttaagcaaagagctccaaaggcagtccaaattctc

SEQ ID NO: 200523 - DNA, 1030 bp, Cannabis indica
aaagtaaagttcaaattacaagactctattcttgcttgagggctgcatgattgtttcttttacatttataagatttttcaactctgaattcacttatgcaaatcaaaaacgaatttagaatttcagaggaccggagaatgtatatttgacattactaacctatataagcattctatgtcccaagaatatcccaaatttgtatacattatggtgagtgaaaactctttttccaacaagtcaaattcaacttcttcaaaaatatacttttgattagtacattcaaaagtaaatacataagaagaagtcattcatgccatcaattagcataagaattcaaactaattcttgaacattattatactcaaactctactatcatgtatagcattcaaacataaatctaaccttcctcaaaaaaatatattatttttaacattttattttagttactctctgattccattagttttctccttttgaagggaaaacttttagataccaccacccatccctcagggaaggggacacgggtcataataataataaataataatatcaatgattagcttgtgtaatctataattggtacttccttatcatcatttttgatattttaatccttatactattcgtggtaaatgctttaaagccattacaaatttacaacaacttacatatttttttttcataaagatcattgtcacaagaatcaacagtaggatcattgtcacaagaatcaacagtaggatataataacacaaactaaaaggcaaagatgaaaatgaaaagcatacaatatgtgacaataatgtaaatcaaattagcaaagctcctattaacctaccgaaattgaaacccagtgagctaatcaatgccttgttgcaaatcacgatggaaactgatgaaaccactgagagagtcaacgcaccaacggtccccagctgaaacctctcaccctcacccataacttttctctgctgaaaatgccaatcaaaccaaaacccataatcaaatcaagaaaagggtcatca

SEQ ID NO: 200524 - DNA, 1225 bp, Cannabis indica
  modified_base (1071)..(1071): a, c, t, g, unknown or other
tatttaaaaaaaaaaagaaaaaggtacatttttcttcattttcacataataaaagtcgtttgaagaccggttcgtagacagacacaagaaatgtctatgaaacgaaccagttgacttgagtcttctcttcctaaactacccctaaaactaatccctgattctgtaaccgcagggtcaacatcgtaaattcagtgtaagcttcaacctttataagctttccaaactcatctccttctcacatctccatcgatattccttcctgagaaaataccatagttctttcttattagtcaaaaatcaagttcaaacaatggatagtgggaaggaaaactactcaaacaatagttccaagaaagccatgaaattgttattttcattgtcagccatatctttcatgttctcttactcctctctcttcattcctttccttgtaaattccttcacacatattaacttttccacatttaccaaacagtcctcatcctcttccttcacaagctcccctcctttggataaaacctacgttttccttatatttaatggaatcttggtcataatcgtcaagaactctggtctcatcgggaatagtactactattactactactactaaatcttcggacgacgtcgtttcgtcgagcgtgattaatgtaaaaaaactcacaccagtacaacccaaagttttctttgattcaaggaaaccagcggtcgtagaaacagaggaaattcagaatcaacagcttacaacgacggaggtaagcactattgtaaaagaagatgaggaattaaacacgattgaagaaggagaagaagaagagttgaataagattgaagaagaagaagaagaagaagaatatggattttcagatgagtttaacaagaaatgtgaagattttattagaaaggttaaagaagaaattatgtctggagcacgataggttcttgaattttgattttgaaatatcactgatcatctaatcaatggtttagattagttcgtaataaaatgagacaactatttttgtttttaatctcgtttttcagttttggttaaggtttttttttttttttnttttttttttgttgtgtagaaatggtttgtggattgagggattgtggagttaaggtgttggtaagtaatcaccatgtccaactactaagcttgaacatcattgaatgtgtctccagcttaattgaagtgtcctcctttaaattttgtttactga

SEQ ID NO: 200525 - DNA, 638 bp, Cannabis indica
attttaaaaaaaaaaattgaaatcacaaatccctaatctgagatctcgactcggtctcttctcaagcatcagctccttctcagaatctcaagcaacgacttcttctcaggtgacagcatcttctcacctccatagttcatctctgttgactactgcccttccttcccagctgcccagtcgattctgactctggatctaccattgacgggcttgatgtctcaaaatcaaaggctaggaggtctgtggtggcctctatttcgatcattgacggatgagagatgctcaccggactcgcaccgtgaacaacaagggagctattgagatcgagaggaagagaatgagagagaaaatcgagtcttcagggtcaggctttcttggagatctcgatttcagggtccatttggaccatctacagtgatgatggcttattcttgtgtgttagcaccaccatgcaagggaagacagagagaggtgttgtgagtgatagagggaagttgggtttctgggtggtgaggtttcaggggttgggagtgcgggacctgaggtgggaagtttagagaatgctggctccaatcttggttctaggcccccacgaaagaacgaaaagaggaaaaggtatcaagagagagagagagaga

SEQ ID NO: 200526 - DNA, 1703 bp, Cannabis indica
taacacaatatttatatcttccaactagagataatctaatagctttattttcctataatcattattatccctactttcccaaaaagggaagaaataacaatctttcaggaacgcgacagccacacagaaaaaatatatatacaatgtgttaggggtatgtatccgatccaatctaatatttttctcctcagctgatccaatctaattagatctcaaaatctaatctcatccaatccaattactaattagattggataagttttttaattggatatccaattacacacctaaattttaatattaattaacataaaaatatgaagaaaaatacataaaaattgaatatcaccatttatttaagtttaatattccataaacatatcatcattacaatgtaatgcaactaaaagtttcaaataattaaaacaacaacatttttaaataataaaataggtcaaaacatcatgaaaataaatacacaaaacaaccaactgttacaagtttaacacaaaaaaatccaataaaattataattaatatatattatatattttttttattttttgttatataaataaatataaataatgttttaacatatataaatgtaattggattggatctatttttaattggattttgaaattgacatccaataactgatacaatccaattagaatccaacatttagcatccaattcaattcaattgtaattggatatccaattacaaaaaattggattgaatttgatcgattcggttcaattagattgaattagatgttgtccacctctacaataggtggtagcaattaataaagaacatataataatgtgtctatagtaagtattattgtagtaccttttggctgccaaaagatcgaaacacagtctatatgcaattatggctctaattttttggtttaatatttggtgttgcggtcatttgttgcaattttaaattagtctattttcacaaatctatcaagattagtttgttataaggtgttgtgtattgagttagttaggatgttagaagttagttttgtttgttatattcaggttgttagttgttgttactggtgtgagatgtatataaagcaaccgattgtaatgaactctttgatcaatgaaatttatttttccatttctctggtttttttctgttttacaactaaaatggtatcagagccaataaattgttgagctcctctgcttttgcttcttcttgttcttctttgtttcttctctttctggtttccatggcgcaaggaggaagaactcagacatgtaccaggagcaatgaagctgctgaagattcaaatcggtttgctgtttttgaagaaaataataagtttcaagctaatgatccacggagtccttatttttctttccattgctgacagtgcctcttcatctttggtactaaagattctcactggtgcaaacaatttcagttcatagcgaaggtcgatgatggtcgcactatcagcaagaaaataaataatttgtcgatggaagactaccagctcctgaggaagatgataagaaattatgactcctggatttgatgtaatagcatgaaaaggtttcataaaaagaatgctcccagaatttttgaagtaaaaagatcgatgcagatattgacccaaggttctagtgatgtgacttcgtattacactaaactcaagggtttatgggatct

SEQ ID NO: 200527 - DNA, 441 bp, Cannabis indica
atttttttaaagaaaattaattgctggtcgatcaagaaaaatggtgagagggaagactcaaatgaggcgcatagagaatgccacaagccgtcaagtgacgttttctaaaaggagaaatgggcttctgaagaaggcctttgagctctcagttctttgtgatgctgaggtggctcttataatcttctccccaagaggaaaactcaatgaatttgctagttccaggtaagatgacatcaataatccacaccccagctatatatatttatatatatatatatttgtgtgaatgtatgtatatgtttctcttatccttaaatatgcatagtaattaatttgttacattgcatcatcatgatcctgatcttaatgtagcctattttttccctctaatctcttacaatatataaatatatattttaatttcatgcatgacttcataat

SEQ ID NO: 200528 - DNA, 766 bp, Cannabis indica
gagattcgacttcatttacctctactcgcagttgaggctgactctacaaattttaccgctcagggtcttcctcttgtggtttgtcttctcttccacgactagcattgggtgcagccggctccctgcttcacgtggagttatgtgtaggctgattcagatcgagactttcttgttcgttcacacgttccctgcaaatacgattattgttaggacgctcattttgtcgtctatttgcggtggttacttgaggattgcctgaatgcatatttggaactcgaggtggacgttgggtcctgactcttccatcaacttcagcctgcaatgctcgcatctatttctacatggtcgtgtattgtgttgttgtcaactggataattccttcaaaggctacgaccggtgtgatagactggaagtggcccacagtggctgtcgacgtcgatgtctcccctacgagaccaatttctgggaacaaattgagaggggtgacattggtttgccccacacccccattgattgagtcagtcagattagttccattacttgggagtgggacattcatcgttctgacattgaaaggtccagtattgttgtatccatttgtttggttcacaaccatgttgattttcctccaaaatcaaaagaaaaagtttccaataaacggcgccaaatgttgtcggaggaatttggacaacaccaaattagaaaatagacagttaatatttaactaaaagtagggactactcaatctaaaacaacgagtattcga

SEQ ID NO: 200529 - DNA, 2113 bp, Cannabis indica
aagcttcatcatcatcagtactcttccctgctcaagttggaaacggtgtcgttcttggtggctcagtattgaaggacctcaagtcagctgttgacactgccggtgatggtaaacagacaggtgtcgtgatccaattggttggtactcaatttggagttgggacccctgatgttcccatgccactcaatatctcccttgccaatcacggttatttctgtccgactcccactacccaaggtatatatgtctatatacacgtgcatggattttttttttcttacaatatactgaaacaaacattacataatcagaaggaatagaaaaaatctccaatctttcgagaacccatttagcattaccgacatctgcatggatttaattatatacaaaatatataaaccaatcattcgatgagagaacatacataatatagagatttttattcagtatagacaataaccagtaacatttgaatctctaaaacaaattagcatttgaatatttactaggaatgtatttgtttgttataaaataaattaaaattaaaataaagaacttattagaaatttatgcataagttaattaacattagaataagccgtacaacttaataacttcattttgtaataagtaaatataaaggtcgccggcttagaatttcttaatgccttagctagtagaagcttttttaaaccttattttagtgattatttttaaatgctttatttgttaaagcatttttaatagttattagtctttgtgaataataatttgcaattatttatataataattattaaattaaaataaaaaatatgtgaaaattaatattcaattataacaataacggtataaatttttattgaacatgtttctctatttcttatacaacaataaagaaaaatattttgatgagtattgcataattttccaagctaaccctattgaaaatgagaaatgttaaaggacaccttaaggtgtcaaacattacaagagatgacatatttttattggtgcagtttaatatttaattttacatatattttaatttaatcaataatatgacaaaccgctaatcacttacaacacatcacatcaatataggtgcctaatagcaatgctcatataaaatacacaagttggttttctcttcttttttgaataattatggaattttattaatagcaaatagctaaaataatagtttgcaatccaatcgggatatctttctcgttggagacacgactaaaattagaattagaaaaacgaaccaaataaccagtcgcctgatttccagatcgtttgacaaaaaattaaaataaaatcagatgaaaaaaattgtagcatcacattaatcttaagaacacctatattctgtttaatccaccgctcaaaagatacaaccgtagataatattgtgtaaggtacgtaactgcattactaacaaccctttcagtcgcaaaaagcttgttatttctaactactaataacgatttgatggcaagccattgaagaacaaagaagaatcaacaacgaaataaaataaaacaaaatcatgtcacataaacaagactaaaacaatcaaaatcatgtcacacaaacaaaactaaaatacttaaaatcatgtcacagaaataagactaatcgtagtagtaaaaatcaaatggcaataacaaaatacaatcccgaataagccgcacctaagctaaaaaaaaaccggcgagcctaacttgagaaaaaagacaacctttgatatagatatagatttggaaatgaaagatcttattttttttttttttagaatattttgatggtttaaaaaaacaaaatgcaatttttacgacgtaatgcaatttattactttcgataagggagagtggttttctctcttttaatttcaaataaatgatattatttctttacattacatgataaaaattaaagtatatgtaaatgtaaaggtaaataatttataagtacctaaagttttatgtttgtaagttgtataaatttaatatttatttttagcggcggtataagtactcaatatttataaaattgtaatttttctccagttctgtctgtacagatcccgttttaaatttattaaaaga

SEQ ID NO: 200530 - DNA, 998 bp, Cannabis indica
caaccaaccaagacatggaaaatggtttcttcatcagaatcgcaaaaaacacagcgagggtcaacaaggacatgtttagtacgcagctgagaacgagtaggaagacatcccgagatagctttccaagcaaaatgaagaaccttggggggagctttaactttccaaagaactctccacagatcagactccaattgtaggctccattcacctttcaattcttggagatggtggtaagaacttttaaccgaatagaaaccagtaggttccttacaccaaaaccatgaatcaacattaacattgtcacttaaaggaacatgcagtatcaagtctatatcccttacctcaaataagtcatgtaataccttaagatcccactgcttactattaacttgcatcaactgtgagaccgtacaatgagtcaaagcatgatgtgtggatatcacacacggatttacaccagaaattagccaaggaacatcaagcactagagtagagatacctgaaccgattctccttctagctccgtcacgaatcagttgttgagattcaaacacactcctccagatgaaacttggattggcacctatctcagcagtaagaaaattaccatttgggtaataacgagccttgtaaatacgtcccacaagtgaatcctcatacaaaagaagacgccacccctgctttcctaacaagaaaagattataatctcgcaaattacgaaaaccaagcccacctgaattcttgtttctacagagacgtttccaactaaaccaatttacacattttgttctattatttgagaaacccaccaatactttgacattaagctttcaaggtgtgaacaagttttaatcgggagcaaaacacagacatcgcataagttggcaaggcttgagcgatcgtttttagcaaaatctctcagccagccttcgataataaacgaccttcctagctttgaattcgtttttgcatctcatctttgagaaaacccaagattg

SEQ ID NO: 200531 - DNA, 944 bp, Cannabis indica
ttaatttcatttcaagccttttctttctgctaaaaaatatgtgctctttcattgaactcgttgatgtttctaacagggcgtccttacaagtcatcttataattctgcccctgcagttgacaagtcaattgtaattcctgcttgaagggctattaattgaatgttgtcattcaagttcttgactatggctgctgtcgtgctaaaatgacttaagtatgccttaaggaattctcctagttgatgctcgatattggttaatgaagatgcttctggtcaccgatctcttgcagcttggaactgctttttgaaatcatttgacaattgctcccaggaagttatagaatggttggtgaatttgtcaaaccaactacttgttgctcctgttaatgaagttggttataatatgcatcgcaagttgtttgaaatgttacttgctcgcttattgtattgaaattatttaggtgggcaacatgatcagttgtaccatcatattgcacgacatgagggtttttaaattcttgaggaaattgtgaattcaaaatatcagggtggaatggttctgcctctttgtctgagtcataccctagtaattttctatattctccatcttggtatttcctgaacttgtcttctaattgtattactcgccactgtattggatccataagttgttgatctgtattttgatttagttggttacgtaaatctggtacattacgatttaaatgctcatgtaggtctggctgcatttgatttaattgctcacagagatcagattcgcaatgtctttagtcgcaattactcacggatctagtccttgtgtaacttttagattggtaactatgcgatttactcatacttttttgattaataaaataatgttgtgatctatccatgtcttgcttttgcctatgagcttcggttgacctactgtgcctgtcagtc

SEQ ID NO: 200532 - DNA, 648 bp, Cannabis indica
tacaaatcttaccactggcctatggtctatgttcatgtaatatgttaattttgaataaatttattatttaagagtaatttgaaattgataattttaggtatgcaagtttttttttattattatttttacaaataattttttctccttcaattattgcctttgtaaaattttgcaaaattatagcaaccctccacaattttgtaatgttgaaccatagcaactatttagtaattttttcccatgaactttgacatgtagtaaatcgtgctcctgaacttttttggctgttaaaaattcccccgaactatggagattgttaaatttaaggacttttgtctaatttcattcaatttactgtttcagtaattgtttatgtactaaatcatgctccccagactttgatatctaccaaatcatgcccctcaaactttgatatgtactaaatcatgctccttgaactttcattcatgttagaatttttttactaaaattagataaaagtccttaaatttaacaatctcaatagttcgaggggaatttttaatggccaaaaaattcagggagcacgatttagtacatgtcaaagttcggaggaaaaattagtaattcgcctaaaattcaacaaatcgtaaactgtaaagttatata

SEQ ID NO: 200533 - DNA, 1355 bp, Cannabis indica
gcattaattatatatatggacatttataacttctaagattatttagaagtaaaacaatgattttctttaagctatgcttaatgagataaaatggtgaaacactcatttcagtaattatactagtttacttaaatatcatttacaagtagctaattttttaaaggataaaatacattaaatgataaaatattaattttgtcatgattcaatgtcgatcatccatagaggatcaacgattatttagattgtagcaatggataattcattgtgtatttatattggagatatagagcgttctatgtaattaattaagagtataattttgagtctatagtgaagtaataagaaattaatcaacttattaaaaagcttgattatataggcacatatactccttataattgatgcttgagatattatatcatcttgaagaactcaagtaattgatttggataatcaattaaaattcataaactcaccatgtcatgttttaaaaatttatactaaagttatatttgattgagaataaaagaaagttaaacttttatttgttaatatttatgacactttgtgggtttacttactaaaagttttcttcatatttttgtaaacagcactgtttatctatcttgttgattcaactatgtgagtgatgtataatcatgtagtaaattattgtctaatttacttattaaaaaaacaaaaattgctctatatttataaaacttttgggacctactctgggccaggattgtgtgtgtatgactcactaggtctctgattaacagaaaatagttaatttttatttttaaaaataccataattctatatgcaaaattagaaaaataacaaatgcaaatgtattggccttacccatctcaagatgctatacataaagaagaacatgataataatatatatatactcggtttgacaagatcaatatagataataataaagaaaagcaacatgaaaacaaaaccatcatcatctattagctgtctttgcttttattcaaaaaatattaatttggaaaaagcttacttaaataattgaatatacattcaatggaaaaattattataatatatttttttttattaaatctgacatgtctttgggttgttaataacacataattgatattgaagcagtcaaaaaacaacaaggaaagccagccaccaacaacatatatattgaaagaaaaagaaaaagaaaaattgtaaatttgatattatacatcatcatgatatatatactttctgtatactaattttttttttactgtacgtgtaaaataaatctcatagaaatctaagtttagttggtcctctccttcagcatctttagcccaag

SEQ ID NO: 200534 - DNA, 735 bp, Cannabis indica
ttttatttgttcattttctcattactaattaattcctgaccaaacataattaaaaaataaagcattatagattctgacaattttatgcatgtgttataattattagtgtaacaaaaatgacccactcagtttttaatcgagtaaagaaaatggtctttttttctccttattgtgtggtaaagattcattgagaaattttgttaataaaaaaaaaagagttatataattttttttaaagaagaaaatcagtacttttctttttttttttaaaaaaaaaataaaatcaggaataaaaaagctagtggcgcgtggggaaggagcttggcactgcatgacacgtgtatagcgacctgttgaggcggttaaccataagcgaaggaaatgaggagcagagcacaataggtcagtcatggtgaatttgcatttcagatgcatttgaatttcatttagcaggaaaggaagagacatatagctaaatgggtctttttatttttattaatagagaagcggggccctacagttttgaagatttgactttgactgagttgaggctttttattaataaaataaagcaaagtaagaaagagctgagaagaaaagtcacactttcctctaagcttcttgctccttcaaactcaagctctaccatatataaaggcccatattccatcttcaggttactcatagtttcttcaaaccaggtcttctgcaaatattttttgctctttaaaaaga

SEQ ID NO: 200535 - DNA, 528 bp, Cannabis indica
aaaaaaaataaaaaagtaaaagttggtagttgattcttgaccttttagcttaaagtaaggttctttagtctttaccactacatcaaacaatatctgttatatttttttattatttaatattttctatatactaataatttggtttcttcacaattttagaggcatggagcgttcgagggctcgagatgcatgcttgactcgcctacatttagggcgggtctcattttccataatcttcttacccttctttatctcagcatggggtgtcattatacttgatcatctctttataagatttgtgcggctttatttcaattttatagctggtaagatattaagattgttatttttttcctattgaatgttattaaattattatttctcattttcttttgtctctttttaaaaaaacaaaaacaaaaagggcaaaataacataaaactgccacttgtattatatattgcatcattattacattacgtacatgcattattgatatatatatagaagcatattattataatatgt

SEQ ID NO: 200536 - DNA, 548 bp, Cannabis indica
agaagcatattattataatatgtaatttgtttttatttttttgaaagatatatattgatttataagtatattaaattatttagttaatatttaatgactttaagttaataggtaaaaaaacatctacaataataaaaaatgcttaggtataataaatgttggatgagtagtagtagctgtcaggtatgaaatataaaaaggataataaaactattaagaatagaactataaattgtgtgtagaaattaacaaaatacacacacatatatataatatatattatatatagggatacaattttaatcccgtgatgcacaacagccgttagatgggagagttctttgatctgagggctggggttgatctagcggtaattagggttaaaaaataataacgtgcactgagactcatctaataccacggaatacattccgtgaaaatacatcacaagataaaatcatgtccctatatatagagcattgttattagttactagtagtacctaacactttctcgacatgtagtaatactttctaaaagttattata

SEQ ID NO: 200537 - DNA, 1574 bp, Cannabis indica
accaaaataatttcgattcattttctcactgtaaaaagaaagtatagattgaatacttcttataaattttgaaaaaaccatacatattcatattatcagcccttattttttaaccaataccataaattttgattcattcaaccccttttttgtaactacattactatgtagtatgtagcaatgagaagcttatgtagaaaaagcaatttttttttacctcataagcatgcgtggttatattttaagctttagtgcaattattttccatcaagatcacacatgccaactaatcaaatcaaatcaaaagttttcacatcatttcaaagaccttttttgtatcaacaaattgagatgaatgaaccaatttagttcatttataacataattaaagcgggaaataataactagaaatgaactggactacatcctcatctaccaaccatattttaaaagtaatataattttaaaaatgctaaaagcttatttatacaattccagaactctcgtactatagctactactgatccttatcaacaatattacatgaattctccaggtaacgttgcaatagccagacaagagggattcgaacaaaaaatttgatgacacaaatcttgtattaacacccacaaacaattccacattgcaaaaaaataaaatagaaaaaatcgatggcgaattcatttgtatcatataattccaagcttttggtcatcaactgaataactgggacagttggaggttctcttgccgaggcatcgtcgagctggaaatgagcaaagtcactgatgattgctgttctttccctgtaaatggtctctttcttttcctcttcggctttttcgactttctccttagtcaatatggttacatcttcagctgcctttgcaaatgcactaaatgcacttgaaacccaagaagctccagttaatacataagggttgttcataatagcagatcctgcactgcttgccttttgctcagcaactgccaaggcggattttgtcttttcggatacttggtatcgttcgtccatctctctcaccttgtcattcaccactgcctttccaatgcttagtttttcgcttagaccaatcttgttgtcaatggaagcgactgtggccgaagcatttgatatcaagtgatgtttttcatccaaggcttttgctttgttaacagcatcttttcctaatataaaaccctttgcaagcatactgctcacaacatcttcagctttcttaactgcagggctgctaagagctaggtctttttccttcacaatgaaaacatatatacatatgtaattaagtggaatttcaattaaaagaaaatgagagtaataaatagagtgttttctttagactcaaatataagatttatgacccttgcgtttggttaaaagtaataaaatggaatgtaaatgaatcaattttcattcaatttttttatttgtttacattttaaagtattttgatagaataactatttattgaatatgagaaatgaccattctaatgagagacgaaaaaaaaacattataaattctttaatttcatattaagtttcctcccaat

SEQ ID NO: 200538 - DNA, 840 bp, Cannabis indica
ctttctattctttatttattggagttttttttttacaaataaaaatgtttggagtttttatgtttgatcaataaataataataataatatttctcaaaaaacaaatatatatatataaatatacattttagaaagatagttaaaattgttgggatcagtttatatgtccgatcaataatcaatcatggctttccctttcaacgcatctagggacgcgtcagagccaattagccaaattatatttttcactttaacttcatcgaacagacattatttttagaagttgaaataaaataaaacggaagcactcaaaaaaaaaaaagttttttaaaatagctcatcaagtaggagagtttgatatgatagattaatgttctctagatttagttaatttttcagtagtcaattctaatcaaagtgtttagaacataattatgctgttattttattaatagtattttttcttgttacaatataacaaagtaggaatattatcattccatatcgattccttatcacgccctaaaatagtgcacatcaacttctaatgctatcaattacatcagatagtgcacatgaatctaaaaatagtaaatttacttttcttgctaccacctgggaatcgatttccaccaacataattgggagcttggcagctcggcatcatggtaaggtttgcttcaatgttatagcttcagccaagatcgaattttaagctccaaagaacttagctagcatatcctgcagtatcatctaaaactgtgtataataagttgtatgaaattctatctcaaaatcaatagcaatgagaggaatagttcatgtatcttatataaaaaa

SEQ ID NO: 200539 - DNA, 759 bp, Cannabis indica
ccatatttatatttagttaagtttctacccaattttaaatataaattcactaaattaccctttttaatcttacattattcataattggtcatcttcataaaagggggtggggtgggggggataaaataaggtttaaaacatccctaaaaaaacttttaaaatgaagaaaatgaataaataaattttttttgacatggaataaataaattttacttagaaaaaaaaactataaatcaaattaagaatataataggaatgttaaataaataagggctatttttgtaataattttagagaggaggtaaggtattcttcaactttaagcccaaaaaaatgtgcatggatctaattccacatatttatttgcaacagcaaacctaaatgggcccagtccaaagacaaggctgggttaccacaaaattgtgcaattaggtttaggggtcatgcttaatggttaatgaatgtcatttttaaaatttagtaaaaatagtcggtaaattagtggatataccgaatataattgagattaagatttttattaaagccaaaattacactgacgggataagttgaagaatacatctttattatattcattaattaaaaatacttttatattatacttcattaaaatctacctacttttgtgagtgtgttgcctaacagactctcgttctccacttaagtgtagcacacggtttacattaacctaaaagctataatgtggacatcatatgtaaaagtgagtatatctcaaaga

SEQ ID NO: 200540 - DNA, 1034 bp, Cannabis indica
acacattagtatctacagaaacagtggaagataatgaaaaagtaaatgtgcaagtaactaaaaacaaagaaatacctcattgtgaaatcttaaagctgtctctaagatccaaaactttgctttgatctgaaaaccacacacaaacaaagaaaagatatcgtgttaaaagacttccaacattgtaagatatacatatctttaaagaaaaagtggaacactttctgaaacaaaagggaatatcgaacagtcacaaacataatttcataatgttgcctcttcagttcaggtctccaatagttttccgcatggaatatctcagaagaacgaaagttattagtttgatcatcatcagaggcaagacaaaatttaaaaacataggtacaaaagcagtaacatcaggaacaaaaacatgtatataaatacaaactatacagcctagcaacagaacaccttcaggtcaaaaatgctcaaaataaatgaagattagcttcaacaccattacagtataaacaatggcaacacaagttacacaaccactcactagatgtctagtggacaacacaatttctaattatttcttttttaactcattatcaaattattgttcatacaaatcacctagttttagccactttttttttttttgagtgaatagttttagccactttttttttttttgtagtgaatagttttagccacttcagttcaggtctccaatatttttccgcatggggaatctcagaagaacgaaagttattagtttgatcatcatcagaggcaaaacaaatttttcaaaacatctgaaagcaataagaatatttaagaaaaaaaataagtaaatgaagacttttcaccctagcaacagaaacaaattcaggactaaatgcgaaaaaaataggtaagattttcttcaatgtcatttcacaaaaataatggcaacacaaccactttccaaatgtctattcagtcatagacacatcaattatccaagtattgatctacaaatcaactaatttagcctcttcagttcaggt

SEQ ID NO: 200541 - DNA, 800 bp, Cannabis indica
tttctgctgcttcatagacaaatcgaggattgggggatcgacaacatgactcttcctcttttgaggaggattgaggattcgtagaggacagagtggcaaggtctttgttggtctttgacttgtgattaaggctcaaatcactcttcatgaaagtcatgtctacaaaaaaaaaatatattaagtacaagaaaaatcatataacctcatagaaattgtcaacataagcaagctcatgttatctgagatttgccttagagtctgcttagaaagatgcctgtcaatttttaccttttggttctcaaaagactctttatatactggttctcgctgaattctggtttcaggtcaaatcaatttatgttcttgcaagttggcaacgtgtagagaagacgctaatcaagatccctcactggtagactacttaagaattttgcaatttccacacgatcgagctggcctatttacaaatataaacaaatgttgtagtttataaaatagataggagaaaaagactttatataaataaacgacatatgagggaaacagttaaagtctatcctaattcctagcaatgagaatgcatagagctacttcgatttctgatctcccattttagaaaccatgtcttctcctccattgacatcacattagcccatttactagaacaatagaaaccattgtcgtgggcaacattctttatggttcttgatagtgggttccccttgcgtgtattccatataaatcgcatagaatccaaggatgatcctatagcggtaaggagtaagctagaaaagagatac

SEQ ID NO: 200542 - DNA, 1180 bp, Cannabis indica
ataaaatatctcttataactacaacatgcaccattatacataatatttttctaagtgctataacaaaaatgttttttccccaacctttttcttttctcactaaaatccaacttccaaatacaaccttaaagtatgttcctaaaattattgtgaaaaaattacgactaaaatgcataatcaaatcaactaaaaacttgatcaacaaaccgttagcaatgacaatattaataagtcacaaataataatcgaagaaaaacagggattaacagagtaattaaaatcataaacagtaaagcaataaaacactaaaatgaacaacaagatatatactagttcaagtcctataaatcgatgtgatctatggctctgctccagttttagaacaccactgaaatcctctttattgattgagcaaaaataaagtatgttacagtcaagatcgattttctattagatcctctcaaggtgtttatctctcacacttacccaaaaatattatttcttcatacaaaactcaaacccatttttttactctgtacctctctttctacctttcaatttctctctctctctctctctctcaatctcgaaacccaatctattcagcataccccaaatgataagtgttggtagtatttataggctcaggataaatatcataagtcggtggctgcaattgctaaattgttaagtaggttatgccataacaaacttaacaaactcctagtaacaatatctccacgtgagcacaagaagaaggatttctggaagagatgaacacttcttggaagaaagacaaaagcgtatgcggaagggacttcctggataggaaagatgctagttagagtcgattatccagaactccctttcaggatagaacaactagccatccaaaactcctttatgaagaaaggctaactttccttggagacccttctcagatggaaaagctagaatttcgaaacttctttatggacgacatctagcttttcacgagattcatccggatggacaagttagactctcgggagcgcccttttgggagactactaactttccataacgagaactacacatgaagatctttttatttggaagaactataccacaattataaacgtgcaatacttttcatattttcaaaaaagatgtgtgtggataaaattgaaaaaaaaaaaga

SEQ ID NO: 200543 - DNA, 652 bp, Cannabis indica
aaaaactaaaactaaaacaaaagcaaaaaaggctcttaaacttataagtttataattttgttttcttataaattaggactgtttattcacacgctaaatgggacgttgaaaaaataaaaggctgcatggtccacacagtaacattacctgatattaatatttatttaaaaaaaacattacttatattattaatttattttctcccgcttatttttggctgtaaaacacattatattatttaattatttatcttttgtatttggaaccaaggttgtgtacttatatactcaccttgtaatattcactcactaattcctcactctccacaaccgtacatggctgccatggctgcctccacaaccacccaactactcttcttcctcttcttgttcttgtccgttgtactacttccattaggttccagcgtcggtgtgaactacggtaccctcggcaacaacctcccctccccaaagcgagtagctcatctcctccaagccacactcatcgacaaggtcaaaatctacgacaccaaccccgaaatcctcaacgctttttcaaacaccgccatcgacctcattgtcgcagtcgagaaccagcacgtcttcaatctcagctccgatacttccttcgccgaccaatggttcaccactcg

SEQ ID NO: 200544 - DNA, 1124 bp, Cannabis indica
tttttaaattaaaaaaacaaattgacatctggtaaaccaactcacaccaaccggttattaaataaataaataaattgaaacacattattacataccgtgggacctacctgccgtattgtatttgtgagcacaaaatcaactacctatatatatatatgtatattttaaaagaaagttagtaaaaattttaaaaacaccgaaaatttgtgttttttctattataatataatgtgccaaatttgtttacttgtacacttgtcaaatcatatgaagaaaattactttttacactcttttatctttataaaaaatcaacattaataaaaaaaaacctaaaaattacaaaccaattaactaaaccggctatagcaattaaacttttttattttatataagctacattgacgtggacctataacttaactattcaaaatacagtactactattaactaaaattgcgtcacataatacactaattttaatgcaaatataaaggcgtaaatcaattcgctttcgtacgtagcggttagaatccgacgcctatatttagatatagatataaacctatatatcaagattataataggacttagcataagttgattatcagtaagaaattttttttaaccattaattttagatcatgtggttattaagatgtaaggtgtatatttttatgacagaactatatgtatacaattaaaattttatacatattataataatatttaattatatatttattcaaaaaataaaataatactaataattaaaaaagttattaatatttaatttgaattattattattttttaaaaaagttaatttaaattattttttatataggtgttgtctattattttttttagctatgtaaagatctcaattttttttaatctcctacataaatagttattatttttgctaagtctctaagaaatctttgatgctcgttaaaatatgacaatatattcaaaaagaaattaattatctaaatttttatgtgtctaacccatatgaataaattttgaatttttatttttaacaaaaatattgtgtaaatgaagcataaatttcacaactgtatctcattaataattcttctatttgtctcgtggtatcttt

SEQ ID NO: 200545 - DNA, 934 bp, Cannabis indica
gataataatgttgttattgaattttttttggtcaaagtattgactcaaagtatgcatatgttaggattttaagaaaaagaaagaatatctagtgtatttcttttttaataatgaaataagtatgtagtgtatgttagtgacaaattgtcatgattataagtattttatttgtataatttattaattataattatatttaaatgccacttctttttgacagaaaaatattgtgcataaatacaaattttctttttttccctttcaaaaaaaatataataattttttttcttctttgctatgtattgaaatcaatatatactaagattaatctatttgaatgcacggttccttaagattcctctgtgtactgggggaccacatttccccatataataagtaaatagtgatacttttcaagaagacactttctatatctcgacctttttttttatatataattttattttatttaatttttatatttctcaaagctagttcgtattcatgagaattgagtttttttttttatggctagaacatgagtacttttaactcataaatacacaataatattttgttgaatgttttgggaatggggtgagatagggactcttaatattattgcttaataataatttctaataatttggctttattgatctactcactctttcgggcctggcatataataataataaattaagtttgtttttttttatgtgtaacaataacatgactacgatgtattttattttttgtttttaaagatttttttttgaaaccctttttaaagagattgatatacatgaggtgtaatgtcagaccatttaaaattattaataattgaagagaaatttctttaaaaaagataataataattgaagagaaattttatttgccatatttaaaaaaccacccaattattaaaaaatac

SEQ ID NO: 200546 - DNA, 829 bp, Cannabis indica
caaaaaaaaaattaaaaatataggaaaaataattaagagtaaccagttatgttatacttttttttctcatattttttaaatttattactttaaaaaatcccataaaaaaactacattttataaaattgtacctgagaaatcataaaaataaaaataccaaaattatgggtgattattttgttgagaaaattgtaaattttatgaattttatgggtttttatacattttgtggaaaaatgtggttttttttcaaaaagattattttatgggaaaactgaagaaaaaattgaaaaaaattgaaaaattaagtaagggtaactagatatacttatgataattggaggggtaatcagttaccataaagaggtaactaagtacacttatggtaaccgaggggtaaccaattaccataaggggttaaccagataccttattctatttttttctttactttttaacttttttccaaaattttcctataatataatttttttaagaaaaaaccatatatttttataaatttatactttaaaaaccatacaaatgaaaattccctattttgttttgtatttctagctgaaaactaatccaggcccaacttacattaaatttattctgggcctaaggaacaccagaaacaaaatgaaatctacaataatacagaaaattttagatatttgcccatataaaaaaataattaacataaagtattattttttaacaaaattttaactatttttatgtttaaagaataagtttttttttttacaattttatgtaaataaaatcttaaattaaaagtattttaaaattctatataactgtattt

SEQ ID NO: 200547 - DNA, 643 bp, Cannabis indica
attctttttgtcaaactaatcctaatgaaattttgatatatatatgaaaaaaaatctttatatttttaaatatcacgaatgaataaaaatctatttttcttttcttgtcaactctgtctcaaccaattaataatcacacatcatttaatttaaagaaattgcctcatatattatttagtttttaatttacgatttggattttaaagtgatttctatgtgagttgctatacgatttttgattacaatttaaattactctgctagttgctaaattctgtaaaaatacacaaaaaaaaaaaaaaaataaataaaaaagcccctttaatttaatgagacatatctactaacagaagatcaagagtaaaatagaagtttacttttatgttaatatcaagtatatattttatattttcatcttcttcattttttttttttattttgaaattcttccggttatatttatttaaatctttaaatctttaaacacacaatatttaaatctttcaacattcgtactctattttttttttgtttgacagctgtgaaaatttaaaagatgaagaagaagaagaatataaatgatcaatgattggtacaaaaacaatgaaataggaagataacaataaataaaattggaagaggga

SEQ ID NO: 200548 - DNA, 1046 bp, Cannabis indica
taatctgtcacgacatttgtctcttgtccttctgtcgccactgcctacagtacaggtacaaaaaaactaagttaagtaaattaagctttaaactttcaaaagaaaatatcaattatggggttgaagtggattttctcaccttcatgtagacatcaatatctgcatcaggtttgatatttgcttctttctctcttctagccaattcagctagcatgtctgcaagtgcatgcaaatacatatattaatttacatattagaaaatttattatgaacattcataaacagaatgtagaaaatgatgaactaaccgaaacgagttccaactccttggcatcttgcagagaaagataaagtttctcttacagtcatttctccaatatggacatcatgttgactaatataggcagctgttcttacaggtacaaactcattcatctcatgtccattataagtcaccctcccagaaaactataccaaatataacacttcatcagttatcatgttaaaaaaattacaagaaaaaataaaagggaactttaatgctaatgatttatttttattttgttgttcacctttaaatccttggcaagctttcctgccagagtcaataaaagtgttgtcttgccagaacttggaggacccaatagcaatgtcaatctaaaacatttcatagtaaagtaatattagttagatgtatgttttatggattccaaaaccaaagatataaattattgatgaacaaaacaaaaaataactttactaaccttcctggctttataactccactaacatcgttaaggatgttaagatgtttctttttgctattgaaaataggcagaaatcccagtagacccttaaataattgaacaaataaattgttaaaagaaatgttgtgagtaaataaaaaaaaaaaatagtgtatttattgagcatgagatggcccaatatttgtgtagtgtgagctacctcaaatagtattaatggtgaaattaatgaatgaaggtaaagctctgcttccaatatgaacatctgcttccacattaact

SEQ ID NO: 200549 - DNA, 1116 bp, Cannabis indica
aagacaaggagctgtataattttacattgcttggagaaggttaaatgtgataattcttaaactaggtaagtataagactacacagggtaaggggacttaaatgaattgattaatagtacatatattaacaaaatccatcttctgatgccatggaattgaagctaattattcaaatcctaataatggtgaacaaccttatagaactggctatcattttcaatctcaaaaaaattggatgaatggttctcttctctctctcttctcttattttcattatttgaatcatttttatgtttttttggcttcaatttcatgtcctttgaaatttgaaacatgattgactggcttcaatatatatcagatcctaatggtatgttttttactaataactcaattcttcatctatgtttgttttctcttcaagtgaaattcttacacactttagttgattaagttgaaacatttaatgactgaaaaaacacaataatccatctgaaattatatagaaaagttttggttctttgagaatttcatttgtactatcaaaaaaggtttagattttcatgtgaatttgaactagaaacatttaatgactgaaaaaatagaaaccatctgaattttttctaaaatagttaagttttttcatgctaaagttgacaaagatcgacccccatctgaaatttccctaagaaagttaagctctttaggctaaagttgagatctttgaaagaagaaaactaaatgacctaaaaaaacaaaacccatctaaaatttctaagaaagttaagttctgctaaagttgagaaattttatcaaatatataaatttgaaaagatgaaccccatctgaaattttattacgaaagttaagctcttaatatgtactaattaaagttgatatatttgaaagaagaaagctgtatgacttaaaataaacaaaacccaaactaaaaattttccaagacatgcattataattttttcatttgacaacttatttcatcaaatataaattttgaaagatgaattcatcgaaaaattcttttcaaaaagttaaggattatttggcttcataacttaatagggatcttcggcaaaaaaaaactttaagaaacagc

SEQ ID NO: 200550 - DNA, 1085 bp, Cannabis indica
cctttgagtttggttcttacagaatgcttgaatgtgccatttcttgtctctttttatatttttttttgtaattttggtcgttagagtttatggatttctagagaggttatacttcataaagcaatggattataataggtctttggaagtctcagctttgtatatttcacattcatcccttgtgtttgtgtgttttaaaaaaaaactagagaaaagaaaaacaggttagtgtgtaataagagatgataaggtatcatccagatgacaacctacaaagccatgatagtcaaagcaatctaatgcaaaacaaaagcacaaataatggcatgatttgtaattttgtatcacatctgatttcgaagcgggtccgtgccatttaccgttacattgttcaaagtcatgtctcattgcaattgctaggtgtaatgtaaataattagtgttcctagtattactcatagtaaaagacctaacaaagttccgattcatgttgtgtcgaacaatttttgaaggtagctactctgcttagtgttaatatgttcaattgtcctattgcaggttgctagtgtcacatttgacttgctgttgcttctggttctgggatcttacttgatagtgctattcagtattcttgttatctcaactagggtataattcttatccttcctactatgactctgcttcaatgttttgattacaagctccctcctctaaatggaattttttgatacatttgattatgcctaattattactgacaatcctatttgacagggtcttgatgatctaattagtttattccgaagaccaccctctcgaaaggtaaaaaccgcttgataactcaaggcaggattaactccaaaccattagtcgcagaactgaagattctctcgcgtagttcagattaaatttaaggttatatatttatagtttttggcaatgtcttggctagttcatgacacgaacgatgatctcagtaagctctcgtgttaggaagatgcttcatgagaactatttatattgaggtgcgagaaaatttttgtttaaagattcatattttagcaatgtataatccctggaaattttct

SEQ ID NO: 200551 - DNA, 1690 bp, Cannabis indica
ctctaaaagtgcatgctctctttatctttcacattcttctttggagtttctgccactttttcctctcacacctggaatcgttacgaaccagacccctggcataagaagttctcagtgaagaattcttcaaggcttcttttcttctagcaacccagtaagtatatttccactattgttctttgactatttattcttctcttattttttttccatatatatatttatcgtcaatttcttgaatgggattgtctttatatggtttttaacaacttaatgttagaaattagggtcaactgatttataggccctaagtttttacgttttgcgttttccaaaattttgaggcattttttcttttaatcaagataatgcctcattttgaacaagattacgaacacacagaccttatagaacttgataatccccaatttcaagccattatttttaaaccccagacttataaacctcaatccatacttacgataaatgacgaaaaaaatagaaaacattccctctgggctagccaagaatagacatcaactcgtataggcaatgtataaataaaattattgagggtagatgccattatctgcgagaagcggcctggcctgaatcgcctagttcagtaaaaataaccttagcaagaccattatttttaccttgagccaccgttgcttttccaccaagtgatctcaattttcatattatggctatgccttagaaccctaacattacgtttgaggtaaaacttattgagtctaacataaggtccattacatatgttggacccttcttacaatcccgtgggataaaaactgacaatgaatttatagttcgtttgatggagaagggtgagcataaatgtcatcccctagatcacttgtagagcaattttgggtgtagtaccagcaactccttgcatattggggcgtggagtactgagcgcattaaggctgaagccctttttccccttcggtaatatttcaaggacttctgcgacaatcttggggtcactctttttcaacttatccctaatgcatataggatccttgcttgtctaaaatccttgttcaatatcctgagttggggaagtccaactcctttggaaataacctgcttttacactgtcaagtcctgctctgcgaggaaaaattattctaccgacttctattatttgggagcatatagtggcaaccgtaaatgtaaagactgcttaactttaatttggaaattagtagataaatatggtttaattatgaaacttgcatattagttatgaattatcagtttacagagatttatttaaattcagaattcattttatttgttatatatggaatttcgtaattttacatgttttgtgcccgacaatgttggaacgcagtgtttggctattagaatcacatcttagtatttttagtatagcagagcaatatagtaagacattgggaatatcgggaatattcaagattttagaattgacaaaaatacgtgatttttatgacttttagtgtgggcaagggtattttggtcttttcgccctaagttggttttgtcttttagtgggattttaagttgttaagctgatttttgtagtctattaggctgatattagtttaataaaacttattttatttatctcattttacaaaaaagaatcaaaaattaaaaaagaaaactctctctctct

SEQ ID NO: 200552 - DNA, 1862 bp, Cannabis indica
cttgcattattgtggtggataaatgtgctttgcctaatgtcaatggaagcttgattattccttaactggcgacaatgtcgcctgtaaatccacaaatatttaccatgcaaggttttaattaagctttttcaagtcgcatcttcttcagtgtatccctataaaggatgttcactaaacttctgttgtccaccagcaccctctttatcctcttattaacgagttggatggtaatttctagggtgttgacttgaggatacatcacatatttttcatcttccttccagaatataatcgaaggttctttagtctttgctttcttggaaggttccaaagcaaaggtagactgctcattcttcagttctttcacattcctcttttgggcattgtgctttctcttgcaatatgtggccctctcaagatagctaggatatcctctgcttcaaggggagcaggttgtaatccttggttgcatgggttattgggcagatttggctagtttcgcccattgccttattttttcacatattgcttgaagtgagctcgtgcgatgagactctctatctcatctttcaattgacgacactcgtctgttgtatgcccaatgtctttgtgatacttatagaattttgtcgtacctctcttatgtctcgcatgcctcatgggctcaggtttacgaaatgtgaccttatgctcagcgcgagataaatgttttctagattttcattaagttcagtataaatagtgcaaattggcacgtacttgtcgtgattcttttgctttttcttatccttggctgactccttagaattatcttttttctttaaactagaggctcctggattatcagccttggttgagataatgcttgttaaggcattactgggtttgcttcttgaaccaatccgtatcaacttcatctcttttcttgcttcctcttttcgaacaaatacttaagccctttcattgatcttagtaatgttttttactgggcgacccgtaggtcatcccatagctcgcctccagcagtggagagatcagtagagatccctggataaagagcagtaagcttggtactatcatccaggtttctcaccgttgcagcagctgtgctaaatttacttaagtaagcctgaagcgtctcgtccggctgctgctttatgtttatgagtgaggatgcttcaggtcgcctatcccttgcggcctggaacttctttctgaagtccttagacaattgttcccaagaggtgattgaatgatgagtaaatttgatgaaccagctactcgctactccaactaacgaagtggggaacaaaatacagcatagattgttggtaacattactaggtcacataatagtattgaaattatttaaatgagagactggatctgtggtcccatcatacgatgagacgtcggggttcttgaatccttaagagaatgtagtatgcatgatgtttggatggaaaggctcgagctcctcatccaagtcatatccggactatttcccttgctccctgacttgatacctcctgaatttatcttccaactcatatattcacacttggataggatcctcttgctttagaccgagctattggtgaagagcgggttttttctagttcaagtggttacgaagatccggttgttgctgtttataatttctaacaaacctcatcctactcatgaacctcgtccttaagtaacttttagtgttacttgtgccggtactctctcgattattattacgatgagttctttccctccttgcattgatcgattatgggttatcgtgcgtcctgagctgacactcacctcttcacatctcatccttctcccagtggtatgggtcgttgcatgccccc

SEQ ID NO: 200553 - DNA, 1465 bp, Cannabis indica
ttaaaaaaattagtttgaatataccaataataaataacacgtagatgataatttaacatttaaggaataagtacttacaaaattctaaaaatataacttaaatattattaacattaaaaattaaacttaataaataattatttacaatcaaaacttaaatttaaatatttataacgcaaattactttacatttatttattaatacagctaattgaacccgcagttttaaatatccaatgggagggagtaagtgcagaccttggtttgtaagttaatttcgtttcatatgatttccgaattatttattgcagcacaattaataattcaaggttattagttggcatgtgtgtggcgtgctaaggaatatgatcagtaataaattaaatatttaatggaaagaattaagttacctagctataattaaactatgtatctacttttataaataaatatttttaaactataattaattatacattttcttaaatcctattaaaaaagtatatactatatacttctatataaaaataataatatattaatttataaatttattttggtaaaataaataattttattgaaaattgtataatacataaataaatattatatttaattaaaaactaattttatatgatctagtattaaaaattatacattgtaattgttgttgcattttgatattttttttgtgttttaatttttattttttgtaaataggtgtttcaattttttgtaaagtgtacgcttttttatttaattataacatcttaattaaaatatattttgattgattttaagtgtattttcaaatagatcagtattctactgtattactagggagagaatatattcaacatgattatattaattagatttaatatatattttgaaagcaaaaaaatatatattctaatttcaaacattaaaattattaaatttaactaattacaaatactacatcaaatgatgtttgataacatataaatatgtatggtgatatatcgacttattttttcttcctaattttcttcttttacaataattttatttaaagaaaatagttctttgtaattaaattaatatgatatggcgtcaaataaaacgccatatcatatgcctagaaagccattttattaaactaaataacgcacaatattttacaaaaattattagctttgattttttgaataaaaaattattatatatagttgtgacaaatatacaaatgaaattgaaaattataggcatattaatttgacatgtgtatgcctttcaaatcatgtacaaattaatgattaatttaaagataataaattaaatatatattcttaaaaaaattaaagattcttagactataaatggggctgcgttaaatgttgaattaacagattacaaaatagagaccaaattaccctagtcgctaatatgtagaattggaagcatataagaccaatatatatat

SEQ ID NO: 200554 - DNA, 1175 bp, Cannabis indica
gttagggatgatgtctaaataggtatgatggtcagtccgatatggtgtccgatgctccttagaattttgtttgatatgtcaggtccaatgttatgtcggatgggtctgatggttgtgtctgacaattttttgttggaatttatcatatgtggtccgatatgggtctgcttgtgttcgatgcttaacagagttatggctttttgaggatttttttatcacatttctataagatttttgactaaaattttattttttaaatgtctgtggatgacaggttttaactatttttgtgttcgcataatggtgtttgggagcttgagggtagagattgggtttataactcagctaaacatttgacattcaagattgatacgaacttaagctactcatgtttggttgatcgtttgtacgaagagctcaatgttgacaaagggcagtaggactttgttgacttaaaaatttgtactagacttctaagccacacccactcactagattgacaagaatataaaaaattgtaaagtaattaatgagagacacatcaaattatagtatttcaccccctatgttgtgatagtaatggggctacgtctacttcgagtttttattctcatgagatggtgattacaacaattgtttaagaatcagaaacttcaagctctagagagaaaaagtctagagagagaagctctgaccttatgggtagttttctgaatatgaaatataaattaagggagctatccttttataggtgaaggaggcccacaaaaataggagataaattacaaataaaatattttccaccgttgatgatgatctaacggtaaaaagtagcttctggtaaagatatttactttttggtgtctggcggggctcggtacgagatactcggagcttatttttgtaactcccttgggggtgaattttgacgatgataacttcaaaatttcgcttggtgtgtgagacattacttgataaagggcttaaatagcttcaaaacgcaagttaaattgcatcaatcagataaaaattgagtgagttatggctactgaagtcagttcaggttctagcgcccaagttgacatctgacgtcaaattagacatggtatatgtgtgaaaaacatccaaggagagtcctttgagatgccccagtgatgttttgcaccccttagtcc

SEQ ID NO: 200555 - DNA, 1996 bp, Cannabis indica
actggaacagggagcatttgagatgagaataaagcaactgttctctagatgtttgcttcatagtgagattcactttaccttgtgcaagtgaatcaatcacctctcaaaccgaaaagatgcgatgaagtaatcttttggtttggaggtctatcgctaaggtatggcccctactattattcgaatagggtatgagtgcattgggatcactttaccgaagctttgatgaaaaacggagatctaaaattactatttctttttctttcaaattagctcacagtgatgtaaaatttaatatctaatgaataagagcattgagtaaagctttttggtacttcattgttattaatcaattgaagctcacacacctgatgacgctctcaaacactgaacaaagcttgtagagttgcttttgaggtaactatgattactttgttagtgagttaaacacttccaacccatgaaactctagacaagtggaccagtgctcacatatgtaacaactctcggagacccaacatgatttggtatggcaagtggccaataaaggaatttcttcgatcacttggggcaaaataagacatagtaaatgggagctatgcacataacatgagcattcaaaaaaatcatggtacatgagagccatgtatgtcacacacaccttggtatacgagagctaggggttgtactgacatttcagacacatgcgttagtattcctatggtttaacaaaatgttgacgttatcactagtaactgagtttcttaatcataaaaattatagcacgagtgccggtaagttcattaatttgaataaatgcacaaatagactatttgcacaacagagttaagcattgttatgatttaagcgcttgaggtctcacaagaatataacgatcgagtttataaacctaaaatgcaagtgcaagtgttcctcctcagatcacaagaatcaaaaagaaaagaatatcatcatcaattactgaaagctctctggaagcaggacgctgtatccaggagagaatttctaattgatcaaagaaaaacttttgggaatgggacattgccccggtttcggtattcttttagtagctaaactcatcctaagtatgggatgatatacttagcataagtttaatcaaacatttattttttcttgttcctctcttggagtcttttctttaacaggggtctatgagttgaaatcatcaaactagattctcagccaacctgtgatttttcccctatatagaagatctggcaagtttttctgcactactctcaacagtgattcatctcacttatgatcataaagtgagatcatgcttcaccaccaagcacacaaaaaatattccactatacctcaacagtggtttatctcactcacaacagatatcttcaacatagaaacttcaaactttttcaccccagtcacaaagagatatacgttggggagcaagagcagtcaagctcagacagtaacaacaaaatttcaaacatcgtgcaaacaaaggtgacagttaataattaagcatcaccaactgttctaatcaaaacataccctgaaaagaatgggtcactccttaagagatctaagccatgtaagcagctcatgtatggtttccggtgagtcgacattactccctgtggtatagaattaaatcgccactcacagttgaaactgtcccatggcaaacatcactatgaataccttcatagtgatcgacaccaagtctcttttgaaggccaacaccgaacgacctcattgccatctcacttatctaccatctgtctgtcaagttctcgacagcggctggtatcgagcttctccttggcaaccaaagagtagaatttgaatgttaaaatacatcgttgacatttgcccgagaaacctccttgagacctcctttgctatcaagacagttaaggagacaaagaaggcctcttcccattgtgaatacaatagaagggacgataaagacctctaaggttaagaccaa

SEQ ID NO: 200556 - DNA, 1974 bp, Cannabis indica
gtggacttggttgaggagaatctctgagtttcaaacttggaacagaaataagggagtttttggctaggcgggttagcagtggccaagcatcaccctttggaaaatttgtacgatatttgtcataacttgaaatcggtagagaagttcccttcatagttggcctatattccaagtcgggctctatgccattgtctaacttttccagataaatggaacacttatcaaaagggtgtcccaaccgcccacactccatacaatatttaggcaatctttcataacgaaattctacccaaaacttctcctgtgcgtgctgaagagtgatcattcggcccctcaataaaggctttgtggtatcaattttaacccgaacacgcaggaaaggcccccacccctcattaagagaatcctcatagacatccacatattcaccaataatgttaccaagggctttagcaagtcccttagttttgctaagaaatggaagcctataaatctacacccagaaaggagtggagatgagtatgctcgagtgaacattctggcctggcagaggagagtgcaacacaatatggtggttttgaaatgatatggctccttaagaaggacacgagccttatctccagcacaaccaaaactgagtgagaacatatccgaggactccgtaattgtaattggaaacctaccattccaatgttgtgccatttgatttttgaaagtagaaagccaaactttcttgttagtgagaacctttgcatataacacatgatcttgagtagaatcattagcaacaaaccccatatcaaatatatcaaaaacatattcttcgtccttagttaaattcattggttctttcatcttgttagtgtaaggatccatggaaccaaaaccagatcgtagcaaaagagatcagatgaagcaggattaggagcagttattacttacgatttatggagaaacaggggaaaacagaagaaacctgggactacacaaagagaaaaagaaaaaacttccttaattgaaaaaaactgccgcagagcacaaaagggtgggcagacgctctcgtttgaaaaaataattttggtatagtttgttaatttttttatttttttgcaatgaataaattcattaaaaatataaaaacatcatacaggctagttatgaatactatacatcatatgttcgtcaaataaatactactcttgggaggatactcaaaataatactatacacccaaaaaaaaatatggatattcatatctagccaaacaagttatttattcatccgaagagcatgcacaactaatctgtgtgcaataaacttgtaaaaacttctaataatgatctaaaaaatcatttgagcgggaactctgatagtaaaagtaatcatagttgtaaaatcttcgtaacagactgcaatgcattgtcatcatcagcggcatgtaatttgttctgaaaactcgctatcatttctctcaaaacttgaaaggacaataatgttttaactgcacataaccaaacaatatattagtgggatgaaaattaaaataatgagtaattaaatattattacaaatttatattttattttactacaaataaacaaaataagcattaaaaaaatactaacaatagttactataaagaaaataatttcaaacaaaaaaattataaagaaataggaatttgtcaaatgtaattagtgtctgaagtagattcacgagcactaattcaatcattaaaataactatcataatttaaaaaacattaataactttataactcaaataaccgataacttaaaattaaattttaaattatattgtaataatctaaattttttcatgaaaaaattatattgtaataatcttaaattataaactaaggttaatacaaataataatatatatttttttccaaataactaactaaaaatcaatttataaaaaagaaattgaaaaaatcaaatataataaaaa

SEQ ID NO: 200557 - DNA, 1119 bp, Cannabis indica
ccagctaaccaccattgtttggcacattctggatactttctctcctaaaatggcggaagctttagccaacatgcaaccatccaatgccgcttattgggattttaaaatgtgcgtttttgaatctgattgtttgagtgcagtttggaagtttaataaccaggtttctttggcctcttttttgagtgtaatcttagcagattttagacagttttttttttttttttttttactttgccagtctttctttctgttctaaaactattaatattgttgcacattccttagctaaatatgccttgtcggaagttattagcaaaatttggtgacttcgttatacttcttgtatcaacgagcttcattttacatgagtagtagttgatacaatcagtctcccatccactttatctttaagctctctgcttggaaggtagtttttgagaatttttcttaaaaatatatatatataatattaatgaatgtgactttttcatacaagaataatgtatggaatgaaataaaacagaagaattaatctttctattgttttcaacatgtaaatgtgaaatgaaaaactaaaaagttaaaagcgcaactaaataaaaattacaaaatattaaaatataataatgagttgttttatcatattgttgtgaagcttctttgagttgtttttagaatattatatgttcaacttgaaaatacagtataaaccaagttgatttcatattgttgcaaaatttattatgagttgttatgagtgttggtctacacttacagctaatagtataaaaatcaacgtgcatgttgctttgtttggggaaggtcaaggctttggtgttggagtggttgcccgggatgataagggtcttcttctcgaaggtttttgcaaacgttttcatgggtcaatggaacctctgctggtggaagccttgagagttaaagaagcccttagttggatcaaagctataagggttggcatcatgtttgcgtgacggactctagtggtgttgttcaagctcttagatgctcattacatatgttgtctttatttggccataatataaatgattgtaatgtttttctttcagagttaaaaaatatctctgtttttattaaacg

SEQ ID NO: 200558 - DNA, 1396 bp, Cannabis indica
aggcctgagttgttctctgagctcattacaagttttcaaagggttaaacctcacagcagttaggctgatgtagttagcattggtggtagaattagagtgttcttattcttagctctaaaaataatgaacatggtaatactagtgtttgtataaacactcttaaacaatctcttaaactagttttaagcaaaatatcttcttcatcatctatggctacaacttgtcgtattaggagtaagagacaaaggtttttcttgccttcatctcattttcatcaataaatttactatttattatttctttatatatatatatcatatgtttaaacaatgtattataaaattaataataaaatcttagtggaaacgtaaaagacaggagaattatcattgtgccagtgtgaccactttttcttatttttcctcacttaaaaagttaaaagcaccaccacttcttataattcatatctcaacatcattggtactctgaaattggacatttattaatatttatttattttcttgagtaagaatgaaaaagtaagaaaaataatcattgaaaactgcagtgttgaaataaatattcaggtgatgacaaaggcaatgaaaactggacgaaataattgaagagttcaaataaactgcaactttgaaaaattaagagttcaaataatggtggaaaactagtgtaaaaatgtgtaagctcaattcaattatatctttgacaggttcgacattattaataatttacagaggttaataatactttgtaccaataaatatgatcaacaggtcccggcacttccttgtcttcatttattgggaaattttgtagtactacaatagtgtatacctaatatggtgacaaaacaaatgaagggtagaaaatggtcgatctctctccttaaaaaagagagaagtagttcgaaaaaagtggtataaatatacaaaattgtagatttcgaatatatttggatgatctttatgggccttttaaaatcaatctcttaaaggaagaccttatataattggaaagatttttacataaattcaggagtagtagctagcatgagtgacacggaagttggagaaagaaagttgcggccatatgggacctccacttttgaaaaattcagtccatacaaacaattttttttggtttcctttgtaccacaaatgcatcaaacaaagatattatatattaatatatctatctaacagaaactataaatatctatttttataatcaacactcttgagttttcatgatgtgagtataagctataatccttaaagtaagctggtaagtaacaagttaaataactcaaataatacaatcagattaaattaatttatgattaagtaaatgatatgatttagaatagataattacagta

SEQ ID NO: 200559 - DNA, 1182 bp, Cannabis indica
  modified_base (32)..(32): a, c, t, g, unknown or other
ggatacagctcattattcatccaaaaaacggntccttagcgccatgaaattgaagggcttctctcacaaatcccaattcatcttatcgtaggctttttccatatccagtttaatcatcataaagcctttagatcctttctcctaaccatagaatgaacaatttccctggccaacgatgtgttctctatgatagatcgacctttgacgaatgttgtttgagtaggggagatgatcattggcagcacattccgaagccgaagagctagtattttagacatacatttgtaaacgacattgcataaagcaatgggacgatagtcgttaaccgttattgggttctttgtttttggaattagaactatattcgtattgttgatgaaatatggtagcctagaagtagcaaagaaatgagagatcatcttcagaaaatcagtacagatagtatcccaatgggctcgaaagaacgtcgccggtaggccatcgggacccggagccttgtcaactcccattgaacaaagagctcaaaaaacttcatcttcatttgggataaaattcagatccccgtccaagtgagaaacagttctgatatggtgccactcatctggcttcaaactagtacgagattgagaattggagaatatgatggagaatttattgataaatagctatagaatatcctcaatctgttcaaaaaccttcgccgactcatctttcaaagattgaatgtaattacgtcttcttctacttaccgagttggccatgaaaatttttgtagctcggtctccatctttcagccaagccactctcgatttttggcgccaaaatatttcttctcgggccaatgcttcgttcaaagctgctctagtagaagtatgagccaactcattaaaggaggaagtgttgggttttgtgccctaaataaaaccctttacaatctgattagttatcaatataagaaatttgaagtaatttatgtttgcatgaattttacatgcttatggtttaatatgtttattatgtttatacacaaaatctgttaagtccagatcatataattattcacaattacagtattgtcaacacagtggaatgtgattgtaattatatgaatcaaaagactaagtccctgtttcatcagtgttttggatttacactgatgtgataatcagcgatgatgtgtac

SEQ ID NO: 200560 - DNA, 1431 bp, Cannabis indica
aaaaaacaaaaattaaatatatagaaattttacaaaaccatccatacgtacacaattaatcaagactcaattaatcaaagaggtacagttctagcacttgaaggagcagtggcctctccttgatctccttcttcattttcaccagtcaactcttcaagtgatattccttttgactctggcaccaaaaatgtaaatgccattccaagaaagttgataacaccaagcataatcaaagaattcttcactccaatgcctggtgggtaaccagcttcggtcttcgatggatccttactttgagcggaatacaagaacccaaaagctcccaccattgctccagctttcccagcagcagctgatattccatgacatgtggacctcagccgtgctgggaaaatttcagccgggacaacaaatgttgtcgcatttggtccaaagttagcaaagaagaaagtcaatgagtacataattacaaacccgatatgattatctttttgagtccagtggttgtaaggaatagctagggcaaacatgaacaccgtcatgaaaaagaatcccattagttgaatggcaaatcgtcccattttatcaataaaagcaactgtaaaccaatagccagggacagtactacacaaggcgattagggtttgagctctagcgattttataaacttcttcaatggcattcattgtgttggcagctgggatccaaccgatggcgctgaaaatatctttttggaaaagattttggctataaaatgcgatgtctaataaaaaccaagttgtggttgtgccaacaagatgaagaccgtgtcgtctggcgaattgcttagagaaaagcccaaatgagtttttaccttcagcaagtctctctaccttctcaacatcagcttcgagctcgacttgtaacaccttggacatgtcggaagcagcttgtttagcgtttttagcaaccaatgctgtgtaacgagcagtttcaggcattttcatacgccaatagtaagtcaccgccgctggaaaagctccaaacatgagaattatacgccaaacatagtcggcctgatgaaccaacgatccagctctgtcgactaagtacgacggagcatcatattttgcgttgaaagcagctgatcatgacgatgatgacaatgaaaaagtattagcacaaaatttaaaatcaaaaagttcaaaacaaaaaagagaatgtacaaatatatttacttacttgagacaatcaaggcaacaattccacccccaacgaattccaaacccttgcatggcgaaaactgcagcgataaagcgccgcgtgtcttcttgttagcgtactcagacataatggtggcggagagagggtaatcgccaccaatgccaaaccctagccaaaatctaaagaagcaaagagttgccatgacagccttagcatcttggccaaagg

SEQ ID NO: 200561 - DNA, 3249 bp, Cannabis indica
ttttttttttgaaatattgaggtgtacttattatttgatgaggtgcaaatagagttttttttaaattatatttttcattctcaaaagtctttttgtaaattatccaaagagccagctcaactccgtatgggtaactaaacttttaaactgaaaccaatttataataaagagatgtagaaaaattagggtttcattcaattgcaaagtcaatagtaaaagaatacaaaaaaagccttatatagacaactaacataataataaccctagataattatttaacactctccctcaaactcatgatgctgttgtaagaagtatcgagattagcctaaaagaaaacgaaaaatgagaaatcgtatgtgacttagtaaaaaagtgagcaagctgcaacgaagaaggaacaaggcaaagtaatggtgcccaatttagatggtgatgagtaaaatgacaatcaatttcaatatgcttggtgcgttcatgaaaggccgagctgtgggcaatctgaatgacacttttattatcataatacataggtgtaggacaagagtgaataacacccatatctacaagtaaccatctcaatcaaaatctcttttgtagtagacgccatggcacgatacttaggttccatagaagattgagaaacaatagactgttttttgctcttccaagaaataagggaatctcccaaaaagatacagaaaccaacgacaaattttcggtctgtggggttacgaccatgatttgcatcacaatactctcacaactatagagaagaggtggaagattgtagtaggctctgaaagatggtaccccgaagacactatagaatgcgaagaacagtagcccggtgaacagtattaggagaagcaacaaactgactaacaatatgaacaacaaatgcaatgtctggacgagtaatagtgaggtaaaccagagtgccaacaatggtgctatataaagtaggatcttccaaaggagagctatataacttagagggagtgttaacaactctagtatcagtaaggcaagcacgctcaatagtgttagtagtgtactttgattgagaaagaagataaccttttggaaaaaaagcaacttcaataccctgaaaatagcacaaagaacccaaatccttcatctcaaactgataaggactttaacacttcaataaggaaagtagaataccctggagatgtgaacttgacaaataaagctgaatcatgatcacttgaaataaaacaaagagacaaaataacagtagagaacttttgaaatcatgctcgaggagcctgtttaagaccatgttttttgtagcttgcaaacattgccttgcttatgaggaacaccaggaggaggaaccatgtagacttcctcatctaagtaaccattcaaaaaggtattcctaaattccatttgagatatagtccattgttgaactgatgccaccgctataaaactatgatcaatagttatttttacaacaggagtaaaagttttctcaaagtccataccatactgttgtaaaaaacccttagtcaccaactgagcctggtactgttcaatagacacattagacttggtcttgatttatacacgcaacgagaaccaatagcatgtttactaggaggcaaaggtaccaagttccaaatatgagtctcttgcaaagcaaagagttcctcactcatagcatgttgccaaaggagatcaataattgcctttttataggacaaaggcttagaaagacaatgaatagacgctaaaaacaaagtaaaagaagcataataagaagagcatgtaaaatttgatcggtgagtagacttacgaatgcgctgaggatagcgaggagggtctacaatctcaagaggatctggaacagttgcagaaggatagggaggagcgatatcaggttgcgaagtattcatatctaatggatgagtgatttcaagttgtaaagtaccagtatctaatgacggagtgattttaggttgcgaagtaccagtatctagttcttgagatcttttaacacgatgcaagcaagagtaatgaagaggaaaaataattgaaggagtagtggatgatccagattcagattcagagaatgggtcaatgtgaataagatctgattttgtcaaattatgaggagtaccaggaatagaaaagaaagatatatgctcaagaaaactacatgacgagatacatacaatttttgagtaattggatcaaaacaacgatagcccttttacctctccataaccaagaaacacacaaagtagagtgtgacgacaactttgtacgctctacactaggacgaagcacaaaataagtaaatctaaagattcctaaagaacaacagtcatgaatacaaccatatagtttctcaaaaaggggcaaacccgtgacagaaggcgaaatcatattaattaaggaaactgcagttagaactgcctcccctccaaaattgactaggaacaaaacatgcaacaaagagaacgagcaatttcaacaatgtatctatgtttttttttgggggaaattttaatattgtatacattatttaattttatttacaaaaaatgtgcataataaattaattacatttagacatacaatatattcattagtaaaaacttattttcatttttttatactaagtatataataggaaagttttcttaattacatttgaatatttattttgttaatatattaataatcaataattttaaataataaacataattattattgatataataaacatgtaagtcttaaaaatctttatgtatatattttttttatgatgtattaatttttaataaatatattatattgataatagaataaaatattcacataaatgtttaaattttaagcgtttacattttagtatttcagttaaaaattaaaaataatcaacattcttaaataataaatataaattgatattatacacattctgtataatttttgtccagttaatttttagtaaatataatattatataataatcataatataaacataattgtttatatattttaattttagtatttagtttttttaacttaattagaaattgaaataaataacatttataaataataaacatacattgatattgtttataatatgcatatgtagttttatttgtatatttttattttaaaagtgtttaattttaataaatatgttatagtaaggttattatattataaaattgtttatattttaatttttttaaggatg

SEQ ID NO: 200562 - DNA, 799 bp, Cannabis indica
cttttaagaaagtgcattgtagactcacccaaaatgttatatgtatagaaggaattattactagcgaacacccatttaattatattataggtttacaaaattacataatataaaaataaacgaaaattatagctaataaataaattaaagagttgtttacaatgaaatacatagataggaatactgcaaatagaacatgttcccttcagcgtattgataactgactcagaatcactctcgatcaacatataagaatgcttccagtagactgctgattccatagctaacagataggccgcgacttataaccgagttagagaagttgagtacattggtagctatccacaacactgactccttatagtccctagccagagccaccacacacattgaatcacaaacaactttaacattacaattgatttttaccaattttctggggggagaccaaataggagactcaaccgtcattggcgcaggaaaaaggcaagaaccataatctgcgtaacacatagaaatatagtcaatgcaatgcttaatgttacaagaagaattattatgaaccttgtcgttgcgggttttccagattgtgtccaccactatcgaagcatacaggaacaactctttgacaaccactcctctagattccatgctccataagaatttaacccaatcccacacacgggctcccgagttcataactggcatcacaccccaggtggaagacctccacatgtgaaacgcaaagttacagtagagggaaagatgttttatagttgagcaatttgcggcaaaaccc

SEQ ID NO: 200563 - DNA, 931 bp, Cannabis indica
ttttctatcaacaaacagctggaacaagaaaggttattacaattatttttgaattgggaaaggttacaacttgatctaaacatatgtccatatcatattttgtttaaggaaattaaaatatattattattattattattattattattattattaattgaaaaaatcaatatgtcagtatgctgactgacaaccggcggcgtccgttttcagcaaattaattatcaaattacagttggtccatccagatattgtacgtagtaaatcagaaatatcttagctaatagatatttggaccatctatgtatatagatatatctaagcttatattttctatacagcaattatattattattgtggttaaaagttcctcgcttatttttgagtcatttttcaaaaatcactcagtccatttaaaaatatttatttatatatatcacttcagattctgtacagtactcaaaccacaatatgattttgatggtttgtggtgtttcttttgtcgaaaatttaaaagaaaaattaaagtggaatatgctataggaatcatatatcctatagtatcattgggtaattgaagtggataaaaagattgaggtacaaacaaatttcaaaaaggtgtatgcatacctcgttattctttgcgcgacaaatttaaaaattttggtttttttagaacaaaaactgtggactgtcatgcatacaaaatagggttgatgggggattaagcagcagtgagacatagattggtttcacagcttggagtgggttgtaatagttttgaagtgcaatacatctaacaaacatgcctaaaaaaattaaaattaataataatagacgagtgctaagggaactctctatcctatactttttgcactatctcgttaatgtgataacaaaagtcatatttttagtaagagtttattttttt

SEQ ID NO: 200564 - DNA, 653 bp, Cannabis indica
tagtaatgcgtgaattatatgaagtagactaactcacaccacttttaggattaacctgaaaaatggcttaaactacaatacatgacaaaccatcatatatggtaccaaacaagttatatcaaacacatacaaactaacatacataagtacaatacaagccaaaagccacaatcgacccaaaaataaagtaccataacataaaatacaaaataaaatataaaactaacagtaattataaaaaatattgtaaatagtaattgttgactgttcttatgataactaattaatcttattttaacgtgttgactttacttttagccaaatattgagccaattaaagcgattagaataaataatattgaataaaaaatatataaaattaagcaataagaacacaaatatttatagatgttcggccccgtgatagtggtaatagcctactccccttttacttgtataaattgtgagaagagaagtaaaaagttcttgatctctcttgaaagcttacaattttacaacgtaagagctcttttgaacaattgattttggattcctaaatagtatggttccactatttataagaaaaagttacatcaattaggcatctcaaaataattaagaaataatatgggaaacttatttactttcttaaa

SEQ ID NO: 200565 - DNA, 641 bp, Cannabis indica
gacattccaacacctccaattccttcttcctctattagtgtagttagtattgtttgataaattgtaatggatacaaattttgtatagaaaccaaattagtgttcctctcaaatctcaacaatagacttatcactttcttgttagaacagtcttagccccatatctctagctacctcaacacagagtttgcctttataaaagttctttgagccacctactaagtgttgattgatatacaatgactgagaaagtcctgttgaaacagttacaacttgagacttgaagttaaattatatatatatataggatgtctagggacattgattttgtccctacgatagtgatgtttttaaagccataaatatttgatctaatgatgacaaatgaatatgtgtataataatagttcacatttgggtgcattagattattttttattttttaataatatttttaaaattcatatacttttacaaatcaattaaataatatttaaaatttcaaaaaaaaaaatggtattaaggtggataaagccaaggtatcgacaattgaaaacttacctcctctagtgtgagttaagggagttcgaagtttcttgggggatgttggattctatagaaaatttatcaaagacttctccaa

SEQ ID NO: 200566 - DNA, 750 bp, Cannabis indica
tttttattaatagataaatcagaaaaaattcattacatgataaaatcgctcaaagatagaatcaacaaaattatgcaaacaatgtcgttaaatcataatagcatttccaacttaagaactaataagttatcaagggtgaaatatcaaagaagtgtgaagaaaaatattagatttgtcatccaaataaacatgttataaattacacctatcaatgataagcagcaaaagatcttctaatgaaatttaggaaaaactagaaccattattcaaaattgtaataagtggcaataccaaacgaccaactataaagaggcaaacaaacacaagagatttgaaaatcatagcacatagggccaatagacaaatctgaacgaaaagaatagaattaatggcaccccattttggtccaatcgacaacacactgatcacccaatatagatcaaactcttctccatgtgttaaatcaataacaatccctactaaaaaaagtaggtaagtgagaaaacataaaaaatgaagttgttaacaggaaaaaataggtgcagaacatatactaaccaaatcccaaaacaatgccaccaaagaaatcaaatattctaggcatcaccccacaccccatagccaccacaacctcaagacaagagccacaaaccatacacccacacacccacaacacctaactccaccaaccaacccatatctaagaccttgactaaggacttgccagatctagagaataacgatccactg

SEQ ID NO: 200567 - DNA, 1444 bp, Cannabis indica
ttttttttttttgaaggaaattggatataattaaagaaaagagcttatcttatatagttaatagatagaaaaaaaaaatgaaaatactcggaggtcacttattaagcattatttattttctattttttcaatgctcaaccaaatggggtacacatacaaggtatgtgtcttcctactaataaataaaagggtttggctcttagtatatatagtatattttggctcttagtatacatagtatatgttgtgataaataaaagagaaatgttaaagtgtagctatatgtagtacctttataaaatattatattattatatttgatataatttaatattaaatctaacttattttattattttaatttaataaaaattataaaatcattaattaattataaaatactatgtaacaaaattattagataagattctgaacgagaggggactactagaaaggatcagttcgccctgttcatatccaatctggtggatttccggggccttattaatatgcctattcagggagacatgatgacatgggataaccaccggtctagtatgaatcatgtcaagtctgctcttgacaagagacttgccaatggtgcttggctgaagttattcccaaaagctactatttgttcttaccagacttgcaactcggatcacagactgctgtgtcttttttcggaaggtttagattcaaagtttaagagatgtttcaagttcgaagaaggttggacgagagatgataggagcaagctagtggttgaccacgcctggaaatctgttgtccacccttgggcccctgcttgggtttacaaaaagattggggctactagggttgctctttgtcattggcaccgatcccaatttggtaacttagagactaatataaaagtgcttcaaggaaaactgaatgagattcaaagcttacctccaggcaacagggattggaacactgaatgtaatatcaggaaatccttaaatgaggccttagaaaggaaagcgcggtactggagacagagggcccggatctcctggattaaggagggagacaaatgctctaaattcttcttcctctctgccactattaaaggaagaaggaatgcgattgaaagcatcttggacaaggacaataattggatcaattctcgggaattaattggtcgtgaattccttgatttcttcaaggggatattctcaaggtcgggtcgtcgccaggcgcttaactgtagtcaattcctccaagatagtatctgctctgaggataagaaagcgatccaaagtattccctctgctgaggaaatcaaaacaactatttttgcgatgaaccctgataaagcccccgacccgaatggtatgtccgtgttattcttcaaacattattgggagtcggtgggtggtgatttctgtgatgcggaatctgatttcttcaggaccaacaa

SEQ ID NO: 200568 - DNA, 1300 bp, Cannabis indica
acgagatacatacaatttttgaggaaactggatcaaaacaactgtagcccttttctccttccccataaccaagaaacacacaaagagcagagcatgacgacaactttgtacgctctatgaaacacaaaacaagtagaaccaaagactcttaaagaaaaatagtcaggaatacaatcatatagtttctcaaaaggagacaaacctgaaatgatagaagacagaatcatattattaagtgaactacagttagaactgcctcctcccaaaattgctaggaataaaagatgacaacaaaagagaatgagcagtttcaacaatgtgcctaggttttctttcagccacactattttgttcaggtgtatcagtacaagaagtttgatacacaatgtcatctaaggcaagtgaattaataaatttatttgaagtatactcatcaccttgatcacatctaaaacatttaatactagcaccatgttgagttttaacataagcttaacaatgatcattaatactataaaagtcataacaatgtttcataacaaaactcaaaaaaaatgagtgtgatcatcaataaaagaaacatagtattgagaacccccttttgtaacaataggagagggtacccacacatcagagtgtattaaatcaaagggtgcaacaaaacaagttgtacttttattgaaaggtaaagcagaaaatttaagtttacatcaactacaatcagaaatatcatgaggttgcaaatttcttaaggttcctttagaagctaaaaattttaaacgagactctgaaacatgaccaaggcgagattgccacaaataaaaattagaagatgaaggagacaaatgaaaagaagacaaatcaacactaggagttgcatatactggtaatctcagttcatccaaaacatataatccctcgcctacgaccggtcccaatcagcttctgagactatggatctgcacatgacatgaagtagaagaaaaagatactgaataactagaatcacacaattgaccaacaaatacaagatttaatgaaagattaggcatatgataaacattaggaagcgacaaatttgaactgacatcaagaccaataccagctaatggcatgggagtaccatcaacagtcatgacaggcacaaatgatgtaggactcaaagaaaaaaagatgcagaatgtgaagacatatggtgtgaagcatcagtgtaaaacacatgtagaaggtgacatacttgatgtgctagtgggtggttggcctaccaaagtagagacatacatggcattaggttgagtag

SEQ ID NO: 200569 - DNA, 708 bp, Cannabis indica
ccccccttgtctactatttttcaatgattttttaggaggagagacagcgtggccttggttttaatcctatcattgttgcagcttcaaagccctctagtccacgttccaagaagccaagactgacttgcttcaactgccacaaaccagggcactgatgtaatgaccgaatagttaaatcatgggaattagcagacaattaagaggtttacttattattatgcgattttgtgcctcttagtagaaattagagcttattgtcaaaaataggcatgaggaaaatattttttcaataacggagatatatttgaatcctagatgcattatatatgttatatgtgaatttttatgaatttcatgttttatgcctggtaatagtggaatgggacgtatgacctatatagtcacttagatatggtttagtattttataaatagcagggcattttagatagacattcgatatgtcaggattataagtttgaccaaaatatattttggtggcaaggttacttgttggtaaagcaaggcgtaaattagtaatttaaccctagatttgtttttagtggctagtggattattagtgaaatcctaagtttaattaggttattctacaagctgaaataaaataaaaatttatttctttaacttatccttcattcatttttttaatcaaataaattagaaattctctctctctctatctctctct

SEQ ID NO: 200570 - DNA, 871 bp, Cannabis indica
aataaacataagaataaaataatgatatctttgaaaatttctcaaaaataaaaataaaaataaataacacataaataaatgtgaacgcaaggaaaaaaaagtgaagaaaaaaagaaaagcttgcatggaatgcgatttgtattgacaaaaaataataatagtaataaaaaattgtatttataaacaaattaatgcaatgttgctgtcttgtgcaaaatcaactgtactgattgaaaaagaaattaatgttcacaaaaaaccaaatatatcaaccttacgttacaagttttgttctgttgtgcatgccgttggcttggagtggacatgtatcatgtatgtacacaaaaaaactgaaacatatatatatgaaatgtgtgtgtgtgtggatcaataatatattttcagtgtacttttgcgtccacatcggtctctccggccaataaattcttaaaatactcttccaaaccaatagtcaaactcttctgctttatgtgtccaaaccagtttatctaaaagaacaagtatgataagatcatcataccatacaaagatcatatatatagcctcttacttaaaatctagaatttttaaggtttttttaaaaataatttttatattaatatcttatacaagtttcacttgatcagaaagttagtacagttaaataaagggttatttgtggtaaaatccccttaagtggtcatgtttttgcaaataacccccaattctaaaattttagtggtaaaacctcctaaactcgtgttctgttaacacttagccctttccatccattttaggctgttaactgccatggtgcaatgtccacctgtacacagtgtacacgtggcacaatttcactcgttcacataat

SEQ ID NO: 200571 - DNA, 2470 bp, Cannabis indica
ataaaatacgaacacaacttacataattttcgtatcgtgtcgaacttctaaattttcgaatcatgttcgtgtcgaacttacatatagttacatgaattgtcaccctgcactatcgaacactaaaatattaagataatatgtagatagatataaactttagtaacgtgtataagtaaggatatattgtatgtttatcgagattttcgataataaaatatttaagagtaaaaaaataataacttgcaaaagtaaagaggaagattttttacgtggttcaggtattaacaaattttagtctacgagtcagtctattagcttctaaaggcaatactgatgtgtttataatatttttgcatgaaaccctaactctttactctaagtttttcttggggaagaagaagacctagagtaatattgtcagagttttaactatgtcaatcctaatgcccccttcgcatgacaagagaggggtatatataggctaagtggtgggtatggagaggcccatgatttgcctaaggtatctactcaaattctactattagggtaaattacatacaatgtttagagctgactggatgatgcatgtgcatgcaacaactagattatagggaccattttgtaccactagaaaacgtgtcacacaaaggttcaacctttaaaagtagaggccatgtgtcgctcaaagctcattcctttacgagcataactctgtaatactcatttggcaaaaaagtggtgattgtatgcgcactaccatgctcggatgtgggagacaagattgatcttcgttagaaaaagcataattgtcactttggtgacctggcatgcataaaaggtcgacgtctgcgacacttcatgaaggtcgagttccactttagatctttcaaatgtatgtccagatatcatctgagcgagcttccctgttagacccttccgggtccagaagagatatttcgccttctgcgtctggggatttaaggtaggtatgggaagtcttcctcacacctttccatactgaatgattcccagttctaagaagcctcttcgtgacagaacaacattaaagggcctgtttttgtattttcaacacgcaagtatacgtatcgttaacaagtaatagactcacaagagtgatgtcgatcccataataattgtagttaagtacgttaaaattaaacttttacttctatttggatatttcgaaattaaggaaaaattaaaactagaaaacaataaaaatagaaaccaagtaaattaatgtgtaaactaacaatgattagaactagggttttttattttaattgtatcaatctattatggcctaatataattcaattcttattaccaatttctatgcattagaaggtttactcaagtaatttatagtattcttagatatataaatcttaattacatgcaaattttctactttcatgataaattagaacatgtaaagacattaaatacaaaatccctataagctatccaaaccacataggactctcgtcttatatcgaaattttttcctatttcactatagcataattgacattcacttctcagatttcgtatacaaatcataaacaattaattgatggtcacacaactaaaagaaataagtacgaataaaatagaacacgtagaaaattggggaagaattaaatgataccataaacagatgtcaaacaatctccatcaataccctaataatgtttagctactcttgttcatcgcaacaatttaacacatatcaactaagaacataagaagaaaatagaaaagaagaaattattgaaacattctgttggaaagcattctcagtcactttgtttctctctaattgcttcatgaaaagtataaaaatccacttatttttatagccaaaaaaagataaaaagatagaaaaatatctacttttgcaaattcagggggcgggcctcgacactaggcccttagtgtcatggcccgtgttgtggcattaatttttcctttgatatttctagcacacgagcctcgacactagcagggagtgttgaggcattagaccccaaatttttggcagtaagcttcctgctgtgatgactgataatattttggccataactatttcaaaattgcttcaaattagatgattcaagattttttggaaagttgagagagatatctaaaacttttatgttttggctttctctaaaatctaatcagaaaatagtcaaattcaggcttgaagttcatctttattttttgacaaaattttctctattttacatatcacattttttcaaaattttaccaatgtatacattccaagtgtcaaacacataaaattaaagaaaacaaacataattctattccaaaaaagtgacaatgaagaaaaaaaaaattaaactctaaaaatgacacgaattataggccacggtttagaatcgtcgactctgagaggaacgcctctttaaaaggagtatca

SEQ ID NO: 200572 - DNA, 1192 bp, Cannabis indica
gaaatcggtgcccaggtgttgaaatgtcaacctgggcacccatagttatggatgggctcctctaggatattgttgatgaaatatcatgtccttgcattgttccttgatgtatttgaagaatcggggtccacgtatgtcactggaaacctagactctagccacggtgcgactagatcgactatatgtcaacttgggagcctgagtgacatttcaagtagactcatatccaatgtctaaaacttagctgaggcatgtctctcatgtattttcaaatagtggctaagcagattgctcatgagaagttgataggaaccaaaactgatgcgagatggcacacaaatgttaacctgtacgcacaacactgatgctagacctaagttgagccctgggatttccacgtggcatcctcatcttcatggttcatcattttagggtcaccaggacttgttcacttaaactttgtcaaatgatggcaactagaaacgtttttactggatcttagtgcctacatgggcacccactattgtcaactggctggggccaggattgttttcttcttgccacgtgtcaagattgttgttcatgtcatcaggtcaaatttttgggcaaacaaatataattaatgtattttccatgcacgtacatatattcatttcatatcaacaagtcaaaaataatgatatgttccattaaattatatgcttcttagtacttttattttaatccaactttgtcttgattaattttttttttatgaattagtcacgaaattcattactccaatcaaatatgaacaagctaaaagcacctaaagaatgggcctcaattccactatttaaatagataattattacttacaatgtatgttaactagataattattacttacaatgttccaaaccaaataatatctttatctttttgtcgtattttttttggcattacacatgatattctagttctcactactgtttattgtactaatctccctggatttgctgcctcatcattccatattttcccatttctgttcaaccatatcatgtatacaagggctgcaatggcagctgagtatacatttttcttgaacgtgcttgcttttgacctttctatctctgcaaggaagaagttttagtcttccatccaagccattcttttatcaactgtaaacactgctgtgagaaaatgtagt

SEQ ID NO: 200573 - DNA, 1744 bp, Cannabis indica
tatttattttttcttttttttaatatatgtgaggttccctatgaatgaggtatggaacagagcctcgaaaaataagttctagaattacaaatgaaacttcgagctcatgtaagtcataggctgttttcttttttatttcaataaatatatatatttatatattggacaagattatagtaggacttagcaatagcataaagtctctatggatggagaagttttttcggtcattaattttagattgttttgtcattatgacataaagtttatattcctacaatataactgcttgtatacaattaaaattttgtatatatataataataatataatatttaatgataaatttatttttttttaaaaaaataatattaataattacaacttttattaatttaaatttaaattattattattccttttaaaagttaatttgaattatttttatatgggtattcattttcttaaaaataattttacttataaattaatttctgtactaataattaattataacaaaattgattaatttataagtatttttgtcaccaatttatttatatgaatagttaattgtaataaatgaaactaaataacaagttttttcatgattatatttcagaataatttgctctaatatttttataaaattatacatatacatatttttatttgaaaatattttattgagttaaactaattttattgaaaaagatatacacatttgaataaatatgttttactcgaaattcggctactacttcggaaagtgacgcgtgtcagtctcagagaatatgaaccagcaaatatagaatgtacaaactattgattcacgtattatattattaaatacaaaaatggaataactcatcaaatgtagaattaatagagtatgtctataactcgctgactgcatagtcttaagcgagacaaggatgtacaaactattgattcacgtattgacgagaaaccatttcacgtctgaaggcataacttcaaggaggacatagacaatgcatagcgagacatccatctggtgatgtataagaggtattggcgatgatttacattatagtaactaagtgtaataacttgaaggacatgattgtccagtctgcaaggccttatggtcaaagagcatctcttaagtttgcccagtatactggtgctcttgccattgttggaatgcatgtaagctaagccattcgtccatgcccaaggcgagacgcctcagtaaggtacgtcctgtagcgtgttataatccacgtcaacactgaccccttaaaaacggtttaaatcatagttgtgtgatctttaaatattaactacatttatttacgtggagcataattaaagcctataattttggggaatattgttatgggatttgaacttaaatgtaattaactgtcaacctatattactataaatataggcagattataccgaaaaagggaaaaacttatagagaaaaagagaatacactaattgttaaaaactcttgttctgtatcagaaaaatctgaataagattgactcgtggactatgcagagttaacggcaaaaccatgtaaaaacctagtgttatttctgtttctcttattcttacttagatttcttataaattctgcgctaaacctattatgaaaataggcttataatcgttaacgaaaatctacgttaacaaaatatatatattatttttctcatttaaataaagtagacattattttttggggtttttt

SEQ ID NO: 200574 - DNA, 1131 bp, Cannabis indica
aattatattgaattttaagatctaactgcattggatcagatgataattttctaaatcaaattactaattggattggattggattgaatggaatgagaagaaaaatattaaattagatcgaataagatgaagaaaaatgttgaattagatcaaatatctaaccccactgtaaatataatacatagagaagaagaaactcattatatatgtaaattgcagcaatgaaagcatgtgagtttaatcacaatgatgatcattttatgaattgatagaccaaattaagagactagagaatcaatgcatcctcattcctcaatcaagttcagctttatcataacacttgaaataataatcgaatgtactattagtacaagattatggtagaacttaacataaatattctatcagtaagaaaaaaaaattgttaattttatatccaacgtttccagtcctatcaataaattgagatcattggaggacgtaatgggaattgaggcaattgatttctctaaggaagaatcaaaaaatgatctgggtgaagaacatgagattttatcttccaaagcgactaagagtttgttgaagagacaatttgaagctattgggttcttagagctaaccctccacttcaggttaggaaagaatattttagaaaaaattacgtggtggataaaattaggattctgaaacatgaaatttacataattcaattttgcactatggaaagtcgagataaggtgttgagtggaggataatagttttttgataaaagaaccctgattattagggattgggatttaaaaaatgttctatttgagaagaacaattcctgtttagattcacttggaaaatttggaacaattgtctctttcgtcacctcaagctctttctttgccttttggcattatcgagcaggaatttcttcaatcatataatatagttgttgaataaaagtgatataattataacaatacttagtgaggcaacaacatcataagttcatctgatcaagataaatgagacatttatataatatgaagggatgaaccattagaaagggtaaataacaagttctttaagagtttgcaactcattaacccacgtactcatgagtatattgaaagactaaggg

SEQ ID NO: 200575 - DNA, 1429 bp, Cannabis indica
gagagagagagagaacaaaaacttcacacgaatttgaaagagcattggaaaaggggaaagaaaggcatgaaggatgaacgtgcagaaaataggccagagaaaatttataaatgcaaactaatgaagaaaagtcaagtgttggcaacaaaagagacagaaatatgatctcacatatgatgcgtatcaacataagtcttctactaaacaaggttaatgttttaatattgtctccaagttcaggagcctggtgaacagagaagaggttccataaaaagcttccttccagaaaccaacctcgtagtattgatttattcctcagttggaagtataaacaagcaaaacagttctaaacacttcagattaataaacccacttcataaacttcaaaactcgaactacaaacatatactaaaaaccaagtcttttgctagcggtttttgactgatatggatatgatttgacaaaactatttaattataacaaagggcagaaaggatacacaagcatcaagatatggagggcaagaccttctgtcacaataggctagctgaatcgttttcacgaagaacgaagctaaccccatattcagactatcttaagacataaaagaaataaacaaggagaagagaaaaaagaggagccagatggtcccatccccatcttatattcctgaaaattagggctctaatggttgaaatattctccactccaatttcttagctcatctataattatcagtactctttgtccgtaataagagggccttataaaactgaaaaccccaaacagaaacaaaggatcactgtggctctactcctccatatattccagaaaaaccaaaggtttggttttactttctttccttaacttttttccccgagaaaaaatactatatttcgcgttgaatcaaacacaccaaccccataacaagctactaacccacccacaaaataaataataacgaaacagagaaacacccgaaaaacaattccatcgtaaaatccgatattccaaaatatatataaatatatacatcataatctcttttgcaattttctcaagaaagataaggcacagataatcgaagaaaaagaaagccaagcaattctaaaccagtcagaatacaaaataataattaaaaaaaaaaaaaaaactcatattcataagttcaaattcacagacgaatgaatttaaaagaaagaaaaagaaaatattcgaattctggttctactacctttcttcgtctgaattgagaaagaaagttttctttttttttttttattttgtctagactttagagagagaaagaagttcctttttagagagagaagcgaggagaagcaacgacgtgtatgaatgatcagaggctcaaactcttttatatgtcttcataattttcttttaattttttcctttcctttttaaaaaa

SEQ ID NO: 200576 - DNA, 540 bp, Cannabis indica
atatatatatatatatatatatatattattattttattaaaaattgtgtgcagcatacgtctgatgtacaaaaccaatgcaaaatttattcaatattgaatatgtaaaatacttagtttgtgtgtatgatcttgtttttttttttttttttttatgatctgtttagtgtgaaaaataacagacaataatatcaaatttttctctagtgattatccaaaaaagaaaaaaagtttaggtataggaaaaattattataatgttaataagaataccctattacactataaaatggtccaggagcttattagtaatttttaattggtgtaaaagcttataaatgtgtaattgtgtagttattataagattttgattgagaaaataaaactttagttcaattagagattaacactatctcgaagagtgtatttagagtttggtactgactccaaatatactctcagtgaaagtactaatgatacaatatcaattgtatcctgtttagagatggaaatttatactggggatgggtaaccgcgggacc

SEQ ID NO: 200577 - DNA, 942 bp, Cannabis indica
ttttgctattctttgacctttttctgcacatatgatattctaaagtccaaaatatttggtgacaagttaaccaacttgcttatcattatttgtaagaaaattaagtgttaacccaaaacaatatggggtttgttaatcaattaactgcataaatttaagtaggattgcttaggagtagagaagcactaaacattagtaacttgatataaagagattctcactcatgatctagagcttgtgctgctgtaatacgctttcgtggatcatatctgcataataatatgcagcaaatgtaaattactgtatgggattgcaaatcatcatatctgaatatcaattagtaataaataatatgaccaaaatgagattagaatcttcaaattttgtatgcaccataggtttcttttgttttataactgagcagattgaatttccctagcagtgtcacagaagaaactagatttatgtgatacatttgtacagatttatgtcattggtgttagctgttagagtcatgctactgtgagacatgcaaacatacatttcatatatgccaaaaagagcacattgaattcataacagtttttatatactttataatctttaaccaccgaataggttttataaagtgccttaaagacaaaattatatctgcgggtgatttgatgattttcatggaaattgccaaacgcaaagtcccacccaatacttgcgataaagatcaatcaggttctccaacattctcaaacatacactgtcctagttgtcaaatgccaagcaacaaagtgatgatggtaaccatattttcctcttatttttttttctctttaatgatggcacactatcatgaagaaacaagacggaaagaagaacaaggaatatacccccacagcaacaataataactaaataaaaagataacaaaagtaaagcctaaatttaa

SEQ ID NO: 200578 - DNA, 796 bp, Cannabis indica
atatatggagcaagttgtgtatgcatggtttataatattattcttctagacaaacattaggtagctacataataatcttgaatttgaccttcgaaatcgaggtcaaatgtcccccaaaattacaataattatatttattaaaaaaacccattatatttatatattttatgtcttaataatacaattttacaaaaaattacgtgcactcacaatcaatgatctgttagagaataatatgtcgtgcatatataaattgtcaccccaaaacaagggttatctttttttttccccttattttgtgtaaaaaatatatatatatatatttatatatgtatggtcatgacatttggcaaggacacatcataacacaacacaatataagttaggtcatgcatgtgggtcgaaatttctgattaattaattatgggttattaattttatcttttcattggataccttactatgcatggagaaatgtgaatgatttactggagttgatatagatttttcatcaaaagcatttaataagtttatttcgagataaggttttgtggggtctttaacgtacaattataaagaaatatatatatatggcaattgtaattaacaattgtactacacatgtctctaaaattgcacaaattattattaatttccatcccaacaataggaaaattatacattttaccatatatatcttttaactttaccttttggacatatatatagtaacccatttttaccttttgttaaaacaaataaaatcatcaagaatccaaggatatcaattatcatt

SEQ ID NO: 200579 - DNA, 1032 bp, Cannabis indica
gactaatgtcacatctacattcaatttcactctaatgatccatttattgctaataatttgcatgtcatctgttcttggaaataatgtctaggtttttacctttttgagtggccttattttttgtttccattgaagcatgccacttggggtctttaagagctgctttgactgattttggtttagaatgtaataaggattcatgcataggatgtttggtagcagtgtaggcttttggtttctttatgccactttgtgatctggttatcatggtatgggttgttatttgtatgtttgtgggtgatggagatgtatgtgggatgggtgacagggtagtttttgtgtttggggaagcatctatgagtatagttggtgtgggggaactgtgagatgctgaggaaatgtttgttgcaatatgtgagtggggctgtggttgtgtgttggttggaggaggttgggatggtagtacaaatgcaggttgaggttgtagttcaaatgtagatacatgttgagatggaaaaacatgtattggtggtataggttgaggttgggaaacctgtatggttggcattggcaattgggttacatgatgaggtggtatgatgggtgtaccatgcttagtgttcacagttgtaatagcatttggaaaagtaaaaacagaaccagaattagtgttacaagtgtaaaaagttgctatggaagaatgagacataagaatattagaatttatatttttttggtttacaatttatttttggttttggacatttcagtagttttatcttatgtcagtaattaaaataaaacctttgtatgttaatggtgcaagacacaacaacgttagccctttgttgcttttgccgttaattttaacggaagcaaattaaaaatttgcattggtgttttttagtaatttcaaaagggagacttcccactaaaccctagaagcatttcactgtccattttctaccctatttttcctttcaccaaacacttaacgggctaaggaaatcgcattggtctctctctctctct

SEQ ID NO: 200580 - DNA, 539 bp, Cannabis indica
tttttattttgttttatagaactaggttacattatttgagcactggctttcttttcttttttgtttatcagtgaagtaataagtgtggtgaaagtcccgagttcatacacatgatctgtaataggattctcttagggacaccaattcttcgaaacgaaattatgtggcattattgtaagccatcattttagtgtgtggcgagcgatactcaattcttgagtattttgttgtgtatgatgaattttgttctgtgatgatgatgtccttcatgtggttctttgtccttcaagttcatgttgatcataaagcttcttggtaatattgtttattgccttatttgcaaatatttacaggtcctgttgcagaagatatgtttcattggcaggcaacaatcatgggacctccagatagtccttatgctgggggtgttttcttggttactatccattttcctccagattatccctttaagcctcccaaggtaccattttatttgctatcttgtctatactaatttcagtaagttcttaatatcttgc

SEQ ID NO: 200581 - DNA, 2570 bp, Cannabis indica
tctgggttctgcttattcgattccgattttgtctcaacggtctatcagttttttacaatgactaagatccatgaagtcagaaagttaaattcataacttcacatttatcatttttacattggaaaactcactcggaagtgaagagttttgagtctctcattttcacaaaacaataatatcttcgagaactggtgaccaactttgctagaacaaagaaacatactaagtgattcaaagtatcacttaggcatcataaagtgcatcccctggatatttatttcacttacccaacatccaggttgacgtcatatgtcaacctgggagatgggatgtcaactcgggggctgggcccagaataacctttagtaaaatgaccataactcactcaatattgatctgattgatgcaattcaacttgcatttttaagataattcaatgatctaacaagtcatgtctcaaatttcaatcacaattcttaagttatcgactccaattttcacccccaatggagttacaaaaataagctccgacttacctagagcgagtcctgccgtctcgacccgaactccaaaaattaagtatcaacctcaaaagttaattttgaccattagatcatcatctatgatcaaaattagccaatttaaatttttttcatactttttcttattttcaaggacgtccttcacctataaaaggagagctcccttagtttatttttcatattcagataactacccacaaggttagagaaaatctctctagtttctctctataaaaattagagcttaaacacttatccatttttttataattcaatctcgtgagaatacaaactcaaagcatatgtagctccattaccatcacgacagttaactactataaattttgcatgtctctctaaattatatacgtacattcattattcatctcttttatttagctaggtattggccacttttcaatgtcaacagatgacacaaaataatgatgttgagaaaaatatgttttgaaatagcaaaatagtaattatttatttttgtaataaataatttagtatgtaattcgattgggagacaaagatgttgtcaagaaaagacaccatgttgttaggaaatgtcttctcagcttagtagaattagaatttgaaggacaactccctctatatttcatcttttatttgcagatgatagtcttttattcaccactgctgatagaaactcttgtttagctattaaagatgctctttctatctatcatagggcattaggtcaacttgttaactttttgaatctttaattttgttttcacctaatacaccttatgatatgaaatgttgtttctttaataatctaaatctatatgatagaccttttgttagtaaatatatagatttgtctcaatttattgtagaaataagaaggagcaatttcaatttcttgttaataaagtcaatccttatcctgatttctataacaataagtttttctctagagctaggaaataaattcttcttaaaattgtcattcaatctctgccttctaatgcgaggtcttgttttaaaattcctcttaatatttgttcaaaaattgaatctcttttgcctaacttttggtggggttatcttaatgaatgttttaaaattcaattgaagagatagtcagatttatgtcactctaaatattttagaaggataggatttacattttttattcattttagtcaagccatttttgctaaacaagcagtgagaatctataaaaatcctaattctttattgggtaaattgtttaaagctaagtactttgctcatacaatttttcttgaagctaggaaaggccattcttcctcctttgtttggcagagtcttatttggggaagggaactcttgagcaaaggattaattgtgaaaattagtttttgacctcacttttagccaacgacaatgagtccattaaagtgattataaataataaaaaataataattgagcaatatgaacacgaattggttatagtagttcgaccacatgatagtggtaaatggtaattttacttgtattaacttgtgagaaaaaaaaaagcaagaagtttttgatctttgtcgaaagcttttatagagattttagctgcgtaaatactctattgaatgaataattttcggatccatcaatagtgaaatgactccactatttataaaaaaaaattacatcatgttagttttccaaaataactaggaaataaatgggaaacttgtatatttttttgcatgtataaattccatgaaaataaggatttaattgataaataaaagagaaaaatatctctgaagatattccacccgcatttaccttggccagtgtatgtgggcttgcgacaagatcgacgttggtaggacggtgccatttactctgtttggatattccaagttatccttctaatcaattgtttacaaatgataaattattctagacagtacatcctggtgcgtattgcccatccaagtcatgaaatgttcctcatgtatcactcagataaatgccaagtcaccctgtgcaaattttgggataacat

SEQ ID NO: 200582 - DNA, 1867 bp, Cannabis indica
ttttcttaaaaatatttacgaacttattacaataaatggtatgataacgaaatgaaacaaaaaatattttaagtatttcaattaattttttaaatgaaaatccttcattaagcatcgatgttacattggaattgatcggtcggtcgtcacactacaagaaatgtcacttttaccagcacagttcgctactgcgctggtaaaagtaacttttaccagcgcatttcacaaactgcgctggcaaagagatcaaagttttaccagcgtacatttgcagtggctaaaatctaacttttaccagcacatttacgcgctaggaaaagtcttttttgccagcgcttttcattttatgctggcaaaagttctaatactaacattgatttgccaacccccttttaccaacacatcatatgtaaaatttattttaccagcgcaatactaacttttgccagcacaaaaatatgctggcaaaagtgacatttcttgtggtgtcataaccgaagtgataatcatatccacatagcattaactttagttaacagaacagatacatgaaccaaataattgatttccctaattagatggtattccatatttttttgctttctatattaatttatatagcaaaagcaaaactttgatttatatctttatttggtctcccaccttttagtatataatacggattgtttgttaatttaattaatataatttttattttctaaagcaaaaggtgcttttttcttaagcctcaaaatggaaattaatatgttagttgccttttcactttgcaataaaagataatgcaaaataagcatgtagaagatacaataattaatttattaagcacttatatgattaaattaaaataatgtaacagaatcttactttgagagaagtttgattcttaattaaaatatgtaaaaggataataattaatatacaaattaaagaaagctgaatcaataagctatataaagggttttcttccttcgattccaaagtgacatataaagaatattgctgtgtgattagtaatccactattaaattagttttggaatactctttcttctcttgaaagagttagttaggaagttagttaacgttgttagttagttgagtgtgttttttagtgttagttagctcgagttgtgagcttgactaaactgtataaatagtgccttgtaacctcatttcaattgaagtaaagagattaggagagtaagagagaaaactaagagagattgagtgagaaacagtgacggactcagaatttttattttgtggggacttatttatcattgaaaaatatttatacctatattataatcactcttattagatttatttaattttgtggaggcttttttactattttagcctataattatcaaattaaaaaaattacatttaatttttgaaaaggtaataatttttgttagtgggggctatagcccccacactaatacaagtgagtccgtcactggtgagaaagagagccaaagaagaacacttttgaagatgaagaaacatggcattcgtggtatctcgagcagctcaaccatagtggtttgagagttattttctctctctgcgattctaattttgtattactcttaattggtgtttgttaataaacctacatagtggagaaattttttaggggagagctgaagtaggactcacattgagatccgaaccaagataaattatttatctcatctctttatattttctctgttttgtgtttgatgatcatgttcatatcttgtttgttttaagttctggtttgattttttgtttgtgtgcattgttgtgtgtgttgagtttgtgttgtgagatttacaacatggtggaattgtatctta

SEQ ID NO: 200583 - DNA, 563 bp, Cannabis indica
tttcttaattttatttctagttttaaggtctaaatgtaaattgtaattaattagtattttctcacttgtgaataaaaagaagatatctttataaaacctgtcattttttttaaaaaatttctttatttatttatttattaaaaattaatggttgtttttacaatattatagtctgtaagtattatcatttacatttttattgtgttttaaaaattgaatcgtctttaataaaaaaattagcaatgaatataaaatttgttcgaaatttaacatatcattaattagttttttctcaaaatttataaacaaacaatttcaacaaaaaaacaatcattatagttgtcgttttctattgtgttttagtggattattattcatttttttaaaagtttgtcgttttcaatcaatttttctattattttgtttttttttatttgtaaatgtgtcgtttttccaaatttttcacttttttttattaattttttacgtatttctttttcttttcttagtacaaaaaaaattaatagttattatattatataaatttaatgtcttgtaaaaag

SEQ ID NO: 200584 - DNA, 1823 bp, Cannabis indica
gctaaaaatatgcgttaaaaattactcaccatttggcaatcgctaatgcatgtcgataaggcaacaactaccaccagccataaagataaaatgttgaaacacataataacaacaccattatttattatttttttagggtagaaaggcaactctacaagaacgaaaacactgaagaaatagagcaggcctcgtcacatccagcaggtttcttcttctagccaaagtgccttcttagccagatcatgggtagttgtatatcctgaccgactaatgtgacaaaattttacatttggaaggagtgaaagaagtgtcctctgctggaaaataagatctccaaacacacggcaacactcattagtgttactcaaagcatcagtaattgctttgcaatctgtttcaataaaatagatagggaagtcttcgttgcaaaaccattgaaggtgatgagtgcacatttgtacactcattcctagtcaattattaattaaattagtatttattttttatgttttgtataaatttgatgtgttttctatagtgtgcattattatgcataaagtgaagaaattatgataaattagaagtaagctctacatatgtgagcaaagtgccgaaatcaaggagcaaccaagtcgagaaacaagctgaattaggaaaaattggtgccatgcgtgcagggggtaggcgctatagcgcatgtctagagaaaaatattgcaaggaaaaaaaataatttcagcacgtggttatttcaggattttttctctcaggcgctatagcgcatggtgtaggcgttatagcacaacacctacctttttttaaaaaaaataaatcctaattctaaggagatttatctatctttactggcctatataaagaaagatgtatatcaaattgaaggacgactagagagagaaacaagcaactttgaaattaaaaaacacattgaagagcaaaagagaagagatttgaagcaatcatcatcaactttcatcattagagttcttttcttcttcttcttctttattcttttgtttagttatttaattatgaacatgattattgtggttattatgtttgtgattatgaactaaacactcattctagattgttggtggaactattttagattatgaatttaagtttttaaattattcccatatttattcttgttatttgtttatacaattttatgctaattatcatcttcttaatgattgatcaccattaattagtatagagattttaggttttacacttgagagaggtatctaaaatcgaacttagaattgcatgacacaggaaaagtgtgagattgagagatttcactaattctatgagtttcatttaaagagaatcatattgctttatgagtgcttaattgattaacattacaagagatatcttgttagttaatttaagttaaatctatcatcacgagagagaggttaatagattacattaggattcttgaaagttgaaactacaaattataagataaattagaataatcggtaaattgagattcatagtttgaaatagggaaatcaatgctctaggttttttactttctaattaaaaatcgttatttgtctgtttattttattatttggttcttaattataatttactttgtgttatctagtttaagtataaaattaaaaagtataataattagtaaaatttaataatcaatccctatggttcgacaacctttttagtattaaaactttgatataacaacgttgtactcttgtagtaaaaatttgtgtatcaagtttttggcaccgttgtcaaggaagaaaaagtcttaaattattgcta

SEQ ID NO: 200585 - DNA, 528 bp, Cannabis indica
actcaatatttttatatttgatctatctgggataatattgttcaataatatcatataggacaaaagaagaagaaactagtcaaatttaattttaattatactttcttttttgtttttgtgagagcgtatatatacatatatctatagatatagaaatataggtgcaactttaatgcaaggttaaaatatattaaatatattttgtatataattaaagttgcataaaatattatcttcaaaaaaaaaagtagcataaaatattcatactttaattatcaccattctgagtgctcatcacaagttttttccattcgtgtgttaacttttgtagggtcactatatatataatatacccaataattttttttttaataaagtgggattttttcctactactaattttatatttttcttctttattttaaattgtttgaaatgttattaggcagaaataaatagattttttttagtacaagaaactaatagattgaaacttctaattttattttttttatcggaaatagaatt

SEQ ID NO: 200586 - DNA, 854 bp, Cannabis indica
gatattcaatcctttttccttctttatgttactaatttgtaacttagttttgtttaagtacacaaaatatagtaccaaaaacactagcaccaataacatttgattaagatggacacaaagtttaaatagacattggctttgcacatgtcattcctctttttatttttgaaaaatcctcataaatagtgtgattaacacatatagtacatgcactttttcagaacatgatagatttcttataagacaaaaaaataaaaataaaaagtaggcattaagtacttttcttttgattccattaccattacctttatagtagagatataaataacatgtaaaagaagagaaacatcaaaaagaaaatctctaaggatcaaaattatgcatgcatagtaatgtcatatcaatcttgaatctaatggactgaaaaacacacacacatccatccatgcccacaggaaaagaaaataactatgcatcctcaattaaattcttttttttttctatttaaaaaaaaatattttttaactatcaagtctcattattgcttataaacacataataataatagagcaaaagtaaaaaggcaataatggaaaagggctatgtatataaatgggttagagaatggtaggcccatactattgctggcctggcctgaaattgtattgctaatttgggctacattttactaagcaatagctcttgtttttataaaggttaggtttatttataggttaatagcacacagtgctattaatctacaaaaaattcttccataaagaaagcaatgaaaggtaagtaaagaactttaatgacatatatatctttcatgtatacattcagtacctttcagc

SEQ ID NO: 200587 - DNA, 752 bp, Cannabis indica
tattgatatattcccttattctaaattatttactattatcctaaacttttacaagtacctgtcaataaaaggactgccataattttcaatatttttacaaagagaaagacatactttaaaattaaaaaaaaaaaaaaaaagtttaactttaatctttaaactaaataaaatattgcttctcttattattttatttatttactaattttaataagattttattcttcttttactattaataaaattaacttttaatcctttttttaaacaatttttcttatgccattgctactcatcataataaattttctttttatttcaaaaatttcaaaaacacattaaaacttattattttaatatttaaacaattatttcaaattaactaaataataatatatatttatttatatatatatatatatttttttttaaaaaaaaaacaatggtgtgtggagtgggtatactggtataggtcagtgacttgaaattaatatttaacaaactgtacggacttattgaaactcaaagaagatacagcatgaattagtgggctccacttctcataaaccgccacgtgtacttacatctcatggtgacgtggcatatatataaaataaatagatatatttatattttcaaaagaagaagaagaagaaattgttgttatatgccatagtcattactctcaccaaaattatattatgccattaaaatcccagctaaaaatatatgttgataagatattatttattt

SEQ ID NO: 200588 - DNA, 819 bp, Cannabis indica
atctctaaaattaaacatacattgcttgtcatcatctgttggcccgtcaccaagttcttcatctgattctaaattaaaatcaatattgttcaaacttttacaattgcctagctatttcattttccatgtcctcttcgaaaaattcatcatcccaattccacttgcgaataaagttgtgaagtacacaacatgctaatacaatccaaccatgttttttgatgattgatagaaaaagggaaagtccatacattaaaaataattaaaatatcatatcaattaattaaaataatttgaatttatttttggtatgtaattacacagtgtaattacacccaattctcatgggggtatgagaattggagagagtaattgaggcctcccaattacctctaattacacagttgatatgtaattacgtggccacacaaacacgtcaaacgcgccctaaaaaaattgatgtgacttggtccaaaagacttccatttcgaatgagtatttgtttctttgtaattagatcttttcattaattttaggagatctgctttttttattttttgaaaagaaagtcacttgtttatctttattatctacctaatgtaagaatttatagaaagtttagaaacatccatatactgttggagtattgactcgaatttactatggtttctattcagggtgtttaattttgggtaagttactatgtatgtttgggtaaccattgatttgtatgaagttactttttttgttcatctaagttgccttgtatgccaagttttacaatttgggtgagagaatgaaattattttagtatttgtaagt

SEQ ID NO: 200589 - DNA, 1181 bp, Cannabis indica
gtaaccaacttattttttaattgtaaattaattttatattcattacctatgaaatatcttgagtaataacgcttagcttaataattttcagaataattaattaataaaacaacaaattatataatgaaattatattaataccgccgttagtttcactatttattagaagaaaatatttacaaataaatgaaattctcacattcctctctctcagtctttgctgacttgtctacattatcattactcaatatgtacgttatatatactgaaaaattaataacataattgattattaatattagacatcagtaataatcactaatattaattgattattaattttagacattaaaacaggcaaaacaggaggaggtaatttttttaattttacctcaatttttttttatctattttacttatagatccactttttatatatttttttacgttaatattataattattaataaataaattaagaaaatgtacatattatattatatggaaatatattaatttaaagacattaagaaaatattaaaaaaaaatagactactacattaatattcattgaacattttagtttaggtaattgagaaatgtaaattacaacctcttattcaactttcacgtttgaaatcacatatcgaaatattttttttcaaatttttttatagcggtattcgttatagttacaatattatccctgtaagtttttgaaaaattccgaatagtttaccgtaccgaaaatagagttcatgatattccagtttaccaagcgcgttcaaaaaacttcaaatgtatttttgacaccgtaaattattcgaaatttttcaaaaatttacagggatgatgttgtaagcataacgaacactcccgttaaaaaaatattccgacatgtatttttgggcgtaaaagttaactaagaagttgtaacaggaggttgaccgtaacacttcttgtttgatacttattttgacgttataaataggataagaatcagcatatgtatctaactaaattaataatagtagtctgcaacatttacatagatgatatatacagctagcatgcgactggttatcattattaaagaaattatttatatttatatgtcagttcatgagttaattacataatactctattactttttatttctcatgcatgtgcgttttattt

SEQ ID NO: 200590 - DNA, 1297 bp, Cannabis indica
ttccattgatttgctaattgacgactgatttcatatgttttaggctgaggccgacactgacgaggtttttgctcaaatcactctgatgcctgatccaaacgtaagtttctaattgtggttctggatctttaaagattgaagggtcctttatttgggtctaaaatctaatcttttattctgtgattgtgttgattttaaatgacagcaaaatgataatgcattcgagaaggaaactcctcctcccccgcctccacggtttcaagtacattcattttgtaagacacttactgcttccgatacaagcactcatggtggattttcagtcctaaggcggcacgctgacgagtgtcttccccctttggttggttcatttgagcttgtttctttctttaattttctgttttattttctgttttggtgactaaatttacgagtctcgttttctcttgacaggacatgtctaggcagcctccaactcaggaactggttgccaaggatttgcatggcaacgagtggagatttcgccacatctttagaggtaataactgaagtattatatattatttactctgcttctgtgtctataatgtcttctcctttcgtttttttattgtctgctattggcttgtgttgctctcttgtataattgtcatataactacaatgtcaggtcaacctcggaggcacttgcttcaaagtggctggagtgtgtttgttagctcaaagaggcttgttgcaggggatgcctttatatttctcaggtcagttgatttttccttcaccttagaagggagtctttcttattttgtttttctaaaataggtttttgttattttgtgattgtctttaggggtgagaatggggagcttcgtgtaggtgttagacgggcgatgaggaagcaggaaaatgtcccttcatctgttatttcaagtcacagcatgcatcttggagtacttgcaactgcatggcatgccatttcaacaggaacaatgttcactgtctactacaagccaaggtttgctttgttatattttgctatgcctgatcttgtaagatgataaagtgaaggctttaacagaatgcaaacttgtgttagagttatgtattgctgcattgatgcttttattacatttacaagtgactattattgaataatttggcttgccttgattacaagaaaattgtttcttcatggcttattgggtgcaatccatgttaaaatagtgataaaatttgaaattttgattttttttttgttttgtatcatacaatgacttgttttctttttttttattcta

SEQ ID NO: 200591 - DNA, 1136 bp, Cannabis indica
taaattatacatcatatattggagttcctttttgacacttaaagctaaattttcttcattttttgagaggtacgaggtgtttacctcctctcttgtgagtgctgtctttgcttatgctttagcttttatatctttatgcaatgcaatgatctttgctattatgtttttgctttacagattgtgtgagagctgagcctgtaatctacaagaagctagaagctacttctaatgatgttgttctgttgagagcttatgtgggagaccgtcctacatggaggactcccctgcatccttggagagtagactcaaaattcaagctaaccggtgttccaactttgatcctttgggaaaatgacgccatcaagggtcgccttgaagaccatgaagcccacttggaaaacaaaatcgatgcccttcttgctgggaactaagttccaaactttgatgggttcaatccaacttattacattacattagactatctttcttttcttattgttggcttttacttctactgccagaaaacattaccatgttgtagcttatcagcatttgaagtattagtacttataataaatataaataaaacacaccttttctaaatggaattttgaactccccattctcatgagagtttgagcaagaagaaaaatatttgttccattatgattgaaagagttcaagttttaagaacattgcatgggaaagaggaatttgcaaaacatgggaatcttttataaccatattaagaaatatgagaattttgcagattaagttttatatgaatatatatttttctcgattagttttatgtatttggagaaaacaaatagacatgttagagaaagatctctacaaggcagagtatggtgtaaacattagtggtttaatggtcactattgcatatgaagtatgaggattagcattccattgctgtcatttcatttgaatatggttacaattatctacgttctcaatatgcctatgatgtagcaccggactggctgttaattagtgtatagagtatgttgaatgaaattttatgtatgctcaggtttggaaattcttccatttctgcaggtcgagtactggtctgtttctatgctgccgtatgagagatatattaggttcaatga

SEQ ID NO: 200592 - DNA, 1192 bp, Cannabis indica
ttttatatggtttgagtacttagcgagacttgttgaattgattgtactgaaattgtggaatgcgatagttttggtgaaatagtatttatcgatgtattgggtatggctgtttaatcatgttctaggtatttagacgtggttggaaactacacatgtatactgatgtggtaagtggagtagtgtacgcaagggtgcactggccatgggtactacgatcgagttaagaacgtaagacaatctagacttgtacgaaagctggggtgtgtgtgtgatattttttttttgtgtggctgcctctatttaagaaacatgatgagacttattgtatggttgatgtatatagttgtgctatgatgtgtgagtgcttgtacatgatatattttttttccttattgggctttacaactcacccttatttacttcccatgtgtagataagtaagcctataaattttcggtggcaagttcagtttgggcagcgtggggtgtatctcgtgagatcaagaaactgcgtgtggtcttggtcattttcctctgaaagtcactttaaaatttataaaacatatttgtggatgttttcttttagttttttgttgcatttacttaaatagtaacactttgatttcaatcgggtacctatattttgaaaattgttattttaaaataaaggtaatattagtactttgacacaagtttgtttatggtattttattttaatatccgtaaggagatatatcgggtaagctgtgcaattccacactgcctggggaaggtcaagtttgatgattctgagactgtgtaggtatgagactacaaagttaaagatggcttaaatggattgattggtactacttatatcaacaaggtgcatcttgttttcttattgtccatcatgaaataactctacaattaagtgtgcttggtctggggtaattttaggatgggtgacctcctaggaacttttcccaaaaagcgtgtgatgaggacaaagcacgccggaaacactcgtggtggtgtgtaggaccagtcgtcagtccaataagtagccagattgacgtagttgtgtataagagccatataaatccatgggggaaggcccaatggaggcataaagcgggggcattataaatagtatcaaagccttgacccaaccagaagtgttgtcgatgaggaagtcagaccccgtaaggggg

SEQ ID NO: 200593 - DNA, 2055 bp, Cannabis indica
atatggggcaatataatatgtatataatatacatatatatttagagtttttaatggttaaactttttcaattatcattttatttgtattttaaccttctaaattcaaacagtaaaaccctccaaattattaacttgtagtaaatttaaagtgtcatccggttaagtatcacgatagattacttatatatacacttttgtacacatgacacgtttatattgattaatagacctaatattattatttaaaaattatttttaaaaattattttaaaatcaaataaaattataaaaataaaaaatgaaatatttaaaaaaaataaaaactattattaattttgaaataatttttatattttttttaaaacaataatattaggcatatcaatataaatgtgacacatgtacaaaaatgtaagtctatattgacagttaactgtgtaaaaaagatgacaccttaaatttgctaccaatcagtaatttggagagttttaccgttaaaatttgaacttagataattaaatacaagtggaatgctaattgagatggttcaaccaaaaaaacttatatatttatatttattgtgcaatgatagttacgtggagaaacaacacttatttttgttgcatgattaagagcacaaaccgctctctagtggtttccatgcatattattagcctttttttcttttaaataatatttgggtttttcatcatcatcttggccattcctttgtcataaattgtacacatatatttgaaaatgacgaccactaatgcatgttgctcccaaattgtgtgtttcatcaaataacctagaagacgacaaataaaaaagaaaaatatataaatacatgtacaaattgtaaaagatagaaagaatctccacgccaagaatagctagagatccaccttgtttaagaaatattctctttcaaattgcccattaccactagaaatataccaaagaatatttacttattttttattaatacattaataattatattatgaggttttatatgtaaagaaataaaatttcagtaggtatagggtagaagtagaaatcccgtagaaaagtaaaaactagagacaaatcttattggagtgggataccatatcttcaatgtgatgaaagttatagtattgttattgggcaccactacacgtgttgccttacaatcggctagcgatactctctaaaaattattatattaaattatataagacctgatatatagttaacactacaaaatagatcatttttagtgacaattttttaattaaaaaaataaattttgtgactatatgtgacttttagtcacaacaaaaagctacttattattaaaacatagcatttagatataagttgtcactaatttagttttaatcacaagtattgtgactataaacacatttaattacaacaaattgtgatttttttttactaatacttttagttacggactttttagtcataaagtgggaatgataatttataattagtaacttttatacttttaatcacaaattttattgcgactaaaagtaaaaaaattgtagtgtaaaccaataacaatattagcacgtaaaaaaaatattagacactactattatattttagcatttttctaaaagttaatatggttaataaataaaaaaaatgttaatgattattacagaaacacaactcaagaaaaaaagtatctttttttaaaattatacatttctttattaattttgaaaagtattatatttatttttaataagagttcaaatatatatatttttcccattgcccattctatatgattaatctttacatgaatcattcgagcatatcatttttgacattatggaatgtatattgtccaacaatttgctccaataatttatatattgggtcccatttaaaaagagagaaaaagcaacaaaaaaaaaaagcatgtcatacatattaaattaggtagtcatatgatcatgaaactatgttgtaagagtcccgaacaagtgggactcatagtcaaactactagtgatgatttttggcattaattaa

SEQ ID NO: 200594 - DNA, 533 bp, Cannabis indica
ttcatgatcactcaggatttaggccgagcttacccgtacacgacacatgacacgaaaaatatgtgaaacacggacacaaacacgactcgaataaatttcgtgtcgtgtcaaaccctgaaaatctcgtgtcgtattggcgagttgtaagctaaattagtgtttttagtgttattgtgtcgtgttcgtgtcatgtggagttcttaaatttcttttacatggctgacatgaacataacccgtgacacaaaaaatttataaaacacgaacatgacccgaataattttcgtgtcatgtcgaacctgtaaaatttcgagtcatgtttgtgtcaaacccacaagtcgtaatctgaattgtcaccctaagacaaacattaagaaataaaaatgctttaaaataaaataaaaataaaaaatacgtttaatcatctgatgggtggtgtatttattctattgttctttaaatgtttaaagaacctctattttaaatgagctattgggaatgctcagttattattatgtatataaatgtgttcat

SEQ ID NO: 200595 - DNA, 703 bp, Cannabis indica
taaatacattaacgtgccaaataataatgttgttataatatgcatatgcatgtttctaacacatgcatacatgtattatatgagagctagcttccaaaaattgttaaatctaagtaatgtagtagcaatgtgggtaaggtaagcactaattaaagttaatttttggccccaacaatgcatgttggccaacacaaataattaatatacatgttatatatagcttagcaagtaaatataccttaagattttgagaatatatccaccactctgctcatgatatattaattttaccaagtttataatcatatacatattgtgtgataactcttttgtgataatgtttctcttggaataccccactactacttccactcatgatgtaaaagcctcctaattcttcatttctaatcaaaatctccaaattttggtatacatccattaaatcaaagtaaaaatatataattaataaatataaaagtgtttatactcatatatatatatatatatatataattaataacttttatccggctaaaatactcattattttaattttttataaatattgtatttttgtatttagatgtaaacatacaatttttttaattaaaacatcatttaaaatttaaaatattaacaaagtgtactagttgctagagggaaaaaaaagggcaaaagtaagtatagtttagaaacattacat

SEQ ID NO: 200596 - DNA, 584 bp, Cannabis indica
agagagagagaggtgggaatttcaattgggaggggtaattttggagccaaggaaaaaataaatttatattttactttagtttatttttttatatttagcctattaatgtatggatcattaatcaaatttctcatatatatatacatgttatgttatatatttaacaatttattaaattgaaaggagtgtgagaaagagaaaaacaaatatgaatatccacaaacaactaatattatacacaacctgccacttatgtatccttaattaataaatacaaactaatcaaatgataattacaacaaaacaacgcctaagataagggccatagacgataagacatgaatgaatagaccagaattaggccgttggccatttagagccgttgccgatgatgaagttcctctagttccagttccaaatcctcttccaccgccgccactaacaccaccgcttggaaatccactacctctcccgccggttccaaatcctgtacgaccattactgccagtactgccaccagcctctaccgccgccacttgtacctctactaccgccacttgcgccacctccttactgccggtgcc

SEQ ID NO: 200597 - DNA, 1828 bp, Cannabis indica
aaatatgaatatattataatatagaaatcctttgaaaattaagattcttttagtgcaatttaaaaaatatgaaaagaaaaacacaatgtaactattgaaattttactcaatttgagaaatgatagtttattttaaattaaaaaaaaaaaacaaaagacatttactaagctaggaggcgaaatggttcgaacacgagagaataaaaagagaatagaaagctaaaattaattatctaaattataattataattttatcattaaatttgtatctaaatgaccattttactatatgtttataaaaagaaacatttatttatttaatttaccatttttcatctcagcccaaaattttataagctgcaaggaatgtctaacaataaccaaccaactatttctattattacaatttactactatcatagacctcgttaggttgaatttgcgaaaacgacctgtgtaaaaccgctaaagttgtcgttttgttcaaattattattattgttatactgatcatagtcaaattctctgtgtaatatgttaagaaaaacatgagattgatccacagatgaagaccttctcaacacaaaacgacgtggcctcttgttttcacgacacacaggcgaaatcaaaggcatcatcatcactggctgtacacgacgtcgttcagttacgggatcttccacgtgcaaagacacgtgcgagtttatgatgattgggtaaacgagcgaacggcatagagggcagtcggggtgaaacgacaaccatttatcgatgcattgaacgtgaaacgcatgacgacaattgggcaagagccgaaccaagatcttctcctctaactcccctaagcacacggcgcactcgctctgttcgacccgaaactctacttgacccggttgaccaggtccggttgaataattgaggatcgggatcgccttcaattgcttctggtctaaccctcctttgggtcggccgattatgggtcctgaaccgtcaatcagttctctgatccgggttcgggtcagacagaaccgaaccactataaagtggtaaactacgatggctatggttgtggccactatgcccgtggctgaaataataagaggagtgaatacagtggttgagagattttcagaagaatgagagtgagactccattaataatgaaaattcattaatttttttaaactgatttatttatttttgaaattaaatgaaataaaattgggaacttggtttttatagaaggagaacaggcactagtcaaaactcaaggatctggaaattcgttccaataaatttggagcaagtgttgaatctttttcttggtaggttttgcttatgcgttgtgtggttttgcaattggcaagtggaaaattgagcttgatcagttcatatattacgctttattttattttttccaatgaagatttggaaaatccaactacctaccatatattagtttatagatttggttagtcatcatcgttttttttcttttgaaagatattatatgtatatatatgatgatgatttatggatatgtattgttattatcaaataaaacttttgtttatgtacgttgagtatttctaatgaaacaaaaacatcactttggtaatggtaataagataagtttaacatatacatatatatatattttttttttatatataagaaggaagttacttcctctatatttcctgaaaaaacgtcacttagcctagtggaagcttcctcatataaaatgacattttaaaaaataaaataatagtaaatttgagggtgtgtttgccatcaaggtgaatacagaaataatcataaaatatcttt

SEQ ID NO: 200598 - DNA, 837 bp, Cannabis indica
aaccggtttcgttctactataatgaactcagttatgggtaatctcatgagaaaaattattatcatagtataaccgaataggtgtagttgatagataacctaaatgcaaccaatcaaagcaatagaaagaaattaattcattttcattccatctatttaattacgttcaaccagaagcaacctttaatcatgctcaatactatattatgtattcaaaaagttccattctactaacttctaattattattttcagaataaaacttaaaaaagttgagattagaataagagacaaggcaattacgagtcactctcataaaatttgattggttttggtatgtgtagtttagtattatttttcttaaactacctaaactaagcaccaccaaggacatcatagttaaactaaagtgtaaaaaaagaaaagcacaaaaactataaactataagaaaaacaaaaggcactaaaacttgaaatgaatggctaattcttcactctttattttgatgatttaataatcaatatagtatataataaattattgattctgattctagtgtattcagttcaatctcgattcgacacatccttagcaggaccaccacttgagatgcctctagataatcttatgatgagttatgaccctttaatgaaaggagcttttgaagtctttaacttcacaaattttaagatataagaatccacaaaggattccctatgagtgcccaaaaagttagggtaggagagagaagaagaagaagaaaagaaaccaaaaccaaagctacaagttgaaaagaatttgatgaactagtaaacataagataacacttcatcacatat

SEQ ID NO: 200599 - DNA, 749 bp, Cannabis indica
ataattaataattaaattaattagtgtcgaaaatcaaaatagttagtataaaagaatatgtactattaactatttgaatctattatttaaaaaaattcagaaaaaaaaatatttaaatacattattctatataatgtatacattctcaatctcatataaaaaaaatatgtcctaaattatgaaatatcaaaagaaaaaaaacctacaataagaacaagaataatgttacaaattaattagtaaaaaattttcatatatataagtataagatttacctaatccagtacatatttcagtatccatttcttcttctgtctctcagatctttgttatatatatgtatattaatggtcttggatataaatttttgagtgagctttggtgtttatatatagatgattattgaagagtattttttttttttttaccaaaattccacattatttgacctttatttattatttttttcgaaaaaatcattaattttcattgactttgaacacttctacattttctaatttcaattgtatactgttatatcaatattggcgtccttatatatccgataacacgcaaggaattaattatgtatattaatatataataatttaatataaattattgtgttttgttacaatgtcattatacaaaatgaggtgagaaaattttaaattttttaaaaagaataaaagataaagtgaaaaaaaaaaaaacgataaatattttactctactttttttttagtttaa

SEQ ID NO: 200600 - DNA, 3254 bp, Cannabis indica
tttgcaatgctgaatggttaacagaatttgagggtgcagatattactattcttgattggtttgaatcagaccatagggcccttgtggtggatgttccaattaaacagttggatgatttgtgtggaccgactagaagaaggggtaggtttcactttgaggaagcttagtgtgaggagaaggagaatgtggacattgttgataagttttggtatgatggtatggaagtacactccatgggaaattttagggcaagggtgaataattgtgggacaactctccactgttggaataggaagaagaagaaggagaatgatgagagggtttctaaggtgcaacatttattgaatgaattgaaggtggcgcaaaatccaggcaattggctagctatcaaaaattctgagaaaacattgaatgggttgttggataaggatgagaagtactagcgtcaaaggcgtcgggcaatgtggctggatagtggagatcaaaatacgaggttttttcatcacaaggcatctgctcgtaaaaataaaaacgagattaaggggttgtttgatagtatgggagtttggcaaagtgatcgggtctggtgtagaagattattggggatttcagtactttattcacggctttagaggaacatgatgaagttatggatgcggtattggatgcagtgccgcatagagttacagctgagatgaatagcgagttcgtgtgaggttttacggaggaggaggtcacttcagcaatgaagcagatgaacccggctaaagcaccaggtaaagatgggcttcctattctttttatcaacggttttggtctaagattaaggataatgtgatttcggtgtgtttaaacattcttaataatgatgcttctgttgattgtataaatgatacggtaattacattaacccaaggtggataagcctaagaaggtggaggagttttggctaattagtttgtgtaatattatttgtaaaattgtttttaaatgtttggctaaccggttgaagtgttctctgggttctatcatttctacttctcagagtgcctttgttcatggtcgattaattcatgataatgctattgtggggtttgaagggttgcactgtatgaggaaaaatcggtttcggaatggaatgaaggttgcgctgaagcttgacatggcaaaggcgtatgatcgggtgcagtggaaatttttgaaggcaatgatgttgcgattaggttatgatggtgtgtgggtgaataagatcatggcttgtattacttcggtgagtttctcgtttatgcttaatggggaagtggtcggaaatgtgagtcctggccgtgggttgagacagagggatcccctctctccgttcttgtttcttttttgtgatgaggctttcatgagtttgattgtacatgcggagaatgcaggtaggttaaggggtcttaattttggccgacatgggttgacagtttcccatttattttttgcgggtgatagtcttgtgttttttgaagctaatgataaggaatgtgaggctttcaaggagatattggataattattgtaaagcttttgggcaattggttaatttccataaatctgaaatgtgctttgggaaggcggttcctcaagtaataagggatagattggctgcggtcatgggggtacgagtggttgagaattatgggaagtatttaggacttccctcgtttgttggtcgtacgaaaaaagagctcgttaatgtgatcaaaaacaaagtttggagcaaggttaggggatggaaggtgtctctattttcaatggctggaaatgaggttttaattaacgttatattgcaggcaatacctacttacactatgagttgttttcgtttgcctaagagtatcattaatagtcttcaccgaatggcggcgagattttagtggggttcgtctgagaacgctaataagatccactggtgcaaataatgctatctttgtagaccgaaggagaaggggggactgggatttcaggacttggggttgtttaataaagctttgttagctaagcagatttggcgttgtattagatttccggagtcgttatgtactcaagttcttaaagcaagttattttcctaatggggtggtgttggaggcaaagtgtggttctaatgcctcatttgtgtggaggagtttggtgtgggataaggagcttatcaaacaagggtatagatggcgcattggtgatggtagtaatgtgtgtgtgctttaggatctgtggttgtcgcggccagtgagtttcaagatctatgatacaccttttcttcctagccaaatgtatgttactaatctaaaatgggttgatggtacttgggattcaactttcattaaagctgtctttaatggtgatgatgcggagctcattttgggtattctgagtattggtgcgggggttgaggataaagtaatgtgacactatagtaagaatggtgagtattctgttcgcagtgggtatctgctggcgagtgatatgttggaaagagaggctcagttggacaataaaaagatgatggaatggtaacgtatgtggaaatgaaagattcctccgaaggtcaaacatttcatatggaagattagccattcctggattccaacgaaggtggcgcttgcgaatcgaggtatgcaaattgataaaaagtgttttcggtgtttcgagaattatgatgaggatgtttatcatgctttatggggttgtcggggtaacagggatgtgtggaggaagagtggggtatgggagcaaatgaaggtacataaaaatgttgatgttgtatcttttttgggggtgttggaagctgggttgtctgcagatggttttgatttgttcttgttgatatcatggcatctctggtccattcgaaactcggttcttcatggtggggtggctcctacaccgggtgatgtgttagaatggtgtggcaggtacatgaagaagttccgtgaggttgggccgcagaggaagctccaagagcagcgtgctacagctaagtggaatttgccggatgttagttgctgcactattaatgttgacgcgggtgttcgagagcctatgggggcatcaggtattggaattatggtccggaatgatggtggtaatgttcaatttgcatctagcaagtggtgtgctttgccgacttcaccgttagttgttgaactcgttgctattagggacggtctgatggtgggattacagcgaaggctgcttgtgttcggggtggagtccgatt

SEQ ID NO: 200601 - DNA, 774 bp, Cannabis indica
tggttcggttcaattggattggatgttggccacccctaaattgtactattaacaactcattcagttacaaagaacttattattcccaaccactaataaaaatttaatggcaagttattaaaaacaaaaaagaatcaacaacaaaataaaaatatatcatacgaattaaactaagacactcaaaactgttaaaaaaaataaaactaactgcaataacaaaaattgaattacaataaaacacaacttcaaccaaacaacctctatgttttaaaaaaaaaagtcggaaggcctaataacaaaaaaaaaaaaagacaaccacccagttaatttttaacattgatgaaatcattaagaatgactttttggcatatttgagtcctaaaatactttctccaagagttttttttttttgataaatatttccattagtcttattaaacaagacaaagtagaaacatgctcctatattattaaaggagtttcgtgaaaataattttccccattcacgttaaattttttctaagcctagaaaatgacgaaaaacaaaagttaagagataacaaagaatttcaacgaacacttacaatttggtataatgatattattctttgtgaaaggttcttatcggtaaattttattgtttttttttattttaaaataatttttatcaatatttaaataattaaataatttagacccacataattatactatgtggaatcgtggatggttcaatttgcaagataacaaataatttcaacgaacacttacaatt

SEQ ID NO: 200602 - DNA, 834 bp, Cannabis indica
tgacgtggtgtggcagaataagacgactacgacaacgaaagttgttctcttggcaagagtgacccttaatcaatggcaacatgctcaatcaaatagaatggggtcgttgtctcacacgatgaagtgggataataaacttgagcattggactaaatcagatgtgaataagattaagcttaatgtcgacaacttacttttcaaatcagaaggaaagtttggtgtgggagtagtagctcgtgatagttctgacactcttttggaaggcttttcaatgagttttcatgggcgggctgaggcttcttttgtggaggtcattggaatcaaagaggtcttaggttggatcgaaaggaaagggtggcttgatgttcagcttgagacaaattgcttagtggttgtttaagccgtgcatagtgccattcacatgccatatttatttagtcaagttgttcaggagtgtaggagtttgttagactttttgaagtctgttaattttatttttgttaaatatttaataaactaggggctcactatgttgctcgtgactcttatttctatttagatcatattttcattgagaactccgttcctactgatgttttatctattgttatagctgaagctatttgattgataaaattgtcattttttttttttcaaatatatatattgctatatattattttaatttaatattttttagttagtttaaattaaacactttctaaataaaaaaataataactattatgatttcgtttctaaataattttagtaaataatatattacaatattgattatcttcttaatttttttcgtctatatttctcaatttaa

SEQ ID NO: 200603 - DNA, 1075 bp, Cannabis indica
gattcactaccaactacaaatcaccacagacctcaatgtattcggcatacacctctcgagcaagttttagtcaaactctgagagcttcatattctgcttcattgttggaggccttgaacccaaatctgattcactactaaaaaccccaaattcccgtcagttttaaactgtcggccaaagaattccagacagtccataaaactgtcgcctatacgagcgttgtagatacagggtagaatagacaatggtttaaaaccgtcagaaaatagtataggccacggtttaaaccctcgcctatagtgaacactataggcgatagttttaaaccgtggcctatagtataggctacagtttaaaactgtggcataaagtataggccacaatttaaaactgtagcctatagttttataggcagggttttaaaccatcgctatagtaaagttttcagttcaattataaatttcatatttttttggcgacagtttttgcaagtcattgggttgcaaataaaaaagatgaaataaaaaaaaaatctagtttttttcactgcattaattaaattttactaatttatatattgtaactaatagttagcataaaggataaacataaattgaaaagggacaaaaactgaaatacatacaaactacgtactcaaacatacttaatcgttagttatctgaaagtaattggttataatgtaaagtataaaaaaaatagaaacggatcatcataatagcccttgtcacactgcgcgtgtttagacgaattcaatccactaatcacatagaagattcatctcatcatttgagtaggggatgatcttaccctacaaaaaaaaattacacatcttatcttaacatttaatttattttcttgaataaattcctagaacccataatatatatgtaacatggtttacaaaatatcatttttggtgggcaggtgtgacttcttttcctaaatgagaaaaccactaaatcattacacatccttacttgtactgtaaagaaaacaagctcattagcaaatagtaaacacactatcaaaggacccctaatttaatgaaagccaa

SEQ ID NO: 200604 - DNA, 1030 bp, Cannabis indica
aaacaattgggttccatcacctactttcttggatttgaagtgattcgagacgcaagctgcatctttctcaatcaacaaaaatacaccaaagatctccttacacgcaccaaaatgttagatgccaagcctcagtccacaccgatgtgtgccagctctaaactgtccatcaactcaggaactcccttaccaaatccgactgagtacagaagtgtaattggtgcccttcaatacctctgcaacaccagaccaaatatctcgtttgccgtaaatcgactaagtcaattcatgcaaaaacccacaacagaacactggggtgcctgtaaacgagtcctaagatatctcgctggaactatacaccttggcctggtttttactccttctacaaccctgcaactaacgggttacacggactcggactgggcagggtgccatgacgatcgtaagtccacttcaggctacggaatataccttggaaacaacttaatcagctggtgttctaagaaacaaatcgtagtagctcgaagtagcaccgaatctgaatatagggcacttactcttgctacatctgaactcatctggatacaatcacttctgcatgaaatccaaatcccacttccacagtgccctatactatggtgtgataaccttggtgctggatctttggcctccaatccggtcttccatgcccgaacgaaacatattgagatagaccttcattttgtcagagatcgagttcttgcaaagcagctggaagttcgttatgttgactctatcaatcagacagccgacatcttcaccaaacctttaccagtttccccgtctttctcaggaacaaggtaacacttggtgtacaccagtgtcacttgagggggaatattgtaaatacaaactgtcaagaacataacgaacttaacgaacataactaatcacgaaacagttttactgttgttctgttaagttcttgtacaactgtcattttctgttacaaagtttgttgtaaggtctctgaccaaaccatattataaataac

SEQ ID NO: 200605 - DNA, 563 bp, Cannabis indica
gatttaggaatttgatgaatttggttgagccaagatttaaagtttcttcctgatccacaattactagaaattgccttaatatctatttaactgagaagaaaagattgagagatttgttaactaagtatagccaacgtgtttgcctcaccactgatacatggacttcgtgtcaaaatttgcattatatgtatttgacagcccattttattgatgaatgatggaacttacataagaaaattctcaatttttgtattgttccagatactaaaggagaaactcttggtaaggctattgatcaatgtttgcatgattgggacatacgtagagtatttacaattacagttgataatgtttcttctaataatattagtgttgctcacatggttaagaaagctaataatagaggttatgcaatcttgaaaggtgattatatgtatgtaagatgtgttgtccatattttaaacttagttgtgagagatagattagctgaatatgaaggttgtataagtaagattcaggatgttatgagatatgtgagacggtcgtctttgagaatggccaag

SEQ ID NO: 200606 - DNA, 1710 bp, Cannabis indica
ttttaaaaaaaaaatgttaaaaacaatgaagattggagatgacttacagtgagttgtctaggactttggggccgtttattttgaatttttgcacgaaaacaaccctcctccatctctggccagtgctaggttcaaaaataaagaaagcaaaaaaatatcaattgaagcaacaaagagaaaaacggaatgggagtaataaaattaaataaaacatatcaatcttcaacaaaaatcaactaaaacaacaagaaaaatgggcggagtaataaaatacgcataccttgggaggatttttgaggaagaacaacaagaacaaaaggggcagtcggaatggggatgataaatcagggtttgagttttgaagagaaaagagggggaaatggggaatgagggtatgataggatatatataggggtattagcggcggatagtccgccgctaatagtaattaattttttttattaattagcggcggattgtgttcgctgctaataagcagcggattgtgtccgctgctaataagtccgccgctattgaacttatttgttgtagtgcctcgcccccgatctctaactaggtcgtgcaagagaaggagatactactaatattgaaaactaaggagaaaaagctgaaaacttgtgtgatggcatcgacgatgaccaaaaccctgaagacatggaagaggaggatgacgacgatggttatgtaaaagatggatattataaggatggttattattatgaccatgacccaaacctgcttcgagtgactaaagagttagaattacttagaaaaagtttgctgagcaagaaaaacttaatgaaaaaatgaagaaaatgatggctcgtctccaagacaagtttgaagatctggtagaatttgaggatgatccctcggtagaggttatggttgaagccaaggaatttacatgagcctactctgaaagaatatttgaaggggttaagcttcatgttgtacttttggaggatcttgaagcattcatctagatcctccacatgccctcaacctttttggatttgactagcatgtcatttacatacacctccatataccagagaagctaaaggaagtataatataaaatttgatttgccaatttctttgagttttgcatttgtattgtgttttgacatagattatatgtctgtataggatcaaaagaataaaggaggtatgccaccaagtaaaaaatctatatgtgtaatcactaaagaggaggaagagaagggagaaatagcttgctaaagaggctaggcagaggggcgaaggttcaagttgctagcctcgggattgattgtcatcaagaagtttgacatttgtttttacattaacctattgtaacagaaacttgttttagattacttttagatatttgttgtataggttccttttggtgatcttcttatcaatgcaccaaacacaaatagagcctttatttatattttgctcaaactgatcaattgtataggttccttttggtaatcttttgatcaatgtaccaaaatcacaaatagggtttcaacttatattttgctaatgctacaatattgtataggtgccttttcgtgatctttgatcaatgcactagcaaccaaatgaataaatattatattttgctaatgcttcaatgttcatatattaatcatttcatttaaaattttcaagtttttcattacgttctcatacaaca

SEQ ID NO: 200607 - DNA, 3395 bp, Cannabis indica
atatatcctaagactatcacgcagatcataataccaaaaagattacaatataacattagaatcagaaaatattcaaagaaaagaaaagcttcatgcaaccatggcaaaatcaactaaaacaagtaaatagcaggattagaaagcttacccactacaagaaacctttggtgaagaagatgggaagcttggatcgttaaaatgacgtgataattttgggagttgaagcaatgtgggcattgacctctagagagaaagagaagctttcaaaagttactgtttctagagagagaatggaatgtgaaaagtgaaggatggtttccctcccataagcttatatagcttctgtgggatccctttcttttacttgccatgcatgtacaactaaaaagcatacagaagagcaacgcagttaacttattgcacagagtaagatcagacagttaagaacaaacatttcaaaggctaaatatgctacaagattagcctggttaaggttacatcagtccaagctaaactggtaactccctattcacacaaacgtctgcacaaggacttagggagaaaatattatctcaatttttgcccacctgatgtgacatgtctacgtggccaacattagtaccacgtggcaatacaactcatcaacaagaaggctactcaacattctaatcaatgaggggtctgagtattcaagcgggatgatgaagtgatgaaccagccacccctggctggccctaaggccagcataggccagtcagcttttggtgatccaatggttggccaacatccatcctgtaggttcatgtctggccagcctttggcctaacatgattttggtgcgcagctttcacacgtgggcagcaagccagactatgaactgggccttaacagcccgcgaaaaatagagaaaaaatatttatttttgaggagaattttagtcatttttatttggtaaatttcatatgtaaataacaacttattttacctatttctaaagaatttgaagggtgtaagctctcctatataaaaagccttagtcaaaccctcaaacccaaaattctaagtcattaaggctcaaactccaagctctaagtctgataattcatctatttctcacacgcccactgctcttctcttacttgagatttgtcaactctaatttctacattgtaatccttacagagctacttcagatcctatcactatagtgatatgagtagtattatctcaagatatcaatacaaataaaaaggaagtaagtcattacccgctaactaaggggccaaacctctataaagtcaagtgtctatttactttattgttcttgttattaacatatgagaagcatcagtattaaatacgactctgctgtcgattggccaaatctgaggtcaacagtgtatattactaggttatgaaactattaatacagcctagtattttatgtaattaatttcaataaatttaatgcacataaaacatataggacaattcgaaataatcatgtttctaatatgagatacatgattatcaaaagcaaactgagtggaattttatgtatggaaattaaatatgcatgcactaacaattagcaaacaattaatcaaacattaaatgaaatgtgaaccaagtaaatattggatatttctacaataacaacctttgatataaaaaaaaataaactacactaagaataatctctctcgtacaaaattcttctttgttgtttcttgatgtagctttagacacttcacaccattctcctttgaccattagtccacagttaattcaccattgtgtaattagaagcattatttctgattacaaattaattttataaaattaatttcaaccccttatcttgtttcattaattataattaaataattaaatagttggaatttatttgattatttaaaaaataatttctgaaattaattattatatacaatatataacatatagttaggttttaaaaaattttaattaactaactataagacaagataaatgtgcatccaggttagtttaaaataatattctaaaatactttaaaaataagttataacaacctataactagtttttaggaaaaaaaatagttattttaatatataatgatataaatataaataattattctattgattgaaaaaatattaaagatttataataatttttcaaaaaaaatattttaatatatttttaaaaaatatcactaaccattttttttaaaaaagaatatttttatatggtatatataccctttatatataataaaatataatttgaaaaaaatatttctagatatctgtttatttaaaaaaaatgataaatatataccccaaaaataataaaattttattaggaattctttagggttttatgggccaaagctcatttaaaagtttgggaaccctatggcttcagttactacaaaatagtcgaagccataaggtgcaagatgccatttattattttttttttttgtgatgagagaaggctatggttttgcttttgttttttattattgaaaaaatttaaagctaaagcaaattattgtagtagtgctgaactgttaaaattgttgcaagaaattctatgtcgtacattctgctcattttttttaataatttgttgatgtagcactaatatgacattaatctggttcaaagtctaaataagaaaataaatgtacaaatagcaatctaataataaattatgagaaaatatatatgcatctttagaactaatatttatatttttaatatgaataaactagattttatgtaatttaaaattattatactgactcttatattacagctatatttataattcatgttcatataagtaaattattttaaaaagtgaataatataactaaataaaaatattggcaacaaaataaaaattaacaaaacaaatatctacaaaaatcgtagttcaatagaaaaaaaaattctctctctatatatatatacactagtggagagacacatacaaggtatgtgtatcccatttgaataaattttgaacataaaaatagtgcataataagtaataaacttttatgtattgctatttttttaattatttcaaaaaaaaattacagttgtacggaatttgaaataattttacagttttaaagaatttatttacataaagtctagttttttgattgtattttatgctatactattgttattttgttgtttgattttttggttattttatatattatttttttatgttgtttcgtatgttgtttgggataattattttccctattaattttcaatgtgtgtgtgtttttattattatttattaaacaccgttataaatgttaaaaaaaattttgttttactttttagaaaagtatttgttatataaaatc

SEQ ID NO: 200608 - DNA, 685 bp, Cannabis indica
tggaaaatagcttaaaattatgtggaaaaggtttgacaaagttggtagaccctcattgcaggtacacctatgtataagttggtgggaagatataaggggcttaaggaagttcttaaggctattaatagtgagggttttaatgaaatacacaagacttaaatgtgggcaaagcaagagatgctagctatctaggaagaattgaatagaaatccttgaaatagagaattaatggagaaggaacaaatggctcgagataggtatcctcattaacacgaagctcataatatgtttttagatcaaaagacaaagattgattgggttaaaaatggtgatgagaataatgccatattccatgcatctttgaaagcccgaagagctcaaaatagaattaattctatctgaagtgagagtgatatttagatagaaaaaccagaggaaatccaactaagtttttttttttttttgtgttattatcataacttgttagggacctttatgagcaacaaaagtaaggacttttaatcggtaatgattgttggacctttatttctaaaagagcatattcaaattgtacaacaacctttcactattcatgaagttaaagatactatattttccattcaaagtatgaaggctcctggccaggataggtttgggagttttttttatcatgataattgggatt

SEQ ID NO: 200609 - DNA, 1021 bp, Cannabis indica
gaaagtttataaaatattgtatatggttcaaactcgttaaatcagatgttattctttctgttttagtgtttaattcattaattacttagattttaagatctcttgatatattattttttaattgtattgcatgtttattggtttggtaaactgaatcgtaaatctttgattgtttccatttcgcaaaatgttcttgtatttttattttagcttatcatctaccaacaacattaaccttttaactttatcatgtcggtaaattaatgaggttatgctatatcatttaaaaaaaaaaaaaaccatattgtcattgcctcatttttttactactcttaacttaagtaatagtgtatattggtcatcatatttgactaacatggtaaatcgagacaataaataagtctctttttctagtatcgatctcatgtttcggtaagaggattgctattaggtaccaatgatgcctagcactttttcgacatgttgtgttgcgattggctagcgatacttcttaaaagttattatattaaattatatgggacccaatacctggttagaccaataacgatattgacacataagagggtgctaggcaccactgatgacctttagcatttctcttttggtaaataaatatcatatgttcccgaagtttattattaacacttttcttcaagagttgctcaagaaactatttttaagggagtatgaggaattccgggtgagatggatgctaattaaattgaaagagagaaatttaagtcttgttattattataattttaattaaaaataaggtcaattatatacataggaaattttttaaaaatatcaaaaaaaaaatataactaaaaaacctagaaatcaatcgggaccttaaatcaacctcaggacaattataaatcaactataaataaattataacataactagaaactaattacctcatgacacttataatagttaactataaataaactataaaccaactaaaaatagttattatttttactgaaatgtat

SEQ ID NO: 200610 - DNA, 1272 bp, Cannabis indica
ataaaaaataaataataaataatcagttcataactaaactacctctcgaacttgctctgcacattgaatagtatccaaactagcctgcaaaagaataattttaagaacaacatatcatttaaaaaagagaacatagtatttgtggaaaatacaacctgcaggcgatgaaccctctctgacaaactacgaacttcatctaaagccctcttctctgcattaactaacatttccttttcatgctttagaacagaaacctgttgggtaagacaaaatataatgtgagtacttctgaataacatcaatctacaaacattagtctaaaaccaatcacctccatgttcaacttcctcgacagctctgacgcagcattcacagattcagaattttcacgcaactttcgttgatagtcaattatcaactgtgaaaattccacattccttgctagaatgccattactttcagctctctgacataataagttgcaaaacaaaaatcagtttagacaaatattagggccaagttccacattcttcgtctataaacataataaagaaatccttgaacactaaagacagataacagcaagatagcgaaatacagatgtatgcatacatatacagatatagataagagagaaaaagagagagagattctaatttatagtcacctgatgctcaaattctttcatgaatcggtctagtctctcgcttgaaaaactcgcttccaaagcaaacttttcacgctctgagcgtatggatgcaatctcaatccttacaatacagaatcatgaataaagagaagaggtgtaataatgaataaagagaatataacatttaaaaatacaacagtaaatagaatgaatagagtaaacatgcattaatagggattaaaaaaatggtttgttttgattaaaaaaagatttataaacaaataagagcaaacatactgaccctaatcggaattagcatacttggattcaccctctttcagatcaaaagaaaagatttataaacaaataagcatatacagcacacacaagcacatctaaggccaagcctcaaagataaaataaaagaaataaaacaattaatctcaatccaaatcagtgttttatttaaggaaaaaaaataaaaatctaaaagagctagatggcaagttaggaacctaaataaagagcaggagggaaactatattcctaaatagggtcagatcacacataagacttgtttgtaatcccatgaagaccaactcccttctccttaacatcttctt

SEQ ID NO: 200611 - DNA, 667 bp, Cannabis indica
gttaaaggacagttccttgactcagaacccagactaccacggtaggaggactagcatatcacctttgacgcaccaaggaccttgctccaaaacccatttactagccgagccattatcaaaggaaaaacggaacgtgttggacccagaatgggcaccatcagttggttgcaccttaacccgtgatttccacaggtgtgagcaagtttgctcaacctactttgcaaaggctcttgaggagagaatttttccaaagaggaaaagcttagaaagcacttttgtagttaccacactaggggcaagagaaatggaaacctcatttaaagagaggcacctaccctgcttactactagccgaaccaactacctcttccatagtcataaatactcaaaacacccctatgaaacccaccaacaaacaacctcccaacaacccaaaaagccattgaccccttccaaaacaagaacagacaggaaaaaccaccaaggaaacaaaagtcaaatgacaaacccccccaactcaaaacaacgagagacaaactagaccgacaggatctcacaagtcaaaaacaaggggaccagataaaggacacaaagaaacaaaaagtaggaaaagaagaaaggttggactctgagagacaatagtagaagacatactctctctctctctc

SEQ ID NO: 200612 - DNA, 895 bp, Cannabis indica
gcctcccatacacacaaacacaccctttgaatccaaaccaatttatctacccataattggccgactgataattatacatttactctattttgtttggtttgatggtaataagttttatttttgctttgctatgaatgtctgatgcgattgtttatttggcttctgctgatgaaagtttctttcttgctctgttatgaatgtctgatgcgattgtttatattgcttcttctgaggaatgtttcttttttgctttgtcatgaatgtttatgtgtttgtttttctggcttctgctgataaaatacttatctatgttatttgcagggaaagaaagagtgctttgcatcatgcctctttgtttgttatgatttgctgcggcctgatgttgtccttgagcttgcctggctgaacaatatgatcgattttgccttcccatatctcttgcaggtttttgcccccacatcccctagaaaaaaaaaatggagctgttttcatttccatctccgcatgacttaaccatttaactttctgctatcctgtttttttcttttctagtttattcgagagtatacaagcaaagtggatgaactagtgaaggacaaaattgaagctcaaaatgaggtgaaagcaaaagagaatgaggagaaggaattggttgctcaacatgtatgattcccttgtcttttaaagcttttcttattctcttacttacttctacatctacctagcaagtatctttatttaggggatttaaattgttctgtctaattttcagaaaactaaaactaaacaatttataaattgtgctaagtgcctgacatttgcatgaacccaccaactagtaggttttggctactctgctggcgttttaggtctcatcataaacatatgattagta

SEQ ID NO: 200613 - DNA, 973 bp, Cannabis indica
atcaatggcactaagaaaaaacaacaattacaccaacaaggtcacaagccttcatcggttgaatatgctggccttgtctacaccaaagaagtgccctcaaagcaatataattcttattcatcatcatcatcatcaagaggaagagacatgaagaactcaactcaactccacacagcaacaaagtccatctacaaaaacgacaatggaaagacctcaacgacattcaaaaacacttaatttgtcttgtgatgagtttgttgatagaaggagtggtcgtttagggtttaaggaagaggttacttatagtcgtaaggataaatatgataataaaaatgatgggtatgttcatgagtatgaaactcaagtcaagttcaaacatgttgcttaccctaaagaaccttattatgccactaatatgatcacctatcatcatggtgatggtggttatgatcatgatgatgatcgtgatgattgatatcattagctctagggtttcttctatttatgttttaagcatgagatcttgatctctttgttgatgtagtgatctttgttttgtttagaagttataattattaatgttaatcatatgtgtgtttcaatagtttgattttgtgttttgtggtaattttttttcatttttttggaagcaatgaatataataaaataaagttctacacctaattaaccaataaattaaggggcttttggaatatatgaaagtgttttaaataatttgattaggaaatattaggatgaaaaatataaatataaatataattatattctcattaaatcttattgagtactggttaaattttcaaaacaaacaagtaatatttcacattttataccattcttactattaactcattttaaacggtccctaattattccaaaacaattttggaaatcctaccaaacaagttcttcgtataaaacaattttgaaaatcctaccaaacaagttcttc

SEQ ID NO: 200614 - DNA, 1854 bp, Cannabis indica
aaaaacccatttgcatttttatgataaacaacaatttgtggctgtaatctttagttttcttaattgatttgttttaataatgtaggtatttgggataaagaggcttgaattctgttgaataccttaaaagatttgtttctctttggataattggaagagggagatgctaaaatggctattataagattataaagctgtttcatggtttggttttgaatgaatggagaggctggagacttttacccagcaagataatcctggtccaactgatgtttcaggtatttgctttatgataaattaaaggttatatttattgatcaaacaatgattttatatcccaaataaatgtgaattatggaaatgaatgctcttgtttagctttcttttggtgtttgtgtgttctctagtatatagctcttatttatgttagcatgatatgattgatgtattccctctggatgttaaagggtttttcatattgtttgtggctgtacatttttgctgttatggcagaaaatgtatgcagtgagtgaattgaaatttaacatgttacatttgtaggatcagttgcgtgcctgtatgatctcttatgttcagaaacagaatgttggaagtaccacaatgatcaatcggcattttctggtactttgatcctcatagcaatttttattagacaatttctagtttttggttttcaaacttgttgtttcctcttttcagttagaataacaaagatcattcgttagttgaggtagaattcagagggtttatgttattgccataaataagtaacaaaattataaacatttgataaggttcatggggtggtatttgagtctgttcaagtctttgcagagttcgagtcgcaatataataaaagttctttaaaagactataccaaatgagttaagattctgaactaaatggaataacaggaaggatcaatcatttgataaaacctaacatttgctctcatttgggtgttttatcataatgatgatgtctccttatactcttcggaatgtatcatttaagaatgttaaaacaatctccggatcacttctgatttctatcatcctttacaggtacacaacaaaggatggaaaatttcttgcaacaagatggaaatcaactttgtgcagattgcggtaccccggatccaaaatgggtgtaagtttcatataattgatcttttgtgcctcttttaggctaaatagattactacttgatgacgggtttttattgtgctcccgttttcagtttacctgttgctttgagtatgtactgaattatgataagtgaaataatctaaatttgaattccatttgcattggttaaagtaaattatatctcaaaactaatataatttgcatttgagatattaaatgataatctgcatttgagatattaaatgataatttgcatttgagagtgaggcaaaaatagtgaaataatctgcatttgagagtatctcgaaattatttaatttatgttgcatgcatcctgaatagaaagtgataggtaatataatttttcacggagttgtgaggaagtgttgctaaacgtgttttgattaaacacgtttagcaactttactttttttttgttccacccctctgagtgatgagatattcttatagtatgataccaggaaaggttaaaaaggactaatgagaattgatatatctcaaaatttgtatattttctacttttttagatataggccaaatatcgtgacacttctattatatgcagaataagctagtatttcttatgagaaactgttaagtatggcgacattttttttctactaaaaaacaacatatattaaataaattaattacatgaagcctg

SEQ ID NO: 200615 - DNA, 662 bp, Cannabis indica
ttattttgttaaatgataatttacaccctatatttttataaatataacataattggactcttatctaaattctggtcaaacttttcttgaatataactaaaatgaccccaaattttcattttaagtaaattttttaaacatataattcataaaaataaatattcataaataaaaaaaagcaaataagtattatttctattctcttctcttttcgtcttcctcactgatttttcatcttccaaatgtaagttcacaaacaaccatcattgaagagaatgcttatgatcagagcaaaatttcattttacgttaagggagtcaaagaaacccaacaattagttttttgcaaacttattatatgtttttttccttgtatttcctttgttattttactaaaagctatgtatgatgttgtttttgttctttttttatttgaaaatttcctcccttttgtattgttagtacttttttcactgggtatggcaaaaatataattttgaaatattattagctttttatttctaagttttttttttttttttttttgtaagttgacagcttttgtgttttgcaatctctaagttttgatttttatttaataataatgtattacaaattaccctttgtgttgtattggtactttctttagtgggtgtggcaaaa

SEQ ID NO: 200616 - DNA, 625 bp, Cannabis indica
ataatatatggattaagtaattaagtaaaaatttcatcaaaaaaataaagtaaaaactattaaatttgtcacatgtattataaaattaccaaatgtatagataatgatcacaaaataagagttaaattcattaatttgataatcacataaatatgtaactttcatcacctttatcactcttaaattagtaaaaaaatattattaattatttaattatgaatgatagctattgaaaatatagttgataattaacgacttgattttatcatttataaaaagtataaatggttcaaaatcaagaaagagtggtttagaacattttggagaaaaattaaccaaaactgagaaaattggtcactagtaacaaattactatttttttaagcgtaccattgtgtgcatttttgaatgttgggagcatttctaaccacttcaaaaacctctagttgaacgacaaaatttaattattattattctttttgtatatgaatattcctttcagttaaaatttaaatgaaatatttgattataataataataataataataataataataataataataataataataataaatggtaatgagtcagtaaaaaaaagtaaattaaggagatattttct

SEQ ID NO: 200617 - DNA, 598 bp, Cannabis indica
tttgattggtcttgtagctactgagctcatttgggccttgtattttagccaaagcccaatgtattttggatgagtgggttatatttacagacttggttttgaaggattgtaattccatttgggtcgtaagaggcatttgggcctgtgcaattttttgccattataggcatcttcatgagttggtcagagctagacttgggtggagaaatcaccattgttggggatctaatatccgattgttgtggctcgtggtggacgaggaacacgaggagcccgagtagaatggggtgattgtgtctaaataggtgtacgagaggtttgggcatcaacgtcagagtgttgagatccatcaacgttggaggtcccattgacagtgccaactctggctcgcacctttaaagaaggagagaatcgaaagagacttaggatttttttgtttctaagcgtctgataccatattatgacaaaaaaggaaaccttttattaatgaattgtctaattaattaattaattacagtcaagccttactagacaattattttgggtataaccaattataataatatacttaatacatgttgtacttttttttctttgg

SEQ ID NO: 200618 - DNA, 1305 bp, Cannabis indica
acagtgactacgctggatgcatatacacttatgttttaacagctcaaggtggatgcattagttgaaaattactctacaaaaggtagtagccctatgatcaacgagagtatatatatggcagccactaaagccattaaagagaccatacgggtgaaaggtttaactaaagatgtttgcttcaactcggacaatatcacagtgtattttgcacttaatgaaataccccatgtttcatgagaggtcaaaacacattgacctcaagatacatttcatctgagacatcattggcagaaatgaggttcaaataagcaaagtaaacactaaagacaaccttacagacatgttcactaaaaggagttctcattagcaagcttaggcattgcctgagattgctaagcatttgtaacagcagcgcccttagggactcaatggaacaatcattaaactagttttggactcactaacttgtactaaaggtagatttgtggtgttagttaaaagtagttaaaagcagttttattcttttcagctagtgagctagccttggcttgatcttagactgctaaaggaatttggttatgacagttggcatctccaaatatcttggacaaaatctatatatattgtactagttgatctctttgatcactaaaaattctctctagataaattgtatagaccattaaactagacaattcgatcttgttttgtgatttcctagcaaaatcctcatttagttttctacactattgtagttctaagaattttatcaataaagatttaagccctaaggttgttcccctaggggaataaacaattgccactgtcatcaattttgatcgaagctcgttatagcttggtgtgatttgtttatttgtctgaattttatgtttatatttctttaattggtttatgatcttttcttgtttgtttttgaggtgaaactacatgtacaatctttttatgaaatttgtagacactccttattagtttttattgagaagaatgtgtgatatattcgtacatacggttttgtagtaatgcttaatggagagtttggtagtgagttttttattattttattagtttttttgttataatttaagaaaatttacaataatatatatatatattattaaactttattacattaaatgtataaaaaaaaacttatttataaaaaattatacattttcttaactatgagaaatatatttttatttttatatacaaattatatatatggtaacaaatttatatatactagtttaatacaataacgttattattaattgattatgttct

SEQ ID NO: 200619 - DNA, 712 bp, Cannabis indica
ttatatatatacacactcatatagctaagggggttggtgtgtgtttggtaagatatatactaaaagtcttaacttacatatatttctgagtaatcatatttgtttcttattataaatttattattaattatggattatatatttggtttggtggctcattttatatttagtaattaactcatagaaattgaaatccaaccaaaagtagactcacctaaaagctaggcttaagttttgggaaaaggaaaatgtccacatctaatggggttggtttattgaaattacacaattgcccattaccaaccacaaatcttgaaagaccaaaactttttgttattatatcatattttattttattttatttatttatataataataataaaaaagtactactctcctaacactcaccaacccctaaagtgacattgtgaggacattattccctcactcactcaaatctattttgtttatttttttctttaccaataattttccatcatgaagtatacactacttatttaatcattttggataggttggtgaggaaattttgaccacatatccctgctctggaacgttctagggttcttccttctggttcatccagtttcgtccccgtcgattcaccttccgccttctctacatccctcttctcttgcctcatttaattctttctgccttcctcactgtcatcattagcttctttaatta

SEQ ID NO: 200620 - DNA, 686 bp, Cannabis indica
actaaacatggcatgtccaactgattctcaagaattggagcacaagctacaagcagccgcagtgagagttttattttgaaaaaaacaaagatgctactggtagaccattctctattgctctccaagcaaaattttttacgttaggtggtaggtttaggccccaaaatccaccaggtttacattaagctagagcagtaagactcttcttttttagctaagaacaagccaacctataacccgattgtacagaatattctccttcattgtggtgccaaatccattcatccttagcattatgaaatgggataggaatggaaaggatataatcaatatcaataggtgaaaaatatgcttgcaatttatccgaattccaaactttatccactctgatataatcagagacttcgctagtatcacaaccagtgtatcgaagtgggagaaattcagtattttaaggaatctaagaatctgaaccacataaaatgttattactgtcgccaactttcatatgaagacctttcactaaaagctctcgactccaacatattcctttccaagttatggtatgatataccatgacaatcagcccccataaagttattattctgagaatacttgcccttgagaaactaactaagaagtgaatttgcgttttgaagatgcgccaagattgttaagcaagcatc

SEQ ID NO: 200621 - DNA, 2132 bp, Cannabis indica
tctgttaaagttaaagtagaatgcacatgtcattgatttactatcacactcatggcacgtttactaaaatataatcgtaatcggaataaattaatgagagaaatgaaagggaatcaaatttcatagaattagaattattattttcacatgttgtttactaagttgaccgaaaatagaaacataatcatttattttgtttacatcaatataaagaaaggtaatcagaatgttttaaattaatcatattacccttcatataaaatttacatttttcttctagttattaaataaattaaattatataaaaaaaataaattcgtgactttagggccatcagatgctagtggatcttcaagaagaaaagaggagttgatgataagtcgaaacttacaaagctagacttgtagcaaagagttatacccaaagagaatgtgtggactatgataacacttttagtccaatagtcatgctcaaatccatcagaatactcttatctatagtcgccgctcttgattatgaaagcttgacaaaacaatctatatggatcaaccagaagggttcaaggttctgggacaagaagggaaagtatgcaagctcaataggtccatttatggacttaagtaggcttctcattcttagaaccgtaggtttgatgagattatcaaaacttatggctttgaccaaaacattgatgaaccttgtttttaccaactcaaggagaatcaagtactggtagtattctcagtcttttatgtgtatgacatcttgatcattggaaacaatgtcaaaaggttgtcagatgtaaagaaatggataagcactcaattcgaaatgaaggatttaggtgaagctagctacgttctcgatattcaaattattagagacaagaagaacaaatcacttgctctcttgcaagcagcttacgtcgataaggtgctagatcacttctttatgacaaactcaaaaggggcacatttgccttctagacatggagtacatctatctaaagagcagtgtcctactactccaaaagagatagaagaaatgagaagaatctcttatgctttagcattaggaagtctaatgtatggagtgttgtgcactagaccagatatttgttatgcagtgggaatagtcagcaaatatcagtctaatccataaacattgaaaagtagtcaggcatattctcaaatacttgcaaagtaccaaaaactatatgttagctataagggtagagttttaaactctttaggctacacaggcttagatttttaggcttgtgtcgatgacaaaaagtctacatctgagataatgtgtactcgtggggtggagcagtaatttggaaaagcattaagtagtttgcactctctgattccaccatggaggctgaatacatatgtgtcactaaggatgcttaagaattagtctggctgaagaaattctatacagatcttggcgttattccaatcatggataagccactagtgttgttgtatgacaacactggggaaaccgccaatagtaaataactttgaagttacaagagaaaaaaatatatagaaaggaaataccatatcataagggactatgtagctagagcaaacatgatagtggagaaggttgacactaaagacaatctaattaatccattcactaagacaatgccagagactacattgagaaatatattaggaatataggattaattgaaatgtactcataattttatgttagtgtaagtgggagtttgttgggtttatgtcataaataaaaccatattttaatgtaatcttatttatctatcaataaaagaaaagtgatcattgtgattattgtctattgcatggttcacatatttatttcatgattaattgtttaatatataaattatgttaaatcatgaacatatagatatttacaattatagtgttgtcactatagtagaaaataattgtgattatatgctttaaactatttgagtctcataatttatcagtgtactgatttacattgatgtgataatcaccgatatgatttacttacacttggataagtggtatatctttcctaatgcattagtaaagtaatcaaggatcaaatgtataggtttgcatcggactggaccgatattg

SEQ ID NO: 200622 - DNA, 614 bp, Cannabis indica
aaaaaaatccactcttcatagacattcgaccaaagattattccacagtcatctatcaatgtttagtgaagaataaatcatcataactctctaattcaagttcacacactaaggcaaagaggtgaatcgatcttcatttgtcttctaataagattatctctcgttagaagatgaccatgtaaagcttgccaaagaataaaccaatgctttggggctcatagtttataccaaatagtcctcccaaaagaaacatgagttattctcactaccaaaaactgtttacttttagtgataactttttagtcacaacataattttttgtaattaaatgtgacttttagtcacaacaaaatattacttgtgactaaaacatctcttgaattgttcaagacacaagcctcttggattgcaccttgggagaatatcctcaaagtctgataagtttttttctaatagtaactcacgatctcttgcttaagctcataagaccacaaaatttggcctttcaagtaaatacaattcacccactttacccacaaaaaagcttgtttccattccatatcccaaaggtacttggcaagagtcgtctagttccattttgttggggtatcaatc

SEQ ID NO: 200623 - DNA, 667 bp, Cannabis indica
cccataacaactttagcaaccacttcatagaccacaaagctcaatgttccttatttatttataagaaagagagtttaggcttgagaaggtcaagagctttgtgtctcaacacctaaatataaaaaagacaattaatcaatatggattttttacaaaaaaaaaaaaaaaacaatgataactcttgacttgatcaccaaatccaaaatgctgcaaagaaaattacaattggccaattgaaatgcccactactaaaaagaaaaagtccaaaatatatccacaaagttaacctaaaaattaaagaatagacaaataaaaaaacaatccaatagaacaaacaactaaatataaaaattatacctctagatatcttgtgcaacccatcacgtccacaaactaattaacatacgaataatgtaacaaaagcctacaattctcaactccacacacaatcgttgcactcgaaaaatctttgagcaacgaatgatctcaaatacaaagaaggaagcaatattgatatgtacttcacaaattttgactacttgttcataggtggaagcttatattattttttgtaaattatttttttaagagaaatgctaaaagagtacctagtatatttataaggtgcaatattgatattggtataatattgggtcttacttatttt

SEQ ID NO: 200624 - DNA, 653 bp, Cannabis indica
caaaacaatattatcattaaattgatgcccaaatgtatgagattaataaaatggctaagtgggattgattgcattaaatttaaacataccgtgcctatgactgtatgcggtcgagaaaacctataaaaagcatctaaggcatctttagcagagttcaaaacattttttggctccgattcaagaggttgttcagcagcagcattaacaaggaatctgttattttttctatagtgaaagacagatgtctcagtacttttcgtgcaatgcttcaaggaacagggttggaatccagaacaacaatgtgtttctttaacattccagcctctaaactttgacacgcggtatgccccatatgaacctgtattctcaaaaacagatacgaagattatgatcactatggactttacaggtattcccataaacagacttttctttcaagggcaatggtaagaaacctttttaaaaagtgtatacaagttagtttattcatctgttacatttcagcacaaacatttttcaaccactctgctaagaaacctatatgagcagtaaacagaggaactcatcaaaatttagaagaaagagggtaaagaaaaaaggaacaaaaggacacatatatgacattctcttataaaagaaactaactacacaaa

SEQ ID NO: 200625 - DNA, 718 bp, Cannabis indica
gaatacataaattgcaagccttaagtttaaaattgagaaccaagattgttgacaaggttttgcaataaaaacatcttgctactagagtaagagacacaccgatgaatttggactaccaccatactttaaatcaaatgataattttttcgaataagacgccatttgatttaactatagaagtgtaaattaaatgaatggctaagaagagctcggtatgaaagaaatcacaaagagtttattatcaaaaagagctcgaaataactcactaaagagaaagaaaactcatcgaatgaagcctaaaaaagaaaatattgtatgaaagagttcaccaatgaggaaaaactatcacacgaattctaagaaagtataattaaatttaggattttttgtacaaatttaattatgattttttttttaattttatagaagcgtctttataaatatattttttgagctacacgcttgagattcgatcccataagtccctcaacacacacactcctagtatccactatgaccacttttatgcattttaagactttgttatgtgttgtttgttatgaattttatgatattttatcaagtttttattttcattgacgaggctaagtactcgattctgttttttcaaaactttgcacgtcgctttcacttctattacgagatgacaacacataagatttgagtctaacacagtttgcttgtcataaatgtataa

SEQ ID NO: 200626 - DNA, 2228 bp, Cannabis indica
aaggctttcttttccttttgtatttgatgtttccatagaatatttgccttaaaacccatattagttcaaaataaagcatacaaaaataaaatcccctcaaaaacagaacaaaatatcctctcctatcttatgtaatttattcagcagaaacaagaacttatcaacagtgaaactaaacaaaaaagacctattatatgaaagagaattgttcttgaaactggcaacagtgctgaactcgggctttacatcaccattccaccatcaattgtaaagacctaaaatgaaagaacacaaatacatatcaccttttccacacaaactatttttccttttggctacaagtaaaggattgtacctgtccagtaatataactagccgcggagttaagtgccaagaattctaccagtccagctacttcctcaggttgaccatatcgtcctgtgggagtgattaaaaccttaatcatatcttatttcgactgcagatagccagatacacacttcagtggtataattataaaaaaatgcaaatatttatttagctcacctaggggaatgctccccaagatctttttttctacgtcttctccaagttctgcagtcatatcagatgcaataaaaccaggagccacagcattgacctatgaaaaggaggattatttgctttgaggtatatcataatcaagaacaagaaacctcaaaatcaataaaatagaaatgatacctctcccaatacaatttataatataatcctagattacttacattaatgttcctgcttgcatattcttttgcaacagacttcgtgaaaccaatcacaccagcttttgcagcactgtagttcgcttgaccagcatttccaaccagaccaacaacagatgctatattcacaattcttccctgcaaaagaaaggacaatataatgaacttagggaatgcagaaagaagaaaaaaataaacacaaaattcaagacaaatcattctgagcgtaaagttaaacatctcatcttcagtcagttgcagtaaaacaagatacacactacacactacacactacatcctactaaactactgacatgaggtgccaaattgtcttaaaaagaaaagttatatgttgatgagctcccaaacgtacacatacaattaaactgagtgattttttttttggcctagaaattaaataattatagtgtttgttgttccaaattgttggcaaaatattctgcataaaaaaaatcttcactggcacaaataaatttcagacaaggcttacctctctttttcatcattattttagctgcagcctgttttagagaagaacgttagatggaataaacttcatggccacacataggaccaccattattttctttgggaaaaaaaatagaaaggaaagtacaataataaaaaattgttgcacacctgtgtgcaaagaaagacaccagtaagatttagatcaatcacatcttgccactggttttttttcattctcatcaataaaccgtccctagttattcctaaaaacaacttatacagcaagtcagctcaaactgaaaacaaaaaacaaaataaaaagtcgatagaaaagtgataattgcaaacctgcattattgatcaagacatcaactgttccccatgcatcaactgcctgtaaacattaaagtgagggtgagggtacctgcagatagatttttttttcccttttacagtaaagccaaaggaggtttacttacagttttgatcatcaactctacatcttcttcttttgagacatcaccaccaaaggtaagagcttgaccgccatgttcctcaatctagaaaacacagtcaagtttcagatactatctcacatgatcagtgttctggaagagctttcattcatatatgtatatcagaaatgaaatggaaaggaatgaagaaactgattgaacaaaagaatagtcaggactcaggactattactatcaaatgtcaaaatggcttttaacacacctccttggaaacttcttcagcctcctttgatgacctcgcataatttacaagtacctgtaacagtaatagaagcttataatcactaacaagttaaagttaaaacagagaatgttcgattaccgtacataacaaagtaagattaggagcatgcattagaaaatttacaaggtttatataatggacatatcttataaggaagtttagaccctagagcatgtatttactcaatagatcctat

SEQ ID NO: 200627 - DNA, 830 bp, Cannabis indica
aatctcattcattttatactaaattctaatttgagctttggaatcattctaaaagcttcgttaaaacacaagttatgagtgtttgaagttgagtagtgaaatttggaattttctaggcaaattgagttatttgaatgttgagcatttttggactaagttttaacaagacaaaaatctgaactttttggatatagtttcaatatatgtaaagatcactgtaattttttaaatttaaatttctcttagaaacgaagttataaattttttgttagaaaatcctaataattagatttttacttactggcggttttaaactagtaacttggaaacactataactcaagactttaaaatgaaattttacatgcaaaatctcagttatttcccaatggttttagcaaaaatgattcaatattgaagttttggtaagatccatacctttgaatttagatgcacatttgaataataagatatgacttttgaatctgaatattgaaatatttagacggtttgttttcttacatctgaatgtattttttttttatattttttaacaatatttttaattgtataatattaataaatttattaaagtatatatacttttaaaatattttcaattattaaaatataaaatataatttatttaaatttaaaactaataatatgtgataggatgaacttattaggttttttttacatttataaaagatgaatattatcattttattactattatatctattaaatataaataaaaaagttagaaaaaaagacattcttataattctataagtttacacatacattataggggcttttttattttta

SEQ ID NO: 200628 - DNA, 740 bp, Cannabis indica
catatttctggcacactttctaaattgtgattctttgcaccacatcttgaaatttaattatgatacagtatatgcatccttgcttcattttagttctctttgggggcactagttcatcaagctcaagttttttatttttttaatctacatggttaaactttggacataagcttcaccattctaaccttaccactcttaggccactgaccttgattcctaattgggaatatttaatgtctataagccttaataaaaatactcctttgcataccatttacttacataactctatggttctccatgctttttccatatgtcagctactacatgattgcatggaattccaatgaaatctcactttttacaagagcatttcatcttcttcaagtctacataatacaagcttccatacatggtttgaatttggtaaacaaagtctaaagacttcagtgggatatggccactacttatgtccttgttcttcttaagaatttcttctatctttggagcaatgttcggttctcacatgtacatcgaatgcctattcatttgttgcctttggagtagataaattctaatcctttctaacacggacaatattggtcagtctcttggtgataatattgctgatcaccatgaaatgtttcacacaagttattcaaaagaatgttatgcttactccaatgttgaggccttgcttccattaactagtcataggcatcctgatcgatcttctttac

SEQ ID NO: 200629 - DNA, 1608 bp, Cannabis indica
cccaattaagaagagaagttttgaatgtaatgacttgaatttgaatatgattatttggtgtcttactcggttgtattggattttactgatgtctagtgcagattgagggattccagggaacctttgcttgagaaggagtaaaatagtctcagctctctcttcaaaaagttctcttttttctaaactaacagctgaaccccaagctgatttcccatctttttggttcatttttttccaaatcacaatggaagcttcaattctgttcttaaggtctaaaatcttgtgttcagaggataagtctagagtggtaagaaattggtcagggtcaaagaactcaactgtaatacttctataaattgaatctcctaaacttgctcttccattctaaacacattagaacaaaaaaagggttagacaaagaaagaaagaataaaaggaaaaacttttgttgtgtaattattatttaccttggggagggattcaatgtagttatctgggatttccatttctgacaaagtttgagcatttatggccattgctgctttaagcacttggtttacacaatctttctgatactgcaaaaactttcttgacatttctgatagaccatcttcaggaactttaggagcaggtaaccaccatttatcatcttttctctttgcatttcctttctctgagtctggtgcatcttttgacacataagagaattcattttggtccttgaagttatcaagacaatcctgttttcatttcattatatatacataatttcattagagaatgaataacactcatatatttgtatttggtcaaatgttgtgttcttacaatgagcatggcatcaagtttgcgaagagcaggaatgttcatgtgaagatcagtccgttgccttgtcaccataatcttttagaaatcaaaacacacaataataaacactcatcaaaatctgatatgaaacatagagaaataatttgtgtttaatttaatttatttgattacctccatacttattccatctttggatttctgttgtgaagggacaaattcaacaatgtaatcagtaaccgataagagccaatctatttcttttctccacctggcttttctttctgctgacattggctctaaacgccattgttcaccaaaaacagaggctgcatttcatatccatcaaaaatcaacaataaccaatcatatataatagcaaaatgacttggttttggtatatagattatagttatatttttggaaatacgaaaaaataggaaaaagaaaaaaatcacctgcaaggtttgtaatggcatttgataatgctaaagctgaagaaacaccctttccaccaccagacatatcttcacccaaaagcaatttagcaaacctttccttcatttgttccatatctggatccaaaaaacacaccacaaaataaaataaaataaaaaagaaatacaacttttaaattaaccaaatttttatgtactgacaaattcaaccacattctttaattttccaaccaataaaaacaaacataaagtattgagttgtcaatcaaacaattagaataaatacaattctaagagacagctaacatataattattattattat

SEQ ID NO: 200630 - DNA, 1645 bp, Cannabis indica
tattaacaacccattgagtcatagaaaacttgttgtttccaaccactaataccgatttgatggcgagtcacatcgaaaaataaagaagaaccaacaagaaaataaaatcatgtcatatacatataaaattaaaacacacaaaactatatcacaataacaagattattcgtaatatcaaaattgaattgcaatagcaaaatacaactctaaccaagctgcacatatatccaaaaaaagtcaacgaccaggactggttagaaaaaaaagataatttcctgtaattataaatttaagaactatatatcctaattaaatacttaaaagaaattctataatttgaaataatattaataactatattttattatatattacagatggaagttttaggctaggtattgccaaattgccaataattaattaaattcattgtcttttcatatgttttgtttttatacctaacctaaactacaccatttataatattacatgataaacatttatttccatttactttgtctattaattattaacaatgtattaaataatcatatataaatgtatatggttacttctgtaaatatatttatgtaccccttttgccattataattgtttattatttaatttcattatttttttctgactctggctactttggatactagtattagattctgtcaatctttgtactttttattagagaaaataaggctagttagagtatgaataaaatttcccaaaaatagcattgtttcaataattgaaaattatgaaattaaactccttaacttattactagaatatatctcactatttatatacataatatatatagagataatagaaataagaaattatattttatagtattagaatattattctaattatagaatgatttttctcactatattggtggaataattattccatgcaatatagaaaaaaaaaaaattatcaatttattgtgtgccttttaaattttattaattttatgcttattttttattcttattcttagtagtggactcaaaaattttgttcaagtggggcaaaaaaattagaagtgtaaaatataaaaattaagatataatgaaaattcattcatgtaaaaaataacataatgtacaaggaaaatataaaaaagagagcataaacataaaaatatttacaaaattaaaatgtaaatgtaaaaaaatatgttatgaaatggactaaaatgtaaaaaaatatgaaaaaaagaaaatttgcatccataaaaactgttagtgcgaatgcataatcattactaacatttaaaatattaacattatcaaaataatcagaaatatttgctgagttaggactagaattagcatttgaattatgtccattatttttcctctaaggacaatctcttctgaagtgtccttaattacaggtccagcaagcttttctaccccttgacttcgatcttgattttcctcttccctttccacctttggagttgttttttttatctgatatgcctctcacatttagtcattctgcagggttcttagacaattttcgattgtctttcaaatctagttccttggagtatgcaactccaataacttcttccagggacaatgtttctctaccatatttgagtgtatctctcaa

SEQ ID NO: 200631 - DNA, 551 bp, Cannabis indica
agattgatcgtcatttgacatccttgaaacataaataaaaagatcaggcaagaaaacactgataaaaagaacaagaaaggaaagcatagagctgaacaaggcaccaactctggttcaagagttcatcggagaagagaatagaaacacgacaaatagggcggagaagaatcaagatttgggaaaagcttttctttcccgctctgataccatattgtagattagaaatgaaaacaagagaaacattttattgagtaatcgaataaataaattacagagtaaaaccaaccatatataggttgtgacccaaaactaactaaaccgacttaattaattaattagttaataataagaataaaaaggagacaaaacaaacatcatcataactaagtaactcctgagagtagggacaaacaatgaccaaaataacataaccaattcttgtaacaatatgaaattatattaaaaaataaaaataaattatacatgattcaaaataattatgaaaataaaattaaaatagagtattataatttatcaaataatattaaaaa

SEQ ID NO: 200632 - DNA, 1523 bp, Cannabis indica
taatttcaatggaaaagcaaaaataacatactgtttcaagatcttcttcagaagccgagtatagggcaatgtcaaacactacatgtgagattgtttggcttttatttgttttgaagcagcttaaagttgaacatgaggggcctgttcttatattgtgacgacaaatctgcacaacacatagctgacaattcagtgtttcatgaaagaacaaaacttattgagattgattgtcacttggtgaggaaaaaagttcaagaaaggattgtgaaaacaattcatgtttcaaccaaagaccaacttgttgatatactaactaaaccattatttcccactcaattcaaggcctttaaagacaagatgggacttagagatacctatggtccatcttaagggggagtatcaaagatgttgtttgtctacattggctattagattttagtttgttagtcttagctgtcatttcagttagttagtttcagttgtgtttgttatgattgtaactaattttctatagctatattaagcttgcttcctcttgtatcaattgaatgttaattcaatctcaataaagttttcttgttcaaatttttttctctgctgtctaagctgataagactaaatatcatcttaactaaataatacatcatacaataaaaatatattaaaatatataacaataattaaatgtgtagcatgctaagtaatatatatatatatatatattatgttagcaaaattatatattaatattatacataataaaataaaaaataaataaatattattttaatatactactataccgtataacaaaaattatataacatacaacaaaatatatattattttcataaaaaaattgacataactttcaaataaaaataattttaacaaaatttttaaactaacatagatgtacttaggtgatatgcttctaaatctaaaatatattatatgtattatataattgtgtttgccaggtcaaaaaaatataaactagtcaaaaagaaaatgggaaatatgaaaattgtgtgtagcaaaagataatttaggtaatcaataatatcaaaggttcatttccccactaattttaagatgaggacatttagctccattattccatgtttttggccatttagtataatttctcatggctattctcaaacgtagaagccgggaatgagcgctcagacattaatacatgcaaacataatgtcaaagtgttactaacagaacagaagaataattggaggacctcgattaaatcactgggcagttccactgcatcatctccggtaacattaccttgttccaagaatctcatttgtttcatcatcaatactaaaatcatcagtgttgatttggttcctttttgcaccatcattagacccacttacgtttggacaaagaacttctgaaaatgattctccagctgcatcacaagtgctcaacaatctctcaaaagtatccacactaaaaacctcactagtccttagtaatcttatgatttcttccattccttc

SEQ ID NO: 200633 - DNA, 1815 bp, Cannabis indica
tttaatctaattttttatataatatttctttgttgggttttgttttgttttgttttacactgagttattcattttagtaattgagttcttgaatttgtaatctctttctcattattatcttatttttatcatcatcttcttcttcttccttatgcataaaagttattgcattttctttgttgggttttagtttgttttattttacactgagttattcatttaagtaattaaattttgtgtgtttgtcttttcatttctttcgggtttaggttgataaactccaaagcaaggataatgaagaaatagttagagtaaaagggcttgaaagccaacttggcaaaatagccaaatatgtggttgcattttaaacccctcttttgactatctcatgtgttaaacaatttattatacaatgtaagtattcttacattaatataataatacaaattataatcatacgtactacactgattagtgtcttactagtagtaattgagatgtatcattccataattatttggtatacttgttgtggtattttaacacagtagtatacgtatcgttttgacaaataatacttaggtgatattgttcccacgaggatatagctaagtaccaatcaatcaaatccttgtttctatttcacggcggttgtttaaaaaattttaaattatataaataaaataaatcataacttttatatagtgacaactaaataataaattgtaccaaattttaatctaattttttatataattttgtatgaaaaattaggtgtgtacaaatggaccgatccaacacatatttaccaaatctcattattataatggaagccaaacacgacctgtataacataatattagacttgacccctagaattgtaataaacattgataataatagtaataataataacatgtgatagtaaatgtatagtgtgttttttttttaaaaaattattaatttgtagataaaataataaaaaatgggagaattaaggaaagaagaaaaaaagaattttagaaaattttataatatttaatctatcaaaaaatttattaatcttattttataatttttactttataatgattctccaagtcaatctaatatatggttacaaaactcttttcatttaatataaaaaaattaatatttaaataaaagtatgtgagtgctcttataattaaatagtaaaggctaattagaatttttaccccttaaactttgacatgtaccaaatcatgccctctgaacttttaaggtcgttaaaaatgccccccgaactatagagattgttggatttaagaattttttttccaattttagtaaaaaagtctaacatggataaaaattcagggggcataatttaatacatgtcaaagttcgataagcataatttggtagatatcaaagtctgaagagaatgatttagtacataaacaatcattgaaatagtaaaattgaacgaaattagacaaaagtccttaaatccaacaatctcaatagttcagggggtatttttaacaaccttataagttcagggggcaatatttagtacatgtcaaagttcagggggcaaaaatcctaattagccaatagtaaaaggatttttttgtaattaaagaaaggttaaggatatttttgtaatttaatattagaaggccaaaataagcattctcacttttatataagttatagatatacatattatatataggcacattttacttattatgtcactccctctttagtctttatgtgtataaaaatacacacgcaggcggacccaatgctgaaaaaaaatatttcttt

SEQ ID NO: 200634 - DNA, 937 bp, Cannabis indica
tccatgtttatcggaatattcaattgagagagagagaggccttgattagaagtgtgaaaagagttttgacaaggcacccccaagtaaaatggagtttcatatccgaggaaacaaatcttaatcatgtgtactcacaaaacaaagattttaaagcagaattataaagaaaacgccatttaaaactttgacttcaaatttttaagcaaatacaacatgaatcatgtccaaacaactatcaccactacctcatatgtatttgttcaccatgccaatgttttcactaatggactaaaatacacaactatcatttaattagaaaaaacacaaatttgaaatagaaaaatacctcggatgacgacacatcatgagtctcaactcgtccatgccgttcaacagaacctcttgaagcctacaaatcacaaatacagaatgccatcaatcactttgaagactgatctatctgcataaagaacatagatagaaaacgatttgtcaaccacaaaatactcacggtaacacttagttcagaagcattaggatgcccgttgtctgatattgatgcccgtgggggagaaccttcctcagatccttctcgtactggagaaggcggccgagggggagccacatagacaactcttaatttacactcttctacttgatgcccagattccttattgaactgaaaaaggaaaaacaaaacaaaaagcataagcaaaacgcactggcattacttatatcactttgctaacataataaacttgttaaatttcaaagaatacttaatataaataccatctccggagtaacatctttggcagaagcccctgggctagctacaacgctctgaagcaagaacttgtccttgcattgcatatctaggggcatttccttctgtgcttgcattgttactaaaaacccatttgagaatttaaaaaaa

SEQ ID NO: 200635 - DNA, 1074 bp, Cannabis indica
ttgtattaattaattaataagtgattaaggcatattatagttaaaaaataaaaaatgaacttttatttccaaggaataccacttttttttttttttgaaatacaaagatcagtaaccaaagattgacaagaaaacagttacaatgatcttcacaaagaggaactgaggttgttccaaatcatctcttcgtccgttccaagagcttctcttgcaagattgtgggctattgtgttctccgttcttgggataaaactaatggaggcacctggaaaagaaaataaagaggaagcaatagcggcaataaaacccgatagagccaatcgatcaaaggagcgcttctgaagacgacgaaccaaagtcaagcagtcagagacaatagatctaaggggaaaccgaactgcctgacaccaaagtaacgcacgattgagagcttcaacttcaacaaatattgtgccacttttatagtacaatatatcacattaattttaaaattaccattaagttacactatttatcatatctaatatactattatactaattaatttataaaaaaaggaaaaaatttatttatatattttttatcaatttcaaaagtagaaaacatagtttgctgaaaaagttgtgcttcaataaaaatataaattacaaaattacaactcaaagtaaaataataaaacaacaataataaaatattaaataatgttacaatactaaacaaaatatacacataaaatattgaatagtggatgttaatccccaaataagcaaggctaaccctcgagattagccgataactaatcaggagattagcgaagacacagccaaagagttaccccgaatgtgtcactcggcaatgcccgagggggagtcacttggtatgcccgagggggagtcactcggcatgcccgagggggagtcactcgacatgcccgagggaaagtcactcgaccatagcttgaggaatgtcactcggccatggcatgagtcacttgaccttggcatgagtaaggtcactcgaccatggcataaggaaggccactcaaccatgacctgaggaatgtcactcgaccat

SEQ ID NO: 200636 - DNA, 908 bp, Cannabis indica
tggtcagtataacaaatttatttacgttctttatccccgccaaatactcatcttgtgtcctaccttttgtatatgaaccctagtgagttttttggggaagcaaacatcatatcgaccaggatcttcttcaacatctgtacgaggatcaccctcgtctctgtgctagtctgtcctcagtgacagtctttctaattcaagcttcgaagaatgggagataagcagcgaacatacaccttttccagaactagaggtgcatcaccatttttacaccagtcggatcgaaggtgaaggctacgattgttttatttaggagctaaagaaggggtggaagcaatatttccccatagctacattttctataattatttccacacataccaatcaagctccgtccaggagtattaggatgattgcacgcaccaaacaaatagtacgaccatcttctctaacttaccctcacgtagctcgtcttgccacaatgctgagtgcagagcaagctcaacctgctactgaggaggaagaccttgagggggacgctaaagtctaagaggtggaagattagggcgaggttcattctgatactccacctgaagccaaggaggagggagcagctcggaggcttccctttggtgggttcaacgaagatgtagaacctgtgtctgaggctgatgaaatccgtgaggccggtgaggactatgttattgaagaatacactgaggctattccttagaaaagataaagtgcagtaggatctcagtgggtttctgctgcatctatattaacccaggcaaaaatgaagaatttggagaatcacagctacttgagaaatgtcaaatgcttcattcactctccaaacaactagacaaccaatctaaaggaggggtactgtgcctggtcaggctcatact

SEQ ID NO: 200637 - DNA, 3176 bp, Cannabis indica
attatttctagaaggcagattgtaactccttcatggaatgaattgattcaagagtcagtctcatacaccaatgttcagcaaatttagtaagggtcagggagaggcacaaacacttggcatcctcattgactctcgccacttgcatcatcttgttgtacacggataagtgaatttttggatttgtgtgcccatcatacagctcaatttagggcatcttgaagttctcaaggagtggagcctccgtgatccctcttacgcagggttctgggtcctcatccttagaatcagtgagggccccacttagttttctaaccaattttgtagtgtgacaatatgttcttccaacctctttgtgtcagtatctgggagatctcttccacagactttgttgttcaagtggtttctaaggtcattaccacgtggtctcgttttcttgctttttttcctgctcgtacttggcatctaaatgccttttgagatccactatggaccaactttcctcagataattatcccctatcccaccatcctagtttactgaatcactggggtagtttttccttcccttggtccttggtactttaataccaatcccttatggtgctacagagcctttctgggctaaagggcatccgagcctagaggcgtgaatcgccttctgcgcctagaaaggcatgttagcctgatttgcattttttttttttgaggagttataggagcaagtgagttcttaggatcacttacctttttccatccccttttcatgtgcaggagtagaggttccaacattgatagggttttccttggtgtttcctctaacgcattcaaccaaggggttatcatcagaagcttcttcatctaggtctccaaacttgactcaaaggtaagccatcattttctccatcttttgataaaacttctcctaacgggctagcttttatctactttcaagcagctcgttagacactcaagttactttggagtcctgctcataatggtagttgtctttgtaatacccatgattgacgtaattgtcatcgtcttcctcttcttcgttcatctcaacatctctatcatcatcgacgtgttcatgctggttgtttgggtcgtcctctcaatcgttcacattggacgtattctcgcctctcacattgcttgtctaggcgtgtttcggcaagagtgggtttacttcctccatgactgtctcaaagccacattgaagagtcttcttaggaactgactttcatgtgaaaaccatggtagtagcatgggtttacgtctttatttagctctcaatgaaagcaccaaattttttatcgagattttcaaaaactaaatattttaagaactaaagaaataataaaaggaataaataaagaggtgaagatttttttacgtggtttggatattaattaactttagtccacgagtcagtctattagcctctagaggtgcttttcatgtgcttaaagtgtttctgcaggataccctaactctttgctcttagtttctcttagaagaagaagaagactaagagtaatactagcatagtcttagctatgttggacatccctccattatatgagaattgaggggtatttataagataaggggcgggtatggacatgcccatgacccgtctagggttctggtagaaacccactaatggggtatattacatgcaaagcaagaggtgactgttgggtgccttagaaaatattatgctcgtccttgatgcagctagactatgggggaccatttgtacgaagtgcacacgtgtcatccaaagacttaacctttaaaagtagaggccacgtgttgcccaaagctttctcttttaaaatcaatggtctgtaataccctcctagcaaaaaggtggtggtggtgtgcacactaccatgagacaatatctaatctttgtcataaaaagcatcatcgtcacttggtgatttgatgtgcgtaaaaggttgacatcctaagcccttcgagtacccgtctgagtattgtttgggaaagcttctctgcttagaccactacaggtttgggagaagcaattttccttctacatcaaagaagccaaggcaggattaggctggcttctgtgtattctcccatcccaagttgttctcagttccaggaggcttctccatgacaggattgtatcaaaaggtttcaattagggaagtattaaactaatcctcctcattaaataccacacgacatactctatagaaacacggataacagagttaaaaagataaaattaatggccttatctctctaacccttgtgcgaacacaacgtaaagctcattgggttttagaaatgccattttagttctaggcttatcttttatcaaaaataccatttttctattctaaacctttaaatgtatattttgtctttaataattataaataattatcaaataaaataatcatttaacataattattaattagactcactcaagtctcttaattaataataaaaccctttttcttcttaaaaactcccttgcatggtaaaattcataaataagaccagtcttacttaaaatcctcattgattaattaaaacaaatttattgagtcttcaacgtagtaagatctcaagtagtgaagtagtgtggggaccatgagcctatataatcaagctcccaataagtagttctaaaatttactatgtaaattctcttagcttattaattcctctgactctactatagattcggaactgcactcttgattacacacaacacactattctgcaagaataaatacgctattagttacccactatttcaatcaaaataatcaatgatcctctataaatgatctacatttaataaggaataaattactattttaccctccaatgcattttatccttaaaacacttggctacttgtaaatgatatatgggaaaactaatagaattactaaaatgggtacaccatttaaattcgtttagtctagctctaaggaaatcatcatttctcttatatgaacttatagaagttatagatttcatatctatgactagcgctcccactcaattacactatcatgttctcaagatgtatgtatttgagctaaaccaataggaaagctattaacgaacaagttaaagaacatgtgaaatacaattgagccagaacctaatcatatcaaaatta

SEQ ID NO: 200638 - DNA, 1505 bp, Cannabis indica
gaacatatgagctagagccaaattcctcaatcacaaggaaccataagcgggtcttcagaatgtcgcagagcgagacaaggaatccgaacaaacttcagaaggatcttcaaaatcaattttgaaagttttgtcttgttcttgttcctttgtgtcccaagggaagtctcggataacacccgagtgactccgaatcatcttatgagatcttgaacataaggaagcagaaacttcaaaaagttttcttttcttgaaaggagtggttctaatatttatctctgaagtggatttaacaccaatgtcacctcccaaggttctaatctcatacaaatccaacttcccaaaatgcttaagctcttgtagcaatgattcttgggcttgaaaaaaattacacaaggccttattatcgttggtagagcaaagagccttctgtccaacacttaggaaatcatattggcccaattcattaagaggagagctcggcccaccaatctccttatcattaattaccagaggcccacaagaaattggcccacttccaattccattcaaagtcaaccctcctttaagcacactattatccacgtgaggtactattccaattccatttaaatcaacataagcagccataagcccacttggcccactagtgttcaaaatcggcccaatatcaccttgaccaccaacattcaaaaccaatagtacaataaaggaacggtaaaaagggcattcctctaacataggaaaagatacaggaagctttcccttccctacactgtcagtcggccaaattacccaacagagtaaaggtcaaatctcgagatgcaggcttgtgcttcgatatccaggcagcacgcagaggcgaacaacggccagctggctcacgagatgtcgccattgtcctcctcctcgagtcgcggccatggccaaatccgaaaacggggatcttcgaggtatcaccagacccaactcccaccgccggagacgaacggagcttggccactagacccaagtcccaccgccggagacgaacaaagtcttgatttcccattgatgagacttgcttaatatggcttcccatagtcttcccctgagtttcattgtaccttgatagagttgaaatcaagtcatttccatgcaggttccctttcatactagccccttcagagtaaaattgacttatggatacaaatgattgttgaatcgtcctcccacgatgaacaaccaacaaatacttgcaattctgactggatggggtgaacacctaagtcatctttaggcaaactctgcattctctttaagcttatattaaggatgaacactcataggcaacacagcaaacactttgagtaaaatgatataataaagtgttcagtaaaatgatataataaagtgtagaggaacaggaaattggactgagcatgtcatcttcttcttcattcttaaatcccttccctctctttctcactctcgctctctctccacaaattttccctgaacaaggctca

SEQ ID NO: 200639 - DNA, 871 bp, Cannabis indica
aaggagatatgagaagtgatttttgtgtttaaataaatatgctaaatctattaattacttttaattatactcaattttaattacataataactttctaaatggagctttaaagttgtcattgtgttgttggtagtgtaaacattgatagatgaggtgaccatattttttaggattaagacaatttaaatcttgtattttagaagaattattgattagatattctgttttgttaaatgataaaataagttttgtatttttaaaatagtataaatatgaccttgagttcaattttcgacaatctttttaatataatcaatttgaagacaattcataacacgaacagatgtaaaaaacataacaaattttatcataatacttctacattaaattattattaaattttattttgataaaaataattcaaggtattatttagtactattttaaaaactacaaagtcgaatttgtcatttaacaaaataaattatccaatcaataaaatttacaaaatacaagatccgaaatagtatttactcttttttatcgataaatataataaaggttcgtttgttttaagattgtcaacttaaatattgatcctccatcaaaatagaccatctaattgaaggatcttgcattcaaatcatgtaaatttctaatatgttttcaattagttggatttcttgtactaataatagttttgtgtatattttgtatgcttgtattttgattattttttaatcttttttgagagattaatcaataagatacttcaagttaaaaatttgagatatcatcttatgtagtgttaagctctcaaatattaagactatgcattttcttttcattaaattaaccatgttcatgcca

SEQ ID NO: 200640 - DNA, 1084 bp, Cannabis indica
ttatacaagtatctttaaatgtctatatgaaataataaatatagtgaataaggctattgatgaaaaattatataattccattttttagtttgaaatcaaatagtgtaaacttttggagttttatgccttaaaattcaattttaatgtaatcttatttacttatcaataaaagattagagatcatttttttttactattgtatattgatttgttcacatattactttcataatcatttaattaatatataaattatactaaatcccaaacataatgttattcacgataatattgttgtcaccacattaaagaataatcataattgtatgttttaaactatttaatctcatgatttatcagtgcactagatttacactaatgtgataatcagcaacgagatttacttatacttgcaccactacaattaacacatttcatttctctttttttatggaaaaaataaaaaaccaaagataattaaatgaaattttattagaaaaaaaaagaaaaaattatgcatgataaaaaattatagaaaataaaattaaaataagttttaattaacacaaaataatatgagaaaaaaattcttaaaaaaatattatgagtgatttgtaaaaattattttaagcttaggtggttttaaattttttaatgacaaaaataaaattaatttttttttaaaaaaaaaaattgttttaaaaaaaaaatatgttccataaccacttttattttttaattgtaaaaacagaaaataaaagtatgttctgtaaatttaatttttatttgttgattttatttaagtagggtccgcaataggggttcgtggtcagtgtctgggtctaagtctaggtttgaggtccatgtctaggtcaggtccgagatcggggttgggagtccgagtctggggtttgggtccaggtctaggtcgggggctcggggtttgggtgcgagtcctagttagggtcaaggtcgtggtcctggttggggttcgggttctaaggtctaggttgaggtcggagtccaaaatatggatcaaaaagaaaatctatttaagaaaattttgaaagagaatttttttgttt

SEQ ID NO: 200641 - DNA, 507 bp, Cannabis indica
gttttcgaaaatctcagtaaatagtctccatcatcaccttgaattagcatagaactcgtttacgatattctgcaagagcccagagcgggaaaatgtttctatacattgcataatgtagcatacagttcttcataaaaactcctgttatttcttgctgagggaaatcaccatcatccaattgagaattgattattaattttgctgccttgtgaagaggtgttggatctctttctgcttgtcctccataaattagacccatcatagcccaagaagtttgtaccaaatttgatccattttcttcaagagatacatattcctacatcatgaaataaatgaacaagttattcaattaattacttgtaataatatcatcattaatttaattaattaccttatttggacatgaaagataactttcaccccaaccaccatccttgttttgtgttcttagtaagaacttaagtgctttacgaatggtttcactattattgtaagtcttcccaacaa

SEQ ID NO: 200642 - DNA, 2656 bp, Cannabis indica
tttatagagatatgttccataatgttcggtgccataatgtaaaggaattcttattaataacatttgtcttatttccatatttaacgtacatatctttataagtggtatcattttataaattaatgtagtaaagatctctttgacaattgatcgctgccttagggtcggtatcgagtcaatttcattaagcctatgagacacatctcatctttattattttcaaacttaaatatctcatattttttttcaaaatataaattaccacttcttgaccaagttaacaactaaccactatgaagcttagttgcactttgtgagtgtaacccatcatttcaaatttcatgacttaacttagtgtgtcgccttaagggtcgatgtcactccaaaatacatcacttcctcttatcttagtcaagagatcaatcttgagcaacagtatagacacatacctttcttagggggatgaaaacaaagttgtctcgaggccagtctatactccatcggtgttaaccaataatggaggtcgtagattatattgacatgtactccttctcccactcactattttaagctaatgtgtttggtttatttattcttaaaaactttaatgattatgattaatttacctataataaatgtctcaaattataaataaatttctcgttataattattaagtctgaattaactctttaattaataatttaaaactctttaaaattaataggttaattttaaaatttaccaagttatttataaattaatcctagtcaatttatatgctttcagttttaaaaatggtaaacatataaacacaggacaatcctaatatatcatgtttctattatgagatgcatgataatataagatgtgtagaatttctatgtatggcatgttattcactaatgcatgagcatgttaatcaactattaatgaatatttatttaaaataataaataaataatgatgacgaattgggtatttctaaggaactaaattacaaaactaatctccgtagcagtattggtatttttgtaatttttttaagatcttcgtaagcctcaaaaataattaaaaaactttaattaatattatttaattatctattaatttaatatacattttaaacccttttatttaattaataaataaactttttatttaagacaaattaattatattttagttttgttttaaaataatatcatttattatttattttgggttaagacaattttgtcttaatttgtttctaggtttaagtttgaattttaaacctaaaatcaattatatttatttaattcaaatatgtatttgaaaagaataaatatcccacaaaattctattatattaatttaattattaaaaataataaaattattttactatttattaattaataactaaaataattattattttaatttagaattcaaataataaccatgatatttatttgaaattcaaattcaaataaatatcccaaaacaactttaattatttacattaaataattaatatataatatatagtgtatatatgtacattatatattatatatattatatacaataatcaatatatatacattaaggttgggtatgcaagaaggaccggccaccatggccttactgtggtcggcggctccagtgagccaccttggccacggtggctatttccagccacctaggcgtcgaataccaggcagtcaagaggcacagagtcaagcccattcacgacccagtcgtgtcttacgtgcatagagacgtctcacgtccatgtatgcatcttctcgagccataaaatgaggaccccgaaggtcttattgtcgtcgattggtggtcggaccaccatgcagccattatcgatgtcaatcacagggatttcagtcccttggtgcgatcggcctatgttgattgagcggaggggcacggtacctgaggtcttacatggttggggttcctctatgaacccgagctcacatgcttctgatattttcgatgtgcatagtcgggttacaagattaaaaatcgagctcacatgctatgaacattacaatgaataattttttacgtaaaattttatttcaaaaaataaattacattacataaaaatttctatgctttaaattggcttacattattttttaaaaacaataaaaataaaacttacacccaattataccatgtaattaacgattcatcacctcttatacattcacaataaaataccatccattcacatgcatatcacatatatgtaaatatttaaaatttacacagcatttaatgtatacacattcatggaactgctcttgataccaattgttggttttatggtactaaatcaggtacgcagcgaaagagtgtattatttaattatcattataccatagcctctaagatgtctagatgtgtgtgcattaaatcaaaacaattaaaacaattagtttagagtatacctcttgaagccttttagtgtattctcaaaacttctcgtaagttgtatcccttaacccagttgatgaggaatatgtaatttggactcacgctaatttttttcaaatcgatccaccacacacaagaaatagtgtgagttactaagataaagtgtacaatcttgttcttattgagctctcaacacatgagcaagaacaa

SEQ ID NO: 200643 - DNA, 551 bp, Cannabis indica
ctgtggtcctaaaacatttgttgttaattaataattaagaaacgtaattaagattaattaagccgaaaacggccgggcggtcgaaaaaagattaactaactcgcgtgcatgatccaagattcctcttgcttatttattaatttggttgttgagatgaaaaggttctgaccatgtgggtggaacaagtaatttaactatatgtaataacttattcaaattaagcacagaattttgactggttcaagttacaatcacaagtcaaacagagatacccaacatgaatatttttaatgtcattgttcccatttcgtgaacatataggatttgtctaaagctgcagcaaataataatatatgtattatcagtattttggagattatggatcgacacgatgtcttttggttaactttttatgagcctcagtagtgttgcaatgataatacgaagtgtaacatgtaatgatatgtgtatcataataactttgtaaacttaaatttacctttatctcttttacgtttgttactaggcttttaggctgcaatagaaatttt

SEQ ID NO: 200644 - DNA, 643 bp, Cannabis indica
gcaccgcgaacactcctaattaaatatttttatacaaacgtatatattagtgttatttagcactttccactaaattttataaaattataaataagttgtaataccaaaattaaacgtaaaaaaaaatcattttcacgtgagtcgctaatttttttttattatttttagtcacagtaaaatttgtgactgaaattaaaaaaattacgattaaagataaatcattatttatatgttattgctgaaaactctgtgcataaaagtattagtcacaaaaattataatttgttgttgctaaatataattttaaccgcaacacttattgtgactaaaactaaattagtgattacttatatctaaaatactaaattttagggaagtaatttttgttgtgacaaaaaataatatttaatcataaaaaatcaatattataactaaaaaattatcacttttagtagtgagtataagatttcataacaaatttgtttttatttttcagtatatgaatatataaaaaatttacaaaaaaaaattataaaataacgcagttatttattatatcttatatttttatttatagaaaatttaaataatttatattactgaaatcaagaattgatttatttatttaagaaaagattattat

SEQ ID NO: 200645 - DNA, 1132 bp, Cannabis indica
aaagagaaaaagatgagagagataaaaaggaaaggaaaaaagttgtttggtgggtaatgtcagcataatgtctgaaaagccaacctgccttgagtaataataataaaaacaagtgaaaaataaaagttaataaacaaaagggaacaatgccataaaggaaaaataaataaaaacaacaagaactcaagcaaaataaataaataaaaattaaattaaaatttaaaataaaaaagtctatatatagtatacattttaaatgagtgtttgggtagatttttgtatgtattcggtatttatagaaatttattagtttaatttttttataatcgtgtatgttataattaattagagtcacatgtcaattttttaaaaaatttgaatactctatgatttgccaaaaataaaattcaaatatttcattacaagtgtgactaatttttacttaaacttgtgataagcaattattaaaattttatttttgtatactgtaaattatttaaatttttctaaaattttacattatacactatcattaaacaattaattaaaaaaaaaatcttaaatactaacactatgtttggtagagtggagttcgtagatggtggaaaagagaggattaaagggattgattcctttgttggacaagagcgagtgaagagatggagggaaacactgtttcagtctctctccaaatacctaaacttcaaaccccccaaaaacgaaggaaacaaaccagaaaaaaacaaaaacgttaaagcaaaatatttttctaaatcctatgaaaaattatatataaatgtattatgttagaaaattaataatatacccaagatctatttgtatataacatagaacacaatagtaatatataataattaggtatgtgtacctgattgatccatagcaattatctctgtttgatccacagcagttactccaatttgatagtgcaatactatcaactaagtcttcctccctagatctctaaatcagaagcagttttatttatctgattatcaaaaggtatacaattgtgatgagacaatatgtatttatagagttagggaggggacttgctacaaaccctagttgggctgggcctgctcatcaaaggcttcagtcaactagaaaa

SEQ ID NO: 200646 - DNA, 630 bp, Cannabis indica
tcctggtaaaatattcccgacatggcaatgcatgttcttgaacccctcgggtgtgttataacttgtttttttgatggcgtagccatattttggggtcccgggaccataaaatctcattttgatgtttgaagccctaacgggagaccactgccaccagttagggctagaaagtgacagtggttggccatggcttatgggaagccatggatgatgtttcttgattatttcagtcattatggatactagaaaaccactttagtcacattagttcttggccaattacttaggagagcactgccactattattgccaaaaaggtggcagtggtcgcataaggggtttatgaagccttgggtgacttttgtcacttgtagctgatacaaggatgttggaaatataatttggccaataaaactcttccccttatgtggtggccgaccattgccaccaattgtcccaaaagtgtggcagtggtcggccaagtagttttcacaccacttggtggcttctttcacttggttttgacatattattggtgaaattgcaataatgaaagattctagcagattgagaaattacgtggtccccttagtgaacacggccaatgttgaacaagtaaaccaaattgag

SEQ ID NO: 200647 - DNA, 1119 bp, Cannabis indica
gagagagagagagagagttgtacatgacgtataaaattgtattttgtgttatgatcaaacattgaagagagatattagagttagaatcatcagaatagaaagaaaacagtttcagacttttcagttgggtttattagtcggccatttattttcacttagccccacaacttcacctaaccaaattgaaactaacaccattctcttctcttctttaattacctcttttcactctccaaaaatgtttcctgatttttttttttttatcttcttacccaagccatgacccattcaaacaaaggcccctcctccactacgtacattctctcttaaatatggtaactattaattaatttttatctatatatatgtatgacatatgacattatttaatgttacactacatatagtcctcaacacccaaactactcaaatccaaaaacaaatcacatcacccctctcattaattacaatatctctctttctttcttttatatataaatccttacattaccaaattacttctactataagttttatcacaatattatatatattgatcttcatcttcttctttttttctaattgcgtacattgaaatggtgaaaagagatcaaataggtgcagtgtaaatagtagtactaacattgattattcttattgggcaagtcaattgtggaagcaatcatctgaatttttcaaaggaatgattccaaagtcttcatcatcatcaacagctcatgatcatcatcatcatcatcatgaagattatttccttgtttcaaagcctaaaggagtgtcaataccaccttcttctccttccaagcaacactatgacattggattacaaagctccaccaactccccatgatatatatcatcacattaattatatatattcactactttcttcttcttcttcttcttcttcttttattgatcatagatctcaccacagaacagaagattataatgcttatactaatggttggtaaactattttatatatatatatatatatataaattgtattttattttatttttagttgtattttgtttatgtgatatatataggaataaataagcatgcatatagagcaaaatttcttctttctttttt

SEQ ID NO: 200648 - DNA, 2209 bp, Cannabis indica
taacaaagtaaaattctcaactcttcatttaaattattttaaaacacaaaggaaattgccaaatttatatgtttttatacaaaatatggctatggtttagaaaagtcatttcatggaaaaaaaaaattaacaaaaaattacaaaatattcctataaaataactttttttgaaaaaaaaatctataattttgtaaatttatatttgaaaaactataaaaataaaaattcaaaaaacaaaaatatccattaataagtaaattatacaaagtttattacaataaaatatagctcataaaataaaataaacagcaataagttgaggagaccgtttacacacatacatattttattctatatttttttgaagaataattacataaaatactaatttttcttttttttgtaaaaatttaaaatttttacattcaaagtattttttttttttttttttacaatttttacggtgttttataaaaaaacacgaaaataacaagtaaactacaggaaaataacatcaaaataatataacaaaaaaaataaaaaaaatgaacaataaattaacaagagaacaacataaaaattcatcaaaatatcatatgttcccgtaaataaaatcctaaaaatatttaaaattctgtaaaatcatatttttgtaatttttttttattaattttatatatttgtgaacaatccctatttttgtttatagttttcatatttattttactcatataatatcagttggtttttcaaattttaacatttcatctaacaattcaaaataaaaaaaaaattatcactttaattttcataaacttaagggatttttttatcgaattaaaatgtgagaaacttgatttataatctattttaaaattagtaaaaaaaaaaatgttatttaaactatgtgttttgcaaaaattattaattactttttattttgataaatgataaattagaccatatattttctacaatagtactaattagtactttaaactattttttcggtcaaaataaaacttaataataacctgatttagaggtgttatgacaaaattaattacatttattgtatctattcatgtcagaaattatcttcaaattgattatattaaaagaaaaattatcgaaaactgaactcaatgtcttatatgtactattttaaaaaatataagatccatttctcatttaacaaaaacaaaaactctaacatttacaaaatacatagtctaaaataggattaaccaaaaaaaatattttgaaacacatatacatttcttttgaaagaaaataaaaatattcattaatcagtaaaacaaatttattacctaaaataaaacttatagagtaaaatcaataataataagtttgtctattacttattctatttatatttttatagtttattttctatttattttactcataatagattcaaacgtgccttccctgaaaaagttattttaggtaaaagtcacacccggtatcacgtaactcgttttaattgtctaattctacagtgagaagtggcactacactctataggaaattcatgtgaatgtgatagtgatgatagagagtatacacctttcgagggagtgtggactggtgattttaaataattaaaatttggtattcttttagtaggtgagagatgaggtcattctatggtattatgagttttagatgaaaatgaaaagagttttggacagttgtaaacgtagcctaatgtcctttcaaaaagaaaacgtatagcctatatgtttattagaagatcttgcaattgcggaacggcccaaagtggatggactcgtagagatggttcgaagaaagtacccaagctaagaaggcccattttagtgggaccatgagaaattacttggaaactacttttgtttcactactgcggaatcatattaaatatggcttttctactttgtcaaaaaaataaaaaatatggctaatttgaaaaaaaaaatatatatatatatatatctattctatataaaaactaggtagcgctttgcgcggtgtttagacctatatatatatgtaaatatgatactttatatttaaattttaatataaattttgttagtaaattagataaagtttaaattaaacaattttaatagttcggaaaaattttaatgacttaaaagttaaagaacataattaatatgcgttaaaatttgagaaaaaaatt

SEQ ID NO: 200649 - DNA, 1429 bp, Cannabis indica
accatctccaatctaatagagtctatcatatcgaaacacctgtaaaaaagacaatgtaaaagaaataatgtcatcataacttaaggggaccaataatatcaccacctacctacaattccatgttatgttacaaatcatggagcacccaccgctactcaaaatctgctgacaaaacacacagtattactttatatcaagttccaaaattcatataaaaatctgctaacccaaattaaaatatgtgtgaaaaaaaaaaatctatataagttatatataaaaatattaataaaattaaaaagaagagaaaaactacaatatatatccacttttttttttagtggatattccagaaatttattctttaagctggctgcttcgaccaattataatttattacacttgtatttgtattttgggttctcaacattttatcattacaaccacgttacatatatgtatagtaagtaacagattctcagcttttccgtgactaatttcagtagttttttttagtgatcatcggacgttatcctttcataaaaacgcaccgttttaacaaatcaagagctctctacacttcgatcatggcgactcccaagctcacgcgtttgcctagcatcagagaccgcgttgaggacactctttccgctcaccgtaacgaactcgtttctctcctctctaggtgtaatcactatccattttgacatttgtttttgtttggttactgagaaagttcgggaaagtcaaaagtgaagcatttaagtaatactgtgtgtttgtttgtgttgaattttgtaggtatgtggcacagggaaaaggaattttgcaaccgcatactttgcttgatgagattgacaatatcttccctgatgatgaagcgaaggagaagcttagcgatggcccctttggtgaagtcatcaaatctacccaggttagtaatctttcactcctcgcaacttgactagattttgatgttgatatatatatttttttggttacttaagttggtcctacttagttaagatagagttaatgaagttcactttcaataacaaaattgttttgatcaattaaggggtttcctttaataactgatctttttcaaccttgtaaatgttagaggcactttttttaggtctggattctggatatctttctttaatttgaacgatgagcttttctttctcttctatttattttaattatgaaaacagaacggcctgagatggacccctctgttttttctttctttttcctcacttgtttcgatttttgaagattgtgacttccaatccaagtcaccctttttgcatcatattttgattgtttaaccttttgtgggcagcaatcagttggaacataattataggggaagttaataattaaattatatatttatgtagatccctcttttagtgattgtttctca

SEQ ID NO: 200650 - DNA, 732 bp, Cannabis indica
gaacttttgacactacctaatcttgttccttaaaatatgcgacttattaataattctccctaaaatataactgttacattcgcatgtcccttctgtaaggttcaatttcttttatatttaaaaattagtatttttacctcctaaaatttgactaatattaaattttgtctcatttcatgaaaaaaaaaataaatttaagaattattattttttattaattctaaaaaaattaagaaaacctgataaaagtattaaattaataaaaaaaaatatcaagtttactttaaagatgtcaattatttctaagataattattttcaaattttattttatttataaacacatatcttaaaaaatcaaaccaaaattattaaaaatataataaataatttaaagaaattaatattttgcgaagagaaaatcatactttttattttttacaaattcatgtcttaaaaaataaagaaataattatacattcaataaaaatataaaatcatttaaaaaataaatagaaattaaagctaaaaaatattatatttacttaaacaattctagattgttagagaaaaaatacacttgtttcgtaaaatttgttttaacaaaaattaaattttaatattaactttttttttattatttaaatagaatttttaataaaaaataattaaataaacgtcttatttagtttttaaatttttatttaatttttgttttaaattttttaattct

SEQ ID NO: 200651 - DNA, 656 bp, Cannabis indica
aaaaatgaaagaaaaagtgaatgatgactactaaatccattctttgattaatgttataaaagttccatacttttcaaagagaaaaatacaaagttcaaaacttttcgagacagtttacaagaaaactaccatctacttacctgtgttccccaatcaccaacatggttccgccttaggacattgacattggagaactcgagcaaacgggctagggcgtctccaataatggtagaccttaagtggccaacatgcatttctttggctatattcggagatgaaaaatcgagcacagcttttttcactgaaagctttggtgcccaagtttcaataccatcaagcaacatgttttgtatggtctgcagcaccagacattttacagttaataatactaatccacctcatgacagaattgtaatcagttgtaaaataccttaaaatacaaaaaagtataccttagctatccaactctttgataatacaacattcacaaatactcttttaggttgtttagagcctatttcagctatagagcatgattccacaatttctgatggtggaagatttttgatgatggcctatacaaaaccaaacagaattaatcgagttcaaaagaacaaaaaaagagagacatataaataaggctaattgggattttt

SEQ ID NO: 200652 - DNA, 977 bp, Cannabis indica
aaataaattaaaattatatttaaaaaatataattaaattgtattaaaatttaattttttttataattattttttaaattaataattaggtaataaaaactataactctaaccatgcattcatgttagtatataaagagaggttggatattaatttaagcaatttaacgtcatgaatttattatttgaaaatattggtgttattgtatccaattaaattcattttctttcaggtttttattattaatactaataattaacagaattgctgttgtggtggaaaatattatgcattggatgctattgcaagtaataatgatttaaattttaacaaataatagtcatccacgttttaattatcgtggaaaaaattaaaaaataaataataaaaaaaacaaagaaaaaagaaaacaaagtcattcacgttttaatatatgtgatgttgttgatgatggaaacaatttttggttaatagattaactattggaactgtcagtcatcaaaaagaaaatttatccaaaaaaacaatttatattcactactgactacacattaaacttctgagctttcggttttgttatctctttccacgacaagtgtttagtattttagtcagatagtaaattggtctcattagttaagttgagataggtgttttaaaaacaagaataatattaaaagaagcaacattttaataattaatactaataattatattgtatcaataaattagaattattaatatacctggttgtcatttcgggcaggcgatttagactcttttatttccattttatttatttatatttgttttgtgtggaccatggaggctaatatttgttagttagctatatattgagtctgactcgtaaactaaaaactactcatgtgaatcacgtcaaaacataaatccaaattaggattctaaccttctctagttttcagcaactctacctttttgttctttaaaaataaaaat

SEQ ID NO: 200653 - DNA, 577 bp, Cannabis indica
atcatataataatttataattaacaaaaaaaattgaattttcgaaataaaaaatgaaataaatccttaaaaaaaaatcaaatcaaatcatggagagtagagaagaagagtgataatgatgatgatgatgaatttacagactatagcaaaaccagtcataacgattactacaacaaccactgttaatggcttcttcttcttaagctcaaacatttcaatcaaatccaaacccaaattacaacaatttcattgtctcgcactctcaacttctaacactcccaacaaaaacacacaacacacaacccttctagtggacactttccatgagcaccgtattctcaaaaacttgttcaataagctcaataagactgactcatgccctttgcaattgcttaaacaagatggagattggactaaacagaatttctgggctgttgttacttttctcagacaccattccaggtcattggaaattcttcaggtaattaattcttatttattattgtttgtgggttgtttttagttttatcaaactttagcttaggtaaatggaaatcgatttatatttagaaattggg

SEQ ID NO: 200654 - DNA, 2241 bp, Cannabis indica
aggggtggccagccagcccccttgaggtggctactttgtcacttcgtcatcctgcccgagtacttggacctctcgttggttaaagtactgagtagatggcttggcctttttattggcgagttgtactcccacgtggcactgatgttggccacgtaggcatgccacgttaggtggcctaaaatagggataacatttcccccaagtcccagtgcaaacatctatgcggatagggacttttcaacttagttgggactggtgtagccttaactggaaaaatcttgcagcatatttagcctttgaaatatttgttattgactttctgatcaccttcttagcagtacgttaaccgcatttttatttgcatgctctttagttacacactgcatggcaagtaaaaacgaggtcccacaggagatatataagcttatgggagggaaaccactcttcacttccacatttcaatctctctctacaaaaagttactattgaaagatcctccttctctctagaagccaacgcccataatgcttcaactcttgggatttttacaccattttaaggattcaagcttcccatcttctccatcaaatgtttctagtagtgggtaagctttctaatcccattattcacttgtttagttaattttgccatggttgtatgaagcttttcttcgctttgaatatttctgattctcacgttaaattgtaatctttttggtatttttgatcatcatgctagtcttaggatgtataatgtgtgatttcctgatgaaaaatatctgattttgaccttcattgtgattcttgactctttgagtcacgaagaacatgaagaacgtgtttgagtttttgaaaaactacacatttagtatctaaaaacacacactggtcgcccgactaagggtcctgttctaagacatggccgaccatgggtctttctcatggaagttggccagccatagggggtaccccaaaagttggtcagccaatgcctaagcttagggtccctggccggcccttggctgggtcatggaaccttggtcggccctctctaagcttgggaaccttggccagcgaaggccaaggttccaagcggggggccaagtttttgtccttttttgacctcagcaagggttttgtgaaggcattgtaggcatatacaactgtaatctcatacgtggctcccttgggaactttgtataggacttgatggtgagtctattatagtcaaatgtacaacttaagacttgccatttatctaagtaggtatacttgagacgatacttcgttgatacccaagtacccttgggtacaattggccagagttctgtctgttaaactttgagaatttaggaaaaaaaacaatatcatcagtcatctactcaatacttcagctgacgggaggtccgagtacttaggagggacaaagaaatgacaaactagccatccttagggggttggtcggccacccctaaccgaccctatggctagcagacattgtagggctgaccagaccaacctacacttggcaggtgcatggccgaccatcctgtacctggcaagcctttggtgcatagccttcatccggggatagcaagctaagttgtaatttgggcttcaacaactcatgaaaataggggaaaatatcagttacttccctatttttgagggataattaacccattaaatgtttattatttaattatgtaaatcaggatttattttcttattttaaaggatattagtggttaatcttaatgtaagctctactatataagaaacactaacctaacccttattctctaagttctaagtctctaagctctcaagctctacgtctgaaactcaaactccctcttctcttctctctcacatgccttatgcactctctctcacttgagattcgctaacttgattctcacattgtaatcttaagagagccattccagattccacaacccttgtaatttgagtggtattgtctttggtattaatacaacgtaaaaggggagtagatcattactcgctaactaagggggtcgaacctctataaaatcttgtgtctcttttaattttttgttcttattgtgtaacacgtggaaatcaacagtaataaatacgactctgatgtcggttggccaaatctgaggtcaacaactggttctccaacacgtggctgtttaggctttcttcttctcaaactgaactacatcagatttttcatattgtaaggctcaggcat

SEQ ID NO: 200655 - DNA, 825 bp, Cannabis indica
gtatgagcccccactatcatgtcaatagtacgatagtttaaattttcatttttataataatataaaaaaaatcactaataaattagtcttttgagttttattttatattgtatttcatattaatatttttatttaagtaatttgcggtgtaattatttaagtttaatttttatttgcagataagtacttaagtgtcaagtcattatctacgtgttattttcttatttatattcttaaatgaaaaaataaaaaattaataatctagaccaattagggactaccatgtgtcttttgatttaacacttaacaggtattgtactgaaattttataaatataattaagtattattacggtaaaaaaaattaacttaaatatttatctgtaataagatattaaatttaaatatttatgttacaaattattttttacatttaatatttataattttttataaaagtaaaatttaaaatcattgttgaactttattacaatgtaattattattatgatgatgattttctttcttttacaaaatatgcttttttactatgaagaaataatctcatgagttaatctaatcgtaaggttgaagatgttgaaaaaagtaagattatgggtattttagtgatgttgtctatgaaataatcaattaaatttgaaacattatttattaatttggacttgtttgctatttttttgtacaaaaattctcagacaatacattctgtacaacaccacgagttgcctaattactatttattattattattattattcaactgttttttctttcattaataacttataattattttttttattttt

SEQ ID NO: 200656 - DNA, 783 bp, Cannabis indica
atatatatatatctttcattaattaaatacatttgcacatatgttgttgtgttatatatgcataaaaaagaaatgcaaaccaaatggtgtttagtagtatttaaataagattttgtgttaaagaatatgactacaattatattaataatcaacggaaatgtagaaaagataacaatactataattataagtagatctacgtcacatttacatatgtgtggaaccacttgtgtcttttttttttcatgtatgtggaatcatttttctgaatactagtactttctgacattagtaagaaagtatagggtctcttttttggttaggaatgagaataagaaataaaaataaaatagaataaaatttaaaatacatagaattataaaaaaatcattaacttttttcttatattacattaaaattgatcttttttttcaaaatagaataatcattcgagtaaaataatgagaagaacatttggaatgatattctaatactttaaaatatatttaacaaaataaacaaataaaatttgttcaaaaacaaaataaacaaataaaatacaaattattccatttcattacctttaattaatcaaaccccaccacctaagactataatttaatttggtatatttatataattatatttatatagtaagttttttttagaaattttgaaaataatttaaaaatagagttgagataatttaaaaatagagttgagctataggcattgtctatttttcctaatatgtgtagatattctagacatgtcattttacgat

SEQ ID NO: 200657 - DNA, 1543 bp, Cannabis indica
agagagagagagagagagtcaaaccaaggaagcaaccaagtgaggaaggaaaatatggggtttggtaagggttttacttcttgatgggatatgagagaagagatgtgaattagaagaaaatgcagctaaatggcggtagtgggtgcgtatgatagggttgtgagagcaggataagctgcaagttctctcaggttgggagctccgaatagatgaggaagaaaggtatggtcttcctccgccaaacacagttacagcctccattctctcacttgtttttcttcacatgtgacgtgagtggccttattatatactgttaaagaaatgaaaataaacgacaacaaatttttggtgatgaaactacatgtcgtaagaacccataaataagaaaaaaaacaaaaaaaaaaaacaaccaaatcataaactcccgtaactctttgattctaattggataatttgcggccaaactcccttaattttaaaatttagcatgattgattgaaataattagggctgaacttcccaatttataaaatcattttacactgtaccaagtgtacatgtggtaaaattctattggttcacctaatattaataacttaaatattataaaaaaataaataagaatattttaacatttaaaaaatcaggaaaaaaaaaataaaaataattatatttttctcattttctccttttttttttcttctttgcttcttttatctctttcttcttcttcgtctttccctattaccctaatttaaaacataaaaatccttaaaactaattctctctttctcttgtttcttcttctttgtcatcactctatcaccacctaaggttttaaggtttctctttcactaccatcaaccccaaatcattttacagtaatagtggaagaggcaaaagtccgagcatcccaacttggctaccaagaagatggaaatagaacttggtcaaggtttgtgtggtgtagtttcttcaaatgaaaaggtctccaagagtttcttattattcctagaaagttgttgactcacaaaagcatgtccttgaaggttttcttgttcttctgggaaaggtcttcaagaaagctagtcctcctccaaaaaggagttctagatgcctagttgttcctcttagaaggtagtctcgaatagtcgactccaactagcactttcctattcgggaaggtccttcaacgagtgccttagatcgtgacttcaaaagccttcatactcgctcccggatgcacttttacttaggcagacatgaaaacctcgctcaaaggagagttggttaagttagttattgcctaactaacttaacaacttaacttcttgcaaccaccgactttaggatcttgatcctaagcctgtaaataccaccaacactttaggtagcttagttctagtgaaaccttttaaaaattgagagtttgcaatttctattcataaactctttacatttaagttttctatttttttatgattgtgattatctttgttattaatatttgcatgatttcttttagtgttttaatttttctaaa

SEQ ID NO: 200658 - DNA, 674 bp, Cannabis indica
accaactctcatttgtttgacgtgttgcatctctctctttactcacagaaccaaacaccccgaggacaatttgagggaccattctcgtcacctccatccttctttctcccagccacgatgacaattacagaggagaaaatggtgttcacatggttgggtgacgatgatttgagcgtttgtatagaggcgacaatggcacgaggttgggtggtcacgacaggttgacttctacacagttttggcgagcgattgaagagaaggtgagctttctaagactgatgatggtggcttgttttatgaatggtttggaggaggacaagacggattaggtgaaggaggaggaggtgagtttatatggttacttgtgattatggtggattgtgggttattgttcaacttatatagtttatatttttaatctttcaatattgagaaatattttaatctttttgtgttttgatgtttatagatttctacaaaactccaaactctagcaagtagattttgagttagtttaggatttaggaatttttgcaactatgatggtggttttgttctgtgtagatgtgatgaccgcataattagatatgaaaattaatataatattattggtttaattaattatttttatatgattatttatgtattagcagaaaataagtcttattgtcaaa

SEQ ID NO: 200659 - DNA, 1045 bp, Cannabis indica
tacacttggatttaattattttttttatttgggtaagttgggtttcattaactatattgaagactttaatatgactatctcaaaaagattatgtaaaaaatattttttaaactttataaacacattattatacacgatttttatgaataaattctaaaatatttttcggattaaagctagagatatttacttgattttatggaccacctccacttagtttccgactaccatcatgcatatatatcacaacaaatcttaattatatcattacaaccaacaaaatttacaaagacaaaaacaatgcaatttaacctaaaaatacatttattagacagctaaaacatcgacaacaccaaatcactccaaattgtcgttgccgatcgcaaagccacaaaaactattgcctaaatttcacttcatttactctcaaagtcctaaaataaattataaaaatagtttattttgttttttttttgaaatgggaagtaaagtttttttaaaaaaaaaattaaaaaatggacaattatggataaaatgggaataggtttttgacaaaaagggggttttataatgagagaaaagaaagagaagagaagacaaagaagaaagcaatcaagctaaaatctttaaatcaccataataaagtatattagtttcggttattatgaaataagcgaaagcatagaacgaaggcataggcctccgagcctatatgtgtttgaaaaaccgtgtttttgtaaatgtcagttgtatataagaaaatataaaaactgtaagcgtttgcagaagcagaaagtgattctgctacagcaaaacagaacaggcagaatataaaatatttgcagaaaaataataacaatcagtgttctcacgaacactcctagtccacggggccacgcccagagaatgaaatcaattaataaagtatcaaaaattacaaaagaaaattgacttaacaagtttagactccctctaaagtattcgccgcaatcatttgtaaactccactttatgaactctgacctcttgaaacaccttcaagcccg

SEQ ID NO: 200660 - DNA, 1343 bp, Cannabis indica
aatcaatcatattctataacaagtttattaattatattatttaaaatatctaaacttatttacttattattttatcgtttaaataaaattagttagatatattttgttataaataaatttaaaattaaattaaatttatatatttaaaaaaatataattgaattgtattaggtttaatttttatattattatttaaaacaataattaggtaatagaaactctaatacaactccaaccaaacatgcataattgcatgttattaatatcttattattatatatatataatttcaaataatataaataatttaatatttaataaaaaaacatgtcattttttaactaaaaataaaaataatacttcttaattttttttatcaaatatatatgcttgccacaattctttacaatttcaaaaacaaaaataatattggttaataaaaataggtatattatcattgttattactacattaatatattaatcaattttatcgttgagagtcaaacaatacttggttattaaacaaaaagaaacttctcccaaccaaaaagacatacactcagaaagatagataacaaggacttaatagatctaatataacaatcacatttagagacactattttgctagttgttaattttcattttataatgtatataacagatcatataatactttctatggaaagattaaagtccaaattgattcttggatttatttgaaaagtttcaatttgataatgaatagtcacggtaaaatgtaaatttcatcactgcaaatcaaacatattaggaaagacttttgtacatttgtgtaaacgtgtttgtggctatctagagaccagttaaatatttttcgcatcttctagttttatttttcatattttcatcgtgaagagagagtttcttttataaaaacctagagtattcagctaggttttagtttgtgtttattgttcttaattatattgttcttagaacaagttgaagaatttcactgaacaagagaaggatcttcgaaagaaggcttatacaaagccttacttcgggaggaaataagcactcacacattaaaagacgaagagagttcgctgttaggtggtattcaaaaatgagattggcaaaataaattgcaaaggactgcgttaaagctttagagatggagactaaacttgtttaagtcaattgtattttgtaattgtttgagatcggttttattaattaattttattctctgggtggaatcgagtgtttgaaaaaatattgataccacgtctaatcttgtatcaaatttttatatctgttatttctgttatgttactataaatttgtgttttgccgt

SEQ ID NO: 200661 - DNA, 747 bp, Cannabis indica
tcaagaaaaccctactacttaaagatagattagcataatataataatgcagtacgaatttaacctacaactgtcctctaaatatttagacaaattgcatttaaaaccaatcattataacatattattctgttatttgtctaatcattttcattttctgtacaaaactgagagcaacataatataaaaagggaccaaacataaattcatgtcaaagaaaaaaaaaaccccactttctaacgaataaaataaataataattcccgtcctaaaataagaaaaaaaaagtgacaaactatattcttccaattaaataaataatattacaatattaaatataaattccttcagaaataattaaattaaataaacaatttctccggttatggttgtataacacaatctttttcttttcctttattatcattttatccacacatcacatcattcattgcagacataataatattaatattaataataacacacatcacttaaaaagaaaaaaaaaaaaaaatcaagaatccattttgtgctctctactcccaatttttttttttgttgccatcgccattcgccgctcctttcctggcctatcggatcaaatgaaacccatctctctatcttcttcctctcttcatcttcttcacccaattcagctccacaccatttcatttcttttctttccttaactaccacccaatccaatccttcttcactcccttctttattaggttttaaatatatata

SEQ ID NO: 200662 - DNA, 777 bp, Cannabis indica
tttttttttttttttgatttggaatcccatacagtgatatgaaattaaaaattctaggatatacattataatgtccttaaaattaaagaaagttctcaataaatagtatgtaccctacctacctaatttttttttctttttcttttacatggatttagttagctatatatactaatcaaaaattctttagtatgactgaaaatacaaaagctatatttgagcatattttgaagatcaaaaaaaaaaaagaagaaaaaatttgaacaacattgtttaattcatcaatcctcagttctaactagccaatgtcttttaattcccacctaataggattgtgttaatagttttatttgtagaaaatggttatggtgaacaaatttttatgtcacttttcacactaaacagtaagaacatcttttagcttcattacttcagaagttgaccacctttgatgttattctatttaaacgatatatgactttgaggataaattctttcaattccactcttaatgttctggttcttcagattcatctcaattgatgtgatataaaatatatacctatagcctagaagatggtgaagaaaatggcaaaccccaaaaacaccaactagatttagataaattatttgaacagttgactgactaacctaaaaggaatataataatacataattaaatacttcattatattacatttttgtctggttccgattcaagagaaaacattgattaaattatactttttttgggtcccaacgctactaatttgtaga

SEQ ID NO: 200663 - DNA, 594 bp, Cannabis indica
ttcgtgcggctgaatggttagagaaagatgtatttttgtataatatttttgccattttagtatatacataaaaaaaaaaacctattgtgtattaaggttaaatgaaatatattacattttatattttatttagacaatttatatagaggtgtgctttgttcctagcaatggggaaaatagttgtgttgatattctatatgttcttacatttgaataattagttgatgtgctaattaagggactctataaagcattttttttagattttgagacaagcttccaagtgtggtgtcatcctgtcgcttgagagagaatattgagaattagttatgcgtcactaaattaaaagtcgttttgataagtgagttttaaacttaatttaaagtgtacttttaggttgagtcttaggtgtttaggtttgtttgtgtaattttatatattattttgatctgttttcaaatttggatggatttgatacaactctgatcgaaaattttgcaaaaatatagaagaaaaggtgaggaaaactaaaaattgttgattctgaaggagttgtatgcagtcatgtaaggtttagtgcgagcgtacaagtgc

SEQ ID NO: 200664 - DNA, 1224 bp, Cannabis indica
atatattctattatcttcccacattactcaaattctaacaattaaaaaccacatttaatcaattcaatctgactacttggaactcatttgactcaaataatttttcaagtaaatttttttatattaactaaacctaaataattagaaatatttgcgacaaaaatttaaaaaagtactattagttttcactaatttgctaaaaaagaccagctaggatctcctaatcacaataaagtttagggtatttggaaaattatagaagaattggatttggtgtaattgaatatatataactacataattgtgtaattagaaataattacaattattttcaattctcaagaattgggttaacactgtgtgtaattgctaaaagttttttattttaaatattatctattaaaaaatatcttttttttgtatactacttattttgttaaacaatatattataaatttatatataattaccatcttatatctaaacacacttaatttaattacacaacaataaaattcattgtttttagtagtgggcatgtataaaaatattgtttttttttcctttttaaagaatgaaaatatagattttgttactctgagggaaatagaaaatatgttattttctcaaacctttaaaatcttttttttttttttgttctggaactttaaaaatctatttaagtatatattttataaagtaaaactaaaattattataatataaaaacaaacatattcattcacatctaaatatatatttgataaattaatacatttcaacatcttatactcaaatttatatacctttcatttttattgatataatatataaaagggaaaacatacacaatcccattttttttttatttctactagtgatacatagagattgtacttaaatacacttaacaatagaactaaataggtttagcctttagatatggcaatcaatggaaattggtggcttgttaaccaatttgaggagtcctagtaacaattccattttcattaacacgaacacgaacccggtcacaacaaaattgagtgtcaccttgggcatcctctgccacaacaatggcattcactgcagaattttctcgctcaatagtctctttagcaacctcaccttccactcccaccagctcaggccatgatgtcttccctgcaaaatatataaaattatataattgtaattaatatttattatatactttttgtaaatt

SEQ ID NO: 200665 - DNA, 1080 bp, Cannabis indica
aggcccaataatccaagagccaagtccaacaagttacacaaagctcttctctcttcactcacacaatggttcagcccaacaagaagtgagacacaaactcacacaatgaaccaacaatagttcggcccaaagaaatgagatcagcccaataaaaaaatgaattcctagtttgaaacgttaatataacaggcaaatatatgcaaagtaagaaacaagtcagccacacctattctcctctcttaatattcaaatttcaaaacttcttctctcttctaaacttaaattactgctagtgcttcaaggattggggtttctttattcttttctattcttcctttcttcttttaacaaaaatattttaattgattgtcctgtcgaactgaatgtagaaaatcattcacttctcttttttgagtattatttttcagctaaggtacttgaatcctcgcagggtcttgtgaaactttctgatttttgttatatatatgtatatatatatatccttttaagtttttgttatgtattttatttgtaaactattgagaagatgtttggttttttttttttttaatttatgatctatgagttgtgtgaatgaattggtgctttgtgcaaatgatgaaaggttgtcttggtctgtataattttgtaaataaaattggttcttaataggtgtttgttaaagttaattttttttggtatattgttttaagtgcacaacaaaaatgttagatagacattttatatattagtaagatatacctacacactcacatacgcatatacaattagaagttacgtgctccctaaatattattttagggcccgtttacaaaattagattatgctgaaattaatcgtttggtttaagaatggactattttatttatttccttttggaaaaaaaaaattaaaattaaaataaaaatatgtaatattaaatttaaattaaaatatataataataaaccaattaaaaatgaatgattcaccgcaaaaaaagtaataataataaaattataaaattaaataatataatatattctatgtaattaaatgtatatcataaatatataataaa

SEQ ID NO: 200666 - DNA, 843 bp, Cannabis indica
cttttatttatcaattaaatcccaattttaatagaatttctacacgtaaatgatgtaatttaggaaaatatacaagttttccattttatttcttaatggttttgagaaaccaaatagatataattcttttctataaatagtagagtcattttactatttagggatccaaaaattattcattcaatagagcgcttacgctattaaaatctctgtaaaagctttcgaggaatatcaataacttcttacttcttttctcacaagttaatacaagtaaaagagaagtaagttattatcactatcatgaggtcgaacctctataacaaattcatgctcttattgcttaattagtattatttactattttttaattgattcattgttgttagctaaaaacaaggtcaataaaaataatcaactaaccctactaatcagaaccctgactaagcctagagccaggccaatgaggtcctagtcgggtggaaaaaaatcagatggtttcaccccgtgcactttggaatgaatcttattgtgtatcctaaatttgataatctttttatagcataacaacacttgagatattttttaattattattgaatgaaaaagaaaattgaatgtattgtaggtcaaatttagtataatatgtaaatttttagtatgagctaaattttactttttagaatgttgttggagtaggaatttgttgttttttttttttttttgttttttttttttgaaatgagtaggaatttgttttttaatgtgctaaaatatagaagaaactacatttcagctctttattgtaaatgctcttaaaattaggaaacaaattcatttataattt

SEQ ID NO: 200667 - DNA, 1286 bp, Cannabis indica
ttttatttcaatttctgtaatagaatcattagttcgtacttcattgaatcaaggctttataagtttgtagtcataagtatagtttagtggttcaaacgtcttttcttataaaaaaagttggtcctaagtttgaatcctcccactcttaatttgtatattcgtgtgtgtcgtgctagtccgatctatattatattgtggtttttaaaatatggattgtgtctgtcatgccatgccatgctgtgttaatatttttaaacggtaggcccgacacgacccgtaggcccgatattttcgtattgtgtttgaatacgcatcatgattttctcgtattgacccaaaaaaagaaaaactaactcgttatcacattagtgttcgaaatcacactttacttttccacatttattttacaattaataaaccaattgctaaagtatatatatatttctgatagctccttaaaaaattattataattattataattttaatatttatttataaatacttaaatttttatatcatactttataaataaattaatatataattttaattttatattttttaatagttttaattatgaaattataatatttagtattatatttaagttgtttattattaactttaatttatttattaataaaaaaaaattatttatttatttatttattattattattaaaatacaacattttttaatgtgtcacgtgtcttttgggcttgtctcatgttgtgtgttttaggctattttattcatgcttacatacttgtcgtgcttaaatacatattttctgtgtcgtgtcgtgccaatgtgtcgcattgtgtcgtaccatacccaagcctatatttttttcgtatctaatcgtactcatgtcacccagactcgtactgactttgtactgtatcaaaaagtccaactcttatttacaggctccaaaaaaaaaaaataaataaataaataaaaataaaaaacctttgtaagcctagtcaagtggattttacacacaataatatatcattaccatctcaaaagtaaatattattctccatacttcagcaaaatatataatacaaatattcaacgagaagtgttatcatcaacctcctattacaatctcttacttaatttttgtgtctgtaaacacatgcagaaatttttttcttttttcaattttttttcattagcaatgtgttatagtcacaatattatctctataaaattcttgaaaaaaatttacaaaatagtttatagtgccaaaaataggtttgaagtttttttgaaca

SEQ ID NO: 200668 - DNA, 791 bp, Cannabis indica
aaaaaaaaactttgaacgcaaaagtataaatttttaccaaaaataacaatttatgtaattttttatatttatttatattgactttaacatagtttattaaatattatttctcaactatcaaacgaatcatgcacaattattaatatcaatttctttctctctcttttttcttcccttaaattaaaaatattgtgttttcattaaatatatatgatccaacaagaaaaaaataatatcaacaatgaatgaaatgtttacaacttcttattctccttaatctacttgtgttgatattttacaccatagaatggaagaattaatcccaaaaaataataaaacatggaagaattaacccttgaaactattaattaattaacgtctaacaaacctagctagaaagaaagttattatcgatgacccaacataaaattaaattttaataaatttggttgattaggtgagaaagtctacataatagtatttttctttttttcctttcaaacgaaaaatgtctacatagaagttgttgaacatatttagtttaatttggagtattaaaatctatatctcatgtatggatgaaaatattgcttttatccaataagttgatataagatatattattttctcacaaaacagatatattaatgaactaaagaagaggcaatttcattatcatgttcttgtgcagtggaaaatagtgtgttatggccaatttgcagcattgaagtaaatatgtcccacagctataatatgagccaccatgaaacatacggtcatattggtcccca

SEQ ID NO: 200669 - DNA, 2051 bp, Cannabis indica
gatggttcgtatggattgaatgatgagttggttccttggtcagtgagcgataaatttggtgggagggagagaatgaggaaattggggaaaaggggtttccctaagatgtttaattcgaagaaatcgccttatttgtttgtaaggcctggtgttgttcgtggtaagcatggactgggattgaagcacagcctctaatctaatccaaagtttgactctttaactgggtatttcttagattattgaaatcttttcagttttttttacttttgttgttgtttttctagattagattagataagataagatagactaagcttttataattggtggctttattttcatggtgatatattgaggattgggttggtttatgttacacaccaaatctctctccttttttcactgtttgttaattgtttatatctaaggtatctgtaatagaataaaattgtatgtgaatatataaatttgcccagaaataaatatctatggtttttcaacttttgatattagaattttggctgatgtatgtcaatagtggctggctagtgctatagtgagtggtttggttatttgagactgatatgcatgtagatgtaacagtggttagtgctacagtgactaatttgatggtttttgaaacttgtatgggaatgagacataattgttgttcaagtcatttttatggtggtagttgatactgtgctaatagtctctggatatcataactgttgttattgaagatatgcattgattgtgaggattggataccaatagttgtgttgtataggaaggaattatttgacagtagaattagattgtgcaatggctctttattcttatcttttttttttggagattgggttgcttgtattagatgggtagaatggttgtctctttttggagagtcttaattgagtcatttttaatacatttcatagattaataaaggagagggattcattctggttttgcaagagagttattatagagagaaacatcatggtggtagaaatgtttatcacttttgggtatctgtgaattattactacttgatgtttagactaaatcatattgtaaaatcacacttcttttttgttgaaatcatgagatgttattgattgaaatgtagaaatgctatgctctgcctttccttgttctgaaattaatgctagacttggtcaattttggtcttcattaaatcaaatatgacacatttctgcaacttttttctgtcaccatacacttcccataaccagtttcaagttcaacttctcagttttaagcattatttctctcaataatgaatttcatcactgtacagactctgccactaccaccaaatttaacttttctacttaattccagtcaaccccatatttctactctgcagcaactgctttgtttttggtgaaatctaattcatagctacaggaaattgattttgggacaatcttcagactatttggcataactccaatatccaagttattatgatttggtcattcaatacttgattttgactatacccaagtgggtagttcaaattgtattcatgtggtttgctcttacaagattcaaatatcataatccaaatattgtaggttaggcttagtattcttttttttttttttttttcggggaaaataccattttggactctgtgttttgcaaaagttactgattggaccctgtttttagttaaatgacaaaataaaccctgtattttccaaaatagtaaaaataaaactctgaacttaatttttgacaattttttttaatataatcaacttgaaaacaattccttatacgaacatatacagaaaatgtaaataattttgtcataatacttttagatcggattataattaatttttattttgacaaaaaatcaattcaggatcctatttgtaccattttagaaaacacagggtctattttgtcatttaacaaaacatagagttcaattgataacttttgcaaaacacagggtccaaaatagtatttacatttttttttctattaggaaaaaaatcttgattttgacaatt

SEQ ID NO: 200670 - DNA, 945 bp, Cannabis indica
tatatatatatattttaaattttgagtgtaccgggtggaacgcgcatcaaacccaattgaaactcggtacccgggacccaaaacttagaaacctcgcactaaaaatgggtgggttcagtagacaatatttttctaaacctgaaactcaacatacatgtatagccataattaaatttataaaaaaaagaataaaataaaatatgtgtgtgttttatcctacattgctcatgtgtgatttgtggaatgtatattagaataattaacaattttgtcccctgaatttttaacaatattgattctgccccttaaaatatacgacttgttaagaattctccttgaacttttacatttacggaaatttaatcttctgttaggttccctcccaatattctgtttaaatactgagtctttgtaaattaataataaaatcgcccctaaaactttgacaattatcaaattgtacccctcaaaataaaaaaaaaaaaaatgaaaaattcaatttttttagtaaatcctaaaaaattattttaaatcttaaaaaaaatctttttgaatgattaagaaaattaaaaaagaaatcaaaatttctaaactaattaattgatttattatttttttattttttattaaaaaaattcatttggatataaaaagaaatatattaaaaaattaatttttatatagactaaattttataggaacaagcttgatcctatttttttctctaataatctagatttgtgtaagtaagcataacctttttttagtttaatttctaacattttttcaaaatatttataatttattgaatttttaattatttctctttattgtttaagatatgtgtttataaatataaataagtttgattttttccaaaaatcttagtttggttaaataatttattgaatttttaataattttagtttaatttttaagatatac

SEQ ID NO: 200671 - DNA, 776 bp, Cannabis indica
tttttttcatttttaatttagaaattattaatgtatttagtgtataatttagtttgttgattttttttactataatatttttataaggactctcacaatcaagttttaaatattttaaaaagggtaatggtgtttcttggctcctgatcaatcactgtattttttttttgtacagaatgtgaatgtgtgccgtgtgcggcgttgatggttgtgtttgatcaaattcttctatcaagtccttttgtacttattgttatagttatagagtatttttagcagctctatctgcttcttttaagattactatatttttattgattttggtctttgttataggttattacaagtttgttgtgtgcatactctttaaggtttcttttggtatgccgtattacaccgtattgtattatatagtattatattaaattatattttatgcaatatttttatgtaaaactatatgtggtattaacttttatggacacctaagtgtataatattttagtataaattaaagtttaatataatattatataaaaatatgatatataatccaattcaatataatacaatacaatacaatacgacttaatacgacgttccaaacgagccctaaatgaattaaataacttgtgtagatagatattatctctaattttttaggaatttatatcttttaggttgtatgatattatgactaggctacgtaggtttggttggacctcaaaaatggcttaattagtttggcagccattttcttttgtgtataaagttcc

SEQ ID NO: 200672 - DNA, 581 bp, Cannabis indica
tttttttttttaatgattgtattccctgtaaatatttaagccatctaataaattttaaagaaattttcaaataaattgtagtacaaaaataaagtttaaatattttattgtgatgtgtgtatttttataaggtatgaaacattaaattttatttttgacgtagtaaaatatttattattttttaaattttgtaagtaattataacaaacacaatcacttcaaaaaaaattaaactagtggttaatcaagaacttaatacagaaaagcgtgtatcagtaaaaggatatttgaattgtagaaaattccttgtatttgtataaatatatgtgattcggtaatatataatgtttaaatgaaaatgaaaaaaaattatacaaattttcattgctgtataaagcttggaagtgattcgttgaacatgtgatatttacactattttcgacatgatggaaatgtggagggaaggaaaggataggaggaagaggagtgaaaggagaatcaatttcatttgtttggcatgaatgaaagttagaaggaaaatccttcaaaaaaaaaaaacgaaaaaaagaaagaaagaaagt

SEQ ID NO: 200673 - DNA, 749 bp, Cannabis indica
ataaagagaggtatgcagtttttctgtcattctgcttttagtaactttctggaaagcctcattttttattatattttttttaacaggaatttggttgttccaatgaaatgggctgtggattctgtaggcttgttattaaattcactagcttcactcaatctaaaggatgaaccagaaacatgaacttcagaaactaataggtcagtggtttctaatgttccatcagacctggtcaaattttccaatgttgtaaaagaaaatggtaacagtttttgaatgcattaaattaaattggtaaactattaccataaattgatgaatgtcagattcaaagcttttaaaagttctaaaagagaaaatcaaatcttactgatccaccaaggatagaagtttgcacacaaaggtgatttaaggtaagattttctcttcaatccaagaggagctattgagaccaatgtgattaattttgtaagtcttcaatggacatggtaacagtaactaatggtatcattgtctttttcccttggtgaaccaggatacgaagattttatttggattgtagacaaggatgatgggtgtattttgtactagcaaacgtatcatgctaatcattatttgttccatcacccttcacccattattgaccttaaattgtatataatagttatgttcttaaatatgttcttctagttgataattggaccaaatgaaacatctattattgtaccccccccccaccaaaaaaaaaa

SEQ ID NO: 200674 - DNA, 518 bp, Cannabis indica
caacttttcccaagcaatttatcccggcccttcatattccgagctatttcatagaaaggcttgacaaattctattaatcttttgtaaaatagctttgggaaggatagttatttgggaccaataagagttaattgagatgagaacaaagttaatgaacatgcaccttccagcataggaaatattcctcgtgctccacatcttgattacagcaacctttttttcaacaatactatcacattctttttttgaaatccttttagcatatattgtaatccctaaatagcaaaacggcattccactaagttagaaaccagagcaatcagtgatatattgaatatcgtcactcctcattctagaacaatatatagcggtcttgttcctgttggcatgaagacccgaagtttttgaaaaacgggtgaagaacatcattggcaaaatacaattaaatctatttcaaatcagcatatcttgggtgaaatttaaaatctggaagagaggcgactttcatgagcaatcta

SEQ ID NO: 200675 - DNA, 1272 bp, Cannabis indica
cttatataaaacctcacttcattgtaaggtttcacatttcttaaataggacaaaaaagttaaactgtagctactagtgtaatgacttggttaaattggtttttattactagatggtacacgttttttgattcgaatattagttttataaatgttgtactttttctgaaattaacttttttattaggggaaaatatataatttaagttttattgggtggttgcatttacagcacatagatatgaaaaaaattctaaagtatatccccttaagaggggtacatacatagactccatttcttctgtaaatgtattgcttttagattgattagagttagtaattgtgggaccaacatgaatagatgtgagtagatgtgattattttcttgttgagatgggattgaactagtgtgcctatttgttaataaatattttttaaagaaaaaaaaaacacctttcactttgtgtttttgtgaaatgcctaaccttaaattatgaaaggaaaatattttgtttcatctcacaattctctcttctttcaactacattgaaaatcactctgattgggagcattgaatgatgtgttgctttgagttacatgaaaattactaaaagatattattagtacttaatgttttgtcacaatattattagtataagtaagtatttgattccatataatttaaaaagataatttttaaaaaatattactgaacaatcacaaaacgccacatacaaagtgttgggtactagtgcctaataagaatgctccaactaaattgatggtgcaatagtcaatagacacctgaccaccaagtccatatgggtaatttaacattttttttttttgacaaaatataggtaatttaatttgataaaaaataaattatttagaaaaacaaagaaattagtcaaaatgagtgacataggtgcctacctagttagatttcccaataatattttgctaatatttttttcattctcatcactctatatatagatgaagatagaagccatcatttgttccactactaaaacaaaataatttgatattaatttatggagatgaatcaaaggccacaaacaattccccgagttcttatcttccccatgcctgctcaaggacacgtcagcccgatgctgaagctggcggagcttcttgccatgtctggcctccatgtgaccttcctgaacagcgaccacatccacaatcgtctcataaagtacaccgacatggaaactcgattttccaagtaccctgaattctttttcagg

SEQ ID NO: 200676 - DNA, 945 bp, Cannabis indica
gctccgtcgtaaacgaatcgtacggtatgattgagaattgtattaaactacaaagacgacgaaccagatttgattgtgtttgcttcatcctccttttacacccagaagttgtaatatatatatatatatatatgttctgattgggagaagttagaatcagaaaatgaaaaacagattaggcactaaaaatcaatacacgatttcatgtcgtctcaaacagtgagtcaaatttgtctgcaaaaaatttctcttcaaaaaaacaccttttttttttataatgaataaatttgcactattcaataagtatttattaggactatgaaaattcttgagttttttttttttactataagtttagaattgaggagattataaacatatgaaaaaaaatgttttaacatttccttaaaataattttcatataaatattattgaagctatttattagaaagggaatacccaaatgtatataattattaaataattgaattcttaatcaaaatttaaggaaattaatcatcatgatattagttaagttttttttttgacacataaaaatcagatttcaagtagctcgaaaatcaacacacatgagttacatgaactaggtagtattcccatctaaccttattagctcataattttgtggcaataaactttgaatttagtttaaaactgtgcttatataattattcagagaaagaaactgcctacataggtatccagtttgactccaatatgattggaataaattacagtctgacctcttttcttttcttgagtgtgttgaacagttcttcaccttgaattaaggatgtttgaaaatcaagcttcatgaatagtcttctctcattgctaagtttagcaaccaaacaacacaataatgagtaatgacaagtttttcaatttctatagtaggaattaggaacaccaaaccccttcttt

SEQ ID NO: 200677 - DNA, 2122 bp, Cannabis indica
tttacataaaaacatacaacatacacagaaaaatcataattcaaaccaaagacaaatcaatcaacagtaatttttggaacataaaatcttcatttccaagtatataagaacaggcaatgaagaatcgtaaggctaatcgaacaccatgaacaatagtcagatacagattagatcaaactagaagtgtggacataccggcttagtctgcgaggagaaagaatgaggaagaaaaggtccgagagatcgtcggagatgagataaagtaagtttggtgaagagaggaactgtaatttgcggcttgcctaaaaccctaatgtggggtccatgtccaaacataagaagagtcaaattttaaaatcatgaagataaaaataaaaattaataattcatctgtaatgggatgataaatcttcggtgaggcttgatctcatattttacaacttctcgtacacatgcacacataattaataagattgttgttgttggtatttttttttttttgatttatttattttttttatagaatattaactaagaagtgattggaaaaaagaaaaaaaaattgcagtaatttatgttcttatgtgttgtgaagttcgtataatgtatgcattgatgaataattttttttacgtggtgattaaaattacacatgattaatgatgtagcaatttataattggcggtggcatattctcaaatatggatagcttattgtctaactgaatgacatactttgtcaaatcatgaactacagaattcttatcgtaagttacgtggaacaacactaccccaaaaattaaataataaaaagttataacattctcaaacaacaacaccagctcattaaaaaaaaaaaaaactcttcttttgttgatagttgttaccatagagtcaaagtttcgacttgcaatacaaaaatactaactaaaaaaaacaaaccacaccaagaaatttcgaattaaacttaatatgctaaattcaaatataaacacctaactgaaaaactaaaactcaactacaaaaagataacgaaattctgactaaaacctacagagaaccaatccatatcaaatataaagacttaaaaagatttgaaatacttatttgtcaaaactgaaaaagtcgttgaagtaaaagtcatgagcacaaaattgataagtgctcttaccttatgaccatactacaaaattactctaaataattaaggacaatttataataaatggcacaacaaccgtaaaaagcacaaaaacatcaaattattagttttattggcttatatatgttagaaaaatgttaatattctttgattagttaggatgaagaaacctaatggataaaatattttgtatctcgtcttaatccataaaacagattttttagtacttagaatagattcttgtattttttttgtcaagaataaggtattaagagtgcattggaattgagttgcaaataagaaaaagagtttcttctaataaaacttattgtctaaccaaaccaaagaacatactaaattaatttatgagtcactaatacaaaattgtgacagacataatgccctaaatttagtaaaatacacaacgttaaatcgtgtacaatgagtcataacatataataatgtacaaggtgaggtatgaatcattaagcgccacaattctgttggctttggtgcctttcaaggcttttgcgcttatttttatagcttgtccctaattatttaggataatatggttaattgttccatgttttcatgagaaataaaaattttcaaaagaaattttttgcggtattgagcaccatgagtttagttagattaggtactattatattattgtcaaaagataatatagtccacactgcgttgagtaaacccctcaaaggttagtcatagttggtacattaaaaacattatttgttgctttttcattattgtgtttatttccaaaggaatttttttgatatcctagggtatgggagcattgcagggcttatttgttgttactagattgcatatacaagtattttgtaggtcttagggtcttagtaaggggatagtgatcctaagatgattatgaagtaaaataaaagagtttagttggctagttctagtaattttat

SEQ ID NO: 200678 - DNA, 1195 bp, Cannabis indica
tttgaatttagtgtagtgttatgttatttttgtgtaataaataatataatatctataaatgtgacaaaatataagtatattttgacaaataaatatgtaacatatttgatttaaaagcgacatttgatgagtgtacaaatttgttatgaaaagatttataactcctttatattatcagcaatttatttgtgaattgtagagttatttcacaaattttatttaattgtccttgtgacaattttgccatatagagtagttgtaatttttaatcttcttctattctattattctattgggtatatatctttaataataacacgaataaatagctatttggaagtacagaaactctttgttgtttgttggaaaacaaatgaaggcacggtgttctagaagaagtgaatgtgaagttccaggagtttgttaatgctgaaatggccgaagtgatcactcacctgattccttatttggggttaggggagtccgggggccccttgaattcaaatttcatagttacaaatagagcttttaaggagggatggtgtggaatggttgtgttagctaggggtttgtaacaatagcaatcactatagtatagtatcgagtagctctaaagggttctcaggtttggatgcagaattgaaagctgtcgatttagccttaaactgggctgctgagatgaattgaaagtttgttaggcgtaatcgtatcacttttgttaatgacctagttgttcaagttagggtcctgagaatagttgactctcgatgtattggggagggattgcctcccgtcaatcctactttgttgttttaatcctaatgaactgatgttctctttcaaaagaaaaaaaaactattttttctatgtataaaagtattctagttttagggttgtaacaaatatttaatatctttaacaagtttgtggatcactatttttaatagtttttgagtaccaacttgccagtttatattcacatgtaagcaatatgttacaacatctgaaataaattcttgtctttttcttgataagtacaattttatgccatgaaattgttagaaattttattaaaataaaagaaaattaaagatattacaactctattacaatataatacaaaaattaataaaaaaattaaataaatatataacacgtacatatatacaatatatatacactatatatattataa

SEQ ID NO: 200679 - DNA, 632 bp, Cannabis indica
ttaaattgggacatgattacagataatagtgccttaattcctagaaaaacaaagcacaaacaaaacccaaaatctacgaatcacataacctttaattttctagccctaaattactcaaacattcttatacagtgcacctaaacaataaaataatgcaaaaaaaaaaaacaaaacaaaacatataccaagaaactaagattgaaagcacgaaagaaaaagcaacaagagagaatgtcactaaatggtttgatgagagattctgtgtattgaagagcttcggggtggaaattttgatgtaaaaaaaaaatttgggtcttgatgattctgaagttgagggatgcaatcggatgaaactcgaataaaaatatgaaagacatagaggtcatgcaagtttatagaagatattggttgagaaatttttaaagcttgaaggtttcttgggctaaatggcaaaaataataaaaggtttgaaatttatacctaaaagatgataaccctttgatcaaaataaaattgatcaaacagatggtaactgtacgagaaaagaacaattggagcattaaatgaagaaataatttgcctcaaagttttgaactaccaaaattaaaacatgcaaattttaaaaggaaaaa

SEQ ID NO: 200680 - DNA, 640 bp, Cannabis indica
aaaggcatccagcctaaaaaacaacaaaaaaaaaaaaaataaagtggaaggccatttggtattgaagactttaaaactctttttcaagttgaaaaaggatcgttaattaaaatattcacatacatgacaacaacttaacaaacttggtttctaaaaaaaaaccttaataaacttggtacgataatacaatcacatatgatatgttggaacttttcactctaaatctacactaatttaaattaattaaacaaatcgtcttttttatttttaaaagaaaaacaacattaaaaaaacatttacgtataaattaccttataatgataagtacacacaatttatatataaacataacacacatagtgatagtggcaaattacttttgataattgtaaagcgacctattttaaataaaaataattaattaaaattacttgttacataaatgtctatttgtatataaataatatgccaacatattattattcataatttatatagatgtgtagaactcagtgaaaacactaataatatatgtttgcttaactattatttatgtggaactcacctaaaatcactctaattttttatgtatgtgttgcatatttattaacaataataatgcatatttgcttattatcta

SEQ ID NO: 200681 - DNA, 1151 bp, Cannabis indica
agcttacactaaaatttctttttcttttttttttttgttttttttttttttttttttctctaattcatgcttaattgcttattgtatatatttctttcttctaaaatctgcacgtttactaccactccactattttttattggcaaattaaataccatatatacttaatattatataataattattaatttggtaaaaataattatatataaatgatattataggaggcatggcatggactgtggaagagcacaagaggttcttaatagggctagaaaagcttggaaagggagattggagaggcatttctaccaactttgttcacacaagaacttctacccaagtcgctagtcatgctcaaaaattttttaatcgacacaccaatatttataaaattaatcgtcgtcgttccagtcttttagatgtacgtacatatattaattatgttttttaattatataatacatggaagagattttaatagttataaatactttattttcataatatataataacgggtaatatttttttatgcagatgggaggagacaaaatattttataagcgcggtgaaaaatttgatgaaaaaactagtaattatactaaaagtacctattttgatgatgttttaaaaatcaatcatttagagaggccaatatatatgaataatgaatataaatatgatcatgatgatgattataaacatcatcactcatctccaacttctcataaacatcatcactcatctccaacttctgaattagagctcaaacttggagcaccaaacacatcaaacactattactaaaacaagtcctcaaaatcttctattttattaatatgttattagtaataattagatgtattatattttgtttatttgagtcatatgtttgtttggctaaattatgcaatttaatttaattatgagattgagatgttggggggtattttattgtcatcgattcattgaacatggctaaatgggtttttacccacaaccactataggtgtattgatattattactatttttatgaatatttgttgtaacgatccagaggtctaactatttctatgaatgaaggtattttttttttaaaaaaagattcattgaatgaatatattgtttttatcagaataaaaaaaaag

SEQ ID NO: 200682 - DNA, 1459 bp, Cannabis indica
gatataaataattctattttcatggagttatcagtctctggtttagtcctgaatgtatgaagggtattttagcaacaactgtctcaaaaggtgcttcttttgtattttatattttgtgctttatgattaagaataataatgacaattttgaaaggataaataccattttgaactttatattttgtaaaagttattaattggatcctttgtttgttaaatgataaaataaaccttgtatttttcaaaattgtacaaatatgaccctgaattattttctgtatttgttcgtgttattgaaagttaagctcagggtcttatttttactatattgaaaaaaaatgtaaaatttattttgccatttaataaaatagagtctaattagtaatttttgttaagtatagggtccaaaatgatatttacttattttgaaatgaaaatatcattctagtccttgtaattttagtgaaatatcatattttgactttcagtttttaattttgttttttcccttttaaacaaaatataactcaaatacaaggtcaaactcagatcaaatgataggcaaagaactttcttcaagttgtgaggttaatgactcttaatgtctcataatcttaggagtcttaacattaccacacaacaccatttaaattttaaaatatagttaatgctaaccatgttccatcagaggctgaggcttgctcttcaaatgaaaagttttttcaatatgatttgatgagtgatctttattatcttacttttatataatcttcaactcatgtttatgaccaaattttctcttaaggctctcaactcaagtatccatgatttaaagtcacaaaatcgttgacaaaagctggctcctcggtagaatgtttaaagaataaaatgtgtattgaccaaaataactctattgcttttactataaaattataaaatatttttttttaaaaaaagggtacactttgactttttttactatatttttattaaaatattattttttctttgtaatgaagtgtaattgtaatgggaattatattggttttggtatgtaatcattattacattataataagttataaaaaccaaaagagaaaagcaacaatataatggacttattcattagcattataattaccattacaataaatcaaacatcactaactaactgcttttatcttatacatgaaaaaatccacttagatagagaagtttaattaaaatctacaaataaatgcaaatcataattaatatattgtttaaatgcacactgaattttacattatagtcagaacaaaagtttgctttcttgagtaagtttttgttctaacatcttaaaaaatcttagtgtttttttttgaaaggttaaaaattcttacttaataatgatagaaatttgcaatcttcttaattggcaacaataattagttatagttttttcatctatctatacatt

SEQ ID NO: 200683 - DNA, 810 bp, Cannabis indica
ttaagcatttctattatctaaaagaaacgtttgttggcacatatatatagtgttacttataaatacatgtcatgtgtgtacaatgtgagtaatgtatatgaggaaaaattcaacctttgaagttgatattgataaattcatcagacattgctcttgaagatctcatatcaacatcactagcacaagatgagtaaaaatcttcatcatttaaatcatgcatagctgtactatttctagcactagtagtagtaatctcatggtgattttgatgatcactacttgtactaacaacttctttcaattcttcaattttctcacttgcttctttgatatccaatctcttctccaaatcgccggtgcacacttcattcctatcttcaatagcttcaccatctcttcttcctcccaaccttcatgcttttcgatcactaactcgtccggtgggatatttgagctcttcaccaattcctctacttcttctcttccggtcactatttggagtatcaatatgccgaggctccacacgtctgttttcttggtgattcgcccgtgttggaggtactctggcgatttgtaagccgacattaattgatgggcgtcttcttgattcatcaacgggattaggccatagtcacaaagtattggctcaaaatcttctttgagaagaatgtttgaggtgttgaggtgtccgtgactcgagattaggcttggaagctcgttgtggagatgtaaaatgcctctagctatcccttttacaatctttaaccgcgttttccaatcaagtggacgatgatcaactgttgttacaat

SEQ ID NO: 200684 - DNA, 672 bp, Cannabis indica
aataattgttcaaatataaacattgagtatttttaccgcaaatatctatataagaatatatcaagaagaaagaagatcccaaaagaaaaatgtatcatgcctatgttctttcagtttgtaaaattggtacctaatatccccatatatgtcactcacaactcaaaagagagaccattacctttcttgaagaacaaaattgcttggactctattcttcaaggataagtaacaatgggcaatttttagatgtaaagatccctacaagaaaaaataaaatttaaaatgtgttctaatacgataattaataagatcaagtaaaatttaacaaaaaaaaaaaattgataaaggtgtgagattaaattcgtaggatcatccaatccaatccacaaacaagttaattacattatatcctctgtagtatgcatatttttcaaaaattgcatagatattatactatcctccatataaattattatcttttgtccccaacatatcccaactctcttcatacgctatttgtattagtcgctaagagcactcccaatggcttttgtaatatagaattttcttcaagtataaagaaatcgcgttgaaataacactccatcagatttcgttctttttgcaatttggattaatgcagcttcgaccaaaagtgagagagagagagagag

SEQ ID NO: 200685 - DNA, 990 bp, Cannabis indica
aaattactcaaaaaaaaaaaattgaacccatatttaaagaacatatggtagtttaagaaaaaaaccaaaataagatgtataattttgaaaataaaaacaatttttttagtagtttgagtaggtggactctaggtagaggcttggtctgtcttaatataggaccgataatatatgcaaattggatgatttggtttttcattagcgtttttcagcttgtaatttttatcagtttattcggtttagtttcagcttaaacggtttgtaatctcaacatatactgagtggggtaaaaatatttcaactcatcccatacaacttgaataaaccgattaacaattctttttaaaaaaaaagttatataatcaaataaataaattatttcatatttgtcatagtggagagtgacttgaaaactactattcaagcccttaagggttaaatttctagatgagaaattaataattattgtactcattgtaaaaggctttctcataagtttttggattatagtttttttcaaattagtagaacttgtaattttgttgtccagtaaagtggacttatgctcataacttaatgatgtgttgactttgtttagcaatttcgaaaaaatattatctataatgactgcaaggtttaatattcttttgaatctatgcacgcattttgtttgtgttctgtaatcaccttagatggtccttctaaatcaaatttaataatttaattgaatatgtccttaaaaaaatctaatttaattgaagaaaaaaaatctgtatattttatggactttaatattttcattttttttttggaggtttttacaccacatattaaaaattttaatttttttacctttttactgtgaggcggaatttttttcaaaaatactgtgtagtatgttaagtttttactgttatgccacggttattttttagtagttccactgttgttttaattgttctgttttgctgttttacaattgttttataa

SEQ ID NO: 200686 - DNA, 1571 bp, Cannabis indica
tcaaagaatttattctatattcctttttaactccactataaaatgattctagaaaatttggtggtgacgattaagaagctccaattgatcgttttaatatatattcgatctttttcaaattaaatggcacaatatgcatgctagcttcggcttcatctttatgtaaagtggatattggaaataacgtattaataattagctcaagcaaaagatccaattcttaatctctctagtaattatcacaaaataccaaatgataatgacaagtgacaaacctgcaaatcttgcatattttatacaatatctttctcaactttcatctctgttaattttttttaaaaaaattcttaatattttatgtaacaatcacttttgtatagatgataaattatgttgaagttgtcttatctacaaggtctattttttaatctttgtaatgactgtcttgttatatagtgatgttggaactattaagtgtggagtttcaatttggtttaattgggaaccttattagctgatctgtttggttgtttagctactgattcagctattgcattctcaacgagatcttgattgaagagtcaagtgaattgattcttaggtttcaagggagttaaaactgttattacttgagtggatacttaagtaattgggtaataaattgtattccttatgaatgtaacatgttgaattatagaattggaatttgtaatatttaacattgatttcatattggaagttattcagcagcctatataatgtatttttaaggcaggtgaagcatgtaaattttgtgtgtgaatttacattgctttcgattgattaattgttctaaaaatttaagaagatattaggtataacactttcagtttagagaatatacatcaacaataaaatccctcatatttcaattaattagactactaaaatatgagatttctgacaattgtaaataatcaggttttgtattaatgtcgtcaatctctaagatggatgcctattccacccactatttcactgttgcaaaaccgagtgaaaaatagtagataaatgatacttcaaaatcgtattattgactgatttatatattatatatacggaataattacgttcaatattgactagatatctcaaaaactgaccatcaaatttcaaaacaacacaaatctaatctaaataatcaatatccttaattgatcaattcgactttgcgaatgaagtcccaaaaaattacatcaaaaagcaacatggaaacttacaatttcataattaagctacaacatcgtcattctcatattttacaatccctaattgttagggattctagctagtaaaagctcaatgaagaaatctacaatagccaataacgaaagatcaacggtgaatagtccaaaaatgaaatgagcaaacaaccgaaattctatgaatatttagaattctgaattttttaggcggagaaactaagctcggaacaatgatgtgcccctaagacccattttgttgcaataagaaaaaaaaattatagatagtgaaaataaagagagagagagagagagagagagagagagaga

SEQ ID NO: 200687 - DNA, 1579 bp, Cannabis indica
ttaaaaaattgtctgttaaaatttaacaaatatttgtacttaatactaatgaataaacaaaattttgtgtcttagatgcgctctgctgtgaaaaaatgtggcaaagtattttccaacggcaatcataagtggaagaagccgtgataaggtatgtatataaatggattttttattttttatatcgaaattgttgttaataagatttcaattaatttactaaagcaaatttcattatcgtgttcaggtttttgatttaataggactaacagagctctattatgccggtagccatggaatggacattatgggccctaactgtgtcaaatctattgataataaacaggtaattcattgattaattaaccattaaccctttcaccttttacagctcttttaatatgatacattaattgatgaactaaacattttgtttataataataggataaggaggtaaagctcttccagcctgctaaagagtttttatctatgatcgatgaggtaattgaaaattttatttatttattagaggattatgaattgaatagaattttctttctattaattaaaaattcataatagagttttcttaatttttttttttatcaaaattaaattcaggtttttagaacccttgtcgagaataccaaggcaattgaaggtgcaaaagttgaaaatcacaagttttgtacttctgtacattatcgcaatgtagaagaaacggtaactaattgatcatataatatataattatcttaatttggttaaaacaaaacaaataaacaagctaaatattaaatactaattatattgagttcaatttttgtgtttaatttgttatcagaattggcctttgattgcacaatgtgtccatgatatactaaaggactaccctcgtttaagattgactcatgggcgaaaggtaatattctattacaactttctttatctttttattttaaaaaaaataaattcatttttttaattactgttttcatttattacaggttttagagattcgccctgtgattgactggaacaaaggaaaagcagttgaatttttgcttgaatctctaggtatataccatatacacattcttgcatatatatgacgtgttttaatgtatttaattttgttatatatattttttatggttttgactttaaatatcaattggtgcagacataaacaatagagatgatgtgctaccaatctatataggtgatgataggactgatgaagatgcatttaaggtacttaatttatttttttttttttttttgaaattgaagatattactaataattaatcttagaagttttttctaattttttttttttaaatttgtaccttttttttggcaactagttcttgtctatttaactttattttttttcatttcagtttttaagggaggaaaacagaggttatggtaattctggtgtccccagtacccaaagaaaccaaagcattctactctctcaaagacccatctgaggtttggaaccaataataatactcttattttatgattttattttgtataattttggccttgttgtattaatgaaccctctta

SEQ ID NO: 200688 - DNA, 2223 bp, Cannabis indica
atattatttttttagaaaaaaaaaatacatggagagatattatatacctaataaaggataaataactaattaaaataatgttagaatatcctatgcgaaaaaaaaaatactttttttaaaaaataaaataatcaatttattgattttattgttgataaaatatagccagataacataatatgaataaaaaaataaaataaataataaaacgttcttatctttaatacctttttattgtgttccttcttataaaagtttctccttctataaatacgtattagactcaacaacaattctcattaaccaaaaaagaaaataattcgtcatcttgttattcactttaattttttacatatcaaatatttctcattttttctcttcttcgtgccccatggaagcaagcaacgaaactaccatcctcaccacccctaccacccctatcaccgttactcccataactcctgtcattgatatccccaccccaactacccctactattattatcacccccagcaccaccacccccactacccctaccacacctaccactgaaaccatccccgctatccctatcagtacaagcactacgagcatctccaaggacgctgcaccattatgccattatactccaaggatacactccaatattatacccgtccctgcctctattgacaacgaatcatcccttgtgaaacctgacaccataaccaccattacaacctcagacatcaccaccaacacaagcctgaacatcaaaaccaacctcaaccctaccattaccaacactaacatcaccccttccaacaccaataatactctcactctcaacaccaacacaactcatatagacttagacactagccttaccaatgacaccaccaaggccaagaaaaaaacgaaaggaagacagaagatagagatgaaaatgatcaaagaggaagagaatcgcctcatcactttctcaaaacgtagatctggtatttacaagaaggcttgtgagttggtgaccttatgcggtgctgaggttggtgttgtgatattttcaccatctggtaaaccattttcttatggtagcccttcaattgatgatgtagcatctcgtttcctccctagtcaaacagacacgcaaacatctccaattgtagaggcccaatatcgacgtgtgaggatcaatgagttgaatgaacattacaataatatgtcgaataacttggatgctgaaaaagagacactaaaagagcataagaaaatgacagcagaagggtcaacgccaagggcgatagatgtggcaccaaacctgccaaaaggatggtgggatgcaccggtagatgggctgagtttggatgagcttaagcaacttcataaaaatcttgaagagttacatgcaaaaatggttaagcaagttaaggagaagatggccaatagttcattatgttttattaattctacttcctattacaaataataataatttaaacatcttgtcttcacattttgcagggattaattaataggagtggtactaatcaagaactaatcaactcgcttatgaattttgttgaacatcagagtgcaactggaatccatgcttcctgcgattctcatgttatatgactacaattatatcgtgaagaaaatcataatcaacaatagttattcatgtatttcagttaaaattgtcggtattttttcctttgaaaaaaataagttatttattttgttttaatctcttttcgtagttctttcacaaatataagaaaatatctttactattttataattatataacttaaaaaaagaagtatttaaagtaattttagagcgtgaccatcttagtcatcgaccttatatgtattaattatatgtatattatattatgttaaacaattaaagaaaagaaaaaacagttataagtttattgtacctgtttattaaaataaataaagtttttttttacagataaataaataatagttcaaaaatatgtataactcttcaaaattatacatattattccttttaaaaaaatcataactataagcttcttctataaaaagaaatttataagctatagatatttttttttttaaaaaaaaactaaaaataaaaaaatacctaattctctattacaacgaagggagaaaggaaaactttgtaacttaaaatagtataattttagacaaataagaaagaaatattcatgatacatatatctatatatac

SEQ ID NO: 200689 - DNA, 1098 bp, Cannabis indica
cataaaataactataatttatttattttgttgctcgttatgtgaaaaaaaaataattttttataaatattaaataatttaatattaaaaataacaaatttaaaataatcgactcaatccctactccaatccctacttttaccgattaaattagattttaattattttgcggattagattggatccaaaagttaaattccgcaatcaaatgatccattatgaataaaatagtacatattacattagattagatgaacattctaatttgaatcttctctgattcttctttaattattgccttaaagtctctttcggttttattttatttttataaagcatgagagaaaaactgcaagtggagggtgcggcgtaagatatatataatagtttgattatatataaatgtagtagctagcttaacctggtttttccataagtgtttattaatttattttttaattttgaatagataaatactctattatttttcctaaagtttttcaacatcttcctttgatcagttgaaatttgcaaaaggtcactatcatataaatatatttatatatatatatttgatttgtttattattgtttcttataagatatattatattaatggaaagttttggaaactatttcctaatcattcaagttcaactgattacgtttagattataagtgtatagttataatagacattattatattgattggtgaacaaacacagataattctggtttttttaggtccactctatgatttagggtcacttcttttaattttcttcctagattagaagattatcattttttaatggttctaaaggcgtttctttttttttttatttttttattatttttttttaaattaagcgtagatttataatagaataaactagactcatggtcgttacataatatgttttccggaacagaactgatcgggatcgatccatacacctggtgagtaaaagcccacttagcgacattgtgtgccgcaaagttacaatcctactaacattagaaaattacacaacattaaaaaggagaagactagtacaaaaggagacatagttctctagagtccgaatgggacgcctt

SEQ ID NO: 200690 - DNA, 1286 bp, Cannabis indica
  modified_base (1171)..(1171): a, c, t, g, unknown or other
cttcttccactacactcaccttgttttgacctttcttttcaccggcgccggactcctcgccggagggagactcctccggcgactttcctttaatggctgaaacttgactctgtttcttttcactctcattttttgcagcgttttcagtagcattgacttctgttttgttacttggattaacagctttgttctttaagctttctgggtctttctcttttccctcgttcttcttattcttcttcatcaccatgattttcccggaaactttctctttttctttctctgatgatatccaaacctcggcgcgttttcctgtctttaccagcttcttgatcaggatctgaacgtcgacgttaccagtgactgtaactctttgttgttgagaatctataatcgtggtataaacacctgagaaaatggtgccaaaattaaagtatgaacagagcaaaacagagctttttgcatgaaaatagaaaaaaaaaaaaaggaaagaaactttacaatgccattcttaaatagtgttacttttagtattacatttaagtatatatataatataccatcaattttctgaagagttttcttgacttttctcttgcaaccttcacagtgaatggaaactttcaaatcccatgtctgtaaaacaaagaaaaaaaaaccaaagttatgaaaaagaaaataagagaaatggttaagttagaaatataaagtgaactttactaaccttgtacttgagtgattcggaggcctcttgagctgagattgaagccattgggaggtaaaaggaccaagcttgaatttgagaataaggtatatatgaaaaaagttaggagctttaaatgaagtgtttttaatttgaagagaacatgaagaaaatgattgaagaaaacagccaaaacgtctactctatagtctgcaatacatgtactctgttagggagcaaagggcctcaaaacattacgtgaaaatgacaaaagaaacttttgctccctctttactctcttccgacttagattttctttattcatgtattttatattttgagaaaaatatgctttatactatactagcttgagtatttagattaatctttctcataatgttaggatctctatcaaaagactcttacaagaagaatctatctatattatccattttggtcctctaaagnttcctcttattgtggaccacacttgtgtcaaggctgagagaaaaacgcaacaacaaaacgatctgtacccttaaattcctttttttttttttttttcttttttctcttttactac

SEQ ID NO: 200691 - DNA, 1293 bp, Cannabis indica
caaactcgaatccgaacacggtcccagactccaaacctcgacacagacacagaccctaacttaggctggcgtccgggtcgtgattcggggtccaggtaaggttagggtctggggtcggaatttggtgtctgaggtccaggtttgggtcggattctgggtacgtgtttggggtcggggtccgggtcagactgaggttggggttcggggtcaggccccgatcgagtccgtgtttagggtacgagtcgggtctgagtctgggtctagggtctggggtttgaggtccgagtccgggttccatggtcagggttcaaggtctagggtttgggtccaagttccttggtcagggttcaaggtttggggtctaaggtctggggttcgagtctgggttccatggtctgggttcacggtccaaattccatggtccgggttcatgtcaagtctaggtttatatttgaagagttatttttaaaaatgtggttggttgtagtgtgatttaatatttttgagttttaaaatattaaatttgtgatttgtaaaaaatctaaaaaaaattaagtaagaaaatatttgaagattttttaatgtttgaaaacataaaaagtattaaaaaaattgtttttagtttttagcctaaaacttaaaattattttgagatttaatttttgaaaactcttaaccaatcaaaaattttcacacttaaaattattttgagatttaagtttttgaaagcataaaattattttaaagttcttaaccaatcaacccctaatataatattttgttagttatataaaaaaataaaaatacaatattttgttaaaattcacattaattaattgagctcttaaagccacctcaccatgatgaataagccaaccttggacatttaggatatgaagggccatttattttatggtactaaataaattaatctttccaccacttggaaaatttaacacatatatggaaaataaataatttactaaatatattaaaattagcaaatatttttttaaaaaaaagaaagaaagaaagtggtagatagatatacatagatgaaaaatgaataataaatcattcatcaatagtttctaaattcgaaccattgcatacctaaaaacttgaatttcccatttttagttaattaaatcaataattaggtttaatcatacatttggtacgatttttgagaattttttggacgtataacatatatttaaaaatctataacaattgcttacgaagataaaatttatatttttattatctcgtgtattttttttaaaaaaaaat

SEQ ID NO: 200692 - DNA, 1128 bp, Cannabis indica
acttacttacttacttacttacttacttacttacttacttacttacttacttctctctctctctctctctctctctctctctctctctctctctctctctctctctctctctctctctctctaactttaataatgtacaacttgaacaagagtcaaagcggctatgccctacccaagagtaatggactataaaaaatgagagggtcacactacagaaaatgttacttttatcagcacaaaataaaaagcgttggtaaaaataatttttcccaacgcgtaaatgcactggtaaaagttaaattttagccactgcaaatgtgcgttggtaaaactttgatctttttaccagcgcagtaacacagtagcgaactgtactggtaaaagtgacattttttgtagtgtcaagtagggccgaccctaagagtaggtaagtcaggtgtgcgtcccgagcccccgaaatgtgattaaaaaatattaatataaagatcaaatattaaatattaagaaaatataacaattattatagttttttttttgagataataacaaatattatttagtgtagtagtaaagagtattactttaagctaaaataactttttaatctctatatttctattttaaaaaatatatatatttaatgtgtaattataaaggattgaatcttagaaagagtttttaaaagctttaacattacactaaaatactcaaactattattttaataataattaaaccatatataaggctttaaaatttaattttatcataagtctcgtatactttacgacctcccataatagaatgctccgcaacaatacacttttttactttttagtacaagttaaatggtacaaattaattaattagagagttgccgaatatgctcatgtgaatattcagttggtaactatttggtttggtgcattttcttttttttttttaaaaaaaaaataagtgaattgtccctggtccctataatataataatatgtgagatgatgagcattattttattcattattttagttgattaaatatattgttgactttataacaaatatgtataaatctcaaaagtgccgcatatctacgtaagagcaacttaaaatacaaacatatttcatact

SEQ ID NO: 200693 - DNA, 610 bp, Cannabis indica
aaaattaaaaataaataaaagtaaacatcataatcaaaaaaaattgaaccctaacttgtctatctacttgattaatcaatcctctttcttaactcattcctataattaaaaaagaaattattaatttggacgaatgacacgtaaatatttacgtaacacaaaacggttgagtgcagaaatataatttaaattattactgttaaaaattaaatttaattaaacaaatatttacatgcaaagtctcggtaagaaataagataataagatggttcgatttcggtttaaaccacgcacataacacttattaacaaaatgacgagtgaaacgttgtcgttttatttttattaacgaatagaatggaggaatgtatatttgtagtcaggtctaaaaaaaagtataatgatttttttaaaataaaatattaaattttgtatttaaaaaaataaattagataatattttaaaagaaaatagttatgatatttaatatattcacttcatatgttttaatttttatattctttaagatatactcattttcatttttatagataatctttctattagattttaaaagttaacataaaaaattggtcaatccacttgaaaaa

SEQ ID NO: 200694 - DNA, 875 bp, Cannabis indica
ctcctgcccaaataaaaaaaattgactagcaaacttcaaaggattcttctcactgtttcaattttaaagtcattccgttaccaaattacccaagaaaattcaaaggaaaattaacccactggatgtgtgtaagacccagcgaattccatctaaattcattaacacaaaattgaaaagaaaaactcaagggtctgccgggaaaacgaaatttattcgaagaacatgtttattaaactaatttctcagaaaaaaaaaataaactttctgaaaaagaaaaatcaatggaaaaaaaaaaaaagagagaagaacttgcctgtgatttgcagaattctgaggatttcagtagatgtctttacagatcagaatcgaaaagtggagtctttgtaatcggaggggtgttttacatggtaagcaaaggctcagcttcggcaataaacaatcgaaagctccaaaaaattgactctttcgttatttcttttcttgtcttaaatatgaaattaaataatcaagaaaatacattaaatacttttcaacagcttcttttttatttatatatattttttattccatttgtaatattttaatctactaaagcttgttctttttttcgccagctgattaaactatctgcatgttgattggctggtttaatgaaaagacaactatgcccttcctttgactttattactatgcatagtattggtttactattggatgatgtgttgattacggttgacagctaattattcctcgtttcccttttattattcttatattttcccaatcattttctttttgaaagggatattttttccaatcatttgctggttaaatttcatttatttttttacgtcaaaattttttttaaaaaaaaa

SEQ ID NO: 200695 - DNA, 633 bp, Cannabis indica
gattggacagaatacattacttaattcctacccggagttagccaacctggttagaacaaagaatatgtgcatcaaagatatggcaattgtggaggaaggtggattcagggtggtaaattgggacttcaaattcagaagaaacctattggacagggaagtttcgagtctgatggatctgttacaacaagtggaacatgtgaacttggctgacttatcaattgacagtaggggatggaatccagaatatggtggctctttctcttgtaagtccgctttctcttgcttcacttcagataatagctcaaggaacctagaatggactaaaaccttgtggaagagttgtgtaccagcaaaagtcaaagtgtttggatggttagtattcttgaggaaagcaagtgtgcatgaagtattgcaaaaaagaagaccatacatggcaatctctccgggctggtgtgtgtgttgcaagtctagttacgaatcaattgaacatttattcttagaatgcacatatacgcggaaaatttggtcgttgttgttcaaagaattttgcttggattgggtcttacctggattagtctctgctgtcctaataagcaaaccaatggggaataaaaggaaagttaaattgtggag

SEQ ID NO: 200696 - DNA, 740 bp, Cannabis indica
aaaaattaataatattttattatcttgtattaaccaaaataagaaaagaataagaaaaaagatagacccacatgacaggagcagagataagattgaagagtaagtctataagtgagagttggagaaaaagatttaaaatttgagatggaaagagaaacagagtttgagacagagaaagattcagagtttgagagtttcagggagagaatgagacgcagaggaggtgaaatcgatgacgttcgtgcgtccaaactctaaggcctatcaccgtcgtcgtcgaatgtgcgtcgttgttgtgcctggaacatcgacttctcacctatagatctggtatttttcttgtttcaaaagtgtaatatgagaaattattgtcattgtttcttgtatagacatggcatccaaaaattagttgttgtttatgatattgaaatcgaaattttcttatgaataatttgtatgaatctgtgtttgtgctctctctctggtagcgcttttctgttttttgggaatccctgaattctaattggtctttagggcaaagagcttaatcattcttttttttttttcctttctttctttgttttgatttaaatgggaaaaaggaggactgtttggttgatgggaaaaagagagtcaaaattaaaagagtgtaattgatgtggccatggctaaaggttgaagagagaggagtttgagattgtttgtggctatagattttgaagtgaaaaaataatttaatt

SEQ ID NO: 200697 - DNA, 569 bp, Cannabis indica
ggcatacttttagcattttgagaaaaatataactcaatattttttatataataatgtatatgtagtagttatagtagatatttaaactagttttgaaaattttcaaacaatattaaaaataggatttaaataggcaattgcaattatacatgttgtttttataaatatatattatgtgcacaattatacatgttgtttttaccataaactcgattctaattctaactcctgtctaaggtttgtgattggggtcggggtccaagtcagggtcggcgttcgagtctgaattcgaggttcaaaatttgtagttgggtcagagcctaggtccagttttgaatttgaggacaggtcgagtttgagttcgggacctaggtcgagattggggtcagggtccaaggtcgggtcacagtctgatgtttggggttagaggtcgggttgggggtttgaggtttggggttcgatgtcgggtcggggtccaaggtcgggtcatgtctggattaggccaggtcgagtccaaggttgggtcggggtttaagacgggtttgaattttgagaccttgggtcgtagt

SEQ ID NO: 200698 - DNA, 1093 bp, Cannabis indica
attatttaataatatttcttaaaaccaaaaaataatcatatgaaaataacggaattggcatttttaccctccttttcttttgggattttctgaaatttaaaattaatgtaaaatatctttttttttatctgaaattaaaaataaatttaaaattggttgccactcaatgaaagatagataggatccaacaagtgggaattgtaatttgctccactatttattatttattttatttgaaaagctatgcattatttatttattcattcatgtgaaactaaatatatatggctacaaaaaaagatgtatatacttttcttttatatgaatatgagattgtaatttgttaatgttatcatgctctttttgttcaaatatttatttttattattttcaaggcaaatatttatttttcataattaaataatttaaattgttaaatctatgtttggtgattgtgtgaaaaatcgtaatttttttaaatttaaatttgaaaagttaataacataataatattatattttttaagaaatttattatctaaaaaaagattataagtgtatttggtaacacttatttaaattttgtttattttttttaattagtaaaagtaaaaatacttttaaaaaatattttcaaattaaatttatattttattttttgtaaagatgaatcagtttttttaaataaatcatatagttttatcaatagcaattagctaaaataatagtctgtaattcaatcaagacatctcgttattggagacacgactaggattagaattaaaaaaaaaaacgaagtcaaataatcagtcgattaaatcccagatcgtttgacaaaatactaaaaataaaaatcaaattaaaaagaattgcagcatcacaattaacattaacgacacctatattcagttttatttaccgttcagaagacaaaacagcaaaaactattgcactaggttccttcaaccttgtaacttgagaacttatttaaacaattattttattcataatttgttttttattagatggttttgtgttataaatttatttacaagaaagttgaggtgtttcaatattaatatcttattgtttag

SEQ ID NO: 200699 - DNA, 662 bp, Cannabis indica
aatatgccatctccaaagggtttcacacactaataggaggacacacataaaaaatcaagacaaggaaactttacaatcaaaagcactaatattaagttgcacacagaattaaacacttaaaccaaaacatagaagaattcacgctccctacatcatcaacaaacacaatccagatttcatttctccatcaaatgcgtttggaatgatcacggtgtttagtggttcttccttgaagattaggctgaacaataatacataagttgaagcaacatctaacacagctgcaagcatttctctatttgaaacttaccaagctacactttcgtagacgcaacagcagccccttctcttctcacttcatttccacaacaacaacatcaaacaaaagacattttaaatatatgaaagttccacctgatagtctttatgtaattgatcagcttatagccattagtccctactttcattgaaagcaaaggaaaatataatataagaatttgctttaagttatttatagtttaagagctaaacattatttggccaagggaggtgtttttagaccactaaaatatcagtgaagaagaccaaaacagatacccttctctgaaagaacagtcaatcgaaatagtaatccacactacaacaaatatatcttttatttt

SEQ ID NO: 200700 - DNA, 568 bp, Cannabis indica
ttttttttttttgttgaagaaaaatacattttatatcaaacaataagtgagaccactaggtcattacaaattaagttcaaaggtatgtcgttacatccaaacaactatcttaatcgtcggtaaaagtccacttaaccatattatgagctacaacacttacaagaccgaactacatttgaaaacacacaatcttcaaataaagaagaagtacttaaacaaactctgagtagtttgcaatttcccacttgtactccgctccattaagagagttgatacacccaacatcaatttgattttggctaattatgactttttcaacaaacttttaacatgtcctaaatcaattcaatactaaaattataacgccccactaaagcacgttattcttaaattttgtaataaaagtttcattttaaaaaaaaaaaaccaattattaagatgattgtaattcaaatccttcgtcaaattttgtttaattttactaataaaaagttatcaaaattcggcacagaagtcttgaatctaacaatattaacaaaaattatgataattgtgaatttgataagaa

SEQ ID NO: 200701 - DNA, 596 bp, Cannabis indica
cctcggatctctgctctgaaacacgataagttatggcttttcactaatgaaaaatgaaaatgaattagaagggaagacatcttaaaaaggtaacaatggtacaaatgaaatttgcaaatatgctgtatcttgtacatttctcgatcttaaaagagggagaggaagtgttaaggcccaagttgattcggcccaaattttgtgctcttgcagtggctaataatcttaaaaaaacctcttgcatttaacacacatccgctaggagattgttgtgttgagacagcctattttttaagaaaaagaatcatagttatttggttggataaaacgacgtatatacattatttttctttttttattgagaaaaattgacttcattaaaatttcaggagcaaatgcaatggtaaaaacctgaaaaagtgtgcctagagataatattaatcaatcataatttaccaccaaagcggcacttatacaatcaagatagtctcaccaccacagtactaataacattagcatatttaacaaaaatatatatttattagttatttatgtacttctaaatgcattgatagcaaaaaaaaaaaaaaaataagaag

SEQ ID NO: 200702 - DNA, 584 bp, Cannabis indica
aaaaaaaaaaaaaaaaacaaatcagaattataagtcttgtctattacatgttgtgagagttttgtttatctttgtgtttagtctatttgtcttggttggtatggcttcaagtagtcatttggggattgatagaggaacaatatgcataaatacggctggaggaggaggaaaaaagaatattgattaccggcgattcagaatggaaggaatgaacttttgatgatagatcgtatttagtgggaaagtttcttataggacaaacttttgatttcgatgcgatgagcacacaatggcatctctttagcagctaaacaaaggagtaaatatcaaaaaattggatactaatcattatctattccaattctaccatgagattgatattcaaattgtcattggtagcccatgaacgttcaataggattcagatgattttccatctctgaagagtggtgaagatcctaaattgattcatttacacaagttggatatgtggattcggatatatgatctaaaagtgggattaatgttggacaaggttgtgtagaacgcgagtaattatgtcggttcattcatcaagtctgatgc

SEQ ID NO: 200703 - DNA, 762 bp, Cannabis indica
tgaatgaaaagcttgatactttggaacgtagactcgaacttcttgaagtccaagtgggtacagcctcagctaacccttctcttttttcaaattaatccacttttcctcttgttgtctcatttctattgatatttgtaaacccagtttggaagtattgttgtatttttttcttcttttttgtttgtttgttaaatcattggatttgtaatgtcttagctactgtcttgtctgcatatatttaataataaataagctggcgttcgtttcatggtatttgctgatccattttatgttctttcatttacgattatttcttttcacaaactgcccactttgacttttttcctttccattgttttacaatagttactgatcatgtcttacccaactttcacaaatcacaattacattcctgcctaattatgagcaagtaagaaaaaggacccatgatttgctttatgagatatgggattcgaaatctcttaagagttttcagttgttggttcgattccacgggggaacatatccaataatctgacctctaataatgtgttagtgtgttatgattttatttctcatgggaaccttaatgtagcatgctacagtttcttgattagtgtaaatgaagtaattaaaaaagactgttacattctgaagtgaattttcattgttttttggtcgatcgtggaattggcttcatagttctagagctaaacacaatcttctccgtttagattactcacatttttctccggataatac

SEQ ID NO: 200704 - DNA, 1798 bp, Cannabis indica
ataagtttttattttataaaatgctataattttttatgctatttaatgatataagttttgatttgtttgatataagggtacataccatttaagaccatgtgttttgtaaaaattattaattggactctctgttttattaaatgacaaaatgaacacaatatttactaaaaaggtaaaaataggacactgagcttaatttctaacaattttattttttaatataacaaatttcaagataatttctaacacgaacagatataaaaaatgtaaccaattttgtcataacatctttagattagattattattaagttttattttgacaaaaaatcagtatagggttctatttgtacaattttaaaaaatacaagatctattttgtcatttaacaaaacaaagagttcaatgagtaacttttacaaaacatatggtctaaaatagtatttatcctttataaaatctactattttcagtacacaagtttttcaaatctttaaattaaccaaattttttaattgtcttattttttcggcaatcattatttaaaaatattattttaaaatatttaaatgataataataaaaaaattaatctatattaccagtaaattaataattaatatcaatatcacttgtaataagtcgtcaacagcacatgtaataagagaaatgctaaagagcatttatggtccttggcacttttataaggtgtaatatcacgattgatataactcaatatcgagccctactaattttacttaaataaatattataaaaaataagtaattataaagtgacactttatcatagtactaagcataatgtgtgcatcatcctctttttgcaataaaaactatattttaatatatattttttttaccaacacatgatattcacaagaaataaattttagaattattgtaagtaacaaagatagcccttaaaagaataattcacaaagtatcaaaactcaactagttcttcaagcctgccattctagagtaccataagtcaaaatcagaaatagtcagtcaacaactgcaatagtccatataaaaatcgatatgaaattcaataacaaaataccaatccttttgaatcattcaaatacactaatacaagcaatatcaacacataaaataataatatgttgaaaacgacaatgtaaccccaaattcactattttatgagtaaagtcataatagtagatgaactcaaccaactacatctacattcatcaaattagtcttaagctaattcccattttctccttaaaaaatttgacatatattaaattgttactcttaaatttttcactattaattattttccttcaaacttttaaaattgttgaatttacaattttattccatttttttaaaattagtgtctatagacaattaaaatttaaaccaaaacggtcataacaaataattatttgctaacattgttaatacctcaaccataccagttaaattttgagcaaaagcttaattattcatattttaggccataaaattacaaggtctaaaaataaaataaaaattgagcctattagtaacccacaaaactgtttcaaatgatctctagctaaaatcgccacatacataatctcactcgatacaattttatttaatttaataattaattatgtaccaaactatactaccaaaactttaatcctatacctttaacatataccaaattgtaccaccaaacttgtcaaagttcaagggtacttctccaatcatctttacactaaaaattacttagattaaaaaaagctagtcatgaatcatg

SEQ ID NO: 200705 - DNA, 1732 bp, Cannabis indica
atacaaattttcacccataatgcttagtcacccttagtaccaaatacttataggcctcaaaagcttaaaaaaatcttaccaatttataatatgttaattatgtaatctctcaccccacttttagtgatgtaaaacctcaacaagattacaactattggattgaaaacaaaagtagcttttgatatctacgggttctactatgtcaatttaaaagtaagggtagaagaaaaagataaacctataacagactatctttctattaaaatatatttttacaagtggcaaagtaactctcaaaaagttattctttatcaaagtcctcaactaatggaaataagagacaaattactctatcaattataaaaagtacatataatttttttgaattatcaatctcattataattaattacttcttaggtctataaacactagataagaattttttttctttctcaatactaaatatgttgcctattgaaagtttatgtatctatgtactcaatggaaagctataaatttaattattatataagttaattttaattatagaaattgatgttcccattttgaaaaactacaacaaacctttaataatttttttttaacaactagttagaccatctctaaaaaatggtacaaaatttgtgttaaatttacatcaagaaatgagtcaaacattatatttgatcaaaattttaccattgtataagggtaaaattaattttatttttatagaaaggtgtaagaaagtcaacaaaattattaaattttaattgaaagtgtataaaaatcctattaatatataaaataaaatataaaaattacattataatgagtagcaaaagagtaaacaaaaaaagtaatatttattatgatgtaaaatttggtatatactacaaaaatagagtattgttatgggacaccgaagaatctagcaccactatgcgatggaattttataagtggttagtaattctctgtaatctttattaaattaaaataagtaggatctaatattaaattatacgaataacgatattacacctcacaagaatgctagacaccataaaacctgagtatcctttagcattttttttaaaaaatatatacactatcttgtactttataaattattttgtaaaaagaaaatcttataaattcttcccaaaagattaatacactttctaatatctctctttttgaatacactttataatatctcaaatacaagttctttcattgtaaatacatctcaccaataaaattagattacaaaattatccctcaaaattatattttatttcaaaaaataaaaaaccaattagactataattttatttgtgttataagaaccctttataataataatgttttagtgtagtttactagcctagatgccacttgtcacaaaacccagtaacctcgcatccattgtggtcttactaagctctctcacactcatatcgcttaccacctttttcttttggtttcccttaacacatttatcattttctcccaaaaattcaatcccaatggctgatcccaacaataaagctcaaatctttgaactcaacaatggaaatatatgtgttttggtcaccaactatggctgcaccatcacctccctctctgtccctgataaagatggttactttctcatacccaatacgtaaatttcacttttttgattgttatatatttaatttcatgttgatttgtttatctttgaat

SEQ ID NO: 200706 - DNA, 624 bp, Cannabis indica
tttagattttttttttaaaaatttatggatattgaaatatataggagggtactataaactttttcaaaatatggtacaataattaacctacataatatatttatgagaagtttatagtacaatttttaaaggagtgttttggtattctttatttatttcaacattaaggagagttttagataagttttttttttaatgatcatttatgttgtaattatttaagagcatttgtaaatttttaaaaaatttcaaatagttatttgaattttatttttgataatgtaaatataactggttctaaataattataatttatacaatttgtttttttaaatctctcctgaataccaaaataaataaaaattattaaaatattttttatatagtaaggaagaattaagaagtatgaaagaaaatgagaaagatgtcttttaaaaataataagtatgaaaaagtagaaaataattaaatttgtttaaataagcaattcaaattttattcttaattgaagaaaaatacttagttcataaaaatctaaaggggtgacagtggcacacatatacttggataattcaactgtacacctcttacacccttggagattttagtatatatatatatata

SEQ ID NO: 200707 - DNA, 1175 bp, Cannabis indica
ttttttttttttagttttggagagagtgagaggacttaggaaagtgttagtttatttttgggttgctttaaatatatatgaagcttgctttggaaagataatatatataaatgggagcatagagttttgttttggttttgtttttgttctgggagtccagtatagtcgagcataacaacagattcttccttcgaagtaatcactttaggtttcagccactcataagatgccaagtcagcttttacccgtgggcttcctgctcattttggcttattattgattatatatattataatttcttaatccatatctctcttgtttatttattaataatttatgttttctacttgaaggatatattttctcttgttataattaagcttcacattttctggcttcaatacaccccaaatatatatacataaatatctgtagatgagaaggtattctgcggtcattgtttgctggtgtggcatcatcaagattcacatatacatcatataaaagtgaaccccggctcctaaccgagagattttggccctaataatcaatccttagtttctcggcgggcgccgaagttgtgtggttactgagaatcttgatgatgctgcatcggcaatgaattgatgaccatacaaagattcaagtgtgccctttgccctttcatcgactgggtttcgactgatgatgatcctcttttgtttttgtttttgtttttccatctttaccttcaatcatcttgattcatcactggttaatttatcaggttagttttaccttattattattttattttattttcttttcttgttatattattttttattattattattatgtgttgttcgtcaggtctttcatgggattgatctcaaccagataagttcggtatagtaagctgactaggtaatggcagatctgtaattattggtttaggaaattttattgcttagattgaaatggcatctttttaagagtactgagcttttgatcgagatagagagatgtgactttttcaggaacaggaaaaggagaatcttggtgatgatatgcgaacaacccttaaaaacaaaatggaaatagaaaaacataaacttttatacataagcttgacggtgtactattttttatatattgttattaatgcatccacactacaccaaaaattagaatta

SEQ ID NO: 200708 - DNA, 1793 bp, Cannabis indica
attctttacatactaaattgctattctcaaaacataagaattgaaggtgcaaatttcttatatgaatcaacaataatatattttaggttagatttttttaattattagaaaaaaatatttaattaatttttttaagaagaggcataatttagtagtggtcaatgttcatgagaaaagtaattaatttacaacgacacatgaactgtgaaatgataaaaaagaacaaaagtactatatgtttgtaaattgaagagttcacaaaattttatcaccataatgtatattttagagtatacaatttgatagtgttataaattttgtagataaaatattaattatttttttaaaataattgtgcctaaatgagctacacgtgcgaagcacgtgagactccactagttataataaaatcatagtcgattttttagagacaaatccacttactaattgactatatatttttatgtattaatttaaatatactgaatgtgtaaattgaatttatgagtattagttttatagaatttgaaatagaaattggggttaaattaatgtttcatactagtttttttgcaaaaaaaaaatctctgccaggttgctttttaatttgagtttgttcttcttcttaggtgacgtcgtcgaattaatggtgctttctcgtttgtcggagttttttcatcgttgtcgattttattacatcgcacaaaagtttcaatctcaaaaagtatgaattgtgtggattgacggtgtgtaagatatattttgaagcatcataagattctttggtggtgtatcttgtccaatgcccttcctgtctggtctgtgattaggaaaagattccatatatcgaagatacgaactaccctctttgtgtgagttggaggaagaatcttttgaacatttgtttttgtcttgtgatgtggctttttatttatgacgatcttttccttggggcatttatcctatctgtaatactggtattcgcttgtgggactgggtcatattcatcttaaacctcaatcataggggtatccgtgttgaggatgtcttcctttatgcatccatagttgttgacactatctggcagactcgcaatgataaggtacacaataattgtctagtagatgtgaagaagtgtattgactttatttgtactttctttgcaaatatacatgcatctttgctctcttgctcagctccgtgcttgctagaggtctggtctcctcctcctcaagactgaattagactgaattgtgatgtaaagtgggcttatatacagtagttgcaaggaatcacctctgcgaggtggttcgaattcagacttcgtagttagacttttctgatgctttatgtggagaggcgacaacttgttgtttggctgtgacggttgctcttgatctcgcctccaagtttattattgttgagaataactcgagggtagttatcaacgctcttaatgggaaggagtctcattggacacttgagaactatacctctttttgtaccaagtcttctccttccttcattagttgtaagtagacttgtaattttgtcgtccataatgtaattaagtagacattctcccacaataagtttggttgtattccaattttaactatctatgtaaaactattatataatgaccgaaaaatttaactactttactattatcataactacgatttccttaaaaaaaaaaaaaaatagcctgcaattttttgtaatattgttttttggtgttataactcaaaaaagaaaaaagcccgtgtgaggcacgtgcactaacatagtct

SEQ ID NO: 200709 - DNA, 618 bp, Cannabis indica
acactcttatggtcttcagtagatatatcaaccacaaatgtttctttcagctaattaatcaaacagtttcaaggcaatgaatgaaacatacacaaaaacaaagtaggttatagaaacaattaaggagtattaatcactcaaaagtagaacctgtatatgtgcatagatgaaatattatgaaacaaatgatagaaaaacttaataagctttctaccaattcattttcaaaatgattgcagtataaaccacaaacatggttaagagttgtaacaaaactgacacatacacattgagcttcaatgaattgtacagttatgagaaaatccataaacatacctttacaattatcctaccatccaaatttgttgctccgccaggaatgctgtcgccaattttaatgtctaaaggcaagcttctccaagcaaacgcctctcgtgacgagagtaaagaaagaggagtggtggtcgctgagatgaacgaagaaggtgacgaaggggaaaagagacaatgcgagacgttgtgcgctctctaatattttctttttttattttataaaatgaacattttccaagagtttatcacactatagttaaagcaatcacaacactttctttaaaa

SEQ ID NO: 200710 - DNA, 1146 bp, Cannabis indica
caaatatccctaacaattaccatacataaactagtataaattagtagtagcaacatgtaaccagtaacttgtaacttaaaaaactcatattccctttgaaaatcaagtccagcaaatgtttctgctttcatcactatacactttaaacacaagctacttattatataaccaaaccccatcaaaaaggtaaaaaaagaaaagaataaaagtaagttggaagcatcaactgcttgcagctaccagcaaatatgagctctgaatagtaaaatgctatatcacaaaaacgatttttgatgtcgaaattcggatcattaagagacattcgctgctacaatgacaaacaagaaaatttgcgggttactatagacgtcttctaaagtttctggtggttccttggtacgtacgaaccaataagccaactccaattccaattcctagacatacactgaggccaatgccgacgcctactctcacaccggcattgaaccatgaaagttctccatcttcaccttccaagtatgctccccccgagtacatgctatagtcttcggtctttggcttttcgtgtggatattctgccacctgagtattttgacacatgaaactaagaatatcaatttgtcttctaatcccaataaaccattcatatatgaaagaccttaactaagagctacttagatattctaatcctaatcagtacatattattactccactgaatcaccaaacttttttgtatgaaagatcagtatctcaagacacaagatttttggaataaagatggaatggaacttcagtcatgacaacggtaaggtggcttgggatttttggtcagttcaattacagtaaagcaacaatttgaaaccgaaatggtaagcctccaaaacttctatcttctaaccatctcaccctcattttgtcacttcctctctaattttatattctgaatggatcaatcgactcaatctacaacacaatttctggtttgaacattttaattgacactactaattaccgaacagctaagtgttctggcaaaaactaagctaaaaacatccctatgggacaattatattatcggtttcaagttccttacaaatctttccccaaaagaaacagatgacttataccttcaatttacatgaaa

SEQ ID NO: 200711 - DNA, 1487 bp, Cannabis indica
aaaaatcaagaaaaagaaaaaatgggattgtatctccatcgttgtcctcctccattattcgattgatttatgggcacctctattatcatctcttcaagctttaggaatttatcttaagaattaggacaaaagggacgatatggacaaaatcgacttatttttggtacctaaacgattttcgtcttcaatatttggggatttaggtagatgcgattttactttaactctcaaacaatttaattaattttatttttatttagtagttgtagtttttaaatttattttagttattagttttagattttacaataaattaaaaaaaaagcctcggattaaatcatggcgtacacgtgtctcgctacttaccctaacagaatagagataaacggacttacgacgaacttacatttccaccgccgattttcaagattgagaattgaggaatgttaatgtcaacatcctattacaacctcttagtcaatctctgtgcccaaaaacacatgtcgaaatattttttttcatgacgctgttcgttatacttacagtatcatccctgtaaatttctaaaaaatttcaaataatttacggtcttaaaaatatgtttaaagtttttgaaactcgcatggtaaactggaatataaacattgtataatattcaaaaaaaaaaattaaaaacttataaaaataatattgtaattatgacaaatactactaaaaaaaattaactaaaaggttgaaataaaaaaatcttaattattactcattaaattgagaatcaaatataaattttgcacaacttttgccaacattttacctttaattaagaaaaaaaaaagttaattcaaaaaaaaagtaagagtggagcagagactgagagagcaaggaagattcatatttaaacgcggggtcgaatagcaaatggtagcagaagagtgaaagagagagagagagcgagagagagagagtagaactgtagaagaacaaaacaccctattaaactttcctcttctctcatcaaacaaccaattcgattccatgggtatgtttttctttacttctcaattagtttcttaaacttttttttttcttgtttgtttccctagaaaatgttataattaggggtttcaatttcagtctgcctttaaaaatagtgttaacggtatcggtagttttggtgtttattatgggtttatgatgtgcagacgcggatatggaagattatgggttcgaatactccgatgaggagcctgaggaacaagacgttgatattgagaaccaatattacaactccaaaggtttttttgtttctcttttgattatttgggaaattttatttgtttgattgaatttatcatttattaggttttcttttaccaatttgtttatttgaaaaatgaaggtttggttgagacggatccagaagaagctctttcaggatttgctgaagttgttcgaatggaacccgaaaaggccgagtggtgagtgat

SEQ ID NO: 200712 - DNA, 1158 bp, Cannabis indica
ctaaagttttaactttaattctttaagttccactggagccatctgataagggggctcaaaaactagctccactcccggtgctaaataaataatgaaatatatttcctgctacggtggcatcctaggtaattcttcaagaaaatatatctagattctcatttaccaccctaatgtcctcaggcccaattgtctcaagtctgctggtgtccaacaccactgttaggaatcttatgcatccatcatgcaataggtccctagctttcaatactaaaatgattagtattcgaaaaccctaaactgatcccataaatataaatggctcttcacattctggttaatgagttacatttttcctcttataatcaatactagttgcatacttagtcaagccttttctgagaataatatcaaactctgctatactcaattcaataacctcagtactcaactccctattctccactctaaccagaatagacctaagccaccttttggagataactaattcttccctaggtaatagggttccaaaccctatctcatattatcacaaggcttacccaatttatcaatcactttaggctccagagtcagacaatatacagtaaaaagagtatttaacgagaagttaacttgtctccaaagacaaactagttgcaacgtcagtctgagcaatgacaaacacccaagctggagtggcttttgcctcttccttcagttcttccctaactagttggggacaatccctctttaaatgcctcgtaagtccacactgaaaacattattcttccatctttgacggtggataatccctcttataatgtcccattacaccacactaaaaacatgctttacctttacactcacccctggtgatgtattttatagctaggacatttcaagaaagtgtaatggcctcctaagccatcctactgaccatcttgaacttattttccctgaaatctttatacgctggctctatctggttaccaacaagatgttgttctgctggaaacaacaggtaccagaggaggatgtgcaacaaaagaaccctgttgcaacaacctttgaatttactcgtcttgcctctaaacttcggcttgcacttttgcaaacctctgctctcagtcttgccgatcttgtggtgaattaacataa

SEQ ID NO: 200713 - DNA, 605 bp, Cannabis indica
caaacctgattactagaatcgtcttgggagtccattggaattgaagtatcaacaccagtatcctcagttgattttatattcatcttgctaacttcattatcaatatccatattaacacaaagctacaaaaattacagtaaataagttatcaaacacacaggtcatttccaatgctacgttgtttggtggccgagaaaatgaaagaaaatcaagtacaacaaatttgaagaagttagggttaaaggcttaaagcccttcccacaaacaaacaaccaaaacatatatagatatatagatattcatttacattccaaacatttaaaacaaaaaatggaaagtaagtagagaaatgatcttaccaagcttcttcaatggagggaaaaggagagagagagagaaagagagagaaccagtcaaagcttagtttggagaagaaagctactgtctttatatacgagtcttaaaccctttccttaaaaatggagtcttttgatagaaacgggcttcacggcccatttaacttggttaatgggccgagctgagcccaatacagaaaatgggtttcctctttctcaaaggctgaaagtcaaagacacaatctttct

SEQ ID NO: 200714 - DNA, 1266 bp, Cannabis indica
aaaaaataatttttgaagtttttaaaatacaaatcacgtttggttttaaaacagaaaataaactttattttctgaaaaactatttaaaaaaaaaaaaaaagctaaataagcctaattgttttcacaaaataattttctgttttttaaacaaaaaaacagttatttaattatgatgtcaagtatacacttaattttcttacttaaattctaacatataaaaataatttagtttagtatcaaaataaaaaaggccattggaacatatttttttttttgttaaagtgaactatattttaactgtatattacttatttggagatgctcttattgcctgactaaaaactttcaagtgtcactaaaaaaattcttttttaatgaataatttgtagtataaatacttaagtttaatttttaacggtaataatataatttaaaatttctgctgatacttggtcattgcatgttaagtaaaattgccacgcgacaatctctaattggttcagatcattaaatttttattttttaaaaaaaaaataatttaaatataacaataaaaaataacacgtaaattataacttgacatttaacgatcaagacttacagaattctaaaaatataacatagatattattacggtcaaaaattaaatttaattatttttttgtaaccgaaaattaaacttaaatatttataccgcaaattactctttttctaatttaaatatgtcataatagttgttaccctctaaattaagaacattaaagaacaatgtagcatatcttgtaatggaaatggtatataaacttcatttgctactattttttttaaaaccaaagatttagctgtaaaacatttctgaaaagaaagtaggcatcctggtcagatcacagttggtccatatgaccctatatattagatacaaataaagtctgtcccctgcttagaaattagaatggccagccacataatattattgttgaccatttatctaacagaagagaaaaaccattgtcaatttttacaaaattaggtagtatttggcattaatatattataagcttcaataaatcacaaactacattggggtgagtttcatcagaatagacagtcccatatgatgttttaggtgctgatgtttccctccacataatgacataaataatatcactgtacaaaataataataataataataataataataataatgtatgtgcacagaaactacaccaaatcaatatatacatttatggcaagttttttaact

SEQ ID NO: 200715 - DNA, 869 bp, Cannabis indica
gtaaaaagaatgcattgtataaacaccctatgtattattatagctctttcatttattatttgcatcaaaaatcacaaattcaactatttcatattttactactatggtttatttcattgctcctgtgttagataaaataaccatattattattgtataaacataatacaatatatatatatatctacaaaaaaaaaaaaacaataatacaatataatacatagatatacatacatatatataattaaccacttttatttgttagctttgaaagttgtattaacatccataagttgttttaacttctctcctacttctgtccaccattttaaccatataatattttattaaaattcttacacaaaccaaaaaaaaaaaataaactagaaaaaaattacatataaaataataatatcatcaactatttatatatatacataataaacacaataatataatacaacaaatttcttttaacttctcccgcccacccaccattttcactcttaacattacatatacatgtcatacatatatacatacacatatatatataattacagttttttgtatagaactaaccatgataatcacgatgaactaaaagttaaaaaattatgaacagaattgaaagaacacgtttatataacagagcagttttcaaatattaactcaacaaaaggttaaagcttcatgactaaaccaagtctctttatattcttttcatatacatacacatatatatatacacatatacatatacatatatatatatataagtatataacgtctcttgtcacaataactactctcacagctcttttgatgatcttaacataaacacacacgctcctcttcttcttcttcttc

SEQ ID NO: 200716 - DNA, 1758 bp, Cannabis indica
tttttgttgtcggtctctgcatataaatgtttcacttttttctttttaagaaaagattgttgtttagtatgtactatgtattgtatgtcatgttggtaacaaaactagggacctaatattgaaacttgccacactgaattttctgtttattctttcggattcacagtgcactcattaactcacagttaaatggaaatgggaaatttggagaagggatgatgcaaggaaatggaaattatgtctttagaaagactaaatgatcataagtttaaatatggaaatagtttattattttttgtttcaattaattttcattgcctcaaacaagggtatagttatggtaactgataagattaagttaactttccatattcatcatgaattgagtgtcatcaatgggctttttcaactgtattctttgatatggatgtttttcaactgtttttcttcttcttttttttttgttgacataactgatatcctagttagatattttaacttttaaactcatgtgaactattatagtaatgtacggtcttagagtttaaatcatttgtacgtttatttttgtagtcgcatcaacaatatgatgcctgttttggattagcccggccccgatgaggggcaggggccatgcctgcactctgcctggtgggagctaagcttaaagtacatgctgctagggtttcccatttttaactggcagagtgcaggcatagagaaccgaggtggactggagtggatggatttgttaatgagatggaaacacgcactggtccactctaccattctcggttttgtaggaagcttctgtcatccttgaagaatgatgaagaagtgcactggttttggataaattttttgtgggcgtttattttgctatggatcatgccgaaagaaagagaagaatcttttctagcgcggggaagcatgctcctcttacctgtggtgaaggtatgcaacctatttgtagtttatataaacatctatctgtatgtatgcagttttttattttcaaatcttctgaagccatatgtgttttattttccttttggctttcagagctccaagccatttctttttggcgggtgctggtaaacattcttggcgtgtcttgaatttcaacgaaagcatttgacagccgacttgcaagacacttgattgctgtgttgcgctaggatgtccacttgattgctgaacctgaaaccaagaaagggaaaccacaatgcgtgttgtatggccttttctttcccagatagactatttgtcatatcactttgagatatttgcaggaatgaatactccattttagcaaataaaataattgttttctcttaactttgttgatcaaaattaattttcccaatgggtcagttattcattctggttagtttgtgctgatgtcgtttatagtctatagcatcaatactaaaaaatgagttgaggtttgggatttttaagcctcatccaggtcaacatctaaaccagtttcctatactcttgatctagatatgttggcttttgctataaacttgtactgtatttctgttaatgaggcaaactgtttagtaaatcataagtcattccacttgagcaagccagaataagtagtgtccttttatcctaggtagattggagggagatgagggcactatctagtaatagggatgaataattgataaaagacattagaatggtgggagatgagaccactctttcaaattgttttcgcctcaactattgagtttatagaggttt

SEQ ID NO: 200717 - DNA, 1712 bp, Cannabis indica
gtacatagtcttgaagatgattttagaggagaccccatcatccaccatacagcatgctaccgtcaattcccaatttgtgtggttatgaccgaagggtcattatgagggagtctgacatgagtagcatcttcttcagtgaaggtgatggcgagctcttctatttttggctattttagatttctttcatctacagtaaggacttcgtttctttgctcatgacagggggtccaagcatagcagtctaatgttttgtttgagtccccaacaatgtgaggtccaccgatgatgacctacaaatggccagtaactggtggggcaatgagtcattattctgttggacctgtgcttagttttggtcggcttagacaaactgacgtatgtgggaattattccttcttatcaggaactcgatctgatctttcaagttcttacactcattagtgtcatggctgaaatctctataaaatcagcaaaactttgttggatctctcttactgatgtcttttttcattggtggggaacaatggcctatgtagccattaggatggtcttgggggtgttcgttaggataaagaatcatgtgaacttttcctccttttcttgaaggtgttgttgtgccaagggattattgaattcccctttcttgccattaccttggtcggaaccattattgttctgtttccctctattattggtgttggtttggggctaggcaatattacaggccccagttgtggcatgtgtgttatttgcacctgccggatagtttcttcaagttttataaaatcattagcccgatttaaaaactctctctattgttagttgatattttcctgatatccctccaaaggtcactcagaggtaggatacctataccgcctttcttccattagtcctttgaccttggtggcctcggtaaataaagctttgggtatattctttcaaaggttcttatgacctttgctttattttaaccaattcctccaattgggaaggtatctatatgaaggatgacaactatgtttaaaactcaacagtgaaagcgcccaaggaattgaatctccatagggccaacataaaataccactgttctgtagtgtcaaacaaggttgctggaaaaatcctccaacagacatcgtctaacactgcttaaagatccatctagatctcaaagtatttgatatgggccaaaggatcctctttcccagtataaattttccaagttagcatcttgaacttggttggtataggcaacacattaattcatgcagagaaaggtgaccattgagtcctgtccaattctaggttggaaagatttagactggaaaagccttgtacaaggctcttaagttgatctaattatgcttgcatgacaggatcaactctagccatcctttgcccggctagctccactcatgggttgataggaggttggacgtaagggtcaacagaatttggcctaccctgtgcctttggtgggttattttggtgcaagatgtattcgtctcggttgttacatcttcgatttaagttattccaaagatcttttcctacagagaggcccactctatcaaacacaaaatccttgggactagggttaggacgtgtttgagcattccagggatgaacgtcggtgttacgcccgatattattatgagttctctggttagtgcgctcaccaatagggtggctagtggcaccatccacgtttg

SEQ ID NO: 200718 - DNA, 1058 bp, Cannabis indica
attacaatttgaaatgaagaagctcaaaccatttaaaattaagattttaattgcgctggagatctatatgaagtataaacagaagaacttgtgggcatagttacaaattaagttatttacctaagaaaagagttaatttatacatatccatcactgatcttgccctgaatggaatggtagtatcgttgtatgtactactacagtactgtgattctttcttaactgtacaaatgtgactgagtcaaataagaaagtggtctccatcttttacatgtatgaaacacatctttgtattagcagctcttttgaaattctttgttttggttttagttctctttggtctttactaaagtgagttagcttgaatgataaaggggggatggggcggaggctgcatttctaaatcttcattttctccatcagacgatgtatctggtgaagcaatgggatggacctaaattgttcattcaccaaaacaaaatgactcattcatcaatgccaggtctcacattaacttatcatagtgatttattcatgttgttctagcaatagtagtattaaaactcgattcatatgcaatagtttttatgaatgaactattttacctgttggctgcgacgtcggcggttatggatggcactcacagccctcaccatgacataaattggcagcacaatcccaatagttcttagaaataacaactgcccaagttaagaacaaaagggtttaagcggattcactagtcattgatgcaatttagtgctctatttgttttggcttgaaagaaaagaaacaagagaagttgaaatcagttttaccataattaatgggaatgagtagtcattttttcctttgattattaaaggaagagtatgccttagaatcaaaagtatcatgaactgcaaaaacaaaacaacaacacctgtttttgtcaaaaccaccagattattttgtcatctatcttctaggcacagtacattaaccaatttaacttacaatgacagccattgcacggcagtatgtgagacttcttgtactggaagcagaatcatcatcaa

SEQ ID NO: 200719 - DNA, 741 bp, Cannabis indica
acaagcagagcatgtaacaatatgaaattagaaaggaaagaaaaacccacaaaatgaaaaaaattaaatcactagagaaaaagttaaacagtcaatgtgaagtcttttctgaattacaatgagcagccaccatggatcttctcagctgagacgtaaaaacaaatatcaattgggtaatagcagaatatcagttcataaaatgtaccgtttatgtgattcagaagaaattccacagagagattaagagttggctgtaacaaaggaccaatcacaaaacctgggtttagtgaaaccatatcaatcccattttctttggtaaatttccaagcagcctcttcagctaatgtttttgaaagcatataccaaagctgtagcaagaaaagtcatgcaagtcaaacttatctgtgaaagatagtgcagctgtggacaaatgctttactttcttatttttctcttccctaaggttatggtagttaaacataaccaatatgttaagtatgacaatacacaataaaattgatagtatcatccaaattaaatgtctacagcatataatggaattcatctcatacttccagcagctggattctttaacatgagctgagcaatggttaactaaaacaaaaagactaaagagaatatcataaactgagccatcttgcttattgtagttagtagtcaaagtagcgaagtatatagaagagtaaaggaaaccattttccagtcttccagttccagtct

SEQ ID NO: 200720 - DNA, 1415 bp, Cannabis indica
ctcctcaacttttaaattgtcacatattagtcttagatcaattaacaaagtttaaaaaataaaaacgaaatgcaactgaaaggaaaattaataattatttatataattcagtaaaagaaaaaaaattatagggcaaaaatctagtgtaaacatcttattttttcttttgtttttgcttaatcttttaaacatgatttttttagaagcatgtatgtaaaatatttgacatactaaaaatggagatagagagtgagttgagaaatgaaaatataatgattttactttgataataatatatatggggaagaacaatttaacttataggactctcttattctgttagtcacaacaagagtactatataaatgaattggtttggcaatgattaatgagagaaaagatgaaaaatgaaaagaaaatggcgagtcactaaggacatgttatacaaatttctataacttatgtcgttattgtttttatgtgaaactagttttcatactatatatggcaatttgtaggaaaataaaaactttctttctttctattttgttttatatattgttatgtgggacttaaataagaaagctttgactaaaggtaggggtggtaatttgtgtttgtgggttgtatttttgtcatgtcgagatctatgtattatatgtacatgctctatccgaatacgtcatgtttaataatcgtatcaaaaaataaaacacaaacacaatccatttataaacgagttgacacgatacggccgtgtaactccattaatatagtaattacatatttaacacatttgtgactcatttatggcttgataaagtattaaaataactttaaaaggttattaacgagacacttttgtgttaatagtgacaacctgaacatgacacctatttattaataaattttatttaattacatgtcaccctattaatatattaattacatgtttaacacgtttatgatcatttatggcttgataaagtatattaaaatagttttaaataagttattaactatgtttttaaaattaattagtggtaagtaaagttgctcaaattcttatatatagctcaatattttattatttatttaatgtgagatattatcccacaatatatattaattatgagtttttctattttttgttctattatcatttataaatactattattttatatatatttttttaaatattgataatatatattataaccatttttcatacttttgatatttactcatatgtatattgttttagcttattaatattaacatagatttacatatattattaaatatttataattagatgtcaaataaaagataatagtaatataaatattaaaatatttatattttacagaaattaatattataagattaataaatatgctcagaatatataca

SEQ ID NO: 200721 - DNA, 541 bp, Cannabis indica
ttttaatgtgttatgctttcgagttaatttatttgtatttacgtgttgtattttcagacttatcgtgtcatgtttaaatctatattttttcggatcatgtcgtgtcatgcctaaacacatatttttttgtgttgagttgtattcatacctctcagacttgtgttgattttgtgtcgtattaaaaaattcaactcatatttacaacaatacatataactttgtgtcagtcacacctttttataaccatagggccatgcttctggactattaacctagttgtatatcaacttgtagggtgaatactaatggaaggtttgtgtagaatttttcatctcaaagaataaatgatgtcaccttatcaaatgttatatggatatttttataatttatgttagaatttaagattatatggttaagaaagttaaaaaagaatgggaaggataaaatatataagattacatctcaaaatcaatttataaaaagagaagtagggcatatatatcttatatactctattatatttttacacattaacaatgtg

SEQ ID NO: 200722 - DNA, 895 bp, Cannabis indica
attcttagtcttctccctcgattttcggcgacatgtgcagcaaaagctcgtaggacgttggtgcttagagaataggtaaaaaaaaaatgatattttaaaaaaaaaaaagtgccccaacccagccaaaaaacttggccctaacccacctggatcccatcctaacctgcatttgcccacccaaacccgaaacctgaaaaccgttttctcacgtggacgagttctgtacacataatccacacacccgaaacccaaactagaaaaactcgaaacccataaaacccacctaatgcgcacccctaattattactcattttaaataaaataaaataatagaactaattattagaaaaaaaaagcatttttattgggcacatgtggtgcccaataccttctataggtggcgtcttacgattagttagcgatatttcttaatagttattttcttaagttatatgagattcaatacttaattacatcaatagcagtatgtcattgaggacggtgctaagcactaataatgacttttaacaattcttttaaacaataaataataaaactaagatttgagtgtgagtgtacacgtgtttaaatattagtggattgctttttggtaagcaaatgggatgagtgtaacaaactagggcctagaactactaacaaggacaacactcttctcttattgcatatgtaaaggcatacaaccaactccactcctagacaatgattttttttttgtcaactggaccatgaaattgatatagaaagaaagatctattaaataaagaaacattgttcaaatattatttgggtggctacaaacaaatttatgttcacatacccatttagagaagtggcagcttgtgagctttgtcattgctaatggcaactcatttgt

SEQ ID NO: 200723 - DNA, 818 bp, Cannabis indica
tgtttttgctctaataccatgttcgaattataagatccatgaggatgatgcggttccatcttacaatcaattgatgatgagaggagtagctcatggatcttatatattttattatctttccacacataagcaatgtgagactctctaatattcccttaagatgttagttattttttactcaccatcttggacagttcgatcacaagcgactcttttatggctcactatctcccgaatcacaagtggctcttttttgactttggttctactttttagatcgatttttttagatttattttgtggctctttttttggttccacttttgtttcaatcgtactttttttatttttttttagatcggatagtcgttagaagttttttatttttgcttaaatatcatgttaaaaatttaagatataaagggttccatcttaaaatcaattagtaatgagagaagtagctcatggatcttatatatattctattattatttgttgatttgccattttttttttgtattttatgtcgtattcatgatcgtgttgattgatggactatcgttttatttattttatgttatattcccgattgtgtcatttgttggattgtcgttcatagaattatgttattttttgttttgtgtcttcttattttatatgattgtgttgtttattaactttttgtcgtttattgatttttacttatttattttaggagaattatcctatatactgttttttaactttttttttcttttacggttttagtttctaaagtggttgcagcactagttgctataggggtttctatacgattt

SEQ ID NO: 200724 - DNA, 1384 bp, Cannabis indica
agaatattgcatgcaaaattcagccagaaacagagcctgcaaagaccctgcataatcacaatgaataaaaacgtgatctacagactcaaaagtttttttttccagagaacatgccatattactgagagaagcacttgataagggctttatttctgaatgctattaatcatcttaattctactcaaggctgccaaccatcgaagctttaccttaaattttgtccagataagagcccttcaatgaagtcaaaattatccaatacgaaaaacaaagatacatctgtagaacctcaaaactatccaaaacttcaacaaagagtttccttcacactatcaaaatcaatggaaaaactttgtgtcgctttatggttagacaatgaaaagaaatttaggaacctagtttctgactttctatgggttttgggttcttcgttgtaatgtaattccttaaggacatcttgttgttcctcatcgcaccatatcctgagaattaaaaatatggcgtaggtttccaatagtagacgcaataaataagtgtgaaaatgttagacattgttagataatcttttatggcatttcactgaatattttgaccattgatagttgtgaattctaatgtcatctatctactaccaatcgtgcaaatgagtagcaaacccttattactatcacagcttcgaaaaatcctcaactatgaagtcttcaaatgaaatgcccaatgcccacgtagtttcgacactcaaaaaggaaatgccgattcaaactgtatactttctaaaatcaaatttgacaatgatgccacaaccatttccgtattgcgctactgtaagtaggtcagtatgcaagaagtacataattctaaatcatctctctatcatcaacttgaactccaacgagaaagcaacagtaatccacgccataattcacataaacaaactgttaaaaaacatacggaacaggaaagcaaacctcgttgacctcttcggcaggtggaggaggaggaggaagagcaagaggctgaggctgaggcggcggggtcaccttaggtattttggacaagtcgacggcaaggtcaacgccacactgcggacaagagaacctagcaagtccatgcggcacattaaggattgctctgcaattggcgcaagggagctggatcttcgtgggatcgataccgtgggccggcacttgaggtggaggagaagaggaagaaaaaggaggattagtataagaagctgcgggagctacgtacttctggggcctactcaagagctccggcggaagcatttggggcaatttgcaggaagggcagcgaactccgaacacccccgaagtcaccgtcaggatcgaacgacaaccggcgcgacctgacctgaactgttcca

SEQ ID NO: 200725 - DNA, 699 bp, Cannabis indica
ttagataaaatatcatgaatgggtagggtacctataaattcacttttttttttgttaccattctctatcaaataaatcacatcatatgtgatccactgtgaaaaaaaaaactagtgttgtgtggtgtagtggtagggattatccttttttacttggggttaaaggtttaaatctcaccacaattcttcattgggaggaattacgcgtgacattttaggaggctagtttgctgtgacggtatcatacttaataggatgagaattcttaaggtgcataccgataacttaattaaagtaggatgagttataagactctatagctagcatatagttctcgaaattgttaaaactactgaaagagtaaggaagagatctgcaccatatgatctccattttattaagcaaaaaagaaaaagagaaaaaaaatcacattatgcctaaaaggaaataatagatatttgcattcaggatttttttttaagaaaaaaatgaagaaaaagaaaagacctttactttaaatattcacatctccattaacattatagacttaataaaaacataaaaattaataaagataatttgtgtgtaatttaagaattattttttataatatttatttaatccgtttttattttatttttttaattaaaaaagtgaatctaaaaatatattctatgaaattattttcacttttcaattt

SEQ ID NO: 200726 - DNA, 617 bp, Cannabis indica
cctcatttctctaccaaatgtgactttaactcatgaaaagtagtaattaggagtcagtttacgcgttgaccaaattggacagatctagtaaacaagattcaattggaattttgaaaaagaagaaggtcaacttgtatgggaaccataaaaaaaaaaaacaaataactaacttcatcactttattatatgtacagtacatttatacacacgtttatatattttagtaaatagcagtcataaagggccacctcttactttttattaataactagggtttagagagaggtagcaatatgcatgatgcatgcatcactgcatacgtcatcacagtataaatatatattgtttcatcatctcattgtgcttccatatatattacaagaattaaagattaataggaatattgtcatataatttatatatagcaaaaggagaaattggctagggttagatagtgagttagtttaaaatggtcattttccaatccttttgaacaattcaaagaaactcaaagggaaacctcattcacccatagacgtcttgagctataacgttatgcctttgttatataatgagcaataacattagcaaagagtttaacaaaaaggttggaaagc

SEQ ID NO: 200727 - DNA, 1164 bp, Cannabis indica
ttttttttaaaaaaaagtaataatatcataaaaatagatagagaatcttcctatttcttttcgtgtccttgttagacccttgtatcgcttcacttatgttaggagaagtaaaaggtctcactagaagtaaaactctcactagaattaatttggagaagtaaaatgtttgtagtatatttattgtatatttatttttgacttttaattagtgctatatatgtgtattgagtggtgtagtgggtatgcttgaattggttatttatttcaacatcaataggagaggcccatactcttaaaatttgtggagttgtgaattgtgtgaatcacatttcatcaatacaagttttttcttcatcatccatttttactattgaaatacatattatccctattactattatattatactgttgtatttgctagtaatcaagcagcagcagttcgaatcatattaattggtatcagagcaccaattctagtaaatcgtgtcaatgagaatggagaagggaatgcagaccattgatgccaagatttcacgcgtgaaagaacattcaaaatcccatgatcatagcttggtcgtgatcacctaacaactaaagacgttgatgaatggtcaagctcatatcgctaatgaactcactagcatccatgaagctaaatcttaaatcttgtcccactaaattgtagatactcaaccttatcataatgacaataatgataagcaaacatgtacatataataaaatctccataattgagaaattttaacagaaatatctatttctgacaataagtcttattttttactcatgtacatataaactcacttgttctcttgcccaggaagactagcaatctccactattctttttctacaaaccaagaacatcaaagaataaaggaagcaaaacatagtatgtctttattgcattctttgctgtcgcatttatcttggcagtcctcaaagaattatacagaaatataattctctcattcaaatcaagccgtcaaatacccaatggctaacttttcgaagattcataataaacaaaatttggtcagcttcataccaaggcttataacatagaattctcaaaccgttttaatactaaaataatataatgaaactataaataaatccagtcacatataacaactacaccaa

SEQ ID NO: 200728 - DNA, 881 bp, Cannabis indica
ttattttaatagttaaactaattatatgtactattatattacttaataaaaaattgatttatctttaaataaaaaatataaatttagttttaaaaaaaacataaaatagaaaaattcattaatagattttgaaaaactcagtcaattccatctttttcacggatacttattcatcatcttctcgttaattcaaataattttaaatcgtgatattgatatttgtgaaacatatgaataaaaatcaaaattagaacaatgtaatagagaaattcaaacattcaaaattttcatctaactcatttttaagcatttaagtatatcccaacctaatcctaatacaaaaaatcaaacccagtaatatggtaaacaatttcaaaatcccaaatcaatttaacatcaaaacccacaaacaaaatttgatacacgaatctgaacccaacaacatttcaaattcgaagtcaacatcatggggatcccaaaagaaaagaaaaagctcatctaaccaaagaaacttagatttagaatttgtccagtacataatcgtcttcgcctccctccaccttgctctcacgaccttgttgtcattgaagaagtaaaagaagaatatcgttgaagaatagaagaaaacggaaaaagaaacatgtttataattatttttatgatttaaaatatattttatattttgtaattaatatataatttaaaaggataaatcaatttttattattaaataaatataatagagtatcaaatgaaatattaaaatggggtagtttaggaatattaaaactttaaatgcataagggcccgtttggcgagtaggatagggactagtattaacataaattatctcaattttatgtttggtggtaatagttgac

SEQ ID NO: 200729 - DNA, 1367 bp, Cannabis indica
cacatccattatttttaggcctatctagatccgatctaatcatatattggatgttagattttactatccgatccgatccaattgatttcaatcatccaatcgatccaacatctattggatgttggattggatcggttctatccgttggatgtatttcatatatatttattggtttaatttagatttatttaatattttagactagtattttttggattggatcgaatccatccaatattttagatccaatatgtattggattagactggatccatccaattcaagaaaaaagagtaaaattttaatgctaatttttatgtatacatatatagtttacgtataacattataaaatctaattacttattcaaactaaaagaaaatactaattagtttaattggatgttggatgtattagatttttagacactctatccaacatccgattcgatccaattggatattcaaaaataacatccaattcgatccaatcacaattggatatctaatgtttggcagtcggttgtaattggatcgatcaattatcattggattggatcgatttatcggatacccctaaactgacgttaactcacactattaactttcaaaagatataaattaaacttagtcaacccttaaacaaactgcccatcattgatggcattccaatggaggaggagagaaagaagtgaacgagaaagtgattgtagcaatataggagagcaattagcagccactatggaattcaatggccctacgattatttttttggatcagattgaatccatctaatattttaggtccaacatgtattggattagactagatccatccaatccaaaaaaaaaagagtaaagttttaatgttaattttcatatatacatataattttacatataacaatataaaaattaattgatcatctaaactaaatgaaaatactaattagttcaattgttagatgtattagatttttagctagacaccccatccaccatccgatctgatccaattgaatatttaagaataatatccaattcgatccgatcacaattgaatatccaatgtttggcgattagttataattggatctatcggttcttatcagattggatcgatttatgcacacccctgaatacactatgctctcatcatcttcactatcaatcatggtgactaggggtggcaatttgtgatcacggattgtgttcctgtcgtgtcaagacctatgtataacaggtacatacccgacccgaacacgacccatttaataatcgtgtcaaaatataaaacacaaacatgaccaatttataaatgggttgacacgaagcgacctgtgtaacccgttaataagcatattttgtt

SEQ ID NO: 200730 - DNA, 1340 bp, Cannabis indica
ttttgaagtcaattcagcaacacacaaaaagacaatctcagatcttattctcaggcaaagaaaatatcagctcacattctaacaacatctaccaaagacgagaaattgaagcaatctgaggaattctcttaaaactgtcatgtacttgagctgtggggtcccaatattgagaaccctctgaatttttgtaatatagtttcctatcttttagtaaaatgtttatacggatttaatttaaactctatctcacctttcaatgattttgcttctttcactattatcaaagtgccttactaaattactcatgtctatagaatagcctcacaaaaatacaatgattctgatcgtagtgtcaaaaaaagagaaacctgataagtcataacaattaatatatgagaaatgagtaatgacttaatttaagagtggaaataattttcaacctaaaagccataatttttttacttcaaagttgtttttgctactttcttgtgaaataattgcaagcttgagtaccatgatttgtgatgtgttcatatgagctgtttaggcagagttcatcaactgtgctgacgacttattcagttattcttaatataaaatagtttggagttgcttatattataatattatgaattcgattgaagatttgctgatagagcagtgaagaatttcagtagcaataaaagggactcttaagttctttgtccattacaacttctagttatttatttttattttttttgtttgaccaggaaacaacttatatagttattttattgtattctttataatttaaaagtttaaaagtggagaatatataattgtacgataagattaagagagacatcttattttagttattgccttggtttttagaactaatgagttttcttttctgttttcatggtgaggatattagaagagagaaaggatttgttttattatttgtaaagatttatctgagtacaagagaagaaaggtgccttatataggcacgatatgtaccagaatagaagaaaagaataaatcaactaattctaactaatttatcttaactaacttaactgaacttaataggccctttcaagatggagtataaaagtttcgacatccatcttagatacaatatctttgaagttgatttaggaacaaaggttttgttaagatatcggccagtattggttttgaagatacatggttcatttgatgcagttgtgtgatcgtttctctaacatgtgacagttcgatttcgcgtgtttgtcttcattataactgatttctgcaatgtgtatgctgctgaattgcacagtaatgatttgatggctagctgtgttgtatgt

SEQ ID NO: 200731 - DNA, 651 bp, Cannabis indica
ttctcttttttttttcttctcacaaatttccttcattttctaaattactttttcacattctcctacattcattaatggattccaaaattttccacatactaattcctataattcaagcattcaatcttctcaatctaaccaaattaccaaaattctccacataccaaccctcaaaattcaaatttgtaatattctcaaattaaccaaaaaatttcatatatcaaccttcaaaatgcaaatttttcaattttttcaatttaaccataaacctccatttactaacccctaaaattctaatttctaatattctcaatttaaccaatattatccaatctcttttttcccttactaaaactttagttcttttgagactcctaaaatactccattctttacacgaaaaatttactaccacattcaagcattcataagcaaagtataattttaatgttgaatcgtcaacacaatctatctctaaaactcattaacacatggtattgaagagatagcaaaagtaattctacatagtgaagaggaactaagaccaaaaaaaaaaattaacttagatggagcaaggaagaaaatatagttttgataagtgtatgacttaatacatctaagaatgttgttgtgagtgttaggttttatgccc

SEQ ID NO: 200732 - DNA, 1169 bp, Cannabis indica
gtatctataatttataatactataatctatctataactattgtaataaaaataaatgagttatggtacagttataatctatctataactattgtataaaaataaatgagtatgagttataatctatctataatctatctacttaagttattttatcatttagtatagtacaattatttggtttaacaaattttacttttttctgttaaatttaacattaaacaataattttcaaaaattttaaaataataaataaataaaaatattggcaagcagttgaattaaatcctatttttttaaaaaagttttgaatagttttttacgttcatttcccaataaaaataaaaaaaaataatattctaataactacctaaatttgaatgacatatttagtttaattttattcttatctataaataaataaaccctattcactttgagttgcagccataatctttagtttagctattatccatttttatttatgtattggtcataaatattggtggtctccatgcttcacataagatattcccagaatatcagtcgtggatccaacttttaaaactgcttaccattttcaaccttaaaaacattggattaatagtctgttcttctttttaattaatacttatcatgcatgcattgatcgatgcatatatatatatataataattttacgtgtgattttttgtttctaaatttttattcaataaaattagagttgctatatatatatattgtatacatatatttatttgtactattatatatattaaattttctttacttggtgaatggtgatgaattcttgtttaatttttgttcaatgaaattataatatgtggtatattctgcttttctgtagtggtgaaatcttaattttttctattaaagagagaaaatataatataattattactttttgcaattacagaaaataaaataataaagaatgttaacatcaataaaaatgtatatatcgatctaccaactctttgtgtttaattattattattattttttaatatacaaattagtttcatctcaaaaaaaaaatatatatatataaaaattagtttcctatatgattataaatgaaaatgaaaaatattttcttttaaatttgaataaatttaccattaatatatgaaatgttctgttattata

SEQ ID NO: 200733 - DNA, 1348 bp, Cannabis indica
tgtttgagttcttgaaaaacataagttttgaaccacgtagatcctggtcagccatggaggccttgtttgaggcctggctagcaaagggaggctatcaatgggtctagccggccaaggggtggtaccccttaggctggccaacctatgcctggaattagggttcctggctggccactagactaggtcttgcggtttggccggccactaaggcctagaactcttgctggccaaggccaaggctccaagttggcagccagtttttctccctctattgaccttagctagggtcttgtgatagctgtggaggcatatacaactgtggccttctgcgtggtttctcttgaatactctatataaggctaggtagtgagtctattgtagttaattataaaacttaggacttaccatacgtcttagtaattgtacttaagacgacacttggtcgatgatagaccttgtacattatgttttacctggaaggtacctttgggtactgctgatttaaatgtgttttactagtttcatgcttattttgtaattatagccaacacgaagcagacttataggagagtgactgtgtgtgaccctcatgcgatttggttggttacatggggttgaattgagacagtaaaagaggctacctaggctcatgttgatgttagctccgggactgaccatggagatgaaagtcccgatgttgggtttaatattgaggagcttgtactggttaggaagaagagacacaaaccttgtattgttctcttcggttgtccttagggtcgttatgataccaatggtaatctactgaacaggcttggtgagccttcgacacttgtcttaaatcatgtctcagagcagtcttctgaccctaagattttggatgcgagttcataaggaaataggtgcattccccctatatcttctatctcgccagacaattttgagagaatataggctaatgggctagtgggcggtatccattgtaggatacctccacaggatcaaccagcacatagattggccctcaactgcatggcacagttagagtaccatattgagcaaggagccgtgttacctcttcatccgtacttttgagatgttgctgcttatttcaggatgtgtccacacaaacctccccggaaggtatcaagtacctttcatcaatgtttggagtctattttggagatacatcagtccagatacttctactttagccaagttggccaccagtggctagatgatagcaatagttcatctatgcctgaagctggcgagtatgccgacaaatacttcattgcttaggatgttaaagaggtttgtcatcggtgcttctagagactaccatttt

SEQ ID NO: 200734 - DNA, 663 bp, Cannabis indica
tatatatatatatatattgctacacttatcgatgataaaacttacaatcatctatatcattgtagaagattttattatcttttctatactcctctttctcttctagtaatggtgctaattgctttgcatcataaaccaaagcaaataaaactaaccctaatatatatatatagattatatataccccatgcatgcatgcaaacttttaatgcctacgtacgtacctctgatttccattgtccatgcatatatttaattgggtttatcacatacaaaaaaaaaaagaaaaaaaaagaaaaatattcacacctatgaaaccgataatctcaaaggcatttcaatttcttcattattattcctttcatcattattattattattattattattacaacattcattttccactatttgatcaccactactcttaccatcatcacctccgaaaaccacaactggtccaaactgcaccctcctatgatcattattaccaccgccaccacaaccgccattatgagactccaaatttccagagtcagaggccgaggtattggcagttgtggtggctgcagttgtgggttcacgtgtgcttcctccacccctggaggagcgacaactgttgacattaacagaaagaggcggtatttgttgttgttgttgttg

SEQ ID NO: 200735 - DNA, 1702 bp, Cannabis indica
catgatgggacatcatgacatccttatatcttcaatttagagaccacttgaggctaattcaatttgagtctgttgtttttcgtgcaccatgcatgcatatgatactatactttatgattgttttaattatttactttttatgggaattttaataagagtaataattagtgcatagtttgggctattatataagactcttatataaaatgcccttctctttaattatcatcattttatatatgtcataagaataaatatatacttaaaaaaaatctaataaaattttgtgatcttaatacatatgattttaacttatctattttagaatttatgtaatatttattttaaaactaaatttgtgaatttttaattgataattttttttaataaaatgtccaattttatcgttcgaaatcctaaaattactttagtcatgttagagagttctacattaataatgtgatgaaattaaatatgcacgggctactcctctcattatgtcaattggttttgagatgaattctcatgtaccttaccatacactcactattctactatcttaactatacacttctatattctaattaatagaaactccaaaattgcttgagctggtatgtatgtacacacacaaattatatatatatgtgataagtaattttaaccaattaaaaaaataagggtaaatactattttagatcttatattttgcaaaaattatcacttgaaccctctattttgttaaatgacaaaataaatcctatatttttcaaaataatagaaataggtccctaagctcaattttaataattttattttttaatataaccatctttaagacaatttctaacacgaacaaatacagaaaatgtaactaattttgtcataatatatctaaattagattattattaaattttaatacgataaaaaatcaaatcagagtcttatttgtacaattttataaaatacatgatttattttaccatttaataaaatagaaagtccaattaataaacttttcaaaaaaaaaaattagcaaaattgtattaccttttaatttaaagtctaacttatcaaaagtttcgtcaaataagtgtgcatcacgagaattatgtgtagctggttttggtttttgcgtgggacaagctgtacataaaggaaaaaattagatggaatgtcttgatctctgttttcctttccttatatacagagcagagaagaagtgtgtttgactatataacgaaaaaaatgagtaattctatcctagtttttgccaacttttttattcatcttatcttacatctacacctttggaagatcagtcctgaatctaaatttcgaactgctgctcaaagcttggttcatgaagaaggtacgtttttattaaactttccaactttccgtctcaatttatatgttttttttatcaacacgattaattggtctaaggttattataataatgtgagtatatagatatgtttgatctaacttcctagctaattgttggatcttcaaattatatatacttggcagttgaagctctaaagaagctaggaataaaggtcgagtataatgacagtactatttgcaaccgttcagccggttatagttgtcactgcaattacaagagtacttgttatgtaacgaatctgtatgtgtcttcatctgaaccataaatttatcaaacagtgaaaatat

SEQ ID NO: 200736 - DNA, 1123 bp, Cannabis indica
aaaaaaaaaaaaaaaaggtgatcggtatgttataaaaattgtagagagctggtttttgaataatattatctttttagttaaaaaaaaaaatggagctaagtaaacacatgtttttagtagtaacatataaataataatttaagtttattgtctaaatgtttaactttttgtcacaattgtaatagtgataatgataattgataatatctggtagcatatattaataatattccagataacttattgtttttgattagtacgtaagttggtacctaatccaattttgaataataatattattacaaatataaaataaaatttaccccaaatagcataaatctagttggtacctaatccaattgaataataataattattatatatataaaataaaatttacctcaaatagcataaattcgaggaatatacttatccaaaagtcaatgatatacacaacaagcatcacataatattcatatatgaattattgtaattagtactttaatatgctggtaagtgtctcgatcgttccctaattaattattatttttatatataaattaagaaaattctacaatacataattttttaaaaagaatgtactgatgcacttatatatattttgaaatttgagagaatttttttgtccattttttatagtcgtgtactttatattttacaaaatatgagacatttaggaaaatttaacacgccaaaaatagagttcaaatagtctattgcatgtatgactcttttgttttatactatcaagattggttatgtaagttgtgagttagttagtgtttcggttaggttgttagttatgttagttggtccttagctgtcatttttttgttttttctgtaaccattttgcttcattgctacttagtataagtagcatctattggtgcttgtatcttctttgatcattcattgaataagatctgttttcatctatttcctctgttctttcgttcttcatgttctagctctttggagctgttatggtatcagagccagcttcatgtgctcttgttcttcttcatcttatttctctttgatatgtggttatctggtttgtggaaatggcacgaggtggtggagctcaaggccgtggtaat

SEQ ID NO: 200737 - DNA, 867 bp, Cannabis indica
atttaaaaaataaaaataatattgtctcctaaaagaattatgattattgttatgggttttttctataaggtataataaattggtcccaatataattaaagtcgtctcacgtgtgaactcaaattaattgtttacaccgaaattgtttattaaatcgaatttttgtgtgaataattgtttattaaatcttttactattagtactgtcaataattagtgtttattaaagcatttttttttttttaaaaaaaaagctccaattattatatataggatattttgttgtaggctcattaattttgttttgtgtacataataagaataatttatggaccggaaatcattaagattttatgacataatggataagtagaacaatttgattcaaaaataaaactgaaatttacatatatattgcagttagatattttcttctaacattaaaaaaaaaacaatttgattcaaaaataaaattgaaatttttgactgaaaataaaagtatgttaaagcttattaacaatttgtagccatatttaatatttattcgtttatataaatggagtgcttgggtataattctacatttgcaaaactttcattggtgttcgtatattttatttttttattagttgatgtataatttttttttaaaaaaataaattttttcttttttaaatatctttagaaaaattaataatgtactaaccccaccattattaaaatactctcttcaccctctttaccacaaaattataaattaagggacatgaaaatatctctaccataagaataaaaatgtcattccaacaatagaatttttctatatatatttatatttcatgcctgaattttactttcaaataaaaaagg

SEQ ID NO: 200738 - DNA, 696 bp, Cannabis indica
ttatgttcctcatcttagagaataaaattattaagctgctttttcctgaaaaatatgtttacatataccaaatcatgttgtctgaattttcatccatgttagactttcattattaaaattggacaaaagtctttaaatctaatcatctcaatagtttaagatagatttttaaggatcttaaaagtttaaaaatataatttaatatacgtcaaaatttaagtaggtaaaaatcctaattaagctaaacttttttatttataacaagtgtagttgcactaaacgacatcctttaattatccagctaggctgatcaacctagctggataattaaagaacaaatattatcataagatgtagctaataacataactacgtacttatgctatatatactgaacagtgttattataattcttaatcaaatttttaagcccacaatgatatgctaaaataattttttttcaattttttttaataatagtattattatatcgttaaaatattctctataaattttttaataattcataatagtttacagtatcgaaaatatagttgttgatttttcaatttatcattcgtgttcaaaaaattttaaatctattctcggcactataaattattattttttaaaaagttatcataataatgttgtaattataatgaacaccaccatatgtattttcaaacacaaaaa

SEQ ID NO: 200739 - DNA, 1094 bp, Cannabis indica
cgatttagattgctgatgtagtacgatatttaagtgacattattgtatataatagaggtcatatatgtgcaagaaccgcatacttagaaaatattagtagggcaattagcattaaacacttttattttatgattatatatggaaatttgtcttgtgggtcctattttcaaaaaataggcattaaaattataatttttcaattctgaagatttaattagactctaagtgtattatttatactgtatgtgaaattttaatatttttataatttttcttcggtaacaatgaaaaatgcaacagatggtcgttagagtcacatgggttaggttagaaccttttatctagtaggacaatcagaagtttaatttttgaatattggagttaggcgaggttatggtatcagactattttactcctaagccatattattatctaagcttgaagtaagaggcaaaatggtcattttgtctaattttgtggttttgtcctttagtggattttagcattttggacttattttcttaactgaagtaaaataattaagttactaattaaaagttattcttttagataagttagaaattaagattaatctattaccccctctctctctctctcgacacttcttgaacccaaaggaatcaaggtttcatctccagttttctatcatttctagctgggaatttaagggaattcagaagctattgtaagggataagctaaggtaaccctagaaacttttttctttaagtggctttgtctgaaccagtggcctttagggtttgatttttgggttcatatcatgttatttgaagcttaattgagttgtttttgttgattatttcttgggttaaacaagtttgagttcaagaacaatggtgaattttacaaattgaggttatttttggttctgtcacttgaaacttgtttattgtggtatgtttagctgatctagagcttagtttattttgagttgttttggtgagtctttgtttttttgtagcaaaaactagtagaccgtttctgtggaaacggcctgccgtttttactagtaggggcccaaaaaaaaaatggcttgtcgtttttacagaaatg

SEQ ID NO: 200740 - DNA, 649 bp, Cannabis indica
tatgaaacacattatacaccccaaacaatgcaggagttaaagctagctcctacgccatctagcttacttactccagtatcaaaaggtctaacaaatttaaggtttaacttccctttctacgtacccctttcatagttgatacatagagaaatacaatatctcccacttggaacttgatatttctacgctttgaattggcatagtttttttgtgtattcaataaggtgagcatacaactccaattcattaaatggccttataagttccttggatcttttcggtccattatatttttctctcacctgcttcattcaaatgataagtgtacaatacttctctcataccatatttcttaaagtgcctaattaatggtacatttagttattacttttaaacaaacactacgccggagagggagattattccaagataatctaacctttatcatatatgcgtgcaacatgttttcaaatatcttattaatccttttgacaattcacctatttaagaatacaagttgtgctattttctctttaatatgtatagttctcaataaccatctttaactcttaaaatcataatcatggttatcgactttgaaacttcaacattaaacaattcctttaatgtataaatcaatatccttgct

SEQ ID NO: 200741 - DNA, 506 bp, Cannabis indica
cattgaatgattcttgtgaagaattacacccaagaaatttaatataaagatttaaagtaatggaatataatgcaacttttatcaccctttctgccagccgcacacagttgggacttaattatatatatattaaaaaaaaaaagttatatgtaggtcaacaaaatcaatggtgggaaaattatgatgtaaaaaaaaagtaaagggtaataattaaaggacagaaatatctttgtttcaattaaccaaaataaataaattgaagaaattataatgtaagagtgatttgaattcaaagatgtggtctaatgaggtggtcaacgaaggaaaagacagtgctttagaataatattccctaaacataggagtggtacataatcacattattatatattaagaaatcgaaaaccctagttacattgcaaaaaatcatattcttgatcctctactagattcccaagtatatatatatatattcaagtattcaacattcttttttcttattaaaa

SEQ ID NO: 200742 - DNA, 931 bp, Cannabis indica
caagttgcttaaattcatttatgcattgaagcaagtctctagatcttgaaatatcacctttaataagaccattaaagagtataacttcgaacaaaataaaagtgaattacgtgtatacaaatacattaaaggtaatgtagtggtagtcctagttctttatgttaatgacattgtacttattaaaaacaatgtaaaaagtttgtgagatgtagagaagtggacccttgagactagttctaatcaaataaaaaaaaaggaatttcctcaagaaaataacccaaaacaaagtaaactaaaattatgattatattctaatattataaaaaataaacttaatttagttttaaaaaattatctctaatatttttttattgttttattttatttttaataataattattttattatatttttttatatatatattttttaaatcatatataatttttttgtgtcttaatatttaaaatatgtttgatttttattttgttgtatattttttgtgaatataagatggtactatgtgtactgtattttttttattattttttaagatttttttagattttttttatttttataaaatattatttttattttaaggttatattgtttctattttgaaattattctgtttttattttataaaagttgttttatttaaaattttgttatttttattttcataaataaataaaaaatcaattataaaagtataaaaaaaaaaaattgaattcaaatttatatattatataaaatcataagatggatacttttacaaatatttagagttggaattaaaatccccaaaatacatagtttgactgaccacttacttatctctgcaatagagtagacaactagaccttatctaatttattgataccgttttatttggtcagaggaagcagacaagagtgtgagtacagt

SEQ ID NO: 200743 - DNA, 909 bp, Cannabis indica
ttttctcagttttatcgagaaaattcacaaattgcaccagcaacattacttttatagacacaattgtgcaccaataaagttatagtcaaattaattggccatttcaagccactccttttgctggtgcatttggccaaatgcgcttgcaaaagtcttctttcttgtagtatgtgaaaagatatagaaagaacagagagggagagtgagagagagaaatcatagctcgattttgcgaacaaagaagagggtgcacgactgggctggatggtcatggttggattttgaataatctattttttgttggatgactgtaattatttttagttcctttagatgattgtaaaattgttagtggtgtttttcggtctaatctattcatgatgataattctaaggtggtggttagaatagagctcataggcggtggttgtaattggggttcacaggttggggccgtcggatggtgttgggtgttagggttgggtatcggggcttagaaggattagggttatacgaaaaaagaaaaggaaagagaagaaaagaaagaaaaaaaaaaaaaaaaagaaagaaaagaaagaagaaaagaatatatactttaaaattatttattttttaaaataattttctatattttttaattattttttattaatatttaaataattaaattatatggatactaaaaatttgacacgtgttcacttgtgtacactgtgacacttaataaagtcttttaagtggaatagataaataactcacagaaatgaggtttagagaatttaaccattaaaaattaatttatgtagttaaatgttacaaatcgtagttagtttggctgccaatattcctaaacataattaggttagcttttgcttcgtctattttacaataaaataaattatttgatatt

SEQ ID NO: 200744 - DNA, 852 bp, Cannabis indica
ttcttcagtgcgcgcaacatcctctgaaacataactgcacatgagtaaaataaggatgtcaaaataagcatgaatcaaccaagtgcaaacaaagttaagaataaaataaagtaccctacacgtggccatgggcaccctcccaaacaagcaaggaaggggcatcctcatcgaaagagtcctcctcctcctgctcgatcacaatggcctttccctttcctaccacctgagcagaagatcaagcgaccttctcgggactatctctgatcctaatggcccgctcaataggtacttggtcaccttggggagcccttctcttcttcttcttcttgtttgaaacttcctatccagatgcaacccctccttcctgggctggcataggctcttctgctggctgctcggccccttgtccatgatcagatgggtagagcttgtgcttgataaaattggcctcaatggccaagagaacaatgttctgatcatctaagggagcttggagaatctcttgagccctctccctgagtcccagagtgaatgaaggtcaacaataagaaggaatgtgttgaaaactggtgtgcttggtgtccatgcccttgacgaagtaatagtcctccacgtagctaccaattttggtcacctcggtatccatgttaccgattagccacctctcctcgatctgagagaagtagaaatacccagatctattttgcttgcgactgtacatcaggtcaaacaaccagttagtatcatggacggatggttgaccccatccttgagaggcatacaacacgaaaaaggcagataagtacttaatgcccttatgggtgagttgggtcggctgatgttgtaataatt

SEQ ID NO: 200745 - DNA, 802 bp, Cannabis indica
atatatatatatatatacgatcagtttataacttctagtgttaattgttagatatataacatagttgtaaatgtgaaattaatagttaagtgataatttttttagttataaatataatttttttgtaactaaaatataaaaactttaagtttaaaaataatattatttgtaactaaaatatagtatttaaatataagttgtaatttagtttagtcacaataaatattacgactaaaaatatatttaattactacaaattgtgatttttgtaactaatatctttagtcacaaatattttaatcataatataaaaattattatttattaattagtcacaacttttttaattttattaatcacaaattttattgtgaataaaaccgcaaaattttttatagcggtaccataaattaaaatgcatactaaatttattgaaggacatttaaatttgatatgcacaataaaatagattcaatttttttttctttttccttttgaaaaaataaaattttaaaaaactagataaataaattagaaaagttatatataattggttaatggtcttattcattacggccaaactcttttcaatattaattaaatcatttggctatatttggctagacttgtttgacattaatacacctagaaaagattcttcttacattgcaagatccaaccagcattttttttctttattattattattattattctagctgctgaaatcatttgaggtaaagacatatacagttctaaaaacaccaaaaacgtaaagagaatctatgtgtcttcgattatt

SEQ ID NO: 200746 - DNA, 1537 bp, Cannabis indica
aaataaatgaacaatgatcaatatgtttgatatgaaaacctgctccactgccctgtagatttgttgatctctaaagaactcattgttggagttcagatatcgagcagacggtgtcaattgattggtggcacctgtgttaggataccaacttggatcaacaatcgtgttttaagtgctaggagtttctgtatctcagcaagattggcagagccgttaaactgttggaaggattcaagtctagtgaaattcttgtcaaaccagtaaaagcattgttgaacagtgtggccaggtttataacatagttggaactgtgaattttttcccagacaaaaaatatgcccttaccacaagaggaaccacctctaaaattaccaaactagcctcgagattgagagggaccacaggaagaatttgtaggatatgaagagatcctaggtggaccattgaagctatgagaattggtagcagggtggctgaaaccaggtagaccaccacgagattggtaagagggattagaggtggacccaaaccatgaccattgctggacttgttttgagctagattaacctcacttttggtgatttctagttccttagctgctttatcaagaaacattgattgagccattaacactgctttaatttctacaacattgtaagaatccttgtgagtatttaaaggtgtgatgaacacattataatttcactagcaagaccattaaagattgcctcaatgtgaggttgaggagattgttattagtgctatttttaagtaggttattaaagtatttttagtgtgttttagttatattttatacaattttacacttttagtcggtaatatttttcacgtttagtagtgaataagaatagaacaaatttgagaaaaaattgtgcaaaaatgatgaatttaaataaaaaattattgctagagcacaagagatcaatccaagaaaaatctaaaagatttggtgtgattggagcttttaaggttaaagaagtggagagtgtggagtagagccttggcatagaaattcaatgccaggaccctaaaaggaaaaaaaaattgttaaaaaggtcttgattttaaagtctatacgcaggcctcaacattgggattcaatgttgaggcatgaggtccttacttgccctctcctccaaattgagcttcaagggctgcgacattggattttcatgtcgcgacccgccttcggtttttggaaatttcctggaatgtgaaaaaacatgggccgcgacatgcatatccaaggtcatggaggtcgtggcccgcctacatgaactggaaaattttaagattttaaccctaataaaacgctatgaaaaggaaccttttgggacttttggaaattaacaattattagggacaaaaattggaaccaaaacgcggttctagagacttccatcaacaattttttgatgagttcttccttcttctttattttcttatgttctttattaattgttgctagttatttacaatgaatatcaatagttatactttcaattaaggttattag

SEQ ID NO: 200747 - DNA, 2511 bp, Cannabis indica
atatgtaaaagttcgacggataaaaatcataattcgctaaaaaaatagtatcatatacgaagaatgtgagcattcattatatgaaatattatgaaatgaatgcagcttttcaaaatttatatatatatatatatatatatatttagaggaaatggagctaacataatagaaagtaagggggtttatggattgatttggtcccaattttaaaattttaaaattttataatcagattagtattgcttttaaaaattcaaaactaaaccaaactaattaaataatcaaaccaaatccaatctactcaaaaatagatttgtttgattcgaaaccatggaaattatttttacaataattgtgtatttttcaataattttttttaataagtttataatacataaataacaatagaaaatttttaatcataataatattaagtcaatatcaatattctacctaaagttattcccaaatattaatatttcgtctaaaaaatatatattaaatatatataaaataattacacggtattgttttgtttggaactgctaccgagatttttaaaatcatgactgaattggagaatttcaaacggttcgaattgatcaaatcattcacaccggattcatttagtctgattttaaataattcagtctgaatttattagagtttgaaatcttgtaaattatataaacatgcctaatagaaagaaagggaagtaaccaaaagttgaattaattatgataaaataaaaacatgtggaatttatttattgagagacaaaaaattaagaaaagataattgggacaggtgtattttctttttcccacgaaaacctagctacctcataaaatttacttatcagtatttttgactttcttattcccaaacttattattaattatttactttttttaaaaaaaattagttatttaaatttttttttaaaaaaatatatcatcaaaaaaattctgacgaagggttacctaagtgagtgattagtttcaatgtcttttccaactactctatattttgtgcatgccatttattgttgcttatatagttgtttttactctttttatcaatcaaatatatacaaaatatatatatatatatataaatatatatatatatatatgacaaacttaacacctaatgttaagggtattgggttgttactgttagtgtttgttatttcagttgggttgttattcaacagtctgttagagtttgttacaaccactgtaactaactctctttcctctcttactttcagtcactatataatcatgtacaatcctttaccatacgaatagattgttctttggttatcaatctctcttttctgttctttcaatctttctctctctttcgttctgttttactttgctatgttcttcttgttcttctcattgtgtgtttgatcatggctaagagattcaacatggtatcagagcagtgttttcctccactgtcagcaaacatggcgagtactggagttgccaacaatggaaaccagatcaattccaacaccagcagacaacagaatcaacaaagtggagcctctgccttcaatcgatcaagaaacaattctgatgaaactaatccggtatacttcaatcacaacatgtccattagattaaatgatcacaattttctcttgtggaaacaacaggtgcttgctgcaatacgtggaaatagattaatcaaatacattcaagatcgagctccaccacctcaattcttgaatgatgcagatcaagcttccaacacattcaacccagaattcttggactgggaagtgcaggatcaattgcttgtgtcttggctgctatcatcgatgactgaaagcctcctcacacgcatggtcgggtgcaatacaacacggcagatctggcatgctcttgaaaaacactttacactacaagtctcctcaaagattttagagttttgaactaagttgcagaagcttcgaaaaggatctatgtccctaaacgactatctcttaaaggttaaacaacatgttgatctccttgcatctgttggagaaactttgagtgccagggatcacattgctgcgatattcaagggcttacccagtgagtatgatacgtttatcatctcttctaatactcgtatagaggaatactctgttgctgaaatagaagcactcctgcttgcatccgaatcgcgaattgagaaaattgatccagatcaagactctgatctaagcgtcaatcttgctatgattgactccgatcaagtctcagaggctaacgttgcttatcagagttatactaatcgaagcaacaggtttcccagctacaatcggtctcctactcagtcagccacatcgcgcgaaggtggcagtggttttatgagtcgtggagttccaacaggtagcaattatggtcagtatccaggagcaaatggtcgtggtggcactgcttctaacagaggaggaggcagattcatcacaacacctaatcgggttcagtgtcagctttgccacaa

SEQ ID NO: 200748 - DNA, 992 bp, Cannabis indica
actaactcttttctttttcatcatcacttatttggtccatttctaaatctgcatttgccattacagacactatcaatttgatgtatcgtaacaaaaaaaacttacacttcattattcttattaatttgggttttttttttttttttaatttttgattactaaatagttttgaattttatagattaaaatgcaaaatgtgacaagactttgtcatacaaagagtattgtatcagtaaatggacaatttccagggcctcgtattgtagcaagagaaggtgatcgtttacttatcaaagtcatcaatcatgtcccaaacaacatctccattcattggtaattaattaatttcaacactatcatataatattatatgtataataacacatcaattatatttgatttaatattttggtttataggcatggtattaggcagcttcgaacaggttgggctgatgggcctgcatatgtgacccaatgcccaattcaaacagggcaaagttatgtgtataattacaccattacagggcaaagaggcacacttttttggcatgctcatatatcgtggctaagagctactctttatggtcccataatcattcttcctaagcgtggtgttccttacccatttcctaagccctacaaacaagttcccattatctttggtaatttacaacattgcccacattcaaataaataataaacactttaatcttctctctttctctctctctctgaatcttgtaacaaaataattataatatgcatgaataaatgttgtacaggagagtggtggaatactgatccggaagcagttataacccaagctatgcaaactggtggaggcccaaatgtctcagatgcttataccattaatgggcttccaggcccattgtataattgctcttctaaaggtttgtttcttaagtaactgtaaatttgtgatgaaattacacattttgaaacaaagctttttttcaaaaaaattatttt

SEQ ID NO: 200749 - DNA, 544 bp, Cannabis indica
aattttatcaatacaattaaattttctttaattttacaaagtttaaattcttatttaattattttattatataaaattgagaattattttgttaatttaatataattaaattgattaaattttactttaggatactaaatatgtaaacggtttaaattaaacaatatcatagtgcattttcacagtataatttataccgttttaaaatctcgcgatacgattacagtttaacagatcatgaaaatcacatatggtttgaaaaaaaaaattaaaaacacccacacatttattctaacacattacttttacttgaaaataatatttcaattaaattttactaattcccttaaaaaaaaaatggggattagtatctcatacactattttttaatttttttttttaaatttacggttagagtttttaaagtggttgcagctttagttgcaatagggatttttatacgattttttattgcaatttaagttgcagcgcaagtttcaatatgagtttctatgtaaaaattcgttaaaaaaaaaaaaaaaaa

SEQ ID NO: 200750 - DNA, 2360 bp, Cannabis indica
gaatggttgcttctaaagaagttcctgattttactatattgaaattgtgctttattaaatcatttccagacagcaaatttggaagagtcgcagttgcaacaccaacaatgctgttagaaattgttggagcattagtaacaggcaaagcaatttcaaccccagcacctgaactttgcaccttgttcatcaataaagaagcatcaactttattcaatgcagcatatagtttgactttagatttaatgatgtcgtaaagaaccttcctcattccagaatcaccttcaacatcttcaaaattcaacaagagcacttgtgaaaacatagcactacaataccatcatatgcatactatttttaaaacaacaattataaattatatatagtattagtgacaatacccaaaagtgacaaaatagcagcacgagcagccaattgttcagcctctttcttgttttttccaacactaccagtataggaaacatcattgaaaaccagagtagatataaaaactggaagcaacccttcaggcttaatggtgttataagtgggcatcttcatattcatcttggtggcacattcattcaaaatagacttgcaaaacacggtgtcctgaaagagtaacttagaacaattaatatagttatcatttgaatagtgaacaacatcaagaaccacacaaacatttattatctttattaaaaataaaaaagttgttgcagttcaatttcaattgcaacaagtaaagaaaaattaattcatacgttcacttattaatcactcttcacacaatctttcatctccaaacaacaatagtacaacaacaaaagaaattattaaatatctattgaaaatatatatgatataaaatgtctccaatccctagaccattcaaatttaatcaaaacatttaatgcaaataaagctaataatacaaaaagttggataaaaataaacaatgaaaaattataaaatatttatcaactctaccgaaattaacttgaattgtctctctcctaagttaaaattttggtggttaattgtcaatttctgtccaacaaaaataactttacgaagtttgaatcaaggtactccatgaacattgctattaaatcttaatagtattaatattttatatagctcgaacaataccccataacatcaacttacttctagttttactttagcaagaatttgttctttgaagtgagcttatttgttaaactttaatgtgtatgtttgctaagtgggagtacatgcacagtttttctttattaagcttatgatcattttcttatagtgaagacttaaagaagtttagagaaaggtaatttatgggtagccgaaatatttgtggggttaacttgtcaagatattggtttaaaaaaataataattacattcttttaccatcaagaaaataatcctaaacgaaaatagaatttaaaaaataaacgaacctcatgtataagaggaagtccttcatccaccatttcttttgttacaagtccatttacaattgtttctttagctatagactttaaggcaagttcagcaacattttgttcagcagcttttcgagtagaaaaagtatctgaagaagtgtaacttactccatttactattacagttgatctgaactttggcatatgttgataaccttcattgatagtttgatacacaggtaacggtatgtatgacttatgtgtgaactcttgcaagcgattcttatgcattaattgttctgatacatattcaaatttataacaagtaaggaatttataaaaagtaaactatcatgtacaatcacaaacaatgtaaatgcacaatcaaaatacaatagttgcatatttaaagtgtttcacccatattacattagtttcaagatatcatgtacctctacatcattagtccacaactgtatctataaattcaaaagttatattttatagaaaacaatgaaaaaaaatattagtctctaactatggcaactcatgtaaacaaaattacaaaattctatgtaccaaaacgcaaaaatgcagtgcaaaatcttgaaaaatgcctacttcaaaactattaaaagatataaagtttaatcatgacatcatgatacataatcacacattatatattgtactgaaggtgcattacgaataaactagcatttattttcaaaaaaaaaatcacaaatcatatcaaacagagttggtaagccatatatgataaggtaatgagactcttaagatagaagaggatatacggttccaacattccaagttggtgtgaatctcaatacaatgaagtataagccagcacaagaccagattgttgatggctttggtcaagccatcataaaggagttgt

SEQ ID NO: 200751 - DNA, 512 bp, Cannabis indica
accttcaatcaatgtcagtaattctgcagtgctcatgatttcgtatattatacctcttaaaacccagtacaaaaccctaactgttatagacccactacctcaaggtatgtgccttcataaaaaatttctccaattttggagtggcacagactggatgcagtgtcactcccaggcagatacagacaaaccaacaaataagagttctagagtgaggcgttacccagtcccaaagtaagagaaataaaaagagtcaaagctggagtggaactttgaagaaagtaaggtaaggatataaatccctgtattctaaatatactaatctagtagacacattcgagaatgtctgccgagctaggagcaacacatctcattacaagaagccacctctagtgtataagggaggtaaaaacaaaatagatccaaataaaatgtgtgaataccatgaaaatgtcacacatacaacaagtgtaatattccgaaaattaatatagtatttaattagacatatttta

SEQ ID NO: 200752 - DNA, 1287 bp, Cannabis indica
ttttctcattttctcaatcattttaagagctatatggggaattgttattcgtatttttggatgagaacacgtagaattctaacatcaaatacaatttagttatttcaggcccaaaaatgggcccaatcagaataatggattaggtccattagcaagaacttattttctaatggaagatagaaggcttgtctaggcgagatactcttccagcacagcgtatattcgggagacatcaaacaaaacatttggagaagtaaaaaacgagcatccagatgtctaactcagaagcattctcattaattacaagatcccaagatattaggaattaacttccacggatctcgtccgaagataatatcttcttaaatatggaaagatagtacttggaaatcaagcatttaatgtgtctttattctccacgaagatatgacacggtttttggcaattgtcaacatgctgtggcatgggcaggacttcaccaaataagcacatgttaatatgctacttgtaatcaccatatcaataggcaagagctaataagtaagaactttaaaactataaatatacgaaaaatccttcatgcaaaggggttagaaactcattctcaattgcccaggaaaagtaaagctcaaacattcttgtaaaccataaggcttttctagctttcaagtaataatgttgactcgtgggctaaggctcgttaatgcactaaccacataaaaattctcattgttattttctgtatttttggtcaatttctttagctttcacatataataaatttgtttccaaaaatctcggtaaatattttggtgctttcattaagagttaaagaaagcattgatgccatcaaaggttgtatactaaaactatggtactcacccgaaactaaattggtggtcatgatggagagacttctatggacggtgtagatcttgtagcccgggcgaagacatcaatcgatggagatccaacagaggcaactagtcgccctgctaaaaaaactcaacgtactaagaaagaagttgatgaaaatcccgtcaatgaaggtcgagaggaagatcccaaggccgaagatcctgaagatggttggaaagaaaaagattaagatgattactattacgagccagatcatgtagtcattaaaatggacaaagaactccttacaaaaaaaactaacattggtggcacaaaagaattctcctgccgaatgtaagaaaccttgacctaattagaggctaggcttgaaccagagaatgctgctcatgatgaagaaactcttgacga

SEQ ID NO: 200753 - DNA, 760 bp, Cannabis indica
gggagaaggagttggtagacattgttaagataattagagtgggtactgggtagatcttgttatgattgattgactagtgatgtctctcaacaatccaaatccaaaccttacatgcttctgtggaaaatacttatacataacccactgatcaccagaaataaatgcattaatgtagaaagagaaaccacctgctctccttcctcaaatccagtggtataaagctcaccatgctatactcgtcaacctaaaaccaacacaaatgtaggatagttagttatacacaagccaccacatcccaatataccacgacattgtacgatcaaatgttagatatatgcacagaaaaatggttttatactcttaataagtgtgcaagtgcttgtaaagtcttaaaatcctttaaacagcagatgtgattgtatcaaggatcagcctttgcatcgttatgttaagcaaatggaaatggtacaagtggccacgtcaatccatattacatctcaaaatgcaagcatgagaaaccattaagatagtaatgaataagctactctcatcggaaactccactgagccccttttgatgagtaattagatatatgcatttctctacaaaggaaatacaaaggaaacaatctactacaaaaatggaataaatggaaaaaggaaaaccaggaaactgccaaatgcaatatcaggatagtctgtcactaagtttgtgtaaaaataattaaattctttgattaccactgcaacactaagttgca

SEQ ID NO: 200754 - DNA, 941 bp, Cannabis indica
atgctatgatgattggtggacgatttattagattgttgattgttaatggttgcatttaagtgtttgttgtgggtgtagatctccatacaaggagcgtgttgtgatggcgtcctccgtagctgggcccacaggatggtacaaaggaaaggtcaaagctgtcccttctggggattccgtggtgattgtggccatgaccaacaagcccggaccaccaccggaaaagaccattactttagcttctctgattgctcccagactggtaaacaatccctactgttaattgtcgtttcccagatagtaattatcattatcattatcctgaaaagaatcctgtttttttttctttttcttttttaaataaaaataacaaaatttatctgcaatttgttctgagataaatgtctttgtcatctgtttttcctttgtactaggctcggagaggtggtgttgatgagccgttcgcttgggacagcagagagtttctgaggaagctctgtataggaaaggtgcttaatttttatttatgtcagttgctgttggctacaggttatgctatactagtcagttcataacatgcccgtcacaattttttttcaggaagtctcttttcacgtcgactacacagtaccgtcgattgggcgggaatttggctctgtttttataggcagagacaatgtcgcaaagctggttgttgctgcaggctgggcaaaggtataaccgttattcttctataattggacacaagattccatgccccaatatttcctgtaaaatcagcttaatcttgtttacatcaggtcagggagcagggtcagcagaaaggggaagctagtcctgacattgcagagctcttgaacctagaagagcaagctaagcaagaaggacttggtcgctggagcaaggttctcaattaaattctttctccagctttatgaataatt

SEQ ID NO: 200755 - DNA, 1075 bp, Cannabis indica
attatttgtgatttgtaaatcttttcattgttaatagtttgatttttttaacgtttagttgatttggttctgcacctttaattgtaactttccaacaaatagatagtaatcaatcaagaacacagaattaagattttttttgcaagtgttcttgaagaaactttaatgtcatcaatggtgagattccaattggagaaatttgattgaataggagattttgcactatggagaaaaaatttgaaagaaatcctagtgcgccaaaaggtatccaaggttcttggagatgagaagcttttggccgagaagaaaccagagaaaagagtagaaatggaggagatggcacactaaagaatcatcatttatctatccaacagtgttcatagaaaaatcatcgcagagaagacgattaaaaaggtttggaacaagttggaagaactatacttaaagctatcaattgctagctagattaatttgctagaaaggttatacaggtttaaaatgatttcttccctttctttagatgataatattgattgatttaatgacattattgtgggattagctaacataagtcacaaggttgatgaagaaagacagactatcattttgttaagataaccccatttgtgtatcaagaagtcaatgcagccatcaattatggtagagacgtaattgcattggatgatgttcttttcgcactaaagttgaaagatttcgaactacaattggagaaagaatccaagaaagaagaagtgcacttggcaataggaagatcgcccacaaaaggaagttctaagagtaaaaaccatcactctcaatcaagatcgaattccagagagaagaaaaaaaggaagtgttacttctgtggaaggtctggacacttgagaagattttgcaagaagtacaaggagcaacaaggcttcaataaacctcacaatggaggtaggaaagacagctgacatcatcaccatgggaaggattctgctgcaaccacggaggataatgatactgctccacagatgaagagttgttctctatctcagagtcctcaatgaaaagggagtggattcttgac

SEQ ID NO: 200756 - DNA, 949 bp, Cannabis indica
ggaaaaagaatcacagtaaagtacaaaatctattaatagatgttaataccaaacatacatagcatatattgtatttaataatactagtacaaaattaaaatggatataaaattataagttaatattaaaattcttaaaaaaaaaaaaatagtcgggtcggatcagatccgattcgagtatctcatctagcgaggcggggcagggcgagggcaaatccttacatgatttagatcaggtcggatcatagccggatcagatccgacccgacccgaaccgacccatttacactcctacaaaaactactattcaacactaatttttgtttgggtaggtttaacacacctaaacacaattttatattgtggttagcctttcaaattagacttaagaccaaggacatattgtagaaatttcaagttgttaatgaggctgtttgcagattatttttgcagtaggatgagtcaacaaagcacctgtttttcagctgctcttactcactggtttgtgtggaaaaaataaaggaatggctgacatggagggctcggaccacaaaattatctcaactggtaaaatggattcacaaagcaaaaatcaacaagtttaaaaagaatgtgatggcagcagctatagcgaacctggtattctcaatttggtatgcctggaatgatcaattgtggaacaatcatgtagaaaatagtgatgtaattgtacaaagagttaaaaacaatgtcaaacatagaatagagatgttttggctaaaaaaagttggccaacaagatgctctttgtgattgtaaatgttgtggaatatcaataaacttgctaatttatcaaaaaaaaaaagcactaatatattttttcaattccaaccacatcactaaaaattacacttataaattttaattctttgttattttataattatactaataaaataagaatattttaat

SEQ ID NO: 200757 - DNA, 660 bp, Cannabis indica
tttctacatctataacttttgcaaaatagaaattctaaaataatatttaccctaaaataatttcattaccaaatttgttcaacttacctttgctaatttttttcccctttaaaaattagagtaatactaacacatttgctaattaatatgttttacttcatatgttatttttatgatatagaaaagacaatttttttttttttgaatagttaagattgataaaaacaccaatgatgcacaagaaccattaaacaattttgaaattcttttagacccatttaaagaatcgttttgacagacttcctatctattttagcatctaaaaacattttttatctatttttttttataattgcgtacattatagtcatttaagattacttgtaaatttttaaataattctgaataatttacaatactaaaaataagatttaaataattatttaccatgcatataagaaaaaatagtcgcgcgtataataaaatatataaattttatttttcgacattgtaaattatttaatttttttttaaaatttacaaatagtcttaaataactacaacatacacgattataaaaaaattagactaaaaaattttcttggataccaaaacaagagatctaccgaaatacctttagttagggctgaacatcgggcg

SEQ ID NO: 200758 - DNA, 833 bp, Cannabis indica
ggatggaattttcaatttgatcaaatttcttgaatgtgtgtcgttttttttaggtaatttcgtttgattctgtaggaaaaattaatgacctgtctccttcattcatatattattttaattataaagacaatgaaaaaacataattcatgtatgatgcttacatggatgaatggatggacttatgagcactgcaaatcgttttcttgagtgtgtcaaataatattctagttgaattgaatcaatatccttataagatacgcacttcaactttacattgcttacaagtttcatatacatgtgcttgtaaaagatatgctattgacaacaaccaacattttgtttttcttcaatagaagcttgtaaacccaaaaagtagacaataagtttgatttgttgattcaagaatatttttgtacacttctctataagctatgatgcaaaacaaattttgataatggttttataccattacataatgtcttttaatacctgattgtctattgtgaaagttgatgagtatggcaattaatgtattgaaagttcaaatgcaattaactttgatttaccaatcgatataacttctttacttcgtattttcttctacgtatctgcatgagttagtattaacatgtggataagaatgttctaaatcaacttgggctaagtatatatctaaagggaaaaaaagtggcttcatttagcttaatgagaaaaagctttagagaagaaggttgccaaaaaaaatgtattatgataataggcataggcagaaggagagagttgacaaaatgagatggctaagctaccaaaccaaatgtgaatcctttgaaagg

SEQ ID NO: 200759 - DNA, 1390 bp, Cannabis indica
attattaaaaattgagctcatgaccctatttttcccattttgaaaagggtccatttatcatttaacaaaaccaagggttcaattggtaacttttacaaacacataatccaaaatggtatttatcctaaaaaatgataaaaacttgtgattctattctaaaattgctacgtggcaattcttgatgggtccaaatcattaaatttttattatttcaaaaaattagttcaaatataccaataagaaagtgacacgtagatataatggcttaatatttaacgattatgtacctacagagtttcagaaatataacttaggtattattaccgccaaaaattaaatttagatatttatttacaattgagaattaaacttaagtatttatgccgcaaattactcttttttttaccaaattttttatttttgccgatgcatataacatatttttgctcttttttattgtagtgacataaaatagtataaaaatgaatatttcataattaatcctaattttataaattctcatactaattaattaaatagtttgagtaaacaattaaaaatcattcattatagatgactaaatatttagaattttttttaataaaataaaagaaatatgtatggatcacatgaaagaatctatagaagataggaccacattttcttacttaataagtggacaagttttcaatgaacacatatttttatatgatatgaacaaagctagtaattgacacgtatacctttaattaattcaattgttcagaatcaccaccgctgcatttaattaatattttaaacgtgattttttttttttatttatttattttttatgaaaggggtgaataatattttttattttttgagaaagataatatataaagttgaaaaaattgacacaatttttattttatttttagtaattaagacaaatttgacaatagatactttgtagctgtctaaataagacagttttcattaaattatggttgggtgttggtgaattatcaatttattattatgtgttttggtcttgtcattatatgtaatttattaatttattaattaacataaaattgcaatataatcacccttatttctaagagaataattaatttgaaaataaatttcactcttaattagttaattgattatttttgttcaagaagaaaaaatattatttttttaatggaaataatactttattaaataaccatctctgttaccaaaataggtaacaagtcagttggaacaacctccaaagtgcaatcaggatagaatatagaggctctagcaaagttatgagctgccgtatttagttgatcgtctaacaaaataaataacaacattttttaaatccttaagcgtatccttacaaacattcaccact

SEQ ID NO: 200760 - DNA, 1716 bp, Cannabis indica
tttgagatgagagatatgtacaactttattttgtattgttctttgacctcgtcattagagaatttttgagtctcaacctctatttttacttttaaaaaaaaaaatcaaagttcttagttttagttatagtttaggttctttgataaataacttttaagaatttttagagaaaaagatgaaggagaagaagagagaagtgaatgattagttttttttaagaaatgatagtaattttaacaaataattatatatgtaaaaaaattaaataagaaaataatatttttaatgaaaataaaataaaataatgacacgtaattaaaaaaaaatgactctacctaaagttatttttaatacctctactcaagcattatcctaaatatttaaacatacaaaatttgattaagcattggatgctttcttcttttaaattttatattatgtatggaagaaaaaaaaaatagttatctcttaaaataaagatacttgaccataaagtaatatatttgagtcttgaccataaaatagttatgaaaatagtaatacttgctcataaaatagtatatattatgttttcttatatatactctaagttaaaaaaaaaactaaaaataatatacttcagattgttacatagtaaaattaaatgaataaacttgaatataaaaatactaaattaagcaaatcattataattgtatataaaatttaaaataaatcttcataaaaaaattattactagaataaaacttaggataatttaatttaatttttatatattaaagtttaagttatatgtacaaattatacaagaaaaatacataaattagatcatttaatcattaatttttataaaataaaaagaatcaaaattacaaaataataattttaaaattttactgcactcatcacttatatttattcattttttttttttaaaaatctgcatatagttaaaaagctttgaatatatgttgaattctactaacatttcacctaaaaaaaaataatttaatttttatatattaaaatctaaaccatatgtataaattattgtaagaataatacataaactacttcatataattattaaatttagaaaataaaaagaatcaaaattagaaaataataattcaaagataccaaaattattcatcactaataaataactttttcttttctctctctcaaaaaaaaaaaaaatggagacctaaacatataaggtattgaatatacatatttgcttctaaatgggaattatttctttttataatctcataactatttaaagattattttggtagaggctcataaatattctcatttttattaagagggagttatatttacatcttaaaaaacctataaatgcactccaaaactaagtttaccccattttatttattaaaatataaatttttataactatacccaatttatttatcgaattatccttatttgaaaaaggaagtacattccaagttagcttatttttcttcataccagcattaatctaaactgtccttcttctcttctactcccactgctctttccttctaatttatattacattacttttgtaaatatagatctaataggtagttaaaaattagtaaattttgtacttatatatagactatattgattaaaagtctactgaagaaatgatattattttgcaaacctttgttaccttagttatatttctttttttctttttt

SEQ ID NO: 200761 - DNA, 1295 bp, Cannabis indica
aacattgtcgttttcttttagcaaaatgtgcaataacaagaaaagctcatgtgcagtgtttttcagctcactcttacagatatggaattattgaactaattaatattcctaagagcatcattataactcgtaagcacaacattctttataaagaacaattcaatgaagtatgaacattcactattcactatgttgcttgttacgacattactataaaagttgaataattaattaacattaattagtaaatgaagaggggttgggaggaatagaaatttgaatgattccttcaagcatatgaataacttttttgatggtgggtctcaacaatggattctcttgaatacaccacaatgcaaccattacaaacctctctactctgttcatctcacccaaggcttcttcatcattcaccaaaccatatccattttcccatctttatagcaatcataaacccaatcacacagtatcatttcattttcttcttctaccttagcttcaaagttcctcctacaacaaatcaattccaataacactataccatagctatacacatcaaccttaactctcacacctgagtttttgaaccattcaggtgcaacataccctctgcttcctcttattccagtctttgtttgagtctgattctttgttaaaatcttagctaatccaaaatcagatattcttgctgtaaatgagtcatctaggaggatgttttgaggtttaatatcacaatgtatgatctgtgtactacactcttcatgtaagtaacaaagccccattgctatgtctaaaccaatttgtgttctgtggtgccagcttggccttggagatggtctaaaaacaaagctcgctacagaaccattgctcatgaattcatagacgagtaaccggtgttgcccttcattgcagagcccaattagctgaaccaaattcttatgattcgtacgaccaatggcacttacttctgccttgaactcttgctcacctgatgcttctcttgccatgtctattttgtccaacttcttaatagcaatacagttactataaccattaatgcttataactcctttgaaaacagtaccaaaagcaccacttcctagttgctcactgaacttattggttgctttctctagctcctcataactgaagcttcttaagctttttcccttgatggcttcgaatttcggtggaataattgctttcctcttctgtttgaatcgaaaaataacaaaacaagttgctaaaaaaagtacattcataaacactgagccacttaagaaaacagatccaat

SEQ ID NO: 200762 - DNA, 692 bp, Cannabis indica
ctattcttctctgttttgctctgcttattttcttctgcactaatattgtaattatattatactttacaaataaaatagaacttttatttaagaatacacttgtaaccagtagtaaattatattataacttagaaattataactaaaacaaccaacaatattaataagagtaaattgcggtaaaactcccaaaagtttaactttgctagcaattaacccctaaatctcacattttggcaataaaaccacctgaactggtattctgttaactattagtcatttctgtctattttttgttgttaactgtcatgttagactacatacgtatacacaatgtacatgtggcataatattattgatccacgtaaatatatattatttctagttttctttcttgatcttcttcttcattcttagtaccattgccaccacactcaaaccaccattaatcaccaacgcacaatcaccactacccactaccatcacaaccaaatcactgcaaccaccaccacaatcattgcatttattaaatccaaatcaacttaaaaatacaaaataatattgaaatccaaaatcaatcttaaatcaataaaaaaatctctattatacccgatttacatatctagaaaaaagatccatatgatttttatcataaatatcttaccaagacaaaaaaaataccaaaatgaagaa

SEQ ID NO: 200763 - DNA, 998 bp, Cannabis indica
tacaaacccgctctggagtcttcagcatcaagccttgttcgaaagcaacaccaagatctatgtgaacaacttctgccgtggcttgatcaattaagatattcatagaatgtcgatcaccaaggccaacaatatacccaacctgtaaaaggagcaactttatcaaatgaatcaatgattaatgaacctacatatataattgctaataggttattcgtttatcagtacgaagtaaactaaattcattgccagttactttttttttgaaaagggagagggtccgcaagtcatagacaggacccttccaaaagtaaattaataagcctcgcttgtggcggaggaaaaccatattacaagtgatacaagggatagatacaagggataggtggcccaccaagggtgctgagaagagggtaagggtgaattcctttacaacaaggcattccaatctctacttaaatctaagaaggacaagtcctcgaagaacttggttttaaaaacccaagtagctgtccagaatttagctttctcccacaagtcctctactgaacacccaaccccttcgaagattctagcattcctttctaaccacacagcccaaattattgctaatactgtcgttctccacatctttgttgtgcgtttgctgccctttagcttgctaactaacaactgtggtacacatcttggcataacccatgactacttaaattcctttatcaacttgatccataattgactggtgaaactgcatcctaagaacagatgccccacgtcttccccgctagctttgtagcaaacacaccatccaggtgagatggaagagtatggcctcctcttttgcatcttatcatgaacgttcacttttcctaaagccacaagccacccaaaaattttgacttttaatggaacacaacttttccataagggccttacccagtagactcctctgccattcgggttcgcagtaaaccgagagaaggctgacttacaagagaaaa

SEQ ID NO: 200764 - DNA, 814 bp, Cannabis indica
gggctaaggtttgtgacttataagaccgatgatgggatctaggttcaaggtcagggtcggattagtaacgagtttttataataaagatagtataatgttattcaacttactaatacaagtcaatattaaatataatattatattaaataataatagtgtattaaattactagtcctagagtgacatgacaacattttttcattatgattttggccttaaatatataaatatcattgagtacgtaatattctaatgcatatgttgtattatatttaatgttatatttttacataatactcaaattttgatttatatcataaaaatattatatatttatatgcacctgcaaatgaatatcaaatataatattatattaaaataattaatatatatatataacatctaatatacaacgacataccaaatgaactttgtctataagcggtaatacttacagttgtagatgaatttttcccatcgtccaaaggtatgactacttttgaaagcagatgactttgtggccaatgtttggattgggagaattccgtgcgtgtccctactattgacaagtccctcatatcgccttattatgtcaagggccaaatctgtacaaattatatatatatatatataacatacaaatatagtatataaatatatatcccaacaataccatgcatataagttcttacatgaaaaagttactgtataaatatagagggagttttatgaatgtagagcaatctcattatcaattgtagttatatatatatatgaaactttttgttaactaacattactattgccaaaaaat

SEQ ID NO: 200765 - DNA, 1170 bp, Cannabis indica
gcgatttggaaattgggttagttttttttttttttttatttatttttttgatttttatgtttgtattagttttaataaattaggtaaaaaaaattaaaaataaatgagagcatgacacgtgtctactatactaatttctgtcagtgggtaccaataacaaatggttaaaatagagtttttaagattttgtgccgcaattgtttaaaattaagtacttattagcaacaaaatgaacaaaataagtatttatgcagcaaatttcccttaattatatatgagtttcagcactaaagtactaatttgttcatttaagcacggacaccatgcatttatcaaagttttttttcagcatacatgcaactttccagcccttagctcctttcctctttcaaaagaaaacagctactttcattaaactataaatacagagataataaaaaaaaaaaaaaaaaaaatacaaataccagaaaacaaagaggcagacaagatgacagaaaaaaaatatttatttatatagaaatagttctcgtcggatttatgatcttattcaaataattagatccctgttaaggatatagtatacaaagtatgcacgcagccgtcttaccgcttgattgcattttattccactctcacagaacagagattgcaggaatcgacagcataatttgaagaagttgatatgatcaatttggttttaaaactcatcaagcttcttagctgcaaaagtgaatataagaaagttgacaagatcattcaactaataatcacaacatgagctgtctttagtaaggccttcagtaagaataagataatctcataaaggtagaggtataagtaacatacatggcaatgcagaaatatggtatcacaaattaaaagaagacatcacagagctcaggctgctactgcttcgggccttttggcatttttgattcctctaatagctgcaacaaaagtaaagcaaacattttagtcatctcagatctcatctagagaaggaaaaaaaatgtcaaatgattccaggttttccgtaaatttgccttaagaaaaaaatgaaattgaaaaaaaatcatgcattccataccttcagcataatctttagctccaaaaacagctgaaccagcaacaatagcatttgctccagcctcaattacctgccagcaccat

SEQ ID NO: 200766 - DNA, 2205 bp, Cannabis indica
ctcagcatgtgtcataatgaccatctaaatataaagataaagagcattattatatgatattaaggtatttaatactattatgaagttatgccttataattagttagatattatttaatctttatgtaaaataagtaattagactagatattaaattgtactaataataataatcccattaaggttgttaggtactatgggcaaggcaggtcctaaaatatagtgagtcataaaaaaatatttttgagccttttatttaaaaaaaaaattgtagtattttctaaaattaataagaatagacacaaacatagcccgctatatactcaaaacaagattcgagtgatctttacatttgtttgtagtagtgcctaaaactattatgaaatattatatcaatcataatttactaggatgttaaatactttaaaatactaaataataatatttttaaattaaaattaaattcacatgacaatataataataataataataattttagagagcactaatacctaataacaatactcccattatttcaaatgaataagaacatgtgcgtaggtacattcagagtctaaaggtaataaaatagcattaattgtggtcctaaattggaaaatggtaaagagggctttttcatcaattggatgttgtgtcaaaaatttattacatgcatgtgcacccaacttcaaaatagggatttgcacttctctttctaaaaaaaaaaaaaactaacatttaattatcatgtaaaaatagtcaaaggaaaacattcttaataaccaaatgaatatatatatatttttcagatactaataattcttatatattattttgtggttgattagtaatattttttaaattaaaattattatattaaattatatgaaacttaatataattaattgaaccaataagaatattaacacataaaaaaaaatactaaacactattaatatcctttagtatttcttatatattttccttataaatataaatataaataaataatatatccactaattaattatatatgcatggcgtcgtgggaattaataattaaagcgtaaaaggaactaaggatataaatatatagaatatttgtgacaatgatattcaaattttatttaatggttgcactttaatagttaatttctttttttcagtaataatataaaaattttagttgttaaactaatattgtaacaaaatattaatttttgtattatgaccagaaaaaatataaatactaaagtgcaaacaactaaaaagatttaagcattggccgtacatcagtttctcagctgcccccatacattaatctctatatggtcctattatctatacaagattggccagccttgagtaataatgggttaagaaatttttgtatgtatatattatatttaaaataaaataaaatgtgagtattattgaaccagtgttcataaaagttttaaaaaatgctaatttttaataaaataaatatatatatttttgtgcattatttatatatattatatatgtatatagaataattatattagtgaaaaattggtataaagataatataatatacgtgacgtgactgcatttgatagcatctttaatttgacaatgcatatcatcatgatcttcatcaaaacaaaaaaaaaaaaagacaatatgcatatcatgatatatatttttcgtggggcctatatatatttatatatatttgcattgtttaattaggagttttagttaattgggactgattatatttatataaatacatatcttttagccaaacagccaatgatataatgatacgtacgattaatttcacttattttatttctttagaaaatattattgagagagagagagagaatattcatatttgtaatatgctcaattccatggagtagtagcttagtgcgtttcactttcacctagtcaattatataaatatatatttgtttatacatagagatgacttaataaaataatatatactttctttataaaaatacaaacaagttaaaagtcacaaaagcgtgtttcactatgatcagttgaattatgaaaaatgagttaccttttaagattaataaatttgactctacctatatatatatatataatattatgatatgatctatatatataggtgcatgcatgcatgcatgcagggccggccctgaaatacatgggcccaagac

SEQ ID NO: 200767 - DNA, 1204 bp, Cannabis indica
catctcatcatcttctcaagttggtattagagtttctaggttacttttttttcctttctttgttgtctttgcttgaagctttctcccatggcgtcctctacaaacgctagttccagaccccaaggtgcctcctctgccacaacatatgctcctccaacacaggcggttcaagaaatctgaaatcacattgtgccactcaccttacgcctcgatcggaataatttcttttactggagatcttaggtcctctccactgtccatgcgcaccaactcgaaggctttctcacaggaaccagatcagaccccctgccaccattgtcgatccctccgatgaatcaagaaccctggccaatcctgaatttgctgactggttacgtctggatcagttcttactcacctggttgtttaattcgatctctgaaggcatgttgggacatgttgctcgttgtggttcatttgcagatttatggaatgttctgctgaaactctcctcaaacacctctcgtgcgcgtgttctgcagcttcgtggcttgcttcaatcaacaaagaaaggctctactccgattgatgagtacatactcaagatgagatgtcttggtgatgctttaatggtcgctggtcacaacatcacagatgatgaacccatcatctatattcttggaggtcttggaagtgagtatgatcctgcgatctttactctaacctcaaaagaatttgtctctatgcaagatgttcaattcttgctccaaactcaagaaatgagaatagaacagcaaaatacggttgctgcattggatatgcataatccaacatcaaattatgctgcagtagccaagaaaggccctccaccacccccttccacaggttacaacaacaacaaccgtggccgtggcacaaacagaggaagaggaggatgaaactccaacaatagaggaggcaatcgacctatttgccaagtttgtggtagatctggccacacagcattaaaatgctatcaccgattcgacttaagcttccagggagaaggaagctcaaatagttaagatcacacctccgaggagcctcaggctatgctcgctacagccaacacggttgctgacccccaatggtacttggacagtggagagtccaatcatgtcacatctgatggtgcctccctcaccaacacaatcgactacaaaggaaagggtaaattgactgtagg

SEQ ID NO: 200768 - DNA, 632 bp, Cannabis indica
ttctaaggttgacagtggtgggttcttcggggttgcggcgtgatcaaggagttggctaggtatataagttagggtttctttagggttttattatggatcgaagcccatttaattaggagtttagaaacccttttttaaaaaaactgaaatcatagggtacacgcggtaccttataacttcggttatttctaaataattgaaccctaaagtgtttcacaatagttttttcctttttacctacggttttctaactataatgaagctacatgtgagcaactaaataaatgagagacgcaattggaaggctatagcttcgtttttttaaaaaaaatgatcgaaaaaaattaaaactaaagcctaatattgtagtagtgtttgatgacaaggtttagggattttggccatgaacattcttttatgggtggtgttaactataatcatgggtgatccaatgtaatttttctagatttaatttaaaattttgtaaatatttttacaaatcaaagtcaaatatctgaatcaaataatctaaatgattaagagtaatcgattcaatactcacatttattaaactaaaagattttaatattatttcattgtctaaaacaaatagttccaagtaatgcacatcg

SEQ ID NO: 200769 - DNA, 584 bp, Cannabis indica
gctatagaagagcccacggtcttgacgaggcaggcctttcctgcatatgagagaagcttggctttccatccttgaactctatgaaacacccggtcagcaaggaattgcgtgtccgttgtacgctttaaagatcggaacaagggaatccctaagtaagaagcttttttagacatccgcttcatgcccaagagctgagatattgcttgcgatgttcttgcagggactttcttagagaagaagaccgccgatttgtggatgtttacggtttggccagacagtttgctatactcattaaggcagtccataaaagaggctgcttcacgggttgtggcttgcccaaacaagataatgtcatcagcaaataataagtggcttatgaccactccattccttcccattcggaagccttttatttgaccattgtccaccttgttaatgatcaatcgagacaacacatcagccccaagaatgaagagagctggggagagagggtctccctgccttaagcctctctccggtttgattcggccagccacgatgccattaatcaagagtttgatttcttccaccattatgcaagagct

SEQ ID NO: 200770 - DNA, 700 bp, Cannabis indica
ttttttttttttttactttttaaggaaaattgccatacgatcgagacaatggttttcccttgtggctttttgtaaagacaaatttgcaaagttggatggccaacttcgctttttattttatcttttatttaatgcctcgtacttttgcatttgaacttactacatttgtttacttgtgttttttttattcacaacttaaacaattatattttggatcaaatttaaatattttaagcctttccattgctcgtattttcatttgatattgtttgagtagttattaatctactatatgcgcgagcagtcattgtctgctatgcttttaatttacgagcagtttagtgctctagcttcgcataaatagttataatttgtttcaagtaaacttaaccatactttttataattcatttcgtgaattactttgtatatttttgattgtttatatgaatagttagactttctattcatgttttaggtttaagtattttctcaatacatctcggtgtctcgtttaatactttcacgataaagagcagttagtcagttaatgattcctcatattctattagtctgtttttccgcatttccgatcgttctttcatcctcacaactcttttcgctccaggcttcccttcttgtcagggcttgagaagcgtcgttcagttgtcgttttactgcagtggtcagctcgatatcga

SEQ ID NO: 200771 - DNA, 1013 bp, Cannabis indica
aaacaaatcaagtgaggaagttttacacctaaacttctatcataaatctctcctcgtgaacgatatttacctatcaaaatgtgcaaaattaatagtttagaggcttacctcagaacgattacatagaacataatcaagcatcttcagatttcttgacatatgcaaagctttccaaactcttttgtttgtagtcagattcgccaagaaaacaacgaacaatgatgtcttcatctgcatttctagttcaaactcctttgatgcatttactttgaaataagtagagctactatcatccccgttctcatcctcagtgataaacgagactgataaaaaggaccatgatctgcctgtcctctctaaatcagaaaaagtttgcggtatagcattgactaaaatcatgatgtctccaggcaaagttttgtaaggctccttactcctatcactgaatctgttcctccagtaatcaacttgaacttgataaacgctttttccatacggcttagtttcatgaaaatcaactacttcagcaaaaggtaatctatacagcacgtccatacttgagtataactgcactcgagtttcttccaacaaaggatagacaaaagatcccaaataatgccgaaccgattcaaatgattcaggaatcttttccacctagaaagaaacaaagtaagtttattagttaagtaaggaagcttgcaacttctatacaaaaatgaatggtaaaacctcaactagcttgtgtttaagagtttttatagtcaacaatcagttgccatggaacacaatggtgtctcaccaatcattgtaaatgagatttgtaagcaccaaaaatgtacattgaaacaaaatctgaaaaggaaattttgaaatgtaccaaagatacacttccaccaactgataaaccttagatatcattccttagatatacacacttaataaatgtaaagcatgtagaacccatatcacataatcacttttcaagctacattttttaaatttcctaaaaaaaa

SEQ ID NO: 200772 - DNA, 3332 bp, Cannabis indica
aaaaagaaaggagaaatgctaaaacgtgatgctaagctaaaaaatatatatatttattcaaaaaaaaaataatatctttaattatggatataatatttatattctttaaataattagatctaacaaccccgctcttttcaagcaaacaaaaaagtaaccgttttcaaatttcgtcaggatccgtagacaaccccttacacgctgcaacgaaaaatctcttctgttccattgtcatcaaggttttctggttaagcggagatggagaatttggagacgaagaccgtagattcatcgcagtgcgttcgagtcgcggttaacatccgtccattgattacttcggaggttttgtttggatgtacggattgtatttccgttgttccaggtgaaccacaggtgcaaattggttcacattcattcacatatgattatgtttatggtggtacgggatctccttctaccatttacgacgattgtgttgctccattggtagatgcactcttccacggctacaatctaccgtccttgcttatgggcagactggctctggcaaaacatacacaatgggaaccaattataaaggagaaggaagtagctttggtatcatccccaaggtcatggatactgttttcaaaggagtttccggtaagaaatctaacagagaattcttaattagggtctctttcattgagatattcaaggaagaggtgtttgatttacttgacacgagttcaacaacaactttctctaagaatgaaggcgcagcctcttcgaagcctgttgggcctgcaagagctcctatacaaattagagaaactgctaatggaggtataacacttgctggtgtgacagaggcagaggttcaaacaaaggaagagatggcatcgtatttgactcgtggctctctatctcgggctactgcgagtactaatatgaatagtcagtcaagtcgctcacatgctatctttacaataaccatggagcaaaaaaagatcgtaaatggaacagcagccactgatgattttggagatgaaatcctttgtgcgaaactgcacttggttgatcttgcaggttctgagcgagctaagcgaacgggtggtgatggcatgcgatttaaagaaggcattcatataaacaagggtttactggctcttggcaatgtgataagtgccttgggagatgagaagaagcggaaagaaactggccatgttccttatcgtgatagcaaattaactcgtttattacaggattctcttggaggaaatagcaagacagtgatgatagcttgtgtcagtcctgctgatacaaatgctgaggagacattgaacacgttaaagtacgcaaaccgtgctcgtaacattcaaaacaaggcagttatcaatcgtgatccaatggcggcccaattgcaaagaatgaggtcccaagttgagcaattgcaaggtgagcttttattttatcggggttgtgatgctggtacttctccctatgaggagttacagatcctcaaaaggaaagtgtctttacttgaagcaagcaaagaggagcttaaacgggagttgcaggagagtcaagttacttgccaacatttgacgcagcgagcttttgaagctcaggttgagaaagataaattagccatgaaaattgaaatggctcgaaatggtaagtcttgggatgaagttgacttacattcagaacaggaacatgacctgttgaaaagttatgtatttagaattcaagagctagaaggagagttgttgcagttgaagaattcgaacagtagaaaacatggactcattgattgtgctgatgactcggatgatcctgatgatgatgaatttcgctctaagaatgtactgtttccttgtggcgatgagtattctgattatgattgcaaaattggggagatagcagctgatattgttgatcaagagaaggagcaagaacattcttctgttcaagaaaaattggaccgtgaattgaaagagttggataaggaacttgaacaaaaggaggccgaaatgaagcgagttgcagcagggggtaataatacttcggtgcttaaacaacattacgagaaaaaagttcatgagttggaacaagagaagagagttttacagagagagattgacgagctaagacacaatcttgcaagtatatcatctaccactgatgacggagctcaaaagttgaaggaagattatttgcagaagctgaatcttttagaatcacaggtgtccgcgttgaagaaaaaacaagatgctcaagctcagctgttgaaacaaaaacagaaaagtgatgaggcagcaaaacgattgcaagacgagattcagagaataaaaactcaaaaggttcaacttcaacataagatcaaacaagagtcggagcaattcaggttatggaaagcgtctcgagagaaagaagttcttcagcttaagaaagagggaaggagaaatgagtatgagatgcataagctattagctttgaatcaaaggcagaaaatggttttacaacgaaaaacagaagaagcctccatggctacaaaaaggctaaaagagcttttagaagctcggaaagctgcttctactggaagcatcaatggtccaggaattcaggttttgatgcaagcaattgagcatgagcttgaagttactctacgtgtacatgaagtccgctctgaatatgagagacaaatggaagagcggggtagaatggccaaggagattgcaaggctaaaagaagaagcagcagagatgttgaaacaagctaattcaagagattatcctgaaacgatgtctcctggtgcaagaaactcacggatttatgcacttgaaaatatgctttcttcttcatctaccacccttgtttctatggcatcacagttatcagaagcagaggagcgcgagcgggtttttagcggcaggggtcgttggaatcaagttcgatctcttgctgatgcaaagaatttgatgaattatctattcaatttagcatcttcatccaggtgcttggtgcgtgatacagaagttgtgtgcagagagaaagatttacaaataagagatttgaagggaaaaattgtgagtttgagtagtttgcttagagaattagagatgcaaaaagctgagcttattcatcaggtgaaaactcagaatgtagctctgaagcattatgccaatggaggacataattatgacttgcgcaagcttgatcaccgaagctcagtagttgtctcagaggacatggatacatctgactcagaaaaatcagatgtagattacttaagtgaagacgacatacctaagagacaacgacttaagaaaaaagctttaaaatcagaa

SEQ ID NO: 200773 - DNA, 1080 bp, Cannabis indica
tattaatagcgaatgctatttttgaatatattctcgctcccaacgttatagaacttctattactttgagtattagtggttgagaacgttttcttaaaaaaaaaaaaaaaagaaaagaaaaaagagaagaagatacaatccatttatccataaatacaatccatttaaaattactatatataagaaaatttaatagttatatcaaatataattataatggttttatttaattttatttgttgttgtacgtagttgtaattaatttaaaaaattaaataaaagtatattattaataaattacttctgtaatcctaacattaatttgattttatttattttcttatatttttatgttttataagttaactgttatagtatgtcatacaaaaattgtaactattatatttttaatgtaaatgatgtgattcttacttaattactattatagtatgtacatattattatatttaataagtgtttacagtttaattatgtatattgagttacactcgtatatataaaattttaaagttcgtgttatcattttcgaaactttaaccatatatataagttgtttcttttttttttgttttacaaaatcaaaagtagataaagataagataaaacatttgtatattattgttttggaattatcctatatttattgatattatgaacaagtatatattaagagcatgtatgatgtatacaatacatgattctttttcttttctttttcttttgacttttatgatatttcatcattgattgatatatataatctcaattctcagttttgtttaattactgaatagctagcttaaatatttttatatttagggtgttttagctaatcaaaagaattattagaaaatatatataattttatttttgataacgttgaggaaaacacagtgctttaattttgcatttgtatttagtgaagggcaacatgttttgatatttatttaattaatccaaatttgaatcattcgacaaatggtcaatttggtatactaaataagaaaaagttggttattatttcaactaataaataattctgtctgactctgacctttct

SEQ ID NO: 200774 - DNA, 867 bp, Cannabis indica
ataaataaaatataaaacaactaaaaaataatttattatttttattaaaaaagtactttttttaaataaaataatttctgtattaaaatatttttgtaatttttttttttcaaatttttaatctattttacaaatttttctttagctttttaggggaaaatcatgtttctattttttttttgggggggggaggggaaatcatgttcctattttttttttttcaaagatgtgttactgaaaaagtgcaaattcaactatcttattattattcctatcaaaaaaaaatatatcttaatattatttagggttgtgataccaaaatttaaatgataattattggctaatgatgaattttatctttaaattttgacttgtactaaattgtgctttctaaattttttaggtcgttaaaaattcttatcgaattattgtaattattgaatttaaagatttttgaccaatttccttcagctctactaatgaaaaccagaaatggatgaaagttcagaaggtacagtttgatacatgtaaaagttcaggaaacacgatttagtagatatctaagtgtgcctcttgaatctgataatctcaataattctaaaaaaatatttaataatcttaaaaattcgaaacataatttaaaatatatcatcatttttcatgaaaaaattttaataatataaatatggaaagttttaaataaatattgtatatatatatttgataaagcaatattacaacatactgccaaagaatagaatatagttggctttaatattcggcaaggaacaaatgttcttttggttagagcaccatcacttaattataacatcattaaaaggtgttcactttttattattattatta

SEQ ID NO: 200775 - DNA, 1981 bp, Cannabis indica
aaaaattagtgtgaaaagatgtgtgaagtgttatatatgtatgtatgtatgtattggtttttttttcaaagtaagagagtacctttattttgaaaatttggggttcatttgactggtaaccaatgcatgtgttgaccatggaattgtattgtttgttcttgttgaatttatattccattttgaacttcaattaggaaagtatttgagacccgtgacgcgttttaaattaggaatctttttattatgagctaaatggtttatataagtgtgttcatttaattgtttgtcgtagtgattacgggaatttgagaagctattgttgttggtctggtcatttctattaatgggttcgtttctttcattgtaatttttcagaggaactgcttttgagagaatgcggagtaagaggtgacgttttatgattaggagttcaattgcagtgtttatttttgagcatgggagctgcttgttgtgtggctgttaaggagaagactataacaaatgggtcgactagtgaaattttgcatcggaatattcgatgttccccaacatggagctttcgatgggatcatagaggacgggttgcgggagaagagacttcaatgagttggttttctgatggggtcagcaggaatgacggatctgaatctaaatttgaatcagcatatgtttcagaggaaggaagtccattaggtcattctcgaaggcgtacatcacagaagtcctcattttcggagggagctgctgggcagtcaaggactcctgcctcaggtaatttcccagaattgcagcttcttacgaggaaactgtgctatactttcatagatgccaaaaatagaatgtgggtatttccatatttgaagttatatgaccaaaagcaacacgtttatacatgattttgttcaatatttacattgttttcaatcgtgggcaaatagtcttatatttgtgctgatcccatttgctagagtttattttgacacagtaacaataagcactgtttcttaatatgtttaatccttcacttcttctagtgaaattggttgatctgccagcccgcagctgccttcttttctcttctctcttaattgtttcactgtcaattaaatgaattttccattttttgttggataattgtagatggtaatcaggcaacacaactgctttctggttgtggtgcttttagcttatttttttgtgcccctgaacatattaataattttatttggcaacgaaacagcttgattgtgttgaacttttgaaattttcaaatctgtacatgttaatttgtattatgctgcattattgtgattttatatgtacttttttcaatgtatatttttatggcagataaatctgttagaagaaatgcttcgatggattcaagtctagagcaggtaaatcttttatctgttgaggcaatcttgttttttttaatttctttagtgtagatagtcgtttgcttgcatgctttcattttgtgacatgttttgttcatttgtcgggtcctgtagacaaaggagctggctgaatcccctacagtctcatatccatctcctgcaaagttgtcagtttcgataccatctacttcatccttcactgcatcccctttgtcatcacaaggtcaagttcctcctgccaactcaactcctttgaggtggcctcgtcattctcctggacatcagttgtcaaggcaagaatctgatgcacaaatcccgggatttaaatcaccaaatagctattcagtttctgaagaaagggcagctcttccctcttggagcaatgaatcaactaggggatctcgaggagggtcttcagatggttggtcaatgaatgcgttttctgagctaatggctaattcaaatagagaaaggtggtcttttgacagcgagtcatttggctttaatcgtgagaagatgactagagctggtagccgagtctagcttctccttcgctgatttgcaaacatgcgtgtttgctc

SEQ ID NO: 200776 - DNA, 649 bp, Cannabis indica
ggtaggaaaaccagaaaaaaaaaaatacatatatatttagaagtatttgacaaaaataatattaaatagcgttatgttttttttcttttaaaaaaatgatcaatataattttataattggatgaatataataagaaaaatttgtggttggagaatgaatttgtcgatatatatatatcaagaaatttttaaaattatattacttgactagatatcatgcaagttttaaaatttaaaatttatatattataaattattctttaaaaaaattagagttaatatatttttattacttttgtttcctatttcaaactcatattttaaatttaattaataatattatttttcaaatcaaaaactaatccccctattatatatctatttaaatatataatatattaaaatatcttaaaataattcaaattataataacttaaaaaaataacttaaataattaattaaatctctataaataacttcttctttctttatgttcttattcaatgtgaacagaacaaaccgttcactccattccactctaaaaaaaaaaaaattaacaaataccaaactacagagtaaatacctaacaaacgaattgaaactttagtagagatggaagagagaatgcgatgtaatcatcatcatcatca

SEQ ID NO: 200777 - DNA, 2222 bp, Cannabis indica
gaaccagatccaattaatgtcactgctgttataaataccaaggaagtagtcaaaccaagatctgacttggtttccaagaacaaatcagataagacaccaaagaaagaagcaccaaacagctttccctcaaatgtcagaagcttgatatcaactggtatgctcgacggagttcctgtgaagtatgtttcattggcacgagaggtaaaacttcaaccatttttccattttgctttatggagtgtcattgttaaatttctcacggttttatttatgcatatgaaggagcttcgaggaatcataaaaggttctggctatctttgtgggtgtcagtcatgtaattattcaaaggtgagtctcaaatagttccatctctacgtgaggccttattttgagacctaacaattgatcaatggtttatgcttaaggtgctaaatgcttacgaatttgagcgccatgctggttccaaaacaaagcatcctaacaaccacatatactttgacaatggaaagacgatctaccagatagtgcaagaattaagaagcaccccggcaagcttattgtttgatacaattcaaaccgtctttggtgcaccaattaatcaaaaatcatttcgtgtttggaaaggtaacataaaagctcttctcatttccttttgtcatatgttttgttattgcattttcgaatctttatgagtttccttcttcatttgcctgcaactttctgctgcggaactcatattttgcatctcactttctgttacttactggcctcagaatcatttcaagcagcaacaagagaacttcaacgaatatatggaaaagaagaattgaatttgtaagagtattatactgaagcttatggtaggattatcatcagatgtggttttttatgtgcagaagaaagatcgcttgtggtaaattctttagttatatatgacaatggagggaatgatgatatatgttactgcacgaagatgtaaatcttgtgatagagcataattagttgtagttttgtagagatgttaatgtagatgaaattattctcctgctgagccttccccatgttcatgtgggggggaagttcttaatttttacttgctactgtgaaggaaaacgaatttgtttaaaattcaagatttttactatcaaattgtaagtggtaaagaggagctacaacaagaaataccgaaggagaagcttattcttagttgtaatctatcagtttggtttttttccctaaatgttgtatcattgtttattttggtgcaaatcatgtatgcacaaagattactaaaagagactaaaaactactgttaaaaagccaacttcaaacgtcttgctaaaaataaaattcaccattatcactttctcccaactttcgttctctgtctttcggtagtttagtttaagcaaaggatgaggataaaaactagaaaccctaacaagtattcatttaataaactgcatatgtgcagctagtggctacaggctgacacagctcttaagtggcatttatggcatcgaacaattttagaaaggatctacatataacaaatagttgttctagttgttcgtgacaaaataaaatcaaaataaataagatagttaaaaaataaataaaaaaaaaaagaccacctttgacacaataattttttcaaacaataagaaattatctcacacgaacaagttcaaaagaatgacaattagactacaagcatccatcatattgtcatacagttagttttctttcctctttccaatttccaaagcataatgcaataataatgcattcccccactttctaaataatattagtcagcttaagaaccacagcatgctgatttttgtacagctaaactactagtcccagtaccctggtctggttggttgatcctgattgttgagggctgtcatcacacaatcaatatattatattagaaccccaaatgtgtattaagatatatatgtgctccacaaacaggaccagaaacaaaactttggaaatgtacctcggctttgttgtcagtatcagcgagcctttgttttatatctcttgctatcgaaaagaaaacttgttcaacatttaaattcgttttggcactctgcaatatatgtacaatttagactctcagtaacacaatacattaactcaaaatttgcacatcagattttcacaagctgtacaccacttacagtttcaaagaacttgatcccatactcatc

SEQ ID NO: 200778 - DNA, 601 bp, Cannabis indica
aaaaaagaattagatccatttacatccacaactactacaatatgattcctaattaaaaccaaaattttctttataaataccattcaacaacatattcttgcaccaattgttttaggtggctgaccttaaggcatttttgacaaaaatagcaagaaattttttgaatttagtccccacccaaatttaaagagaaaaattaaaataaaggaatatattattttgtctcttttttgtactgggtatctatttatatatatataatattataaaaaaaaaatagtcaaaattcaaaactcatggtcttactactataagcaaaatggtaaaaaaaaataagaaatataaaagctactattaattaatagtgtttaatatctttctctttctctgtattaatattgttattggtttaagtaaatatcaaattttatatagtttaatataataatttttaagaaactcgttagtcaatcgtaagatgacatgtttaaaagtgttaaacctactggtacttaataacattaataacaaatactcgtaaggaaaaataacaatacagaacaacaaacaaaatgtaactctttttcttttcttttatttt

SEQ ID NO: 200779 - DNA, 951 bp, Cannabis indica
atataatatatataattgaagtattaattattagctaacatatataatattcataccaatttatagctatagacgaagctccaaatccagtacattatcattatcatcctcctttagatcatgacctttgagcaaacccaactccaattccaagtctaacgtcctaacattattaatattttctgtagtagtaatattcctcatcatcaatttcttcaagtagtcatcttcttgttgttgatctaaacattgttgcaagctatcagaataagtataagaatttgtaaaaggaacaacacagttgttgtgatcagctgtgaagttcatcatgaatactgatttcttattttgcttgtagaaagtagatgatgatgaataatgtgatggtaataatgaagaaggtgatgatgatgatgatgaagatgaagacaaattattagggctagggttagggttcgggtttggataaatatcagggtttgagttaggattagggtttgagtttggataaatattagggtttgagttagggttagggttattagggattggttttgcataaatattagggtttgagttagggctagggctagggttcgggcttggattataaatattagggcttgagttattagggttagggttagggtttgaagaatgttgtggtgcaatggaggtgagaggaggaggaggtaagagtcttaacctagctctctctcttctatgaacattcatatggccaccaagagcttgagctgacttaaattgtcttttgcaaaagctacatgaatagttcttaattacactactaataccccatggtaatgatgatgatgaaatctcatgatgatcataagaattattattcatgatcatcaagtgatcactactactattcatcttcatcctccatttgtctttgatcatcatcatttgagagagagagagaga

SEQ ID NO: 200780 - DNA, 1374 bp, Cannabis indica
aatattgaatcagagtctcacctttgctgatttgaacaattcgtccaacacttcagacaacgttgggtgtgcgtgaacagcgagctttaagtcctgcaaggaataagacatttaatcagttaattatagtataaatacagagctagtaagcacgaaggttcgatagtagaaagtaaggaaaaataagtaagctagcgtataatcaagtaatacaaatagttatagttgttgttatatgattgatcatatagattttgggcagttaatacaaagttcgaatagtcacctgaatacgtgtccccaatgctattgcatttgaagcttcatgaataaggtccgcagcatgtaacccaaaaatatggactcctaggatctctccattgtcgggtctgtatattaactgtgaaccagaacgcatgcatggaagtcaaaacaaagtctcttttccaggcagaatcgtgtaaaggttttgaatagccagaattgtgtaaaggttatgaatacacaacaataagaagaaaaagaatgcatctacaaatgacatggagagaattaaagattatctgattttcagacattagattataccaagacaacagtgagaaggaaaaagtgaaacgttaaacagactaaaagtctgatgtttaaacctgctgtaataacaaactgtgtttaagagaacccataagaaaaagaaaagttacttgtcactctagtctctaacaaatatagaaaatgtactatgactaatctatttattccaaagtccatgcagttaattttttttgaactaggatctccgcctaaccctacaataattggaaaccaagaaactatagcaattgctatgtaggtaccaagaaggaatcgtatctgagatttgtgggagcataccacatgcctcgccattttcactactcctcttgggtgtttgttgggaatgattctaattaagtgtttattaaaattttcgaactgggaaaagtatgatgggattgggcaatgcacgtagaggaagttgtattacccttgctcatttgcttacctttatttattgttaaaatccaaataatttattttacgcctaaaaatctagttgatcatacacaatgcttatttgcaactgggcaatttagtgttctagaactattattccctttccaatctcaactcaacagcataatacaaataacaaccccttattaattctcctcttctatttattgagattacgttaatggttgaagatgtctcataccacgtgatataaaccaatttttattttttttattcgctagaacaattcttattctcttcactgccaagcatttcaccaaataagataactagctagcttactttgggaaagataaa

SEQ ID NO: 200781 - DNA, 1526 bp, Cannabis indica
ttttacttcgtttttctttggatgaatgttcatgacttttttccccttattgtgtctttcttcagatctatgcagtttcgatcacaattcgtatagtggtaagtaaagagaaattaggaaacctatgtgatgatttatcatatatgagtccttgatgaattcatgtttttttaataaaattatgcagttcggattcatgttcattgcactgatatggaagtttgacttttctccattcatggttttgatcattgccatattaaatgatggtaagtgcttataaagtgcaaagtacaatactaatttttaactttatgatctatgtacttcatctatgatacaagtaagttataacactgtatatattccaattataaagggacaatcatgacaatctcaaaggatagagtgaagccatctccattgcccgatagctggaagctcaaagaaatctttgccactggagttgttcttggaggttacttggccttgatgactgttgtattcttttggctgatgaaggaaactgactttttcactgtaagagtctttgcttaaatattattccacaacaaggatactagcattgctttcgtagcatcagtacgcttatttatgatgaatttttctattgtagaacactttcggtgtaaaatctctaaggaacagcccttttgccgagcatgaaatgatggctgctctctaccttcaagtgagtattgtcagccaggccctcatttttgtaactcgctcacgcagctggtcatttgttgaacgccctgggttactactgcttgtagcattcttgattgcacagctggtatggatactacatttttcctttccatatttactgtaaaattaagtaaataagaatcttcatttcataagaaacttgttctaattctgttttatcttccaggttgcaactctgatagccgtctatgccaactggaattttgcaagaattaaaggtatcagttggggatgggctggagtcatctggctttacagcattgtgttctacgtgccacttgacataatgaaatttgccatccgttacatcttaagtggaaaggcttggttgaacttgctagacaacagggtaagcatcttctctacagataatagattttcagcatatttagttggaacttcagaagagtatagtgaattaagaaagatttaacattgatcatgctaaatgtgtaaacagactgcgttcaccaccaagaaagattatggtaaagaggaaagagaagctcagtgggctcttgctcagagaaccttacatggacttcaaccaccagaatctaataacatgttccctgaaaagagcagctacagagaactttctgagattgccgagcaggccaagagacgagctgaagttgcaaggtaagctccatttctctttatcccatgtttacattgtttttcatgcgataatgtccgttcaatatggcatcagaacattttgctaaaacagtttctttttccgatctatggtttcaggcttcgtgagc

SEQ ID NO: 200782 - DNA, 1770 bp, Cannabis indica
ccaaaaagagcacctagagctcaggttgataggtgacctagtgtgctaggttttgcttatccaattctgattttgtctcgagcattcctctagtttttcatagtaattgagagctattaagtaatacaagccaaattcacaacctcatattttcacttttttggaaaagtgacttactcgtaaatcaggtagtttcgagtcacccgattctacaaaacagcatcatctccgagacctggtgaaaggcttcaccagaatacagaaactagctaagtgatgtcataatattgcttaggcatcaaaaaatacatccccaacatgttttcctactcatgcagcgtctaggttgaagtcatatgtcaacttgggcactggtcccgtaacagccttcagtaaaagagtcataactcactcaatattgatttgattgatgcaattcaacttgtattttgaaactattccaatgctccattaagccatgtatcacactccaataacaattctgaagttataaactccaaattttgtcttcaagagagttacgaatttaagctacaacttacctgaagtgggtagaaattgatgatagacctccagagtcaatatcatcgttagaccatcatcaatggtgaaaaatagactaaatgtatttttttttccatatttttggaaaattttattattattttcataggactgcattccctataaaaggagagctcgtctagctcaaatttgtgattcaaaaaagtatccataaggtcagagcatctctatctagtttctctttctagaaattaaagtatgaagactgagctatttttcttgtaatcaatcttatagaatctaataacccactctattcctaattgttgatgctggcttggaagattgtggtgtgaactcttcgataatagttcttagattggatgatcgtaattatattaaaagatagcaaggataccctgataggctacaagaggtattgtctctcttttcattagtctagatttaatctatatatattatgtggagatccttgggcttatggttcatattaaataaaactattttttatcaaacctgcttcaattttttgtaaccctaatatggaccataaaaactaacaaaagacgtgaagcatccaagtacaaaggtcgatagttgaaagtacacgaaacagcaccacagaaatcaacacaggcgcttagggtttcacctagcaccaagactgacaacccaacttgggtttaattttctggaaatgtcttagtacaaatgggtcaaactttatattgggacatgaattagacatgtcatgaatatatttgagagagcaacatcagatttagagcactttcatttgtgagcacctgtagcaccaggtgccccaggcacctagcgcctaggttgacatattgtcaacttgggccacttccaaacatcaaactaaagatctatcttgttcacattatatatttttcttcaccaaaaacaaggaaactagtacttttggggaagaaacagacccatctgggagctaaaaatagggcccagtgtccaagttgacacctagtgctcggccagcacccaaattgacattttgtcaaccagagcgaattctaaggagttttttcgagatgaattctaggcatattctctattcttatcaaatattaagatacaagtttttccaggaatcaaatggaaccatttggcagcctgaaacttgacctattgcccatgttgacactgttgggttttatgccc

SEQ ID NO: 200783 - DNA, 951 bp, Cannabis indica
agttgtaataggtaggaaatccaaatgtgatgaggtttgaagctttaaaatatcgactcgtggcaactgaggatgagaggagactgcaattattattatcatattattctttgagagcaataattatatgaaaataaaggaatggtgttgggtggcttattagctatagggctcactgatcatgtcatattgtcctggcctccatggaggtccatggaccatggctcatgtcatgaaactatcgattatttattatatatcatttacacatataatatacagtgcaggtgtacgtacgtttattggtatagtgtgtgtggtgtgtgctgaacacgtttcggctttggggtcttgccggccggccctcacccagatattaagggtcgtgttgggttttggaaaaaacacaaacacttaacaccatttctctattatgtcacttttctctctctatgcccccacatgtatatgcccactcctcattttcttttctttctaagattctctctctttttacttctaaaaaataaacattttatttttaagagaaagtgtaatgattctctcttcctaatcttcgactcattaattattattacttatttgcgtacgtaatgcttatttatttatataattaaatttattaagcgtgcgacaccaacatgaactcttgttgtcggttatattaatattgatatttatagatgtatcataattaattagttcatggtttgatggtttactatagctaatcatcaaaccatgaaaacattatagctatatctgcacgtgcataaaccttaataatttcgggcatttatctttctctctctctatcaatatatctattcaactacacttttttttttttttttttacaaagtaagatcttttctttatattttttcgccctaatttctttttcaattatatatatatttaaaaatatga

SEQ ID NO: 200784 - DNA, 1019 bp, Cannabis indica
aaaaaaaaaaaataaaaaataatcaatattcaaatgtacgtagagaaactatatatataggcgcggacccactagacaaagtagggcagtcgtctcttacaaaaattttaaaaaaatatatatatatacaatttaattaattacaatatatatttataataaaaaataatatttaaaaaataatatttaaaaatataatattaattttagtgtaatgattaaattaaattacatatagattaaaaattaatagttcaatttccataaaaagaaaaaaaagactaaaaattattattattataaattaattatatgctgtgatttctgttcaccatttagaagtattttttagttcattatttttatcaacaatatagttatttttttaaaaaaatagtaaaaacaatattctttaaatattttattgtatgaataattatttttttatacatacaataaataattatttaagtttatttttcgatactataaattatttaaaatgttttagtaatttacaaacggctcattaatccttcttataaagagtttcaaattaatttaaaaatcaaatacaacgtgtatatatatctttatctttatatattaaaagtgcctatctaacggcatttcttggtttaacattcttggtttaacagaatatacttaaaaataaaagaatattctgttaaatttaacgattaggtttgatctcccgttaaaaaataaacccaataattaaaccaaaaaattaaacaatcttttaattaataaaaaaaaaagataaaatgggctgtaattagtatttaccttatatgtttgtgcttatttttagttttatttttaattttaccactaagaggagaaggttaaaaaatattagaatgtgaaaatattattggtgcttattagtaatttgcaaagaatgtgaaagtctataaatatatagttgtgtagctattattagatatgaaatgagataatagaacttttttcaattagaagattaatgtacattt

SEQ ID NO: 200785 - DNA, 3005 bp, Cannabis indica
ttatatatattatatgtgtcgttgttatgtgcattgtgtcgttttgtagaaatatatcaattttcttatctccacaatatgtttttgtccacgttacaaattataaaatttacacattatttaaaaatattatattttattttatctctcttccatattatttttagcactcttctaaaaatactccaatgtataatactcttttaaaatcctataattatgatcttacacattattatttaatatatactttaatttttatctacaataactttttaacttcaattttttatcaaaaaataatgaatagcatcaatgctacaacataactgacatccatgcaaatttctagaatgacattcttttctctctaatggtataatatctcaatatttcaccacataatatgttcatctcaccaagcattctctaaagttttactattggagatgctcttatactcaccctgcaagctatttgtttagtgtgtcattaagatgcatgggggattgcatctcaaaattaattggcaaaaaaaaaatacctcataaattttatatattatattatcttttctaatacagttattgactgttaaaatattagttagtttgttttcattctctagctgagttaactaactttctactttgttctccatgtaatctcttctttataaataaaggtcttctctgttttagtctgtaattttatagattgatgagattgttgcattcaacatactctattacagtttatattgataagttcttacttggtattagaaagccagtgacgaaagttatctatggatcctccaagcattgaaaatctaccgcgcaccactgctccaactcgcgagcaaccacctcaacttgttcctcaaccacctccaattgttcaacaacaatcacggaatccctttcaaatctctctcaattttttgcttgttgtcaaacttgatcaatcaaacttcttggcctagaaatctcaagtgattccaacagtaattggacacagtctgaatgatatcttactcaccagagtagctccaccggctcaactcgtcaacgacgacatcaatctagaatttgtcacttggaaaagaaaggactaactcttactcagctggcttcgttcatcaatgtctgaaactgttatgcaatctttggttcactacaacacgtcttacatggcatggaaagcattagaacaacgatttggatctcaatcaaaggccagaatcttgcaaatcaaatctcaactctccacgatttagaaaggtaatctttctatcaccgactactatgacaaagttaagattcttgatgattctttatccacagcaagacatcctatgtatgagagcgatttgatcatgcatcttctcaacgaccttggaccagaatatgaccctgttaatgttcatgtgacagtcttatcgatgatctctcctttgaatccattcaatcattgcttttaacccatgaaagtcgtttagaacgaaattatactgtcagtaaaacctcctcaaagttgatggccaacatctccacaagctcttcaagatctagtcctggctcgtactcgtcttcaagatcctctggctataatggccgtggctatggtcaatgacaaatccctcgatcttctggtaggtactctggccgtgaagcactcgcttcaaaacttttgtgccaagtctgtttcaagagtggccacacagcagtagtgtgccactatcgatttgataaatcatttgttacccccaaaattggaaaatcacatgctttcttgacagatattgatgaggaagatccatctccatacaactcccaaatgatcacatactttgctaatgatctagactggtatgatgatacttgtgctaacaaacatgtagcaacatgaatggagcatcttgatttcgaaatgccttaccatgggaatgagtctcttgcaataggcgatggcaagaaactccacattactcacattggtaatctttctttaccctccacttctactcatgttcaatcaaattctgtcatcaaagttctaaaattaacaaaaaatcttgttagtgcgtctcaacttactaaagataattaagttttcttagaatttcactctacttgctgttttgtaaaggacaagataacagggagagtcttgctcaaagggagggttaaaaatgggctctatgtgctgaccaaatcaattgccccacctgctccagttcagcttgagtgtcacctagcaactaaggattctagttcatgttgctctcatgcttgtaattctgattgtaataatgagactatttcaacagtctcttcatcatgtaataatgagattgtttcaacagtctcttcatcatgtaataatcatgtcattaataaaaattcccttgttttttttatgaagaaaagcgtccatatattagataaagcgataactagacctcgcgatcattacaaggtgtttagggatcgagggaataggaatacatccaaacttctggtgggtaaacgtccacttagccacattatgggcatcaaaattacaattcatactaatattagagaaaatacaagtaataaaaaagggagaggatctaatacaaaatgagacatagttctcaagctcccacctggactcagtccagttaagagcgttgataactactctcgaatcattctcaacaataataaaattaaagccataagtcttcgcaacttctagcgtgtgcagcaagttgtcgcttcaccacacaacgcgtttgcaaaatccaatttagaagtatgaacccaaatcaccttgccaagatgatcccttacaacaatagcagtacacatagcatccaaccccaccttaacatcacagttcagttttatccagtctaggagggaggacgccaggttttcgccaaactcggaagcgagcaagggagcaacgaagaatgatgaactacaaaagaatagcgaatactatcaatacactta

SEQ ID NO: 200786 - DNA, 1460 bp, Cannabis indica
cggttttctagattttatgctcatccgtatttgtggttattagattattttaattatatgttattagagtaataaagttattgagttattaaagttatagagttattgaaatagaacgttctgagttttggcgacttcaaactatatgcttactttgttagagaagaacattttagtagataattttttttttttgtactttaggtctcattagaaataatttttagtaatttttattaggtgttaattatctttgtattttatgcagtttgaaatatcttatttttaattggaacatttagaagaagtggaacaaatatatacttttttgaatagaagatgaattttattaaaccatttcatgcatgattacatcaagaatgttactcgggatagaactacccgaataactacgatcaacatataaccatgagtcttgagcaaaagcatgagcaacacggttggcagatcgtttaacaaagcaaaaattaacagtgttcaaactagaaagaagatatttgcactcctcaatacaattttcaaatggagaggccataatcactgaactccgaagagcttggaccgtgacaaggctgtccgtctcccccgtaacattagagaagtttgaagtctttatccaactaagaacctccttcaatccaagagcctcggcgaaacccggatccacacacccatgccttgaacccgatctagcttgaatgacatagcctttagcatctcgaagaacccaaccaaagtcgaatctgtgcttgtcactaaaggttgcagcatcaacattaatcttgtaataatcaacatgaggggcacacaattgcttatccccttctccaatcccaaccgagaaagaagagagcgaaaagtttttttcttgagcaaataaccaccgttcaagattagttcttgctaaagccataacatttttaactgacccagacttgccattccaaactttattattcctgtcttgccaaatagcccaacaaagcatggcacccatttgcctatctccactgttccatcgttggaactgttgctgaaaccagtcgccaaatgaaaaatttcctatgctgtcatgagacaaatattaattgtcaacttatgagtgaaagatgaagattttcagtatttcaagcattttgtctagaaacataagtgatgttggataggttattctcttaaaatttgttaaagaggttgattttgatccctttgtaattgtatctgcttttgtgagaagacattatcattgttacagaatgtaacaagtacgttatctaattttacagggtatccctaatttatatacattggtcgattaatatggctacacataaattagtaaccaacttctttatctaaatttttactcattaatttattttttaaaatgtataatcatttaggctgcatgacatttaattatcaatcattttgctcat

SEQ ID NO: 200787 - DNA, 1305 bp, Cannabis indica
ctctctctctctctctcttcaatgcaacgatctcagctcgtggtcaactgaatttgaagttcattgtagatctcagctcatggttcatttgaagctctcaatggatctaattttgttttaggcgttttttttattgtttagaatattgggtacctaaaaaagctttgggttaaatttaggtccataccttttattatgtgattgattttaatagtgattgttgaattataataagttatgtatatatcatttaagttattaaagttttgagattttttttttctaatgtttaaatcaatgtgtctagtgatgtgtatttttggatgagtgattccgataaaagaaaatttgaatattattttggtttataatttattatttttaatcattaaaaaaataaaagaaatgtgtgatttgtttttattaaaattatatacaaaatatttgcatagattatataaaacatgaaattaaataaataaaattatttttgtgtttagaaaatgaataataaattaataataataataataataatagatactgtaatgtgcaggtagctgttatctttagtcttacagggtgcgactctaaaaggctatacaatgacgcacattagtttatagtcacccatgagtaaaccatcacttaatatcttaagtttcttttaaagtgggtcagcgaaacttaattttataatagtaaatgtatacgcgattcaaaaattatataagtaatcactcacttcaataagctttgaggctttgaggacagattataaataaaatttactttccatttcactctttagcttaaaaagatactttttctcttctagttactatcaactccacaaaagatcgatgaaagttccttagtgttcttttttcgcaaaatgatttaatgtcgcataaagttttggtgttcaaaagattcatacacgaaatctggtacctctccataaatcacatatggatttcatgatttaatatttaaattttattcttttgaattatgtactaagataattgttaaaaaatattattggtgtcgagtatctttcttggtgtcataccgctaattgtgtagttcagtattgactcttatataatttaagaaaatatttttaactaactaactagttgtaggacgctactcatgaaaaatattgagtatactactggtacccaataacaatactgattttacaatatttaatcataaactattcattagatctcattaatgtaacttttttttaatttccaagaacgttgttagttaatgtattggaggaaactcctt

SEQ ID NO: 200788 - DNA, 1710 bp, Cannabis indica
ttttttacaaaaaaaaaagtatactattatatatatatataatacttattttcaacataccataattattttattatatatataaaaattagtgttaatatatggtaatgcattataaatttaatatttcattagaagtattcttagttaattaaatatcaaaatgataatatatcaaaattaattatatagaaaaaaaaaatctagttttaaatttcgtcctaggcccctctctagcttgagacagccctgacgtaaaacagatataaaatagaaattgccatgaaaaaatttcaaagtattttctcttagaagttggaacatttacacattatggaccaagaaaaaatagattttttttcttttatagaaaaaaaatattacaggaatacattgggtcggcttcttaaacatttatatagtccaacaaaaatacctcttcctctagaaccctaatagtatcaacaacgtagttgttgacaggaaactaacttaaagctgaaaaatcaaaactcacacataagccttggaatgagaatgaagacacaaaaatatgaaaacttaaagaaagttgtagagttgttatagaaaaagataaaagtgtatatttctttaggttaagtctcacaataattttctaaccccctctcacatattagaatgggatatatttataggctttaatagcctgagatacacttgtggtccctaagggacaagttggctattatgtggctgcgagttgtagatgcacaaggtggtcttgcgccttctaccattgtcaggtgttatggtctcgagttgcaggatttgtggttgtagagtacctgttgttgggacgtcagggaatgcagatgaagttcctcaactacttgtaccctcttgtcaccaggtcacgctgaagatgtggtcgtactttgtttcatacctttctacgtgcatgccttgtcctttgattcctttctcaactatcttctctccaacacttaggcaacctcgcccatctctctctccctcaccaccactcgtacaccactctgcctctctctccctcaccaccacttgcacaccactctctccaacgatcttctctccaacactttattgattccaagtccatcatctcttggaaaagcatggatgtgttcatgagaccgttagttgatgaactgaaatagttatgggagacggttttgaagctcacgatgcctataatagaactatattttcaatgcgtgcggctatgttgtggacaataaataattttttctatgctctaatgtgtggttggagcacgaaagggtacatggcgtgtcctacttacaatgaacacactctttccattggcctaaatagtaagatcggatacgctggccacagacattttcttgaaatgaatgatccaaggagaaaataaaaaaaaaatgcgatgggaagcctaagaagagagcacaacctcctatattgacgagggatgatattttatctcaattggatcgaatttaatttcatttgcctggaaagcacaaataatctgggggtgtcaaacagaagcgttctgctcaagagctaaattggataaagaagagtatattttttgaacttgagtacttgaagaatttgtccttacgacataatcttgatataatgcacattgagaaaaatgcgtacggcaacttactaggtcccattctaagtatcgatgggaag

SEQ ID NO: 200789 - DNA, 1751 bp, Cannabis indica
tttctctctcattcgagcaaagagtgccattagaactcttaagattccaaatatgattcctctcccttcgcaccatagtaaaggcgtcaaataaggaagaattcctgtcaccatgtgagagccacaactccctcgaacgttgtttccacatagattcctttcggttccaaatttcacccagctttagtaaaatagtggcctcagccaacaagtcaacctcatgagcttctttggatcgaagagtttggagctcaagttctaactcctttatctgattatcacactccccatagacatttctgctccaccaacgaagagcatgttgagttctgttaattttttccccaaacttcttggttcctcagtcaagatacaactagtccaagcctctttgagatatcccagctagacgggtcattgaaccaggcctcaaaaaatctaaaaggacgaaaaccttttggcttgatcacagaagaatcaaataacataggaccgtggtcagagcaagtaatcgaaaaattacgaacaccccccgaagggaaatcagccaaccagttagtgtccacaataacccgatccaacctctctttaattaaaaggccattactttgtttgttatgccaagtatacttgcagcctctaaatcccaagtctactcccccaatggagagaagaaacttctaaagagtggagccgttccgatacgtaaaaacacgaccacccaacttgtcctccttagacaaaagaacattaagatctcccatgagagcgcaaggaccatcaagagaattgatagtatccgccaaatgatcccaaaaagcacttttacaatcatcataaggtgttccataaatggccaaaagataccacattttcatgacagcatggtctttcaccgtacacacaaaaccaaaattaagagtctccgtaaccactatatcaacacctttgttccaaaaaaagctcatacccccgccagcccaatagagggaatgtaattgttgtactcaaagtgtaaagttttgcaaatattactcatctgaattaccccaaccttagtttccataaaaaaataagcagtccaactttaacttcttcacccaagccttgagagcttggattgtcgctggtctagcaagaccgcgacaattccaagaaagagctctcattgggactggggggcttgataagggtcgcatcctcgcccatttgaaaattttgatcaactttaactttgaaaagtagattccctcagaaaaagaagtagtggaattgttacctgcttctgtgttgccatcgtcgactttagccttctcgagaactgacttactcttgttattagtcagttttctacctctcaacttcttggaaccagaggaatccttcttaggggactccttcccgagagtgaagggagcaatctcgcactttcccaaagaagcggccagcccctttgggttagatgaagaaagagaatgttctggcaccagagtaacgatgggagaaacacttccagtgacttttcttttttcttgctttggaacccaaagaagaaggcgacaccttagcatgaaaccagtgctcaccattttctgttggacccactccctcaatcagcataggcccattcaacttttttgtgatctcctccatcaactctatatgcccagaaatgatagtaggctcaggatgatggtgtggggtccgagatttgcaaacctcataatgtggtctctcaacaacttgggcca

SEQ ID NO: 200790 - DNA, 696 bp, Cannabis indica
acaaataattatttttatattatattatgaatttatgatatgatatttttaattaataaataatatgtacactgcaaataaataaataatatattaatctgactactatattttttcaattaattctaatgctttctccactactataaatatgtatatatataatttgtaatgtgtccaatttatttctattattgatcttaaaagtattaatattgaacataattaaatatataatatatactgggtgcatgcttttcttattattatgcactttgcaatgatatgacttgctaatatatatataatatatataggtatgtttttaaatattttcacgtataccattacaaatcacacacccaactttttagagatttaattgattcaaattccctcctccattataaaaaatatagtgatatttaataaatgttcaaataatttttgaacacaaacaccataaacaaaaattaatgatcaaatatccaacttataattaataattttcgtcacaaactttacaaacaattgtaataataccgtaagacactataaattttcactcatgcatagctagtattttttttagtaaattaaatatatatatatatatatattattgaaaatttatgtagtacatctttttaaaaagttattgtagacctttcacatctaaaaaaaaaatccttttaa

SEQ ID NO: 200791 - DNA, 1421 bp, Cannabis indica
aaaaaaaaaaaaaaaaattaccaggatcatgatggagaagtgggggaagttagccaacttctagcgcaaaggcctcatctcatggactaacccatcacatttatggaagaagacgaccagatggtgcattttgctcatcattacccgttggtgatcgagactcccattgccaacaaaattgttgccaggactctagtagacaatggaagttcaataaaccttttactcaaagacgccttccttgctataggtctcatagatgaagacctctccttgagtggttcttagctcaccaggttcaatgggactacactcatccccatatggaaagtgaggcttcctatagccttatgcccagacaccccacaaagcatgttcaaatatttcacttttgttgtagccttggtggtttttggagccattacctcgatcagacacctatgcctcaaatttcctactcatccagtaagaataggaaatgctcgcaaaaataaaagagaggtgagaaaatgttataatgtggccacccaacaagccatttttattgtttaggaaaccaaaaacataagcttactgaaaggtcaagacgagttggaccttcacatatgattcaagaccgttttggaacctatggagaaattgaagaagtaagaatttgtgatcaagatccaaataaagttattcgcataagaaaagctatgggtcccaacgaaagaaacaaaattgtaagcaccatcaaataaattagctaatgtatttgcatggtttcatggagacatgactggaattagactggatgtaatcactcatgtcctaaaatgttaacagggatatgcctccaatacaacaaaaaaggcatcctctcgatcataaaagttagaagccttagagaaggaggtggataaaatgctatcgaacaccttcattagagacatgtactatccaaaatggttagctaacccagttcttgtgctcaaactgaatgtgaaatggtgaataagcattgactttaaggatctaaacaaggcttgtccaaaagactgctttccaaaacgcaaaattgatcaaatggtggatgccaccttcaggtttgaactactatccattatggatgtgtaatctaggtataacaagatcaagatgcatgtggcagagacaaagagttcactagctagggtatatagctacctagtcatgccctctgggatgaaaaatgagagagccatatataagcacatggtaaactggatgttcaaaaatttatgaggacatatatggaggtatatgtagatgacatgctatttaagtccaaatctggcaaaaatccctcaaatgatctcaaagagtgttttgaagtggtgaaaaaatatggcacgaagctcaaccctaaaaagtgcattttgttggaattatattttacc

SEQ ID NO: 200792 - DNA, 1670 bp, Cannabis indica
acaacttcttcttgtctacgaattcatgccaaatagcagcctcgacagatttttatttggtaattattaatatatattacaaaatatatagtatatatatagggacacgattttgtctcgttaatgtactttcacagtactttcacagaatgtattctacgatgtaagaccgccgttaaatgggatagttatttgatctgagtgctgaagttgatctaggagtaattagggttaaaaaatggtaacgtaccctgagacccgtacaatggaatacattctgtattttgctacaaaatcggctgcctatatatatactctcaaatttcttttttttttgaaatgaaataacaacttcattgaaatattagtatttagagtacaaaagagcttttagatcggtccaaacattgtactcaaaaacactacgaccaaagaaaaatcgagaatatcttgccacaacatgaacaactcgatttgataatcgtctaataaaacgtatacttacaaaaggtaaagaagatagtaaaatctggcaatcgtaggaatttctttttagttgttgaatatagagcaaaattatgtcatcttattattattgtataattgtaccaccaaatttcaacattactattagctgatgctccaccccattacaaagtggtcacaattgttatagttagcaattttttgtaaaacttattcacttgaaataatctaatttattcatcatataattactcttcctttttagttaataaatatttatatttttttgtaggagagcagagaagaggaaatttgagttggagtgaaaggcataatataataatggggacagcaaagggtctagcttacttacatgaggaatttcatgtgtgcataatacatagagacattaaaacaagtaacattcttttagatgataatttcaaccctagaattgctgattttggtttggcaaaacttttgcctcaagatcgatctcatctcagcactagatttgcaggaactttgtaagtcaaatttattaattaattcatcctaaccattcaaatgattcatgtaacattaattaatagtaattattaatcattatcaggggttatacagcacctgaatatgcaattcatggtcaattgtcagaaaaggctgacacttatagttatggtgtagttgtgcttgaaatcataagtggccaaaagagcactgagattaaagagagtgatccagatggtcagtacctccttcaacgggtaataattattaatctttttcctaattaatgtataattaaggctcatgttgtgtggctaaattatttgcaaatttcatggaacaaaaaaaagtatttttaatattatatgacaatgtacatggtagttagttgatagttcttgcacatttttttataaaatttaaaataatttaacgtgctgaaaataatgttcaaacagtctattgcacacatgcatatttaattttatacatgtgtgaaataaacagtttgaaacatattttttacaatgcaaattattctgaattttttaaaattttgtaggatgtcttaaataatacaaatatatagtatcttataaagcaattaagatattcaaacattaacaacaaaaaaaggtacatcggtacacattatttattttttttttttttgc

SEQ ID NO: 200793 - DNA, 1610 bp, Cannabis indica
tgatagataaattcctatcaaatcggtatcagagcgaggtttagcattggctggctaaagcatagaagagaatagatgcttgcataattgactacgattttagaggctgagatgtcatattctctagtggctttgattgagctatcctatagtcctaagttgttaaaatagttaagagacagtatatgtatggagttggggggaactttttcgcaagaaagtgagtaaaagatcactcagggagataccaaagtgtctcgaaaagttcgaaaatttgtaacttcctctttgttataactgaaattcccttcttctaattcattcaagaatataactaaaacattagagtattggtatctgagcattacgactgggaagacaaaatgagaccaaagtttgtagaaaagaacgtccaagaatggccgaaggacctattgggaagagaggagacactgagctccatgatcagcgttgttcaggatgaaatataattggtcaaggaggagatgatctccatgatgggaaaacttctttggaaacaaaggaaagagagagaatcggccatgaacaaagagcttggctcggaacagctccatctgcgactccaacaactggggcttcctaaatatgatggaacagacccccaacgactggctacatagagttgaacaatggtacacattctagatatttataatgaggatacagtggaagcaacaacgaatagcttcgagagtaaggccttggacttggtaccggcatcagccaatcttcctttgggaagacttgaaacttctgatcttgaatatgttcagaaataccacgaaggggaacttatatgagaagattttttagtattgacaagaagagacaaagaaaggcgacttaaatgaagatattcttgattcatcattagaatggacgagacacaaggactggtcgactggtgattctgggattgcagtcgtcgctactcttaacaaaaggatcaatcaatgtactagaaagtctacacccgccaccagaaaagagatgcaccgcttctgagaggttaccgccgccgacaaggacctaaatcgcttctgagaggttattgccgttaaatggtaagtcgatatcttcgctagagaaaccagctctaaaagggattctgaaagatgatatcgtggaaagaatcatccataatgcgttcttttccaatgagtcactaaaaccatatcacaaaaagctcacccccttctatcttgttcaaggtctagcccacaaaagaaaacattttgacctaatttatcaagatgatgggctaaacatttgggacccaggtaaagctcaattacatgtttactctttgtgtaaaaggctccaaatgcatcacttacttgttagttgtttcatcaacaacgaatttgactccaaacttgcacgaacagtaggaagaatcaccactacaaaatcggttcaaccagcaaagaagaaacaagagaattggtctcctagtctgatctacaatttgcatgggatttcaattttttcaaattggtcgtgcattaattttatgggtccaaaaattgggaccctaacaagatctacttgcccatttttcgtcgact

SEQ ID NO: 200794 - DNA, 593 bp, Cannabis indica
tacttgcccatttttcgtcgactatgggaaatttcttctttctgttgatcagtattttcaaagaaataaagactccttaacccaaaaaaaaataaagaaaagatacagttagattttcttataacagatgtggtcgttcgaagatgaacctccgacatcgttcttagtggtgggacaagactaaaaaggaacgaagccaattttctccaaaagtcgtgggaatgttcattggaaaggcacattatgtgctttgatcagaggagacctaacacccatctatctgttaatgatttgcttgtaaacagataccctacaccagggacccaaatgaacaccagacccaatatttggacaaaggggatgaggcacatgtactacttttgagcccatgtgagtgtgttccttattaacttggattttgtgatccaataaaatatcgtgctacacattgggaataaggagaaagtgtgtggacacgatatcaacatcggctgtcgaaactccgacagcagtaatgagacacacagtggcatccttcgtcagatttctaggcacatcgatggatcttgtggtatccagcgtctgcaagatga

SEQ ID NO: 200795 - DNA, 750 bp, Cannabis indica
atatagatattacatgttctttggtcaattaccaacttgacttaatagcaaaaatcttaaaggaaatcttaaatttcaattatagatttttaactgctagatcataaaaaaaaaattgttactgaggttctgaagtccatcaccagcgaaccttgtcaaagtgaacatatttagataaaagatattaaaaacaacaagggtagacaaagaaagtgagggaaacatgaaacaaaaaactgacaattggagatacaggatgtgttaaaagatctacttaaagccataaaaacatcagtattgtaggcaagattggaaaattatgacaaaaagaaatcaacaagcaaccggaaatatgagtgacatattaactaggtaagaataatattttcaataaacatttgtatttatcatcaaagaaaagttgcatataaaagaatgaaagcactttctttgagttgctaagggatatggaagcacaaaaaccaaactcgaactcaattattgaccttagcttgttgaaatgaattgactcggttatgagaagaaaattttcttcctttacagtgcatagatattcttaaggtataaaaagataataactaagctccatatgacttttctgcctttcaaaaacttccaaaagaaaactagccaatcagaatcaccagtaaggccttcttcaggctcagatttataattttatcaatgataaaagtaaccatttctgaattcttattaagctgaaccttt

SEQ ID NO: 200796 - DNA, 2124 bp, Cannabis indica
attttaaaaaattaaaaaatatatatttttattatatattaaataaaaaaatatatttattaattagtaaatatttaattttgttgtattttttttattaattaaaatgaatattttcatatattttatcactatatcatttatttttgttctaatgtcatttatgtacaccattcacataaatttatatataatgtatttttatatatatttattattgtatttatatttattgattagttacacttaaccacataaatcgattttttggtaataaaattctctaaactttacttttgttaactatttaccactctcgttcaaaaaactttattaagtgccataataaatataccacagtatacacatgtatactcgtgacaaatttttagtaaaaaatattaacgacaaaactacctaaattctatgattagtgacacttattcacataaaccgatatttttgtagtaaaatccttcaaacatatttatccctgctcttatacactatatcaactccccttatacactatttataagaattgtacctcactttgatttttatatttataaaaaggaagagtattaaaatcaattgtctgattccatcatattatgtaaccatgattataatttatatatgggtaatttgattctattaagatactcactacaacaaagtaaacatgccaaggtatctttatttaattaacttttgtatttatttttttaacaaatgaagaagaaaaatgatggtacctcacgaaaaacttggagggaaaaacggcaagagagtaattgaatgatatgttaaagaagtcataggggaatgcaaatccaaccacaaattccttccgaataatcgaagtcgaaagttatttgcaaaagtactaaccctacattcgaaaaaagaatatactgtacaaaagtgtctgggaaagaaaacaaaaattacacattaatatacataaatatatcaggtctcattaaagttaaataaataattaaaatagccatctaactagaagaatttctaaggggacaaatgataaataaaaatatctcctactctacagacatgagcaaaaatatgttatgttgaatggaactattcatccaaatttgttacttgaaaaagctagagatgccctgtctttgagaaagggattcaactcaaggcataaatagaatgaccatttacatgtataattatcttatatttatcaggtatgaaaccgatttgcaataacctgtagctcagagcatctatccattttcaaaacacaaactacattgatatacagagcccatagagaatacaagtttctttcataggaagaattctcggtttctacaatgtcataccactcaggcatcttgaacccaaatcctaacagttttatcaccttcaaggccagcagaggcaattttgttctcagtagggtgacatgaaacagagatgactgtatcagtatggccttctagtctttgaaccatattcttatgttggagatcccataagtaaacacatttatcctctgatccactcacaatgtatttaccatttgtcacggaaaatgtagatgttatgcagtatgttttgttcacatgcccactgtaaattttcaaaaacttaccagttgagtagttccacagcttctgcaaacagggaaagggatcaccagttaagattaacaagaccccaacatgataagcatttcaaccatgaagcacacaactgacttagttatgcaaactgttttcattctgttagttgttttaacagtcagttagtgtatagacatttagttaagttctgtaaataatcttacgacagcagaagttttctaaattcactctaaatagctcttagcctgagctattctttcaaaccacaagcaatcatttggtagctaagcacataaaaaacaacaaaagataaaattataataaatcagaaaagcaataaaacaagttatcagaaaatagaactgccaacacccgatatacaactatgagcatgttaactaatcctacatagaatgaagcttaatacaattgaactataattgtgtttgtgcttttactgcttaaaagatgtacttaattccaaaaaaaaaaaaaa

SEQ ID NO: 200797 - DNA, 554 bp, Cannabis indica
gtcaatagtatcatccctactttccaaattagtgggttttcacctgttccagatgtgatatacttctcagataaagaggctgattcaagaggctcaaaagcaatacagcacacaaatatccatcctggttttcagttttattctggcaattttcttcaacaaccatcacacctttgccagatttcttatcaacactgttcttagattcttgtaggacagggaaaggcaaccgaaactgaagcaaaatctttgccacatatggatgatttcgggctaaataagttagagtttcgagcacacggcgagacaccaagggaggcactcctataataaaaaattgacatataatcagtgccgtactgtatatactatatataagaatatatatcaacaaatattatcagagactttaagaaatgagggaaagatgagaaaacaagaagagctttagacttatttgtgtagtaacaaaatactcttccataatccatgagaaaattgaccccaaaagacaggtaacaggcaatagtaaaataacacatgcaagttctcaa

SEQ ID NO: 200798 - DNA, 1326 bp, Cannabis indica
caggagaattatatatgtaggacaaaaacacgaaaaaggagctccattactcaaggctgatgaggcttttcggcaatttaatggagcaaaaagatttaagcacttatttctctccttttttttttttcttttcatgtaaaaaaaaggcaaattgaataataacaaaataatccaaatgctttctatattttgctataatatactacaataataatccaaatatacttgttctttaaagcagagaaaatctagatcaaaatttgcttgtattaattaatcctagcctagagatcgatctaaatatacttttactcataaaacatccatatgtcatataatacaaattactttttgagtagatgtagccttgtaattgaggtttttgcaataaagatatatgtatggataagaaatatatatatgcattatagaacataagatatagaaatgtaggaaaattctcgctttttatacataattggctaagtatgtggaagattgttgcttttgttctttatgggactaacctaattggtgcacacgtagttagttagattgattgatttgttatttgtcttgtagttttgacccaatatagtggacaagccaagtcacccaaaaataaaagtttgtagccctttgacaattaaaataattaaaagaagagagagagaatagttatttctttgtattagtattaggtgggacttgggagagaatgagtttgtttatgaaacttgagtagtttctgacactaagatatgtgagctcaattattgacattttttatctcgaacgaattgacattttttttttttaaaaaaaaaaaaacgcatgattagaaataaaattaaaaattaacaaaacttcaaattcctatataaatagatgatttcatttatttttattattcatataattttattacaggtggtcccccgtattaggacttatatgagtttttggttagtatatattattgaaaaaatatgtagtgttgtttgattattttttttttttttgggtaagaacatcagcttgttcattagataaggtaattgggaagtacaaaagggattccctccctatggtaaacacaattcaaaagactattaactctagccttttttgctacaaaatgagcagcttgattgtccaaactaaaaataaagaaaaagttataaaacattaaaacttagcggtatatgcaaaatctccatagcaataggtcttgtttctaaaaaaggagggcaattctttttttccagtgcttgcacaataaccttagcattagaagctatggcaatggactctgccttggctgcc

SEQ ID NO: 200799 - DNA, 503 bp, Cannabis indica
aaaaaaaaatataaagaaaattatatatccataaatatagatgatatacataaataatttttcatattaataattttttaaaattttacagtaatcattatttatatattgttagtttttaataattattaataaattgtcaatataacttattacttctatttttttttattttttgatgaataagatgatgtttcattactccaatactcaatttgtacaaatctacaagcatcctcaaataaaagagaggaccttagactctataatatttacaatgaatcaaaccaagctttgtcactactagatactttttttggacatatacaagttatccgacttttggtaacattttgaacctgtttaaacactgcaatgccattagtatcatttttctcccaaagtttagcgtttcgattacaccaaatggtgtagaccagagctgcaagtgcagcaaccaagacaaatttttaaatttcttagctttgctttacctaaccaga

SEQ ID NO: 200800 - DNA, 931 bp, Cannabis indica
ggtctaatgccattttagcttcatggtctaggaccaatttctttaaacgaataacctatggttcttcggagggaatgtaataatcttcctcctatttgtaaccatcttcgtgtccgtcctcatagtacctattggggttattgtctctgctgagattttcttcgtcgtatcctttggttggttatcattttggaggggtcactacccaccaccgatgcttcttactcccccacatggcgactgccttagcatccactggaggaggagggttcaaagcatcaataacaggatttaagtgacattttgacccatttctcgcggccactatttttgtagacctttctagaatctaggggacaagtcgccacattctttgggattgtgttaaaggcgtgtcgtgtaagcaatatctgggaggttagaccatttcagataaccccttcagcttctaatcctggacctctgggggtatccgtcttgggtacccaacactacttatgtccttggtttttgattagagttgaactatacttccaggaacatggtagatccagatcatttccagacatgtttgtttgaattcgaatccacatccatttgaagatagatggatcattcccctaaagtttgtcttgtttggttctaaggtagaattttttgtttggtaattcatagagcagaaaaaaaaaacactgaattaaacagttttaactaacaactgttaagttagtcaaatgttgcagcattagttcaattatgttaattgaaatattgcagcattctgtttagttagttaagtgcacataatagttgttacgtcttatttttgcctatttaaaggctttattcaatcttgtaatgtaagaagtaatagagaaagagttgggaaaactagaccaaaatcagtggctaaaactcgagctgagtttta

SEQ ID NO: 200801 - DNA, 1051 bp, Cannabis indica
caccagtcccaggcgcaatccaaaaattagagctgctgaggttgttcaccagtgcaggtagaggttcgaaccgatttgagcaagcacacttccattgattcaggacagaatgggcagagataattacttcagcagcagtggaggctttcttgttccaaagcaagtcattcctagccttccaaatagcccatgataccattaatgcctcttcgaacatagcaagttgtccatagttcagaacctactgtaaccagtcgccaaaatcagtggcagaagtgatgccaagagacataccagatctgttccagtaagagtgggcaaaattgcaggacaccagcacatgaaagattgtttcttcttccctagagcagcatacacaactgagttgcacagacacatgttttgagtgaagctgagttcgagtaagtaagcaatcagtgatggctttccaagcaaaatgaattactttaggagggactttagtttttcacaaagaacgccaaagatccgactccatatcagcagaccatctgcccttagaaacctggagccattgatagcagctcttcacagaatagttacctgaattcccatgatgccaaaaccacacatcatccatattagatgagttaagcggaatattgaggataaggtcactgtctctatgatcaaaaagatcatttaatatctccacatcccagtgagaattatcaactgtcatgagttgattaatagatgccccaacaagtcctggatgagagctgatcacgcacgggttggtcatatcagggagccctggagaatttaaaacagggacagtcaaaaccagcaccaatacgaatacgtgcccctgctgcaataatcagttgagtttcaaagatgcttctctagatgaagctaggattattggcaatcacagctgtaaggaaagttccttgtggaaagtacctactcttataaattcgaccatcaagagacgtctcgttagttagcaatcgccaagcttgtttgcccaagagggataagttatagtcatgcgaattcctaaaac

SEQ ID NO: 200802 - DNA, 1151 bp, Cannabis indica
ctactcctctcattgtcaattaaatttaacatagaactccactcattttatctcaaattaccgggtgtatagtaaaaactttatgttcggtacctgatccacatgtggtggagagatagacccaacaaatagatgtttattattgttttttttaagggtaacaaatagatgtcgtgtagtaaaagacaaaacaaaaaaatgtaaaagttgaatataaagagaaaaataaatctgtagtgtataaatgatgggaaaacacgtatcttaaaaataatataggtgaaaaggaggagattttaaaatgagattgattcttatatagagatataataaaaaggttcttgtctaaaatctccaatattgggattgatgagaatttattggattaatcgaaacacaaaccaaaccctactttataaatgagagaaaaagtgagagttctcctactatgaaagtccaacagccataaaagtcaagtactttgtaaaaagatttgagttttttgaactgctgaaaccgtgtggaccaacgcccacgttgggggcaatagacaaaacaatgacagtaatatgtcattttcctatgatcaaaattgtggagggaagagaacataaaaaaatatattcacctcgaacaattctatgacaaaaaagcccttgcacttgaagttaatttagctaatatttagaattgtatgtttcagtatgactcatcttaaatgcagcagatacatgcttgtatcaaaattgtggaacacataaattaattaatctgtcttgattgtgacacaagaaaatgctgtattatttaatactacatatgcagtctacattatgggttgaccagaactttgttcgatgtgaaatattgtaccgcgttcaaatgtctatttaagagtattgctccttctcaatcttatcaaaaaaaaagtattgttccttctcaaaaaggttaactatttataagtcaaaattaaatgtgataaaaaaaaaatagatgtttgtttctttcaaaaattatattttatttattgaaaataaatgaaaaaagtcttcgacattgtttttagatatatttcatttaattaaaggaaaattattctttatgcagttagagcaattttactccagagttataaatatagtgtattg

SEQ ID NO: 200803 - DNA, 543 bp, Cannabis indica
aaaccttttgcattcattttttgagtgtcagtataggctaatagagtcatgttttgtttgactggaaaggtaacagctacacacataaagtgtcactatattctttttttttcttttttatttaatatttttagagatatagtgacacacaaaaagtgtcactatattaaatatttttttaaaaaaaataataattaatttatattaattatatataaatacaattaaatataacaataataattttaattaactaaatgtaaaatttataaattacatcaacaaagttatattttattaaaataaaaatctaaattaatttacaaggttttttttttttttttattaacagggagggtgcaaaagcaccccaaaatagggaaacaaacgctaaacaccaaaagaaaaaacaaaaggaagagttctccaaacaaaacagaaaacaaacaacctaaagcaaataatacaataactaaatcacagaccaggatcccactctaacaaattaatttacaagttaatacatgtaatgttcaaatgatt

SEQ ID NO: 200804 - DNA, 1823 bp, Cannabis indica
aagaatatgatttttatgttttggaatatatgactcacatcatcgcacgtgtaaaccccaaccgttatatataaaatcaaaaaactgtaagtttaattaataattataatatttattatcttaacacataatatatatgtatataaactaatttaaacttttacttttatagtttggagaagaatagacatacaattcaaaaattgaattattaccattacagggacagtggatagaacgattgatggcggtgattcacgaaggcttggacgaatgatactgaaaggcctaagaatttttcttccgtagcttattttttaggtcaacttgtaattagatttattaactgcttgttaatacttagactaattttacaatatttgtataatatataattgtaatttatttaattgcttctatgaaatgaaattaagtatattgcttaattataaaattaatttaaataatatttaattcaactttttaaaaaatatatatttaatttaaatttaaattaagtaatatttaatgtaaattaataaatatataatttaaataaattaaatttcttcatttataatagatttttaactaaaaaaatataattattaatgatttggtgttagtttttaggcctatagagtcggttatacttgcatataatagcgtcggttatttctatataatcgatgccatagtgtacacatggcgtcgattctttgatgataactgacgccatagagtatcatttagcgtcagttgttttcaatcctacaatgtcgcttgaatcagcgtcggtatcaaattttacaaaaattaacgttgaaatgccataaaaactacctctaaagctcatattcgtagtagtgggtgtcaatattgcttttctaaacacaacttcattatgtggattgctgttcaaaataggctaaaaacaaagagagactttattgtttccatatatataaatatatatatatctaaccgataattgcacatgtgtcttgtgtggcacacatgaaaaaacgattcaacatctattttttgagggtaaatacactcgggattatttacaccaggtaaaaatatggctgcaatggaaagcttgtacaagctcaatactagactgctacggtggattgaaaaagcgaaaataggaaagttcaaagaagcaggtttttaggtttttcagcagctttagcttgtccattgtactatgtttggatgacaagaagtggaaaaaaaaaaaaaagaagaagctggagaaagatcaattggtaaactagctactacacagagttaaggtggtaacaaaagatagaatagcttgtgttctatctagaaagataaccaagacagagtgtggtttgagttgtaaaaagagaggaaaagaatttgtttattttgcaaactgcttgtatagaaagtgttttgaggctaattataaagtatctttagtttgtaaagtttaattttggtgtaatgaaattcttgtggttcataaaaaaaaaagaaaaataaaaaaaaaaaaaaactaatcataacgaacagagacaaaatattgggagaagaacattcgagacgaaattaaatgatgaaaaacgaagggaatcaaacatatattattattattattatacgtactggtggattttattttacgtaataataataattattggatgcgctgcaaatcaattgcgttagccaaagaaaaacggaaatgttaattaattccgtgagccgcccctggacatgctacgcttaatttggcccttttctattgttgtcaccatttatacactaaaacacaaagtcaaacg

SEQ ID NO: 200805 - DNA, 979 bp, Cannabis indica
attttaatttaagttatttaaaatatttggctctgaactttgatatatactaaagtatgtttttttgaactttttaagttgtttgaaatttcctctgaattattgagattattagtctcaaagatttatgcttaatttcattcaatattactaacgtggttatgatccatgtaccaaattgtacccctcatactttaatatgtaagatctcttaaatttcgatatgtactaaattgtacccttaaactttaatatgtaacaaatggtctcctgaatttttatccagaagtttagaaagaagcctttgaatctaataattttaataagttgaaatgacaaaatttgttatatatcaaagttaaataaaaatcttaattagcatataacttaataacaaaaggtcacttcataaaagtgttaaacactaccaccaatacttaataagaatgtgaaataaacaattttatcaaatcataaaaaataaaaaaaaaaaatgataatttgaggatagagaaaagaaggcatttgatcaaatcgttttgtacaataaataacaatacaatcgttttatagtgtagtgtggtgtgtgtggttaaaaaagttaaagctctctttccaagcaaacataaataatattattatgttaattaaatatttttgaaaatagattaaaaattaagtaaaaatgggaagtagtgtgatgtttttagcttttcatattccccatgctctctatatatttttgtcataaaaaggtgtgagccattgaaaagtctgattcttttctaaaaccagagaacagaagaagaagatgaagaagaagacagttaattttattaataataataataataataataatgataaatatagtggttccctcgataacatgaaaccatgtcaaaaatagtttacatttacaatacagaaatccattaattaaccgcctgtacgtacctccaagggccatttatttttt

SEQ ID NO: 200806 - DNA, 1415 bp, Cannabis indica
tttatagatgtacaaacatcgactactaaaattctgtatttatacaaaagtaaaaaaaattatttatgcaagttcatttcttttttttcacactaaggttcgaacaaaaagcttaagttttttagtttgagtatggtagttccgttttttttttgttatttctataagttttttttgaaaaacgtgatctggatcacattaagacattttttaaaaagacttcaataatcgatgcaggaacttcttcaaaccagcataactcattgtctagcctaaggacatggttttgccaaaccatgagtcgcaatgttgtctttgtgggacacatgagacaaaactgccatcagaaatttagacaataaagctatgacatcctctaacaacacacccatgtcatttgtgaacactttcctgttaatgataaccattactacggagagagaatcaaatttaatcgcttagaggaatcccacacgaatgagcccaatttcgttattctataattagtgaaggcttatattggattgatcttcttggttttggtagttgtgtatgaattaaatttatacatagaaaaacaaaaataaaaaaactaatcgaaaattgattatcccaccacaaaaactagcttacctggatcatttctaaatgactattgatatatactaccactaaatttggtatgccttttagctttaaggcccttatggttccaccttaaatcctttaaggagattaggaaatagtgcagttatagaagagtagttcatgagaaagtgtgaagttttgtaacagaaatgtgtaataaaagagctatcaaagtagcggttgtggcaagaattcaagagcttgactgtgcaaagtttgggtgtagatagaacatgatgtaaggatgaactctatgtttgattgggccttcaatcgcaggagcaacagggggacttagcagtgtgaggttgtctttgagagagaaagagtgattgatttcattgattgaaaagtttaaagattacaaacttatatatcaactactgaaactgaaaataaactacctaacctttaacaaccactcttaacaagcatagttagttaactaactaatagtctcactaaaatcatccttaacaaccccttcaaaactgagggtagctttagaaggatacacaaagtttagtacgaaagtctcaacaaatcaagagttagatatcggcttgggtgaggtagtcgacaatttaagcttgagctatgcacgtgtttgacttgaatatgttgttgtaacaccttgtcttgcacaaagtacaagtcagtttcaatctgctttgtatgtgtatgaagaatttgattggcagcaaaaagaacagtactctggttgtcacaccaaatagaaggtattgctagagattgaatgcacatct

SEQ ID NO: 200807 - DNA, 976 bp, Cannabis indica
aaaaatagatatctgactatatttttggagtagttccaatagcacgtgcctttcgcactaaacgaagccaaatggtcatgggcacgcgtggagagccaatcgaatctcttgacgttttgtgccaatcaagtccttgaggtgacttagtagttaaagagctttttgcactttggcagctgatggaaagaggagcttagcatgcacaatgtgctccctcgataggaggtggcacaatgtgctcccttgataagtggtagcgcaatgtacttcctaggtaagaggtggcacactgttatccattggtaggaggtagcgcaatgtaccctcttaattgcacttccatatctagaacaaaaatttatgcacaattatattagactttttgaggcataatattttccccatgtttatcataattttataatattatgatagacttgtagaaaaaataattcccaagattttgaactcaatacccgtaaatattgatattaccgaaagtataaatatgtagaagaacaccaatatttttaggcattttagaaaactaacaataaaaataaaaataaacaacaaatatccctctagtctttaagtaagccttttccttccaacataaccatcgagcccttccaaaaacgctctcaaagagcttcaaaacacatttcaaaggaaagcttaaagagaaaaccaaagattgttggcgatgattcaagcttgaagatcatcattgagtaagttattctcacccttttcctaatcaattttattttccatgttaaaatgcatataaaccatgaatgtttagtgttcttcaaactttttcattaaaaatcctctttttgcttatttgatttttgctaatgttgtgaaatttgatttgtaatttttagaatctaagaatggaacttagtaatatagtctatgggttatctatatctagtttttttttttgaaaatggtagaggtttatata

SEQ ID NO: 200808 - DNA, 2150 bp, Cannabis indica
gtagctccagtatcaattatccatttagatttaggaacaagagaagccataccaaaaatgttggatacaattggttgttctggctgttgaggttgcacctggttttcttgcagcttctgtgctaacatagccattaatttctgacattgagcagccaagtcttgatgatcatgtactatttcattgctttcatgccctgtagtgcaattagctgaagatctagcttgctgatttcttggttttctaggtgtctctcatggaaatctgccatacaacttgtgtctagggggatacccgtgaattctataacacttagcaatggtctgtccgggaacaccacaatgagaacaaatgggacgcttgtcacctttgttatcagactgattgtgtccacgattagcttgggcattgccagaaaattgacctgtgctatcacttgtttgctggttattctcatattgaggtacaacaatgcctctttgtttctcctcctgaattatgctagcataggctttattcacattaggaagtggatcttgaagcagaatttgagacctagcatttaggtaagactcattcaaaaaaatgaggaactcaagcactttattctcatttttatactcttgaataatcttcaaggctccacaagtgcacactggttatggtctatattcttgtagcaaatcccataaacctttgagtttagtgtaatatgaaatcacatcactagaaccctgggttaatgtctgcatagatccttttactttaaagattctgggggcattcttttgatgaaacctttcctgcaattcaaaccatatacaagaggcatcttccatatacattatactatctgctatactaggagaaacagagttcaagatccacgaaattaccagaaaattacatcgaatccaagaatggtaattttcatcgtcttcctcaggagctgggagtctaccatcaacgaattttatcttgtttcttgttgataatgctaccatcatcgaccttcgccatgagctaaagttgtctgcaccagtaagaatctttggtaccaaggatgaagatgcactgtcagtatttgagagtaaataagggctccaaggatcattagctggtaatttattattttcttcaaagactgcaaatcgattcgattcttcagtagcttcattgttcctggttcgagtttgtgttcttcctcctcgtgccatggaaaccagagagaaccaaagaagaaagaaagaaaccaaaagagaagaagaagaacaagtagaattgaaagcagaggagctcaacgaattgttggctctgacaccattttagttgtaaaacagagaaaatatgtgaagaagtggaaaaatgaatcttcattaatcaagaggttcaatataaatggtgggcatatatatagcacacactagaaacaagaacacaccaccaaataaaactaaaatcacagaatctaacaacctaactaactcaatacagaacaccttaacaaactcttgacactaacttaattcttaactaactctatcctaacatgcccactactacaaaagaaccctttagaggctatctattcaacaagcttcataataagggaagctaaagggtgtaaaaatacccgcctattgataatagacctttagaagcagtttttttttttataaaaaccgtaggtatagaattggattataccatttagggtcggttgggaattggacgatgcttggttttggttgagaagcatatgtcgtcgattattagataataagaaccgatggcataggttatataaataaccctatgcttcgtcttcttccttcttcctcacgaacaaacccagaccagcacccagccacctgaaaaccctccccggcccctcccccaaccaccacctcctccagccaagttctcccccatttctccaccatttaagctcaattttcttaaatcttctgctttcgatacttaatcccatacaacaaaaaagtttgacttttttccctctttaagtgtcatctgagcccattagaaaatagtggtgggtataattccggccaccgatatttgttaagaaaatgttgaatctcaacatccattaaggtataaatgtagtttatattcatttttataatgta

SEQ ID NO: 200809 - DNA, 1744 bp, Cannabis indica
atatatattttacatatttaattgaaaagtgtgcttgagatttgaagcattgaatttcattttcaattttgagtcttgggagagacgtttgcaaatacaccagcaaaaaacctacggtgacgtaaatggtacaattcgttaagttgtcaagtgttttagatgtctcatcgatactaacgccgtttccaatatattttctatttttgaactctctctcgacgatccctcactttttgggggtttttttttttgtttttcttttttagaaaggatttgattgggatttttttatattggagttttacttaactccaaaatttataaatgcattaattttaataatttttattttatttctaatatatatttttaattatattagtttttgtcaaaaaaaattatattagtttttttcttcttatttatattcttttaaaaaatttacatattaaataaaactaaattatattttaaatactatattaaaaaattaaaataaataattatgtgaaattttattaaaaaaataattatatatgattttaaaaaaattaaaaatcaaaataaatattaaaattaatataaaataacatggatattttaaaatatatataatattaaaagtgattttcaatatttattttaagtttattttttaaaaaaaatgcacttactattttatagtgtgttaatttaattgggtaatatagatgatacaaaatataatattattatttgtctactttcatttatgacaaaaaaaagcctggtcctacaataaattaacggtggagaattattattacatgaacgcagttaattaaatttagtacatagcaatctagatttttatatttccaccaaaaaaatctagatttttatattttaggaatattaaggacaaaattattttaataatttgttcagtaatcattatgtttctgaacttttcaactggttaaaaataattttaaattattcatagtgttgtaaattggtcattctattataaaataataatgtgtttctttagactattatcatgttaacgcctttaattttatttaatttttttcaagcggtaattgacttttagtttaataattttttaaaaaaagtacttttattttttattttttattttttattttaaattacacacatgacactaagaggaaatagtctaaacagcattatgtttgtcactgtgtattgagatttttggaaactgattaattagagcttaaggaaaatatcaaacgataaataatagacaagtcattttttacgtgattcgggcgttaataatccataatccacgagtctgttgtattgaccttgtcagcgagtgtttaagtattacaagtgtttacagcatgaatattaactctgtattccttttgtttctcttggagaagaagaaagctcataggaatttttaacaaaggttttgtaagtaaatattgttcaccttttacatataaaagataggggtatttataggcacatgtgtgagtgagggcatacccttcacccacttagggtttcgtactcaaacacgttacaatagctgaggttacaacatgacaatctgatcgttggtaggtaaagagcctcatcatcgtctggtgctcggttgctgcaatccaattcgtgggactaaggacacgtgtcgatgtcgcccaaaggtttcaccttgcgaaattggtatctagactagccattagacaaaaaggagctacag

SEQ ID NO: 200810 - DNA, 1099 bp, Cannabis indica
ttttttaacactctaatcaagatgctccaatggtgatgtataatggtttacatttggtatatgttaaaaattgtgtcaaattttatacaaaatataacataagtaaaattttatagcacaataaattttttttttatttactcttttaccacttattaatgtaattaactactttttgtaatttatttatatatttaatataatttttttatgtattttcaataaaaatttaatgcttttgttgggtttttttatactttcttattaacaaaaaaacttaatttaacctactgcatttgagtgctattttaaaatttatgctaaatataatattaatttattttttttaactaattttagcataaattttaaaacttaattttaccttaatgtgttggagcattattttaaaatttaagccaaatataatattgtcttattttttagttaattttagtacaaattttaaaactcaattcaaccttaatctgttggagtattattttaaaatttacgctaaatataatattgtttatttttttagctaattttagcattaaatttacattatcaatctattgaagatgatgttattaattgagaggatcatagctatagcagccctcgatggttaattaataagtatattaaatagttgtcttaaaaaacaaataaacatcatgagcaacttgtttagttttgatacataacacatgagtattaattgctcgaatttataattttcacaaaacgtagaatgtatttataaatgattataatactcaattgacttggagtaataaaatgaattaatgactgattatagtactcaattgacttggatttatcaaccatatgatatagtatatataggtgtatatatattctatatatacgcaactcttcccagcacaattaacatgaatatttttttttacgcaaagtgccattaacatgaatgtgatttcctctaatgaactcttgacctccaaactgccattaggaatgtcaattggggtgggccagactggcccgacccgccacaaacccggcccgactcaatatcattttgaccagtattagggacacatggttcaag

SEQ ID NO: 200811 - DNA, 923 bp, Cannabis indica
aaaaaaaaagaaccgattgtcttaaagtcttactgtcaaggacttctttgttatgggtgttgataatcaatccatggaaaggggacgtacttttccttagagagccgccaacagcttaaccaccattatcagaatctaaattgtccttcatattgggtgttggcagacaatcaggtaattagaatttcaaacttgttcttcttcaacgatatcattcaaacaacctctgtaatattctgacactaggatcaactatttggagagtcatctcctctgctccaaatatagaattcattaaccaacacctatttttgagaaaggcttttgtattggctctcacccactcaacaactgattgtctttgatgttgataataaggtattcccaacaatgacaagtcccctccctcctgacttaacaatgaaaactctgattcttgggtctcgggtcaagctagtagatttagggtatatggggttagtgtatgaaactctaaacggtttaagaatctagtttagtataacctataatcacaaggacaaatctctgaatggaaataacatgaccccattcaaatttttcatgatgaaaagtttgtaagtattcaatcccatcaaagatggccacagtagtggaaactcccaaacgtcattctactttcgaatactccagctacagaggctcttctcttttactttcacaatttcatggtagctcagaacttgtgcatctaccatctggacaaaagtacaccacaaggtaccattttatttatcttttcaatatccttaattatcttaatctttattatactaaatacttttttctattatagacgaaatcatttaataaagatagtaattaaagaacttggaaaaatgttgatggtgttttaggaagaagctgaataagtttctttaaac

SEQ ID NO: 200812 - DNA, 1984 bp, Cannabis indica
gctttatgcaggaggcaaccaaggtaaaaaatctaagtgataatggaaaacgggctaccatcataagggggattctggtgggaaatcggttgtggaaggatacaaggtgaaaatcaacccatactatgagagatttccttgacagagctgatgagttcattaaattggaagaagctgagtgaaacgctcaaggcttcaaccacactaagaacaaaaagaacggaacaagctcgaatagtcaaagctctcaagggggtaatggtaagaatagctctaacaatggcaagagggggaataacagtaatggcggtaacaacaatgacaacaagcgaccaaagaatacccccaagccagccaggcgtaaaaatttcaaaaacctaaccaatttgacttcaaactttaccaaaccttccagacctacatattataccccaaaagacatattccaagcaacaatacaaccaaacaagctcaaaaacaattttcactattaaagagccaagcttgagttctaaaactcaaagcttgctcaaacaaccctacaaccactcaaactagccaaaaacaacttatttaaacataatttaacctcagaaaataatttcaaacaaccacaatcactacagaactcaaacatctaaaatcatgcaaaatctctaacttaaaactcaacaaactaaaagacaaagtgttgggagcttacctagagcttgagatcacttaaaccttcttgaaaattacttgaatttgaggaagaaatccagaaccctagctggttctataatgttcgaaaagagagagagagttctatttagttaattcttattttttataaaatgaaaagattaaatggttttatcaaataaacttagtttaatattcataataaaaacctcatttaaactcactaaaagacaaatggttaactgaggcaaaatgactattttgcccttcccaaagctaactaatcacaaaatcacctaggggtattttggtcatttctagaatttcaactattcccgttattcccaatgtctaactatattatctcgctatactaaaaatactaagatataattctaatagccaaataccgcgttctaatgttgccgtgcacaaaacatgcaaaattatgaaattctatatatgacatataaaatgcattttgaattcaaataaatctcagtaattaaataattcaaaattaatatgcaagtttcaaaattaaactctaattatctgctaatttccaaattaaaattaagcagtcattacatttcatgtggttttcgtgtttttctcttgtatttttataaaataccataaaaatataaaaaaaatactttgaacgtaaaaatataaaaaatttactaaaattgtagaagaaggtagtcatttatctataatatggcaggatattttgtggggcagagagttgcttgttctaggtctaagacgaagaataggtaatggtcgagaaactaaagccttcaagaatccatagataccaagaatactaacctttttttccaattacaagaggaacatttgattcaatgacaatttctaattttatactttctcctagacaatggaatgaagaacgtattacaaaattttttatggctattgattctaagcttgtaatgactattcctcttagtccgtataatcaagaggattcgtggcaatgacacaacacgaaccatgagacctattctgttggaagtggatataatttgacaaaaactactaacagattcctcctatcctcatcgattgacgctttatcataatattgctttttgcatggagagactttcatgaaatcctacctacattaaaggggttacttcaaaggaaggtatcgacaaatagcaatagtcctttatgtggttatattgttgattcaaatgcacatttcgtattctggtgttcatttgcacaacgtatatgaaagtttctcgactatccttttttatta

SEQ ID NO: 200813 - DNA, 797 bp, Cannabis indica
atttttattttcttaaaaaaatttagtttaaatgtactagtaaaaaatgacattgataataagttaatatttaacggtcagttattttttaaaaaatataatttaaatattattactgcaaaaaataaaacttaaatatttatttacaaagaaaagttaaatttaattatttatgtcataaattaattgtttcattatatttttttatatgcacgagtaattttgtagttatttagtattaaacatttaaataatttattatattaaaaaataatatttaaatattttattacacaaatatatttaattaaattttacttataacactataaattatttaaaatttaatctaaattaaataactaaataactgtataccattataaaaaataaaattcaataaagaaagtgttctaaaaatcaaaataaataagagtgtttacagaaataccaaaagaaaggatactacacatttttttctgaattattattctcttaatgagggatattgtcattaatttgagataagaccaacttaaataaaaaaagaattaaatgagtcgactatcatatgattcatatataaatataaattagagttaagtgggtcccagaagtgaataacaagtctttgcttgccgtacacagatcactagtgagtagtagggtagggtgatatggtgtaggactggaagtaggagacccaaaaaagtaatttcacaaaattgaatccatccaatgtcagagttcagtgcttcacaaaatcatgcgtgaccatattaatttgggtaaatagc

SEQ ID NO: 200814 - DNA, 597 bp, Cannabis indica
taattacaatgtcgaaaacagataccaaagattcatttgcacatttgcttcactcgtgtaactgaatgttcaaactttttgattataaaataattctgaaatttttcgaaaacaggtcgaagaatatctaatataattacagtcatataagaaaattttaattataatttctctaaatgctaaaagtagagatatccctaccggtaggatctgattgctatgtttcaactttgatcatgttcttcaggactggtgtattgtatggattatctagaaaagaatatcgattggttagaagcaaaattggtacctctattgaaaggttggttattcggttaatttagttatttagttgggaattgtcgattaattattcttgttaatttgcagatcactatcttctttttgatttccctggccaagtagagttattttttctccatgccaatgccaagaatgttatcacgaaactcataaaaagcttaaaccttcgggtatgtatgattattttttttatttctagggcttcgaacaactttctagacttttgctcgttatctttaatgggagtttcgttggatgcagttgactgctatg

SEQ ID NO: 200815 - DNA, 704 bp, Cannabis indica
gtgtaaaaatctcaaaaaaaaatgtgcaacttttgatcatctatatcataaattctacattgatcataagtaagaacttccacatacattcactcaatgttccatctagcatcattaaagaatttgtagaatgttatgaccaaagagtagtaattagttggaaagctataaaagagttggttgttttatcatctatatcataaatatcaatcaaactattttgatttacatagatattatctacttacatattgtttcatcttccatcttaataaccttaaaaggtttccaaacacacaactttcttagaataaaaattacaaagaaaatacattataagaaagagaaaattgatgaaagtatagtggtggtgtgagtatatgttggtgggtatgttctttcaaaaattaattattttaatattttataaaaatttttggtataaatgaggtagttgagatgataaattttagaagaagtacattaccaaccacaagattcgttttttttttttgaaacgttaggggttagtctcatgagagaattaaaaaaaataaatagatgtatatattttatatcaattaaatatttataaagttaataaaaaattaaaaaaatgaaacaattaaggagagaataaataaaactaattaaagagattttagagctttttgtcatcgtcttatatttctcctttatatata

SEQ ID NO: 200816 - DNA, 917 bp, Cannabis indica
gtcgaaattttttttcagcacccattttaagctaatagatgtggacatgagtgctgaaaatcgatcctattgtcaatgacatgcatactgagtaaatgcctaaaattctcccacagtcagttctaagacattttttatgcctattaaattggtttttaacaaatgtcttgaactaaataaagaccttgatagcctcatctttgatttttaaaggatacactcatatatacctactataatcagccacaaagtaaatgtaaaaacaaaaattggcattggacatcacgggagttgggccctaaacatcagtatgtatgacatctaatgggtgtttggcacgaatgtgattagtggcaaaggataacgcatgagatttgctaaattgacaaccttcacaaaagttttctttagtcacttaaagaggattttttataaaaaaaggtttaagaagaagactgagtacactatgttagaaccaaacatatagaattggatgtacactttgttagagacaaagtcttgaaaacagagttggaagtgcgatatgtaccgtctcacgatcaaatagctgaccgctgcttgacgaagagcctcactcatcacatattttattttctaagtgacaaacttggagtggtaaagacccctcttaatttgacaaggagtgttagaaaataaatttatttccacattttgttctactgtattatagcgccgttggggttatggtcccaatacaattttattagtgaatagtgtcagaaatcgattagaatatattttttacattgcattttgtaaaatctttttcatgttgtgtgcaccctttaaaatattcttatatcaccacaaatgtgatataaatacaagcctctctagtgacggcttgatacctaaacttgacctagcttgcaact

SEQ ID NO: 200817 - DNA, 505 bp, Cannabis indica
catgtttgccttccgagggatctgactaatatggtaatattcaaaggttgatgccaatttcttgacctgagccaaatagttgaacatttttggctccttagcctcaaaatccccccaaacctgctagactattaattgagaaattgattagactagtactctaccagctcccatttctctaactaattttatcccatgaataaaggcatcatattcagcgtcgttgttggtagcccaaaatcccagctttattgattgttccagcatttccccttctggtgataagagtactattcctagcccgctacccctgatatttgatgacccatctactttcaacaaccaatcacttttatcggaatctccttcgtagggaatttgttctggcattatctcgaccaagaagtctgccaatgcctgtcctttaattgtaattcgggggaggtattgtatatcaaattcacttatttctactgcccatttcatcaacctcccagatatctct

SEQ ID NO: 200818 - DNA, 851 bp, Cannabis indica
aaatcaaacccattctccctttttctctcttcatattcgaccataagaaacctcaaggagaaaccaaacttttagaccaattcttcaacctttccaagatagattagcaagagaattagaaggttttgatagcgaggactctaggttagtctctcgtcttggttctaaaacgtaatataattttataattcaattaccattaaataaaatacaaccgcacgtgaagcgcaatatgttttctagttagtttaaatataggatacagtattgcacctattttaataaaatttagaataatttgaatactgtgaaaaaaatagagttcaaatattgaattatacaagtattagtctttttatatacgtacgtgttattgacttataattaaaactttctttttaaattattcaaaataattttttttttaaaaaaaataaataagagatattataatttttccatataccaaacaagatatataaaaactgctccatatttatagaaaatatagaggaggtggtttttgagagaagaatataataattaatataagcaaattaaggtagtatgaactcagatgtaattcaaaggttgaggaaaagcagttggtagttatttgactttttgttccaatataatttccatgttaatattagtgaactatgcatttcatgggcttattaccacccaattttcggcattaaataagtaagaggagggcacttgaatattgagaaatgctaaagggtaatagtggtgcttagcactctccctatgtgttaatatcgctattggtctaactaagtttctggtctcatataatttaatataatagcttttaagaagtatcg

SEQ ID NO: 200819 - DNA, 1589 bp, Cannabis indica
aataataataaaaaaatctaattcaaagacatacaaagacaataaatgagaactttaaatccagattgaaaattttttatactttatgagttactaggcgcttttggacttatttagttctataaatcgtctaaccaatctaattgtactatgtagtttgaaagactccaaaaaaaataatcggttataatttttttttaaggaaaatttaagtacaaaaacattaacttaaactacactaaaactcctaactacaacaacttattttctcacaacataaaatttattacaattatattactataacaacacataaaatatgataatgaattatttaacaagagaattgctaaaaaaacactattggtgcctagcacctttcttagtgtcatattgttattagtgtaattaagtaccgactcctatataacttaaaaaaaaaatatcgttaaccaattatgggacactacctatagaaggtactggacactactggtgcccaatacgagatgctaaaaggcgatatcgctattggtccaactaagtatcaggtcatatatagtttaatataatgacttttatgaagtatcgccaaccaatgacaaagcaatatgtctactaattcaacaaaaccccatttttagggttttatgaccaaatacataacaaaaaaataataaaaaaatcccaattcaaagacacacaaagagacaaagctaaattgtttttattttatttatttattattattattatttatatatacacatatagatacacaatccaatgctactctatgctatatattactctcactcactcattcacatgagaaaagagaagaagaagaagaagaagagagagagagagaaaaagagaaagaaagaaagagtcttcaatggtgagattttgttgccattgtgaaatgccatctgttttagcttagagcactactcgctcatattgaaatctctatacaccttctttatcgctttgagtggtttcggtttcggtgagttgttatggtttgttttctctaagctcagctcagctcagctcagctcatctaatcttttttctctagcttggcgaaaccctaatttcttatcaattattgtttgattgattggtttgatcttctttttgcatgttcatcgaagaaatgcagtggaaatgtgagtttgattattgttcgttgagtgggttttgataatttttgattgaaaatttttgtgggtttttgtttattgagttgtttatatgatttaaaatgattaaggatcattgcatggctgggtaatatgtatctaggaattgtttggagaaattcatgattttctcttttcttagtttcctcggtttaatcaccagtgtttgttgaggagaaatgcctaattgtgtattttgatctatattttcttcaatctttgggagcacaatgtagatttttctttggtttctctcaataaatttgggatttctcaagggaaatttatttacaatagtctaggtttaattgttgttctactttgtaccccatctttctgttgtattgataaagctaagttttggtagatggaaatttggat

SEQ ID NO: 200820 - DNA, 1322 bp, Cannabis indica
gatgttttgtctacaggaagatatatcttaaatctctatcttgaaaatttactagatcaatcttgacatctgcttttgactatcagcaacttatgttctgatgcatatttttatcatatgcaattccatcatctgtagcatatattttatctttctaattagttactatctcccatgtacagagaaaaataaaacagtagtaaaatgcatattgagaagtttgtaatttgaataactaaagttagtgtactaaaatatggttttggtttggtgtagtgtagtgtacatgaaagcatttgtttgtgtggtagtagtgaccccttaccaaataaattgctccattcattcatgcatgtgattgggaacctcactcattgttttgagcatttacatttgcatcccaccaaaccatctaaacttaacaccaatccacttgtttgtaacctcatcttgggccaaaaaagacacttacctttagaaaggtacacacgtctttggaggaatttcaagtcccaacaacaactataggaaaccaacccttaataataataataatataatatgcttttttggtattagaatataccatttagttaatagcacattattactttcttaacagttaacagttagggaattaatcacacctcctatttcggttgccaaagctccgagtgaacctgaaatagctcatgaacttggatctaccaaataataagaatgcatttgagattcaatcaccgataaaatgttaaaatagcaaaggtaattactttatgcaaaagggaggataattaatcttttggttagaaattttacctaatatttataagaaaattactgggtataattaacaatcatagagcaggttgggggattgaattggattgattatgattgttataaacatgtttactctaaagggaacattgctcccactagatgaggaagtaggcctgaatcccatacaatcattacacgtgtcaatagcttcataaatatgcattattatgaaccttctccttctcatgatacggaggacagcgtagtttccatggggaagcatgtacgggttcactatctctgtgggcccccaatacagcgaaagatttgggcctactcgtaattgaactggataactcaaaattacgaatatgccatcattggcccattgtcttgagattataccatttatgatttatttagtgagaaaaaaacaaaaatgttttaagtaaatttatttttaactcaaggaaggcgtaaaatagtatcatgcgccgggcatgacagccggccacgtgctccgagcaatgttcacgtgc

SEQ ID NO: 200821 - DNA, 887 bp, Cannabis indica
gatcttagtctcctcttagccttcgatcttcctctcaaaaaaataaaaaaaaaaaaaaaagtccaacaaataacaatgattcctattgcacgaaataacccaaacgtattcgcaaaattattgaatttcctatagacgcacacaagaaaaacaaaacatttcatatttgtctagtgtcccgttatacaaaaatctttactttatgaatcgagctataagacaccaacatgtttattaaaactattatgtattatgaagtaacacattagttaacaatttttcaaaatatttattaaaataaaataaataaaatttagtattaaattacaccaatattaatatatatatattttatagtacttatgagtgttaatttatattaaatgtcagttccaatataggaactaaaactaaagattttttttatttttacatttcaaaacttagttttttttttttttttttttttattttttttttttgttacagaattacatatagtattgcaactaacagagcaacctaaattgtaactaaaatctccataacaactcgtctaaaaatcacatgagaaactcaaaccgtaaatttaaaaaacaaaaattaaaaaataatttataaagtaattccctaacaaaatatcaattataatatataaaatattatggatatggtgacatcactcctttgtttggttttgtcgattaattccatacatatggactgaatggaaactttttttttactttggagaaaaagaagataacagaaacaaaagtaccactgtataaaaacaatatgaatatatagatatttttgttctgtaaaatgtacctaaacaagaggaaaaatgaaaactgttctgataaaagtggaaaagagaagga

SEQ ID NO: 200822 - DNA, 651 bp, Cannabis indica
taatatttttaataattattaatatcttttttctcaattgcaataacttgaagatccccatgatgaagctatcacccatagtagtgcggagactttttgtggtcacactattggtatatttatttctaaacttaattatcaagataatattatatttattgtattttttttcttatttattttagtttagagaattataattaatgtattgtcaaataaataaataaataaatgcaggcaagtgtattgttggtacttgtgggtttactattaccatgttggtatgagatggttgaaggtttaaaagatgatataaattcaagttccaacaatttacattcaggactccaatcccaaattgagaggattacaaggatttttagtcaaacaacttcttctacacctaatttggctacatttctcaataacacactcattaagtctaatatctcattttcggacattgagaataaggttagtatttatatataaattttcatctaattcatacttattttattaagaatagtgatatgtacacttaaaatatgcatcaaaacttaatctagtgatatgaacaatatgacactaatttttaaaacaacagtttcaatttaaataaatataactggttaaaataattgttacatc

SEQ ID NO: 200823 - DNA, 973 bp, Cannabis indica
tcaccaggaatgcaaaaccaagatggggccaatagatatccacaacaatttagaccaaaatgagaccacctgaaactaaaaaactcagggcatagaaaaattcaaaaagaaacagagagggagagagatgagaaaacaccttcttgctcgcccaaaccaaacttcagcaaaccccaaaatctcaaaagccgctcacagtagctgaaactccaaggagagggcaacaagtggaagtacaaaaagactcgacaccgacgacacccagagagcggctcagacaaccaggaaaaggcattcgacgaacccagcagaggaccaagcgagactaggcgatatcaacgaggaaagatgagcgagcggggatgatggctagggacgctggaaggttcggggatttggacggccagtcaagcagcggcttggaacctcaagaggaggttcagaggttacctccgaggatttcaaaatctctcattatacggaagaaaaaggacaaaatcgtaagtctttgaattcaacaatctcaatagttcaggagaaatttttaacggtctaagaaatttgggaggtataatttagtacatgtaaaaattcagaaggcaaaaatcctaattaacttttattagaatgatattttttactattttaatagaataattatgtcatctatgcgataaaatgttatgctaatatacatcaaaaaaagtattaatcttttctattcatattaaattttatattccattcttattctattttttatttctaatctcaattattttttccttttatttttattaccccaaaccaaacaaattacctaaaatttaaatttgaaggagaaaccaacgtttcttcaaatttgaaggagaaaggaaaaagtgttataaaatcatcatggatttataggtcatctgcaacaataagataaccaacaaagagatgagttgattatgattaaaataaaaaaaaa

SEQ ID NO: 200824 - DNA, 921 bp, Cannabis indica
gattttgtccaaagcttttcgatacaccggagatggaccttgctaagccttatgggatcttcatgaaagcactatatcgaaaacagtctaagttaattgaggctcaatggctccagtctggcattgatgaaggggaatgtagtggtcaacctcaagcaggtttcaatggtggtcgatcggcagtggttgaaatgacggtgaatcaaaggaaatctctggcggttaatgccacgagttttcaggagactatccataaagattacagattaagtggcgggacttaaggggaaaattaaaatttaattgatttgaataataatgctgtatatagtgttgaactggacttaattcaaaggagtgaagctgaggtggcaaatgaggggaataatttgggtcaaggaattagaataactgacacaaagaggagatgtacagctgggagtacgggaatgggttcagttgtggaccttgaagatgatgtggttgaaaagacgttccatcatgattgcatggaacatgacattagtttgatgaatattgaaagtgagtcacgggcccaaattaaggtaagattggagcttcaaaaggctagcaacactgtgggacaaaaaaacttgtatttggcgggttctgcgggtcaaacttgcctttcccaatgagtttgttgagttggaactaccggggtattgggctttctcaaaatgttcagttcctaaaggatgtggtacatcaaaatatgcctatttttgtgtttttgtgtgagaatttttataagaaaaataagatggagataattatgagataaatgggttttgaaggaatgtttgttgtcgaaccagatggacatagtggcggtttagcattattttggaaagaaaaggatcaaccaaagctcagtggtttttctaaaaaccatattga

SEQ ID NO: 200825 - DNA, 615 bp, Cannabis indica
acatatagaacttatcatatacattactcactaagacaatatacattaaacatacacatcttgagacacataatgattttattcaagtgctagaaaatgagggcatttaaggttggttggtaagaaatgagaaagaaaagcatgagaagtaaaaaggccaatccccaaggagagccaccagctctatgtatggcactaggctcagaccctggaataggaatactaagctccctacctgaggacaaccaatgaacaacaattaccaaaaccaaaggacaaatcactaacaccctttgaattagctccgaggcggtcgccatgatcgcgtcgtaaacaacataaccaacaattccacacacaactattgtggctgccattacaaagtaccattgatctgagagtgtgaaattgcttggtgatgatgaatatctttgagctgaaaaatgagccattgggaaagtttggttagtttttggtgagtttgttttttcaagagtgaaataataaatggggctagagaatagagagatatagtacataataatgtcatctctttttttgttctttctctagtggagtcatgcaatagagtattgttattaaagagtagtgtct

SEQ ID NO: 200826 - DNA, 1213 bp, Cannabis indica
taatagagttttggtgatgtattttgaatgatagaatagagaaactgatgagagtactctaacaattctactttttattttagagatagagcattctcataaagaaccgtactaaaaacatgctatagcaaatactctaaacttcttcatcattttaaagtttttttaaaacacactattattcattgctccaaacatattttattaattgttttgagtaatattaataattatttttgtatagagatatgtgtatacattaatattatatatttgaaatgaataaaataattaaaaaaaaaagattttggtaatatattttaaagaaactagtgtatgatgtaatgtaagagtgtgttgtaaatcagagaaagtaaaattttagtgatgtagtttaaaagataaagtataaaaattgttaggagtgctctagtattgtgagagaaatgttaaaagcataaatggaacattaaatgtgcattttgctaagttaacattcttgtttactctctaaatctgctctgatagggtttagccatggccgggagacaaagggtcgaagaaaaaactctactaagattcaagtgactaagaggggggccaaaaagaaaagaccaagttcttatgatctaattaaaaaagaaaatagattgagttaatcaggattgatgaactacaatgtttggatttagaacaagaagcaaaggatcactctgttctttgcgaagagttgctacgtgcgatagttacgaaactggtaatagacgacgatggagttggaattgttctttctctgagatcatctgagaggaaaattatacatagatctgggattaaagcaacatttgcgaaataatgggggcagtggcaagtgccatgaataaaataggtaagagtcctaaatcttcaaaatgactctctattcatcattgaaagatcatttggagcttggtttcaaaatggatgcaaggattgattaggatctgaggcttcgatggtaggcatgatgtgttggtcaatatggaggcatagaaacgatttagcgtagaataaaaaaattcccactactgctagtgcgtgtaatgttgcgttagcatctcttcttccattgctactgttcggtgtagtgatggtgttcgagcagcggtagtccaaacctaatgatggatgaatcaaagtaaatgttgacaagactacatttaaaaatggttgc

SEQ ID NO: 200827 - DNA, 2169 bp, Cannabis indica
tattacaaaaaaaaaatacttaaatcaaatacaaatctaaaataaaacaaataaaatatacatgaataaaaacatacatttcacaaaagaaattttgtgtacaccttctccaacctactaaaattccttttgcctaatctgaagataacaaaaataaaatatttttaataatagaaataaaataaaaatataagaaaaatattataacaaaatatatatatataaactatgtacattatatatattgtatatatacacagaacaaatatatacatatatacatagataaaaaaaaatatatacattctatacatatgtatataatgtatatatatacacaaacttaaacatgtatacacaaaactaaaatatatagatctatatataatacacaatatatatttaaaacttaaaaataatatatatccctaaattttttcaaataatataaaatttgaaatataaaataaaaaaaaatacatacatgaaatgggttttggtggccaatatttggtggtggtggtggtgcgtgatggtggtagtgcgtcgtggttgtagtggtgcgtcgtggtggtgatgggtggtggtggtggtagggaaaatggctgagagggaaatgggaaaaaactgttaagagaataaaaatgggaaaaatggagaaagacgatcagttatttaatgttttttcattattattagtggcgggttctgccactaatattattcagaactgtaagggcgagtattttcttgcccactcattagcgacgggtattagcagcggaccctgccgctaatactattagcggcaggcaatagcagtggaccacccgctactaataatttttcaaaaaaataaaataaaaaacactattagaggcggctagtggggtctaccgcttatacttctattattagcggcgaatttggtccgctgcaaattgataaaattgttgtagtttcttaagattgagaatcaatttcttaatctcatcaatgtgttctctaacagacttatcctccatcatcttgaatgaatacgtagcttgtttgagatataacctattgatcaccaatgatttagtcatacagaaacttttaagtttcagtcaaatacccgtggctgtatctttttttggaacctttctcagaaccttatctccaaaattcaaaatgatcacacactatgagcctttggaagagtttctttcttgtcttttttagatatcagatcaggaagagacttctctccaaacagagcctcatacaactcttggtaacgaacaaatcttcatcctccatattctaaagtcatccgtactagtaaacttttctacatcgtatttagcggcaatcatgattataaacattgctctaataccagtttgttgtgcgaaaagaaaataatcaatgacttagatttagtataccgaaccaacaaacacgcaacacaatcaagaaataatatactaagagatcttaagaatcaaataatgaattaaagcagtatacagaaaagaatagcaccaaatttaaggaatttgagctctatgaaatgctctacatctcggttggaacggcaatagccatatctttattgatatcactgttaacaagggagaatcctcacaaactctgagagattacgagaaaggtttctctctctagtttagactctctctcaaccttacactatcgcgatttttactcttacaaattacaaaaatatattgatagctatttatagatttgtgttgttacctaaattagctctgaaactatgtggtatatttacatcgtattaaatgcttcaactcaacactagcaatagtattgcacgtcatcttgagaatgcacttttagtacaaacaatctagaaactttaatacggaaaagctattcagatacctacaagtgcttttcccagatgaacatccttgactgacaattagctatctgaaagacactacaattacggaagacaagttgcacgaagacccatccaaattggccataattttactaacaaagcttccagatgactaccaagctttctgtaacttcttcctgaagtaacacaacctcctgaatgaaaaagcatgtaattataatcatcaattaaaaaaaaaaactacaaacaataaagtaacagtatatgtaggtgcattc

SEQ ID NO: 200828 - DNA, 595 bp, Cannabis indica
tgaaatttatgagtcagaaagaactgtaggtcacacaggtaaagctctactgtttatctctaatttacacaatcatatttttcatatatccaagtttaaaaatgaacagaattcctaaaacaatactcgtacaaaaggattcatttgtcatatgtctcaagtcttcagactcattttattggctttatgaaaaataattgagagagtaattgatggagatggataaaaaagagactgcggaatattgttgttgttcttgtatattcactattatttaaacaatttgctttacttaatttttttttttttttttttttgtcagttactagccctgaagatacagctgagcagtgtaaagctctattcctagcttaaccatgagattgagctaaagctgttggttcttcaaatacgtgccatttgtgatttccgtgagaataaatatcaggcagaaatctaaaatgtgtaattttatatcattttcttgaaaagggaacaaaaattgtgttgattgagaacttgccattgtaattcttttagtatcttcataattattctaatgtatctgtttttatcttattgaataaagccattc

SEQ ID NO: 200829 - DNA, 1720 bp, Cannabis indica
tgagttttatggatgcgtattcatgttacaaccagctaaagatgcatcttccagattaggagcatacaagcttcatgatagacttaggcttgtattgttacaaagtcatgccctttaggttgaaaaatgtagaggccacatatcaaaggcttttgaaaaaaaaatattcaaagatctcatgagccataacatggaggtgtatgtggacaacatgcatgtcatattcaaaaaggctcaggggcatgtggaagacctagaagaatgcttcaaggtcctccgcaagtacaacatgaagctcaacgccctcaattgttcttttggtgtaggctcgtaaaaattacttggcttcatagtcaatgccaggggaatagaagcacacctagacaagatccaagctcttttggacatgaagtaacccataaccttgaaggaagtacaaagcttgacggaacgcattgctgcactaagaaaatttttatccaagtctacagacaagtatgtgcccttcttcaacattctcagaggcaacaaaaaattcaagtggacagaggaatgtgaaagagaattctaagagctgaaaatatctctacctcaaccacctgtgttgtcaaaatccctagataatgaagagttaggcgtgtatctagcagtcacagaacatgatatgagtgctgtcataaaaagagaagaagacagtgtacaagaccatgtatactacatcagcaaaagactaatgcttgatttgactaatagtgtaggggacatacattagtgatggacctcctaaagatgattttgttgcatcttattggtttaggaggcgatcaattcacttgtacaaggtaaagtgaatctcactatgaagcaaattgattaggaaacaattgctttattaatgatatcatcttaggtgctctccgttccagtaccttagtactggcactaaattcaagtgacagtcatagaaaactccaacatgtttgcccaagttctaacacttctatgatgatataaggtccctccctctctcatagggaatattcagtgttgctttcttggtcaataattttagaagatccataggacacatcttcaatgttgctttcttattcctgatcattgttggaaacaaaagaagaatcttcatcactaccccctctacttagtcgtcttgtgaagtaggggaggttcttcatcactactttcttgttgtagatcttcttgagaaataacagaggactcttcataatatctccctgcttgagttcatattgagaaatagcatagtagtccatttcagtggaggtattaggtgttgattcttcttcactttcctagtcaatgttagttccagactcatgaaagaaataagcagtgtaatcggttgcttcttgttgagaaactcttgaaaccatcttaacagcttcttcgagcttgatgaaactgttagctctgtctagaaactcttgaatagtgtatactgtcttgagtttcatgtctttctagaatagactcattactattattctagttgtcattgccatgaccttagagtcttcattaagtatctttgtctgccatgaccatcaactcagtttagaggttcgtcttcttgttgcatgatgtaaaccaaatcattgggattgattggtctatgccttgatggggagaatcagccatagaaggcttccttgagtatttcccaagaatagatagatcc

SEQ ID NO: 200830 - DNA, 770 bp, Cannabis indica
actccatgctttagctgtgttgctattcgtgtttttgatgaatgctatcactctttgccctgtgttaatggaggcagaggttttacctgtacatgttgattggttgtagtatgttggacgtggccttgctatttctaatttgatgtgttgatgattttctttgttggtcagactgctcaggtcaattttgctgttggatctcatgtctggttagaggatcctgaggtagcgtggattgatggagaagttgtggaagttaatgctgaagggattaaaataaattctacttcagggaaaactgtgagtgctgcttttgagcctttcaaattatattatcatgttattggttatgaagttatcttgttcctacaaactttcatgggagaaaattcagaatgttttttatgacatataatggctacttttcttatcataggtaagtatgtataattttatatttttgctgtagattgttgcaaaagcatccaatgtctttccaaaggatccagaattccctccatgcggtgtagatgacatgacaaggctggcttacctgcatgaaccaggggttctttataatttaaaatgtcgatatgacatgaatgaaatatatgtgagtactgtgatttttgtccccttttaccgctttgattgtttgcgagttcattttcaattatattattgttttctataggcgacacgattaactttctttctaaaattgcatgcccttttctatacgaaactaaactatgtaatggtgtttgcag

SEQ ID NO: 200831 - DNA, 1089 bp, Cannabis indica
cattaaaatcactatatatgaagccttgttatcgtgtacattgctcgcgctactggccctcctacaattcaatcctagctccgcccctgttgccacactacattcaaagtgaatatcattgtatattttacttgtaatagtcactatcattcccaataagtttgatctgtatacaaaataaattaaacattgagttagctactcacttttatacataagcaaacttgtaaaagtaactaatcaaagtcaacgttattatagtatcctcacttgtagtattatcactatcatttttattaagtttactctacatgtaaaataaattaatcaaataattaattaagtactattcacttgtatacaaatattgtagtgaagaaaatattaaaaattgataaatgatcacaaaaaatagagatataaaaaagataattaaatattaatctataaaaaaattctaactactattttaaatcgttgttatcacagtatcatacttatagtcgtcataacattcaaaataggtgtcatcaccaaataaaaaaaaatataccaaataattattaccaaatattgaataaagctattttagagcgcgtcataaagaaatatacataggattttcttattttgaaattttagatgttagatatttttaaaaatatatatatattctatgtattctcaaaataaaaaataatatatatcgagaaacttctcacaaaaaaaaaaatgtatatatatataatatctctacatgcacttatatataattggttctctctccactcatcatcttattagatgcattcaaaaatgtaaaaaaaaaaaaattgaaaatcaagtagggagcaaaaaagaaaagttataaattaagaatatattaatatatgattatttgactttttgcatgaataagatagtagtgttatattagtggaaaatctatacttacaatcttaaaaaaaccaaggacaaaaggacttacttctctttaccgaggaaataaaaaaaaaaagatatcatatatagttgttgttgctgggctttgtgccctaaataaaactctatttcaatgtaatcttttat

SEQ ID NO: 200832 - DNA, 588 bp, Cannabis indica
acgctcgctccaactgctgaagtttggaggtcacgaggttcccatcccattaagaatggccaccaccataacaatctagcttacctaaagaaccaagcatataatccctcccgatagatatcatattactattactacaatttagtaatgaattttatatttgattttaatttaaatatataaaattagatatttatttattaccaataacagagcatgtaggacaccctaaaatgcactttagcatttttccttaaattttagatgtaatgtgtatgtgttgaatgtaactcttctaggttttttcgatggtattaactattatattatattattaaacatttgtgctttgttaactttctatgtaacttgctacatctcatagtgaagaacttcaaataaaacttattgtatcttaaaaaaaaaaactccaacgtctacccattgtatatatcaaataacacatgagaataaaagtggcaaaatttttttaatccccacaagttccttttaagttgaaattatattttatttttacactgtgtgtgcaaaaatagggttttttttttttttagtttttaaaaactt

SEQ ID NO: 200833 - DNA, 838 bp, Cannabis indica
gaaattccaaccaatgttcatcccgaacatgaggaagtttaaccagttttccacgcattaatggttgcgtaatgtcaagtcgcacacgcacccgaagaaaagaaccccatccttcatgaagcgagtcctcatgaacgtcaacatattcaccaatccattcatcgatcttagaggccaaggcacgggacttgctaaggaagggaagtcgatgaacttggacccacatctgaactttgttcaaatcctccttagtgacattatgtagaacaattggagagtgcaaaacaatgagatagttgttgtagtgccatggctctcctaccaacagtctaagcttatcacctgcacaaccaagagtaagaagataaagatcagaatgcatctcagtaacaatgacttcaaaccgacatttttttgaccaaaattctcccattctagccatgaaggtttttggattaaaagcattggagagacatcgggcaacaggaaaaattgtgggttagtgtttggtgtttgcagatcagattcagtaaggacatgagtagccctttcctcagacaagacaattttggaagacatatcaccaatgattgattccataaacagaagaagatcagacagagaataacaaaaacgaggtatagtgtaaaaatgctttgatcgaaagaataaatagatggtaaaaaccagtagttatgctgaaaaaactgggaatcatggtgagaaaatggtggtagaggaggatgaagatgggagatcatggcaaaaaaccagaaaagagatgaggaaacagggaaaacggttgaataactgctacagagcaaaaaaaccccactcg

SEQ ID NO: 200834 - DNA, 1922 bp, Cannabis indica
ctctttaacactaaatcaataaatttaagacaaatgaaacaatctaaacaattttatttttcactttgactcaattcgataaatgcctaaacctattcttgacccagatcttccatactcaaactgcgcaaaaactattcaaaccacagagagaaaatgtaaaataaaaaatacccatttaccccaattgataattatacaaacccttttccgatcaaaatcaaaatattaaacagaaaaccagaaaagggggtacaaagtccatggacaaagaagaatattcaaacaaataagtgtgagcatataaactgtaatacaaagagaactttaaaagaagagcttaatagaaagagaaaatggcgaacctgtaagacgagagagctcagagctacgatgaagaaaggttgaagagagagtgtagaatgaaggagtaaagagagagaagggtatcgtgaggaaggggaaaagaaaactaaaaataaataaaggaattaaaatctgagaaatattaaaaaattaaaattttgaaagacataatagtccttcatgtttacaaaccaaacgacaattttataggggtatatacggaaagctaaattctttgttttttgggtaaataccattttagaccatgtattttgcgaaagttactgtttggaccatctgttttattaaatgaaaaaatggaccttgtattttccaaaaggttaattaggatttttacctcctgaactttgatatgtacaaaatcatgccccgtgaacttttaaggtcgttaaaattgcccctgaactattgagattgttggatttaaggatttttgtctaatttcattcaattttactatttcagtgattgtttatatactaagtcatgctcccagactttgaaatctacaaaatcatgcccctcgaactctgacatctactaaatcatggtccttagactttcattcatattagacttttctactaaaattagaaaaaaagtctttaaatctaacaatctcaatagttcagagaagatttttaacaacattaatagttcaaagtgcatgatttggtaatgtcaaagttaggggtgtaaaaattctaattagccttttcaaaatgataaaaataggaccctgagtataattttcgacaactttttttaatacaaccaacttaaagacaattactaacacgaacatatacagaaaatataaattttatcgtagtacttttaaatcggattattataaaattttattttgaaaaaaaatcaatttaagatcctaatagtaccattttaaaaaaaaatataagatctattttatcatttaacaaaacagaatgtcaaattgataacttttgcaaaatattaggttcaaattggtatttattgttattttcttttggcaagtttcttttctctttttaatttggagaaacgacattgatatctgtataatacttatgtgtcaaaattgtattaaaactctcaagaagaaaatatggtggtggaaacaaaaggctgcagctcggcagaaattggagttttctgcgcagagaaaaataaaaagaaaaagttttggctttgcatcattgcatttgcatgtctgtaaaatcccaaaactgaagtcttttgttatctcaaaatcaacttgcttcaagtgttgaggtaattcttagcttcttcttatttttattttcttcatgaaataaagtgattcctggcttgctcttatgaaggattttaaaaaattttggatttttttttctttctgttttttgttacttgaaaatacaataaagtgaaattgacactgaattttcctaaaattgtatacacatctatgcaaatggaagatagaataaattgtttatttgtatttggtaattatagtcatgcattctatgaaaagcaatatattttttttt

SEQ ID NO: 200835 - DNA, 864 bp, Cannabis indica
cgtgatcaatattgaaataataacttgttgaacaaatgctttttagatatttaaatgagcgtgcaataagattaaatgaagattttaacattatcttaaattatttaatttttatttttttaaaaaaaataacaaaattatggtaaatcacctacaactgcataaattatgtagtgtatatactataacttatctatatatactaaaaataactataatttgtatttaaaaacattcacaaaaaatctgttataaagtttgctatattacataaattacattgttatgtctatataagaaatttctttatggaaaaaaataaaattagattaattgcttttcactaatttagtactagattaatatatataaaagtgattaatcatcaataatttccactataccttgatctctattaattaaaatcttaatatctaacgtatttataaaagtgatttcttaatgagacaaaacacacttggtagttgtacaaagacaaaaacatattaatcaatgaaggataatgactagtgctagctttaatattgttttgaggggtccatttctaaagtaaaaggtttttggtttgtggaatagatttttgtgggtcactttcataattaagcttatttagtaattatatatatattgccttttattttcttagtttggtttgtaatactaagacaagaacactttgccaagtggcactaatttggtccaaaaagttggatataactaaagggagtggcattatagttattatcaagccttgaaagactaaactgaattaatgtaagcttttttttttttcaaattcagaaaagggtttttttgatagagtaaatatatagactaccatgc

SEQ ID NO: 200836 - DNA, 3771 bp, Cannabis indica
tgaagaagctaaagggaacagttattagagaacgtaactgaagtattagtggtcataccgcacaaccgaaaaatagcaactggacaaacaccatttgctatggcctatggttatgaagctatgtttcccatagaattagaacctctttcccatgcatagaagattgacctatgatcaagaagctaatcatgctctcctagtagaatcacttgacaaaattgaagaaaaacgagcctcaacacacctaaagttagtagcccatcaacaaaaggtggctcagtacttcaacaagcaagtgaaggcaaggaaattttatgtgggagatatggtcctcagaagagtattcctgaacacaaaagacaacatggctggtgtgctcggaccaaactgggaaggaccatatcaagtgctcgaagttctagaattaagggcatacaaacttgggcggtatgacaaaaatatgaagctcgttctagtaccaaggtattggaatggggaatacttagaaaagtattatcagtaaatgtaccaggtcggatgaccactttaagtacataaagcaaaaaattttaagtagatggccttctggacggatcccacccaaaggtttggataaaataattaagtactcaggtcggatgaccacctttaaaagtacgatttcttttcataagtgcaattattttatgtttaaattcagctaaagatcatattagatcatgtaatatctttatgaatgtaagttacaacggcaacaagactgttctgacctagaaatgaataaagatgtctatttaaattctaattgtatcaattgttttagcaagttataaatttaccaataaatgcgtaaaaatgtctgctcgacccaaagagccaaacagacgaaaaccctacttgtgaaatgcaagtgacaaagagtgataagtttgctcggtcacttggggggcaactatacccttacaaagcattggcaaaggtaaataacaagctcaataaataaataaacataacaatttgaacgaataattatcaaaacaaggtgaagtattcattgaaaaagataacaaagcacggtaaacccagaattaaaggctgcccgatcagctagttgtctgaaaatgaaatgaaatataacccaagtttaaaaactgcttggccggttatttttgtctataataaaggcccatgggccgaacaaataaaaaaagagaaaaatgtttcaaatggcaggggtctcgggctcctagtacgggttagctcggtctaaagtggctggaggcacgtcactctggtcagcaggggtcttagtgctctggtcgattggaactgtagaattggctgccttaaggtttctttggctacctgacccgcacagtaattaagatatgcctctttgaaatctccgaggtaatcaaaattgcttgaggggttggccttcaaaaattcatagaagacctccaaggcaacagtttctaggctttccacttccttcgagagctcttcctccctggtctgcctagacttgatgtcttctatcaactttgaaagaagagtgtgcagactctccctctcgtctttgagtgtattgaccttcttggataaggcatcattgtttgcctcgatctgggcggttgatggtatctcttaaatctcctttgttagctcatcgacccggttgttggcaacagggagcttcttattcacctttccgagctcattcctcacgtcttgaaccttcttgttggccgtatccacctccctctacaagttgttggtggtggcaaggttcttcgcaattgtggattttaatcgcagtaggcgtaggccatctgtagattgacctgcacggaaaagagttaattcatgcattggtagaaagataagataaaaataaagaagaaaatatttacccgagttgcctccttcaagactccacccatcaccatctctaaggataactcattttctgccccagacagttgatcgctcacctcgggaagtgatcgatcaaggtaatattggagcatgtccttgcccttcttggcctccaagctcagcaccacggcagttgaggaggtcttggtcagaacagatccatccaagctcgccctttttgagctctttgacttggataccttctggggtggagaatccacagcaggcaccaccttagagaggtcgatcacttctccggccggtaccttctctttggacagaaccttgttgcctcgggatcgtttgggcgagggagtctggcccaaactgtcactagtcctcttcttaagagcttgaagtactttttgagacatgattgcatataaacaaaataagaaagttaaagcaagcataatggaaagcatgtcatggaaaaaataaatacaagttaaaaataccatgcacgtgggcaggacattttcccgaacaagtaaggatggagcctcatcatccgaagagtcttcttattcctgctccgtcaggatggcttttccttttccctccactagggcagatggccgattaggtctatcaggttctctattcctgatagcacgctcaactggtgcctagtcacccggaggaaccttcttcctctttttgctcggtctcttctgcttggtcactccgacctggttaggatttaccttcttcttcttcacaggccttggcacaaaatcttctgtgaagagtttgtacttgacataattggcctcagtggccaggagagtaatgtttcgaacagcgtccagtagttgaataattctttgtgccctctccctgtgccccaatgtgaagggagagcggcagtacaagggaatctgctggaactgagtgtggacggtgtccattccttggatgaagtagtactcatccatgaagttccatatctttctcacctcggagtctacggtgcccatcaaccacttctcctcgatctgagaaaagtagagatagctcgacctgctttatttaggagttgattttagatcaaagaaccagttggtgtcatgcggggatggctcgccccatccttgtgaagcgtagagaatgaacagggcggataaatacttgatgcattttggggtaaattgggtcagacagagatgatagtaatctgcaattctcttgaagtacggaagcaagggtaacatagcaccctgcttagtgtgagcacccgaccaagcacagtaatgctcccttggactggtcgccaactggtttggggagggaaggagcatttgacatcccccaagtaaccatccttttgcaaattcttcatctttaccctagttactatggatggaggagaaccccccaacctcctagtgcgccttctcttctctaaagaacggccttggtgtattcctcagtgacatagtcttcaccgacctcagacacaagttttccatcttcattgaagccaccaaagggcaacctccgagttgcaccttcctcgtgagcttcagaaggagtatcaggacgaaccacaccctgatcctccatctcttagacttcagtgtccccaacaatgtctttctcctcaagagtaggccaggcctgttccgcactctacatggtggcaagccgagctacgtgtgggttaaataaagaagatttttgcacggcttcctaggttcgttccatcatcctattcctagacggagcctgattggtatgtccggcgatggttacggcgaatgtagcaatgggtgtacctgcagcaacaagatttggatgacctacggacaaggtatcagtggtatctggtca

SEQ ID NO: 200837 - DNA, 1023 bp, Cannabis indica
aaaagtaataagaagaagaaaactttattatgggcattcattcaatattatcttatctctctttttttttttcttttcctttatttctcactcactcacgggagtgatcactgatcatgatgatgatcctttgatatatagatagatatatcatgtatatgatcaactacacctattaaagtgtcacacctatacttgtcacttttaacaaataaacccatcatgcacatattaccattataatatcattcaatatatggagatcatatatatcaactaatttttttttttcttttttgttaatttgttttaatgcaaagcctaatatttgggcaattacaatgtgttgaatgaatgaccatgatagagtctggcagtgggagtggtaccctctaagaagctttagagagtagggtcatactcaatttatatatataaatgtgtatatataatatatatgtaccccaccatttttatgatgcatgcttatatatattatgctttctctatacattcttgtgggtgtcaattgccttatcatttcttgtgtgggcctcttactttcatcattattcaatatgaagatatgtcattccaaattcttctttcactctattctatagatacatattcaaataccattatatgacttgaatatacattatgtattggtggttgattatataagctcttctttatagcttaatttggctacattagggtgtgtttggattgattcgattataatatggaaaaatatcatgtatatcatcaaacattttattcaaacaaccaaacaagtactcttattggatttatgcttatgattaataatgttccatatggcttttgaatattttatttcgaaaaagtagtcttttgatccctgtgatctatcactttctgggaataaaacaccacactagctaagccatatccattgaattaattatgttcaatttttctttttcttttcatttaaatacagataagaattatcacatatgcatttgggtgattgat

SEQ ID NO: 200838 - DNA, 1141 bp, Cannabis indica
ttgtttgttgagttttggtccttacattggaccaaaacttatgtaaacacttgccataactgaagctggattttcaagaagtacgggtagccgaaacacagatatgttttaaaagcatctcttattcagtttctattattgcctccccttgtaattttgaggtgaggactaaggagtgcactgaggagattctctttcgtatttttgtattttttttttttttttttttttgcattctcttcatagttgatcgacaagtgttaagtttttagattgattcatttgtatctaataattagataatgtcatcatattagagactctatagattatctatttataaatgcaaatgctgtaaactcatagccaacgggccattttacgggtcacgctctttaaacgccctaagaagcgtaactcatcggtttcaatccaataaggggcttcatcttttacattaaactccctgtcttagtcttcatttttcattatataggctttacaattgttgaaggatatggtggtacaaaagaagcctagtttcaaagacagatggagtttgaatgttttttctcagttgatgccattggtagatagaaacagtagcttgactttattgttgctgtaaaaattgaagcaacgagagagtagagatttaaaattcactttgagagttaatgtgatgacttaaataatgtggctagtcgtgatgacagaagtggatttgtcccttatccacattggctccttgaaggctttcatccgacttgtacgattgtgagttgctcattttaaacagtcacttatactttttaaatattgtcttcgtaaattactctactaaatattacaaatatggccttctaatatatttgagaataatatctatcctagatagatgtgtcatctgtttgtggtattctcccaatcgaatgaattgggccaagtatattgaaagcccatttagagatttgcatgtttatggcagaccctactccaatcgacacgatgatacagaaattcgctgaagatgagaattaaagagaaactcgtgctgtttcttcacttgtaccctgacgaccccctggacttgtgtctaggttgaggtggccaccaggccccaacagcaactcgagttgaa

SEQ ID NO: 200839 - DNA, 796 bp, Cannabis indica
caaatttccctatataaatgagaggcttattaacttacttgcatgaggttgatttgcagctgtcggtggtgtgaagtgggccactctttcaaacaataccttcctcccaactccagcctgtactctcacttaaacatcgatcttcttccccctacaatccccttcctacacacatcatccaccgtccattcaccactaacttgctcgatcattaatcctgacacgtgcgacgctataacttcacacgaacccgaaaaagacagctcgtctaacacaacacagattcccccattagtagtcttcttcttcctctggttctttgagtctctcatcaattcattcattcttcaaaagaatactccaaaatcagtcaaaaccctaataccaatttgatccgacagttcttcaatctcatcttcctggtacgcagaaccaactcttttttctttttctcgtcttctcctgatttgttttactaactttaacttttatttttgggggttcgaggtaggttaagggagaaaatggggatcaaacggggagtttttgtgatacttgggctgctaatgatggccaatctggctatggcagctgatggagacgatgaaaaaattctgacgaaaacggtgaaagggaagaagctttgcacgcaaggttgggagtgtcgggtgtggtcaacttattgttgtaatgagaccatttcaaagattttccaggtttaccagtttgaagatcttttctcaaagaggaacacgccggtggctaaagccgtcggattctgggactaccagtcctt

SEQ ID NO: 200840 - DNA, 1433 bp, Cannabis indica
tgttagaagaatataaagtttttgaaatttttgtcgtttaccatctaaagagttattttgatagattctttatttgtttcagaatttagaataatattttagtttatttttgcgatcgcatatttaaaattttttaaaattttacaagtggtcttaaataactataacgtacgcaatcataatttttttttgacttaaaagctcttttatatgtcaaaacagatagagagtctatcgaaacactcctttaaaagagtgtactgtagacttatccaaaaaattttaagatttggaataaaattaatttgagcaaaattaaatttaacatatcattatattttattttgtaaaatacaagatccaaattgttcatctttcttctccaatgggtgttgccggccaaatctgggctagtgactctcgggggctttgcttcttaccattttcaagcgaaaggtggaggtctatctgttgggtctcagtgttggaaggttttttttggtcatcaaaccctaaattttggggctggatccatggcacctgagtttttcaagcaagcggtcactgacctgagtggctaggcatctcttttgagaggtctcatgcctctagtttggggttgcaaatggctctgtccccgtgagttgtagggtcgcgatggtggtgggtttctcttggttctctctctttcaatttcggggtgcgttggccctttttaagtatgaacttggactatggagttgtgtttctcttccattctttttttcaaatctcggttgtgcccgtgggtttctattcaagcatcctggctccgatgtgtaatggctcgtagttagtttttagagtgttgtagacataaaggagggaacttgagttttacccaaagggatgtgcttccattgtcctagcaccttcaccgtttagaaccacaacgagtgactaagtgtgaactattctcgtcgaaagatggcagtgctcctctacttttgttctgctcgttttgggcttctgtgttgcttcctttacattaggtttgtttgtttggtttttttgttttttttttaatttttgtctttttagttttttttttttttttttttaacttctttctaatattgtgcactttatgtttttaatggcgttggtgttaaattatttttagggagtttgtctctccagatgctcttgtgtgagctttgagcttattagtcattacaaatcggagtgagtggccgagagttgtcatcaagattgtggtttttccactagatttgtaggacgcttgctctttgatcgaatgaagttttacaatttaaaaaaaaaaaggtaaataccattttggactctgtgttttgcaaaagttacatattggaccttgtgttttgttaaatgacaaaatggaccctgtattttctaaaaatgtaaaaatagga

SEQ ID NO: 200841 - DNA, 1610 bp, Cannabis indica
ttttgatttaacttttatttgttgaagtgtaattttgaacttggaattaagagattaatttctatgtatgaaagctaaatttgctataatgtgcttggttttagtgtcaaacatctattatacataattaattatgctctctttcacaatatagaggaagaaatattggaagtaaaatatttagattatgactaaattaggatgttcaactgagaaaggataacaattttccatctatttcataataattgttttttttttttttgtaatcaaggatggaatttattcaaaaacattcaaaagatacatattctttagagtgctagaagcatcatgctcactaaactcacaatctgacaaataacaagaccctctagcaacacaatgagcagtcttattagcagatcgtttaacaaaaatcaaagaaacattagaaaaagaaaaagcatctcacgacaatcccgagcgagtaatccaaactgagaaggcataagaatagagctattaatagcttgaaccaccaccaaagcatcagtttcaattacaacactagtccactgtttcttctttatccaactcaaggcttctttgatcccaattatttcagcaatttctgccttgactaagccaaaacaacttacagacaagaccgcaatcaaacaaccattggaatcacgagctacacaaccaacaccaaacttgttttccgcttcaaaaatagctccatcaacattcaaaaaacttaaaaagtttacaaagtacaatcatatttaggttaatcaaaagtcacaatacggctaaaacaaaaacttttgaatcctatgtgcatgtggagaaggaatacggctaatcacagtaccacttcaaagttcaaacccacccccacctttttctttcttttaagtaaattctatttagtacaatcgaacttattaataatatgattaattagcctcaaattgaattaatgaatcaaaattacattaaatgattaatgaaaattttgtagtacaccccgttaaggtagacttttatttattttgatattaaggagggattattagtcaacttttttttttttgttttttattacaattatattcatcaaatttatttagaactatttgtaaacttttaataaattctgaaggaccgaaataaagtttaaacaattacttaccgtacacgtatataaaaacaatcacacatgtaataaaatatttgaatcttgtttttcatcaatataaaatattctaaattttaaaaaaattgaccttaaataattacaacatacatacacaatcataaaaaacaaattgactaaagaattttttttttaatgttaaactagacagaggtctagtggaacctctttaagaggtatatatacttttacattattatttacttaggtggcgtttagttaggaggaatgaaaatatgaatatagaataagaatagaatggaataaaatttaaaatacataaaaaaaattgaataaaaaaaatcaattaatttttactctagttacattagaatagtctttccttcttttttaaaatgggaatagtcattccataaaaatggtagaaagaacattctattgaaat

SEQ ID NO: 200842 - DNA, 1776 bp, Cannabis indica
taagcaatattattatacatatgaattatattgaattgaatcattacttaaaacaaaattcggtagtaagacaaatttccttattattatatagggaaacagttgtaactttccaaaaaaactgaccatatcctttttattaccataaaacatttaggataatactttcctaatcaaattagataacaaacattacataataatttgactttccaaaaaaagattcattaatcttattcagcccattaatattccaccacctttgattacaggatccttgtgatttcaattcttcaattaactaaaataattataataatatattctaaatacgtaattccaaccactttccttctatgctaattttcctaaaatataaaccaatacatagctaatagacaatatcatttaaattaccctctttaaccttattacattttaacatattcataaaaacataccataaccaaaaatgcttatattccgactaatagaatttgtaaagcataacttagaactttaaaatgttattgtatccaagtttactcatacctccagtacctcaaaaattgaccaattaaacaaaactaccctatataaataggggcccaaccatataataggtgctaaagccttttaaggcgccaaagccataaaaatagcgcaaaaagagtaaaatcaatataaccaaaacaatagcaactttacaatataattcattttattggcttaccctaaactaatatatagcaaaacaataagatgagaacaactcaccacctttccaatagtcaaccctatatcacataagccgagactcattgtctcaaaactaatgtaacaatttacttaaaattcttcacattatacataaatgttaaacagaaagttcaataacaagggcctaacttaaacagaaaaagtataaattctaaataaaataataatgtatactaaataaaaatgcttaatgattcaagcaaagtgaccggtagtatctataatcacaaaccatacatatatacaatctaagacacaaacaataagaaactagagagaaaattattctatattaaaactatccatcgcctatgaaaaatggggccttaccaaccataaaattatgaaagttaaaattttggattcggaaacatttctaaaactcctatcacatatgaatatctaaccaaaaggagattttaaatcaaaaaaacgaaactcaccacatagtcggattttctgttaaaccgataaggatctgacatatcattcttttaaccctataactggagtaccaccactttcttcattcccagaactagacttcttggtccttcttattatgaattagacttcaaaatcacaatgcataattaaccacacaaaacacagaaataaggaaaaaatcaataaatgacaaggaacaaatccaattaaaaaaccaatcactatatcaaaattaaaagcaacgcaaaaacaaactgggatgcatccacagcctatgctttgccagcgataaaataacgaaacccaaaaaccagatttgaaaaaatctgagttcagagagatttttcagaatccgaaaagaaaaatctttccttaacatcaaaaataaaagaagaaaaccctttctttgtcttcctgattcagacccagaatcaggaacttgaaacccaaaaaccagattcgaaaaaacccctttgtgatttcttccctggaaatatcaatatttaacatatatttatatatttttatttgtagttgaatgaaaatagc

SEQ ID NO: 200843 - DNA, 547 bp, Cannabis indica
aggtttattttcattattcttaataagaattttcatatttagatttcatttcaccaatatttctttctttcttttcattctttttcctatttaaaaaacaaaaagaaaaaatccaaaaaaactaataaagatgattggtacatttaaataactaaattgcagataaacaatcatatactttgagttggaaggagagactgcaaatagctgtggatgcagcacatggttagttatataaatacactaattaattcattatatatattaagaaaatacaatatagttgagtgctaataattaaaatttgatcaatgttaattaggtttggagtatctacactatggttgtaagccagcaatagtccatagagatgtgaagactacaaatatcttgttgaatgaaaaattccaagccaaacttgctgattttggtctctccagagctttttgtattgaaggtggtaatcaagtgtcaacagttgtggctggcactcctggatatcttgatccagagtaagtatatatttattcactcctctaactactat

SEQ ID NO: 200844 - DNA, 1364 bp, Cannabis indica
tgtgctgaagctctctccagccttattttgaatgcggaagatcaaggaagtattcatgttttgaagtttgggagggccatatctcgatgtctcatctcttcatcggatgatagtttgatatttatggaggcaaaccgtgaggagtgcaatcaaattaaaaagatgcttgctagctacgaagctgcatcaagccagactatcaacttcaaaaaattataaatgtactttgggaagacggttgacgaggctactatttaagaaggattgtattgatgtatttggagttaaggcagtggagtattttgataagtatcttggaatcccaatttttgttggtagaaagaaatgtgagctttttgatgctactaaaaaaagagtgtggaataaagttagagggtggaagagaagtctattctcggcggtaggcaaagaggtgcttattaaaagcagttcttcaggcgattcctggctacactatgagggtgtttcgactccaaaaaaaaaacaattcattagcttcatggtatggcaatccgtttctgatgggggtcttctaaaaagaagaataaaaaactcattggggatctttgggacaaactatgtgcacctaaggagaaagggagattggggttcaaagaccttaagttgtttataacaaagcccttttggctaaacaagtgtggtgcataatgaggaatcctaactcgcttgtggggaaggtcttaacacaacaagaagaatgggatattggcacgtctaactagggcacgacctaaagtggtgcccattttttggtatactttgggtcgacaccactacagttgtgtccctatatttaattttggaggtatgtgggcgcgacatgtggcccaatggacacgataaagtcgtaccaatttatctttgaaaaatacccgttgtaataggcaggaatttccctctaggacagatgggcatgaccacgtcgaacccatgccctgacatggcgtgccatttgatggtaaagggcatgacagtgggcacgcacgtgtcagccccaactgtctcaatttttttaaaaaaagctcagcctttattatttcatttgtttctcacaccccatttctcagctttctctctacgagtctacaccctatttctcagcccaaataaccacttcgcccaaatccttgaagtccaaccatcgtcgtccaccgttctctgtcgccgtcgacgcagcctagccctctcagtggtggtaagcttgttttcattttagcattatatttttttgttcatcattttcatctctcgcttttttgggttgtagagggtggctatggtgactgttgataggcggcagagggttacattttgaagagatt

SEQ ID NO: 200845 - DNA, 941 bp, Cannabis indica
aatattcttaatcattgtattattactcatcttgttcataaggatacttgagctaggttaagaattacctttaaaggtacccttttttaaagctctagaatttgattgtacttttttttttctttctctaggaattaaattgccaaacaaccaaaaaaatcataaaaaagagcatttatactagaaaaaaaccccaaaaaaaaaaaaaatttacatattgttgtgacaggtaaggtagctttaggctatggacattttgagagtatttgagagtgacattactatctctttgagattggtagctttagaatattttacttcactaacattaagttatatatatatatatatgatatatatagctttcaagtaaaagttacatttctcatccaacacaaatttttttaattaattaaaaaaacagaaagaataaacagaaatgtaacttttgatagataataatattaacatagccatgaaattattgaatattggtatcaacttggagacaaaagatgatgtaaatagataaataaatataaagtaatattctaaaagtaaagatttgttttgatcatttgttatcagtaacatttataatatatttatttgtttggaattatttttgacttagagaatatattattacatacattagaaatttgaatatacaattgcaaatattaagtatttttcttcttaaaattggttgtcaattcatgtattatataattattaataaatattaaaaattatgagtactctggccaaactcctatgtttattttatactaaattttttgactttttttggctaatatgatcccttatgtaggaatggtggtcaaatttaaatttttgttctaatttattgtaatctttcagttttttcaggccactaacgtttgaatgttcaaaaatttacctatatcttctttagt

SEQ ID NO: 200846 - DNA, 924 bp, Cannabis indica
tgtcttatgcaattaggttgggttattccgttgttgtgccttgagccttctttacttaaaagaaaaagtgggccgaaatatttgagctcaatagtgatatattttaaacgatgtaataaaaaaattattgggagcactattaaaaaatattaagcaaaaatacatcaacatgttactattaagtcttttccctttcaaattgctcatgaaaaatatgagcaaaaacccatgagcaatttgaaagggaaaaaacgtgctcatgaaaaatgtaacttagttgttaaagtaatggggttttgttctttttataataaccgaagatatatatcttacatcttcggttattaaaatacttttatcttcgtctggaatctctatcgaagatgttctagctagtgaattaatatttccatgggaaatacgtgcatcacacttgcatgtgatgtaatccaaccttttgtgccctctataaatcaacaaacaatatgtattatgttgatgatctatggatggttgcacataatagagagtttccttaatacttccacatttacggtaactatatattattataatacctaattacttcgtcaataattgtttgttcaatgcaaacacgattaccatttatttgtcacgatgacaaaaaattatatgtaaaatgttattaaatatatattttataattttacatatgttggccctcgctccgccattagttgtattattgtgtttatatttacaaatcatgctatttatgtttaaacatagttataaaaagggtatttgcagtgaaacttactgaactcaagtcctattttgcttattagattttcgtttaaaaatctcagttaagtagattgcttacgtgtatacaagtgtacacatagtacgtttttaatggtccatataattttaattatt

SEQ ID NO: 200847 - DNA, 1154 bp, Cannabis indica
tatatatatatatataacattggtgcagatatcatcactcatatatatattgaaaggatgtgtagagagttatgattaattaaatgaaataactataaatacccatatgaaagagatatacgagggtcataattaaacataaatagttctatatttttatatatattattatatatatataaccatatttattaccaacagtaaataagttttttccattttccggaagttgagaccggagaatataatagaattacgtacaaatatatgttaaatatagtgtacgaggttttattttattttaatttatattttataagacagcattataatttatatgtatatagataagaaactagctaataattaataagataatttgatatagaataactcatgatatatatcctgctttacgttttcttttcagtaggtcaattaagcaagaaactgagacgtgcgcatgcatgatttagaaacttaaagaacaaacaattatttatacttaaaaattattcaaagttttgatctgtgtcaaaaagaaaaatacctcttttagtcgaatgacccttagtagcttctattaaacatcataactctttctttaaccagctccttatatattattataagatctggagagtccacaacatgtatatatatatatatatattcagtaatatataaaaaggatttttagagaaatttaatgaaaaaaaaacataaagttatgggaaagaaaaataatcatttataatactataatgcgataggggcttggggagttttacacgtacatctcatgcaagttaattatgtacatatcattttagaaaaatacattcatttataattaaactgcctatattttataagcacatgcccttttcttctccccgcaccctaaactacatttagaaacatataataatcttatagaaattaagataaatgttgtgagaatttaggataaaggtgtatatgacttcaacttcaaaaccaatatttaacaataaaagtagtacatctattatctattcacacattaataatgtagaactatttttaataaatatcctcaaaccctacttcttctatatccgcaccatttattattaacaactataaaattcaaaaaaatgttaccttaaaaa

SEQ ID NO: 200848 - DNA, 731 bp, Cannabis indica
ctagagaagagattttggttccagaccgacagtttggaactagctttttgtagcagaaactggaaagaggaagctttagatttggaaaagcactgaggaacgcccaggtatttgtcgatgaaaggcttgttatccaggtggagagtgttcctgaaagtgtggctgtcagagggaggtgtattaggggagaaaaggatggaggatttattgaagttgacagactggccagtggctaggtggtaagtggaaagaatgtctttaatttcagcagcagaagagggatttaccctagtgaaaagcaggctgtcatcagcgaaaagaagatgagaaatggagggagcggaacgagatatggatataccatgaaaagagctagaagcttccttggatttaattatgccagagaggccttcagcgacaaggagaaaaagataaggtgagagagggtcaccttgacggataccacgagaaggggagaaattttgagaaagagtgttattaatgcgaattcgaaaagagacagtggaaagacaatttagaattaaagagatgaaaggaggggggaaaccaaaatgttgaagaatatgccggatatattcccattcgactttgtcaaaagccttttccatgtccaactttaaagcagcccaacccactttgccatgcttacgacagttaatagcgtggattacctcattagcgataaggatattgtcaaagataatacgatc

SEQ ID NO: 200849 - DNA, 3388 bp, Cannabis indica
aggatgggagtgtcctactccttgttgatagcctattcttactcaattaatgcggtccctacaaggaagcaagctacatgaggcttttactatatcagcacctatacgaacgatcgaaggatcatagttaggttgccaaataagatagagttcaaagaagacttcttctagacgacgtacctctctctaataaatacaactgcctttcgcattatacgtaagttctctttcatagaaacttaaccttgaaatatactaatatgtatttttgaggtcgcttattaaacttttatctattcacagcggttccccgaagaccagttcccactccttagatagcagagcgtcacaaaattttgttgaatcttctatttggtatgagatcgatacacttcttatgcaacgagatcaatctgagaaatgttggccttattgcctcagattaatttacttgtgactacaaagtacccaagtattattcgtggcaaaaggttccagttctggctgatgaagagagcgtggactacgtggcttacgcacattatctcgatagaactgcgtggcttgcgcacattatctcgatagaactgcccctcgggaagaaggaggatcccgaggtaatcaatgtgggtggtcacccatagtgcttagggccgaacgtaacaccctagtgtctttctgagatagtcgatacaatttttacacttggaatccctttctcatagatcgcataacacataggttcgatagttggtacctagaattccacgttcagatttgctgtactagttcatactatgggattgccgagtagtatgggactatgttggatagatcgagtcatatagattcaagttgggatttagatccactaaacccttatgaaatatttatgatcacaggatctaaggagtttagtgaatattatagtcatccctcgtcaacttctgaagattatggtaactttcccaaatgggagtttattccccattttcttttatttattttcctttagtgctaatgtacttccctcgtcttgcagatatggatttggatttggagaacatgttcaagagtcctcccccagttgacaagaagtctaagaagagagccacctaagttggtgaggcctcgggttctactaaggaacctaagaggaccaagaccacaacaaataaaaagaaatcatcaggccaactcaccatcgagctagacaaatctccggagtatgaggtcctactgcgatgaatgccaatgaacaaccccactgggtcagtgcaccaggtgaagttcactggttctcgtccagagatggttctactcgagccctcctgtccattacccctcgaggctagaactgaaggcttgcaactctgctcactgcaatctactaatgggtggcgtaacttcttgaccattgtgtctagcgattgggagcttctcacgcgaggcagcgctgaggatcttgcaaagaagagttacaaactcttgcatcaggttagtttccttttcttcttgttcacacttttcctcattttatcacctttactaaatttgatttacctccttcttgcaggcctctctcctctcctttgctactcatcatcgctcgtctcagcgggcggaaatgctcaagtctgagcttcgcaagactagggagcataaggacactttagccaaaaagtggaatgactccgaggccaaggtttctcgcacaaaggaggaggctaaaaagcagcgtcaggccgaccaaaagaagatcaaggagcttgaagattctctcaagttcctccgggctaaccatgacaaaaaaactcaaagagatggaggctgaaacaaaggaaagggtcaacaacatcgccaagagaaccatttatcagacctggacggccaatcctgatatcgacttcaactttttgggtgaaggagccaacgctatgctttccctatgcgagaaaacaaggagagaagaacttggcgaagatgaagaggtcgaggtggaacaagaagatccatccaagtctcctacaatgtaggcttggtttttaatttgcattttttttatttaggaaaatggccatggctgagacaattgtttgccccttgtggaatttttttattgtaaagacaagttttcattgttggatggcaacctttgcttttattttatcttttatttattgcctcgcatctttatatttgaacttaatatatttgcttgtttacatttttattcacaacttaaataattatactttgatcaaatttaatatacttttaagtaagcatttccactgatcttattttccttttgatattgcttaagtagttaataatctactatgtacgcgagcagttatcgtctgccatgttttctcttcgcgagtagtttatcagttctacttcgcgtaaacagttataatctgatttgagcaaacttaaacatactttgaatgattcacctttgtgaattacttggtatattcttaatttctgatacgaatagttaggccttctattcaaatcttgggttaagtatgatcttttcaaggtgtctttgtgcctcgttcataatacattcctataaaatgcgagtcgttagatattcagcttcacatgtagcttagtgttgcttttttgagttaaatctcatttgcaactgctacttttgattttcctttctggcgataaaggtttagttttttactttacattattcatagacaaaaactttaaaaattttaaaatggagtgggtttgcaatatattatgtatttctagaaaaattctcgttgatcatacacatatatatgcccctcaagtaattttaaagaataaaactttgtaattacttgaaaaatacttcaactttattaataataattaaaatttaaaaattacatcagagatggagattatagcatttttgtggtttactggtagtagggttgcaaatgctcaacattcttgtggttctttattagcgagccgttaagccgagccaatttataaacctcgattccaactattgcctcggtcaaataaggaccttcgtagtttgggttaaatactcctgcagatgcatctttcgtgtttgcaaatgctcaccttagcaccaaaccaccaacattaaaaagccttctcttcactttcttattgaaatatcgcgtaacttggtgttgatatggtgcatttgtgatttgcgactcaacacatttttcttcaactaaatccaagtacaacttcaaaagttcttggttttcttattgattagagaaatctctcctgtgggtcgcaacatttacttctactggcagcattgcctccgagccaaatgccagtgagaatggagtgtgccccattgtttttttctcagtcgttctatgag

SEQ ID NO: 200850 - DNA, 1805 bp, Cannabis indica
tttaatataccataataaaaatagccataaaaataaatgttagattggaataagttatgttatatgaggtttgcatcttaagacttttttgttaattaagttatttttcatcaagaagtttgattattgcaacaagtctaaatataatttttggatatttgtgtttttgttaagtataatagatactctcataactttgttagcacttagaaccagcttataatatgtacatttcttcatttcggaccaagtcatgaacaattctttacactcaaaaaaaaaaaaaacgtttcacaccatgatggagaaaatttgtataaacaataattatcacacccaactttgtaaatgtatataatccactttgttcaaagccaaatgtatctcctaaaaaaaatcctataaatttgccataataactaaaagctattgtgtgtgtaaattgtagtagtaaattaactatgggtgatttcataccaagtgtaaataagggttgggtttatagtgaatatgggaaatcttgccatgtattaaaagtagtgaaagaaggtgggaaggttatgtcaatatctaagccagcacttggagcaatattttatggtttgagttcaagtggtactactttggagaaattggaaccttacttggagaatggtaaggttaaggcagtgattgatcccaaaggcttattcccttttgccaatactatggagacttttgtttatcttgaaacttctagagccactggaaaggttgtcatttatctcattccatgaatgattgggtcttttttggctttaaagtttatatttagtgtgatgttactcgttactgttttatctgaataaaaacaactggtgatcatgttgtaaattgtaattctgtgtttttaatggagttttagttgtctattgtgatcaataaaagttttgttatttggtgcgagaagtttattgttgattgttttctctgcattattaattaattaataaaggatccaagtgtatgagagaggactgttttggtatctctaaaatactttggattggaattgcaaggaatacaagaagattatatttattttgagtgaagctagagtccatttttgaagttattttttaaaattggaattatttacttatttcttaatttatatataattttattttaataatatcaaacactttaaaagtgcttcgagaaaggatcttaagaatggtacaccaatattctattaaatttgtgtatttttctaatttgtaatttttattataagcttaattttatcacattaagctaaccattgatcggtgtatcttagcaacacaaattaatcctccattaacaatagtatgtcttttttgaaaactcatgaatttataaaatattaattgatatatatttatatatatataaatttccccagtccaaatccacttggaccgaccctcaagcaaatcaaatgagaactctaccggaaaagcaataaagcacgatcataaatgacaacttgaaaactttttatcagaattttaaaacttgaaattactgcaatacaatttaacttaaccaatcagatgtaagatactaaaaattaaaacaatcaataggatgggagagagagaaaagctaaagaacacccatagttactaacatcatcacacaaattttatctctactaatgtaatttaatatccgatccacttatttataataattacaaaaataaaaacccctaactatatataaaacatcagtagtaactaataagaaaaagcatgcaaagcttaacctaatccaaatta

SEQ ID NO: 200851 - DNA, 805 bp, Cannabis indica
ttagtattctcctcaaggtatgaagggcgtctgagagtgtacgactagtttccaaaagaacattgaaatcgatccaacatctattttatgttgaattagatcagtttattcgttggatgtatttcatatatatttattggtttaatttggctttattcaatctattagacctagtattttttttttggatcggatcgtatccatctaatattttaggtccagtatgtattggattggattggatccatccaatctaagaaaaaagagtaaaattttaatgttaatttttaatatacatatatattttatgtgtaacaatgtaaaattgaattactcatctaaactaaatgaaaacactaattagtttaattggatgttggatgtattagatttttagacatcccatttaacatctgatctgatctaattagatattcaaaaataacatccaatccgatctgatcatacttggatatataatgtttgatggccggttgtaattagattagtcggttgtcattaaatttgatcgatttatgcatactctatcaatttataaatacaaagagaatataagaagagtggaagatttgaaaaacataagaaaaaagaactctaaaattgtaagaaaaaatactttttcaaaaaataaaaatattactcatcaataaaagtaatttataattaacatatctcttaattaatatatgaactacctaaaatatttttctctgcatataattaatttctttaatacaagatttagaaattgtcaaaattttggtaacaggtaaaaataatatat

SEQ ID NO: 200852 - DNA, 783 bp, Cannabis indica
attctaacgacgagagagttgttgctctttccacaggttggtacaacggcggatcaaggtgtgggaagatgattaagattagggctactaatgggagaaccacaaccgcgaaggttgtagatgagtgtgattcccaaaacggttgtgatgccgaacatgccggtcaaccgccttgtagaaataatattgttgatggttctaatgctgtgtggaatgctcttggacttgatactaatttgggtgttgttgacgttacttggtccatggcctaactagctagataaattaaagcttttataatataaactataataatactctatatacaagagtaataatgatatgtgcatccaattcttaatatatttgagtgcatatattatgtgtattgtaataattaagggcaatagggagtgatcaagagtattgatcgatggtttaatcatgatcatgtgtgcctttaaagtaatattataatgaatagcctaaaataaaaacaaggtttaattatgagcagcctcctaattttattattagtttatattaaccatatatatgctgcgcatggataaatatatatgtctttgtaacatatatatctttcattgtaattatataaatatgtatattattcattattagaagtgcttgattaattatacaattaaatattaaaaaacgaaataaataataagtaacaagataaacaaattaaccacacaaaagctacaacgagagctagggcataaacaaaacactcgagcaaaaccaaaatattaaaat

SEQ ID NO: 200853 - DNA, 2245 bp, Cannabis indica
taactaacattctgacattaagcaaagaaataggaaagaacgacagtagttacaacagattaaaaactaggacacaacttaatactgaatactcaataaaaaccattggaaaaccatttcgatggaatagtttttccatcattttggtggaatgactattccattttaaaatggaaggaaagatcatttcaatgcaagatttgaaaaaatttaataattttttttatcaatttttttatgcattttaatttgtattccattccattcctattcctattttcattctcattcctattctcatatttgcacatgatcatcattgctcaaatacaattaggaagccccgaccaatttccatcgtgatagcaagttaagagcatgaggagtgtgccattatagtagcccaatttcaatgagaaataataatataaaaaaacgagttccaaacctgaaaagcatcactaagaactatcccatattcacataaaatataacattagaatttttttttctttttgagtaaatatttatttggtattttgtattttatcaaaatagatatgtggtatagtttttttaaattgaaaagatctccaaatgtagttatggttatggaaagttagctgtctccgctcctgggagtctaacttgtcaatgcgggaagggtctgtaaggaaagccagtctttttccgaaaaggagttccaggtggctacttgttctctgctggaagggagtttcgcatactcgactcttttcctatctaggaagttccttcagcatacgcttcggtcttctattccagaagcgtatatctcatctggaagcacgttatcttatgctgacatggagattctatttcgaggagttgttaagtttgttaagttgtaataacttaacagcttaacagttgcatctaccgaattaaaatctttatcctaagtctatatataccaccaacacttatcagtttaggggtaattaaattagacgagtttcgagaggtgaattcgaagagatagattaagaggtagagagagaggtacagagaaaagaaaaaggttgagtttggattttgtatgaaaaatcttctatatatgaagaagattcttgggtagtgtgagagtaaacactttgagagaatcgatctcgactgtagttgtactctattcttgctcaatcaataaagaggacttggtgatgttccagaactgtagtaaagtcatagattacatcgatctatagaacatgataccagtatatatatcttggtattgattttattgtcttactgttttaaaatttttttattttaaataactctgccatccctattttttctgattactgtttgcgtttaatttatcttatcattgctaactgttttggtaattaaaattttaattattttaattttgcactttagcccaaattttcccacaacatattagtactttatactttcgataatactcatttaacacctatgtcttatgtagatatagattttgcaccatgtccacaaatttgattaatgaaagtgtataaatttaacaaaactaacatatctaggttttaaattcaaaacaaaaataaaattcaaatattacttttgattatggtcaattttatagagaccataagaaaacctatgattcacacattaaaatcactatcttgaggagtaggtcgtggataataccacttttgagtccaaacaaccagcaatgtgactaaaaaaaatgttgaagtgtaacgcatgtctttcaaaaatatgaagaagaaaatgtactggtattgcttaacactagtacttaaatatgttatatatatattggtataatccaatattaggtttttccatatttttagttttttgagttaaaaaaaaaattattaaccacttaattataaaatgatgcccgcgtgctagtattttggactattttggacattatttctttttgaaggaaattatattgtatacccactttactttacttgttttaattatttatttttatttttatctttatttttatattctttaaaatatacccacttttatagatgatgtcctcattaaatctcttaggttaatgtaaattatatgctagatttaaataaagagtaaggatatattaagaacccactcactctaaaacatttttcgtgtcatatcatctcaaagaaattttactttagatttccttggtagtttttttggaattgatagaaagttttag

SEQ ID NO: 200854 - DNA, 510 bp, Cannabis indica
attgaaaagaattactaaactgtgatatatatcacgcactaactatattattaaaaacaattgagcatttcatattaaaaaaatatatatcggtcatatttaatttattttttaatttagcatatatatatatagtcttgggttagaacccatcctctccttttttctcatccttcctttcgctttggtcatatttaactttacctagctatgccctactactaatgtggggtgaaagtgtgagctggctatttaagtacttacttttagagagatatatattcatatgcgaattgaattgagctcccctttatatattaattaattcactttggtcattatcaatattgcttttgaagggatccaattaaaattttccactaacttataattaatagctagttatcacttgtttaattatctatgtgcacgttttatttaggtgcaccactctgcacccaatatataaagaccatagtccatatattcactcaatctccctttagcatt

SEQ ID NO: 200855 - DNA, 643 bp, Cannabis indica
gtgagcgattggaatcacttttcatcaaagaatatacatcatcacatataatataacccgtcatacttaaaaaataatcaaattaaatattgaataataatcttctctccttgtgtttttaattccatgttcacatgtaaaatatgagaccatttgctacattgatagaaaatgtatatacaagaggccaatcaacgctcaatgtacatctagagtttcttgactccctgaatttgaatattaatgtcacctttttcatcaatcaatttcaccattggaaatatgtataagatgcataccatcttacaatttctattgtgaaaatgaaagaaaacctaatctttataatacttggcttaaaaacgacaaagagatatgcataacaaaaaaataaaaacactttgaggccttagtttttgtctcaattgggagtcgcgactccgttgcaactttgatgtcatcctttgtataatgagtttactataatttacaaaatttcttatttgcatattcatcaaattagttaataccaaagtatattatcatgcgtttatgcaaataattatcttgcaaatttttattttattttatgacatgacatgtgtactttattcaattccaaatcaatgaatgaaaatcggta

SEQ ID NO: 200856 - DNA, 858 bp, Cannabis indica
ttttagtgtttttatctttataatacgttataagaagattttgtcatggtgaacaagagttatgagagttttagtagagccttcctagggtggtttcccatgggtagtaatgaaaaacattaaatccaatttctgatcaaagccagctaacaacctcaggcacatacatagatttcagtaatgttcgcattcctggcaatggcattgtctataaagccgaataagtttccttttattcaagaaaaagcataaacgaaacgtgaaacttttagtcataaagataatggtgatgatgacaataatgatgttaaaacatgagcaaatgaaaaattgaaaagagaattccgcaaatcaaatgtctcttcatactggcaactctttgactttcactaagttaatcccatgcaaccaccagcttgcacagctccaaatgtaaacttggataatcaacttgatatttgttcaacaaaacaattaaacaaagaatctaatttgttcattacatgattctgattaactttcgaaacaccagattgttccacagaaaatccaaattgttacattcaaaatctattatagtttccctcctaccatatcattataattcagtacaagcttacttggaagttttaagactcaagttgacatcattcccaaaaataacaacttttggaaattaacatatttcttataaaacagatgccatctatggcataaaatacaaggtacataaaatccaaatgtaatctaccagaaccagataagcaactcgcggaccgagtcctaatctgaactggtatggaattcaagtggttcctcaactaagaccaccaccttatcatatcaaccttagagagg

SEQ ID NO: 200857 - DNA, 1644 bp, Cannabis indica
actactaaacaaaatgaatctaaggtaagagctagttttgtcaataaacgagcaatactatagcaattctagaaaaataagcaaaagaaaaatcactaagaaaagtacaataagccaaagcatctctaataatacaccctaaataacaatgatccaccaaataaattttaaggtcatttataacactaagacaatctaattctaccaaaacatgagcatagccaagacgaacacaaaatctaacacaccacccaaagtggtcgtggctaaaacctcactagaagaatcctgcaataccacggcaaaaccagctctagcatttggaatatccaaactaacatcacaattcattttactaatcttgtctcgaagcttcacccacttgtgaacaataattggcctaaagccatcagtagctccaagagaatataaaccattcgccttataactgttgaattcttgttgaaggcttgcatttaacaaattagttactctttttatttatttattgagaaagatagcaaactacactgaagttttttctaatcaaaatttatttttttggcaatttttatgaggtgaatataatatttaagatagttatttgtttgttaaaaaaatataattatagggtgttttattttattctctttagggtttttctttagaagttcatagccattgcttgattttttttagcttgaccagggctcggccaaccatttctcggccttacggcgtggctctggtcggatcttgttgattccactagagttgttgctatccttctacttgagtgttcttttcttttgcgtcttctttctttagaagagtgtctcggagatttgagtttctcattggctctgaatttgagtttctcattggctctggactggtggtaatcctttgaatgtgttatttttatttgctatgttttttatgtatatttttattctcaataatggtgttgctacaccaccttgttattgttatgacagtagggctttattcattcatggctgatgatttaagtgttatttcttttgggacattgggggaatctcaattgactcaaagtatgtttgtgttagtagtgttatctcaaactttgtgccaatgacgtggcattgggcaagctaacacatggcaaggaatatcgatcctgggcaaaatataacaccagtttgtactgaccaggccagatgatgccaaaacacccgaacgggctccagacctcacctcacgtcgagtagtacaagccacctgtataatgaaatttgtcaaccataggaatcgctgaagatacttgaggatactttccctaactgttttccacaaaaataggaccaatataagattcatattttcatgagattcgatttaacagaatgagagaattgtgggactcacattcaaatccacaccaatctttctcctattatttcgggattaaatgtactccctctcccctataaatagtgaggtcaattcactattgagggggactcattttttatgcactttgaaaggagaaaatactctgaaaatatttgtaacctcctcgagagataataagaaactcacctagttggaccttgtgctcttaatattctttcataagcaatacaaaaaaaaaaaaaaaac

SEQ ID NO: 200858 - DNA, 1305 bp, Cannabis indica
acttgttcttgtatgtgtcattccaatgtacaaactaattcttgtaactctcaagacattaataaaagtacacaagatacctttgatgtttctcctcaagcttactctctgtccaaatttaatgatgtaaataattggcatgtaaagttgggacaccctgctgaaaccaccttggccaaaatattacctaatatttctcatacagggtctcttaaagcattacaattttgcaatgcttgtcaccaaggcaagagccataaactgcctttttctttatccactagtagggccacccaacctctagctcttattcatactgatttgtgggggccttcccatgttgtgtcaaaagatggtttcaaatactatgttcattttcttgatgattatagtagatactgctggatttttccattaactcaaaaaaatcatgcttttgatgtctttataaagtttaaaagtcttgtggaaaaacaatttaatctacctattaaaagtgtccaagctgactggggtggtgaatatagaccatttgctcggttcttatctgaccaagggattcactttcaacatccttgtcctagaaccagtgaacaaaatgggcgtgccgagcgtaaacaccgacacatcactgaaaccggtcttacattgttagctcatgcagggttgagtatggaatattggtggtatgccatggcatgtgcggttttcaccatcaatagacttcccacaccagttattggtaatataagtccttatgagtgtctctttggtactaaaccagattacactattctaaagtcttttgggtgtagctgctttcctcatttaagaccatataataatcacaagcttcaattgaggtctcaagagtgcatatttttgggttattcatctcaccacaaaggatatctatgtgaacacccatctggcagggtctatatctcacgaaatgtcaccttcaatgaaggccatttcccaactttatcccactctccaaaggaaatatccaatcaggtatgtcctttacctcaatatcctacttttacttttcaaacagctaataatggttcatatgctaatagtggtaatgtttcctctctctcaccttatcaccacacggcaaatgaggaacatgacaactcaacatcacaaggaccacctactactactattccacctgcccctcccactcatcttaccccacggcctatcacacctattgtaccacaaaatgccaacctagacactactcccaatgttatacctttatcccatacacctctcaattcattaaataattca

SEQ ID NO: 200859 - DNA, 666 bp, Cannabis indica
ttttttttttttttggtttaagagatggaagtgacgaaaaggagagagagagatagttaatgaagagatcaattcattaagaaatttaactgaaagaaaaattataatatataaaaaaaactataaattacaatgaaagatatttgaaaaatatatatattttgtatttaattttagaaaatatgattaccaactataggctctctcatggaaaaaattagtaatggttatattacatgcatgatcatcatgtgaatccatgtgatcatataaatattcttatagcataaatttcaataatttaacattcacagattctccatatatattttactttaaaacacaaagaaaaactctacaactaagtcccatttactttaattattttaaccttttactttaaagaaaaaaagaaagtatatttgtcacaaatataactctacatcgctacctgaaaagttactgtcatgacccgagccctacgccgtggtagatatgtaatatccataacttgagtggtcaaatgtcacactttgacccttgtaggaagataaaacttataaatgatccttttatttatatcacaaaatactaatttaaaagtaatagattaactcctatattaataagaaaatattaataacaaaatcaggaccactcatcaat

SEQ ID NO: 200860 - DNA, 638 bp, Cannabis indica
aaataattgttttaaaaaaaatacaaagaataggatcatgttaatctcaacgagaaaaaacatatatatgaatgctgaaaccagcaacatcatagtcgtagttagttgcaataaaaccaaaatggaaagtaaaaacattacaaaattcaggatagatagtgcttaaatttaatcttatcacaaattctttcatctggttcttctctttcttcaaaaattctgaaagcatcatttatagggaccaagaacaacagttacctgagataaaattttagcacattcagccatagtagataattcccttctttgcgatgcagcatcaaatcgagacagcaatctgttttccagttctacaaaatatatatatttatataataagataaaaccagctcaaaacatatgatgtagttactgaaaattcttctccacaaatattcattgctagggttccaaattactctagaaacaggaaaataaatgttttcttcttgctagcacgaaaaatgatctaaattatgtgcattatccccattagcaaatactaaattcgtaagtgtatgtgttatatatcctcctcttaattcaatcaattttattataacctaccagcaacatctcttacataaactttttatttt

SEQ ID NO: 200861 - DNA, 1599 bp, Cannabis indica
aaaaaaaattaagcttttgaggcaaaatgactctgatagaaaaattgtaattttaccaaaattcttgaaagtcaccctaagtgaacctcaagactcaataaactcaagataagattctatgtttattcacattttctagtcttatacagtgatttacaagtttatacttaaaattttataagttcaaagtttgactcactaatttgtgcaataaattatttcataaaaaggatgactaaattcttttaaaatcatctttaagatcacgtatcatttaactaaaaaaatgcaattgaaatttttgaaatcggataagcgagtaaaaagttataagtgttttatgttgaaaaattaaatttttgtccataccctactttcgacctaccatttttcatagaaatggtagagagtttaaaaactgcaagtcgtttttctcagtatttcgttttgaaaaacgtgttaatagctataaacggttaatttttgttcctacactatataaacttatttttcactcaaaataagatgttggttaagcatttattacctatgccaaacattttcaagtgaattaaggagctcctaaagttttaattcatccaaacacatttcacacactatgagccaaaatttatatttattttttctaagtgtgcttgcaaatcactctaggtttttttattgtattatcacatttctagagtgagttttcttgtaataaaaaatacatattcatattgtgattgaggtgaggttgtgtaacgccctaacccttagggacgtcatgtgtgtatttttataaactagtttatgataataaaccagcagtttaaacaaaaatatgagttaataaactttttgctagctaatatgaattataaaattatggcataatcacttatacaattggggatttttttaaaaaaatattacaagaaatgccattgaaataatattacgaaatacataattaagttcagaacatttaaaaatgcaattcctgacaactagaggtatgagtttttgggtgagaataagacacttcttgttattgtgcgagtttctctatttatggtggaaacaaaaaagttgttgagggtattgaggaagcatatgagagctattggatggacattggccaacatcaaggggatcaacatctcaactgtaatgcatagaattttactagaagaaggagtcaaatcgaccattaatgcacaaagaagactaaatctgcccatgaaggaagtagtgagaaaggaagtgttgaagtggttagatgttggggtggcttatccaatttgagatagtaactgggtaagtccagtctaagttgttcctaagaaatgagggatgacggtggtgaagaacgaaaagaatgagttgattccaaccagaactgtaattgggtggagaatttgtatggactatcaaaagctcaacaaagccacaaggaaaaagcactttcctctcccctttattgatcagatgttggatagattggcgggccaagagtactactgtttcttagatggctattcagggtatcattaaataactattgcaccaaaagactaagagaagaagacatttacatgt

SEQ ID NO: 200862 - DNA, 1863 bp, Cannabis indica
agagagagagagagtagtgtggtggtggtggtccatcgatggtggtttgtcggaaagagaaagagagcgaagggagatcgggagggggtttgcacggtgacgagagaaagagagatcaaaaaatttggtccgtcgatggtggtccgtggtccgtcgatggtggtccgtcattgagggtttgagatcgagagagaatatttgagaaagagggtttgagaaaaaagatcgagagagagtgtttgatagtattttccagttgggggttttatttttttatacctattcccgacggttttgaactgtcaggcaaagtatgggccatagtttaaaatcgtggccaatactttgctcgacggttcaaaaatgttagaaatagtgcattattttttttaaaaaaaaattctcagcacttttaaactgtctcctaatctatacgagtgttaaaaactgtcgcctatagtatagtattggcattggttttcaacactcagataatttttttagcgacaggcccccaaaaaaagtgttttttggactgtcgcgaattctaccttttgtagtagtataaggtgcctccactaggtttggttttggattaattaattaattaattaatttaaaagataaatatttacataaatttgaattttaaaaagtaattgagatattatctcatgtggttgagagatctagaatagaatttggttatattatttattaaaatatttaaatatgatttaataaaaatatttgaatttaaataatttactaaataaaaaggtttatttaatataccgtataaaccaaatcaaattaaatcactttttgtttgtttttcaaaggttgtaatattagaaatacccaattaatatccatttcatcatcattgtttatttattgcttttaaataaatgttcatttatagttgattaataacatgctcgtgattatgcatttaaaaataacaacagtggatggcttatatgacagttttcttactatggtatatgcttctaataatcgcattgtgaggagactcctttggaagagtttatgtgaagttgctactgtggaaaatttattcctcatgggaaactccaatgacatgctaactaaggaggaaaggatagggcacaaggtaaaattttaccctgactctgattttgtaaattgttttaattgttgccaattggaagatgtaaaagcgagtgaaaatttcttcatttggacaaataagcaacaaggggaggatataatattttcaaacattgataggataatggccaaccaatcctagatcaacaaatttgaattcaccgaagcaatttttctcaataaagggttgtttgatcactcacctggaattctaaccctttatcctggtttagtgtgtggaaagaagcctttcaaatactttagaatgtggaaatcatatcctaagtatgaaagtggcttaagaaagatatggtcacagagaatagtaggatcttataagttccatgttatctccaagctaaaacaattcaagatcagacataaggagataactaaagaagggttttctaacctccagccaacagtaagcaggattaagcttgaacttgatgatttgtagagtagtgtccagcagcagccatttgatgccaactttcacaataggagtaggaaacaagaggacttctgatcagaatatagagagattatatttccttttgcaacagaaagctaaagcaacatggttgcaagatggagattgcaatactgcattttttcatgctagtatcaaaaataggctgagatagaatcgaattctctctgttgaacaacaagatgggagtaggcgttgggttttgtgccctaaat

SEQ ID NO: 200863 - DNA, 3599 bp, Cannabis indica
aatcccacttaaacatatttgtaaagcgataacattaataagggaatttattttaattgattactcttaaacatcataatttacgtaaatcttaccgttaaaaattgagaatagcttttgatgcccaactttcgaatagtgtcactagaaatagtggatccaatagtgtaagcataatcattgacaccaatctcaccaatccaaaacaaagtatctttaaagtcagcaattctgcaattcctaccttgagttttacacccaacattttttttcaaatacttattgaaccaacgaaactgagtcttaatagattgaggggtaatattaagagtaaggttgttcttaacaaagaatctatgatttatagcagtggaaccagccacagcaaagttgaccccattaggtgaatttctcttaacatttttataaggaggcaagaaaggcaatgatagtgattgtgctacgaaatcaatcaccaatcgtccatctgagtatcgatttgttgggtggtgaaagaaggtgactccgtacggtggtttaaagccataattaaaagtacttggcccagcacccaaccttgtgttgcctgtgtcggtaaaagagtcgccaaaggcatagattttcttgaagggaagtggctttgttttggttatggcattagaggttggagaaaataggatcaagatggtgactatgatgttgatcatagtcatgatttgatgagaaagcaaatttgaaatcataattagaaactttaacacatgtgtagctatttcaaaatctttttgccttagctacttatcaattaagagaaagttttttttctttctttctgaatttagtgagaatggtgctgagtaatatcttgattaaatagttgaggaggttctaatgagcatggttgacatgcactgagttaaaaataaacatataaatagtaagatatagttgctttgttaatttttttgttttttgtttattaatacatgcaaaattagaaataatattttttttcttttaatttctagcctcatactttgagtgtacacgcgtatatgttcctttttttgttttttttttttttttaaagaaaagcaaaaataaacaaaataagaaatatgttgtaacttgtaactatatcttttgttttttgaacataaaaaatgtttcctaacattatctattattatttagaatttttttcccctgagctataacatatgtattattgtaccccctgaactttttagcccattaaaaatggttcttgaactactcacagtattgtaaattggtccttctatcaagttttgtcacatgtggcaaacaaaatgaggacatcactgcttagtcaattgccacgtcagtatcatatcaacgctacgtgagtaattaatttgaaaaatttttaaaatgcataatttttattttttttaatgttaaattatacatgtggcgctgatatagaaattgaacaaaatagtcttgtcatttattttgtttactacgtatgaacaaaacttgatagaatgaccaatttacaataatgtcatgagtagttcaggaaccatttactacgtgtgacaaaacttaatttctgatctttattaattagtaaataaaattaaatagaaagaaatgagatttagggcacaaaacccaacagacattgactcaaggcaagtacattttaactattttgaggaaattcaacatgaatgactcaaaagaaactaaagttccccttgctagacactttgtgttctccacaagtcaatctcctaaagatgacaaagaaagaaaacaaataatagaagtaccatatgttgaagcaattgggagtgtcatgtatgttatgattagcaccaggcctgacattacatatgttgttagcactttcagcagatacatgtcaaaccctggtgaagaacactagaaaggagttaaatggttactaaggtatcttaagacaacaactcactatggattgaagttcaagaaaatagggatcgaggtggaacttgaaggatttgttgatgcagattatgcatcaaacagaattacaaaaaaatccctaactagctactgtttccaactacatacatgttgcataagttggaaatctcaattacaaccagttgtagctctctctaccacagaggcagagttcatggcaacaacagaggcattcaaggaagatgtatggatcaaagaaattctaggagagctgcagatgatgaaaggcaaagtaattgtatttttagacagtcaatcatcaattctcctaagcaaaaatcatgtgtatcatgagagatccaaacacattgatatcagaatgttttagataagagacaagatagaggatggtgaaattgatcttgaaaaatgtgccaagtgatgagaaccctgcttatggaggaactaaggtttgccagtgagcaaattccaatattgtttggatttgctcaacattggtcctgactaattcaacaggatcactcccctcaagtgtagtctagtattgttaaggttcagttttatatggattaaggtagaatttgtggaacataatctatttaaaactaaacctggttttttgcctccaaacagtttttttcccaactgtttttctgttacaaatttttccatatttggaaattcagttatgttagttaaattgaattcatgagttgttaagtgttgatcatgtcagctactaacaatatataaagctcctcactttgattgattgaggtaagaaaaggagagactaagacataaagaaaatatggtgagagtgaaagaagatcaatatcagaaatggattataatcatgttgtcatgatagttgagcagctctaggtttgagtgttggagagcaatttctatcattgattgttcttggtggttctacactgtaattggagtttgtaacttgttgaatcttagtggagaaactccttgggggagagctagagtaggactctaattgagatccgaaccaagacaatttcttgtgttttttctcttacttttctggtttatttatcattttcaatttctagtttgctagctaacatatttgttgattgtttgatctttgatattgtttgagtttgtgttggttaatcacaataataaacataaccatttactatatttatatatatatagtagctcctcaaacatttccctccaaaagaaacacatgtggaggaaattacactacaaacatataaactactcaacaaaattaaagtaaaaaaaaaaaaaagctaacaattttatgtatacttttttaatgataacaaaaaatgttaacgaaaattataaaaatcaacactacaagaaaaggcatttttaccggcgcagttcgtcaaatgcgccggtaaaggttgtcgagataaaataaaatctgaaatcctacttccatttaggctttacttttgccggcgcattattgcgccggtaaaagtctggttttaccggcgcaatactgaatacgtgccggtaaaagttaccaaatgaagcgccaacaggcgcgagaagtttgccgcctttcatttcatttattgtggcgcttgtttacttttaccggc

SEQ ID NO: 200864 - DNA, 885 bp, Cannabis indica
aattgtactatttttaccaagttcttaattttattttttaaagtatacatttaacatgataagtaatagatctacaacatataaataagagtaaaaaaaatattctcaaaagtcaaatataacataaaaatccaaaattcatgcaataaaaaacctgatacataaaaaagtttaaaattatacatacattatacatatagtcatataatatatataaataaaatatttattataaacggtccggtctggtttaaccgttaactatttattacaaactgcaattgaaccattacgcggtaaacagtctggattaatcgaaccaccaaaaacagtttttccaattacggtctacatcaatttggattattgttgtccggatttaaacctcagttttccagtttcgatgaacaaccctaagcagggtgagacaaacttggcaagcccgtccaggggtgctgctcctaaactgtgatgctggtgttgttgagggcctggggtgtggtatgggtgttgtgtgcagggattatcgtggtactgtggttgcttcacaggcttgttttcttcgtggcttgttctcaattataatggctgagtgtcttgctattaaacaaggcttctagcttgcttctcgtctgaatttgtcttgttttcatctttcttcgaactgctaaactgtgattatggcactggtgtctcgttctaaagagttgttggattggtttggagttctggagtctattaggaaagagggaaatttcgataattgttcaaaaaattatcattctttgagaacagcaaaccaaatagtgtattgtattgctaagtttgcttgtttttctttttgtaataattttagaattggtgttgttgttgtttttttttttt

SEQ ID NO: 200865 - DNA, 1203 bp, Cannabis indica
ggtccgatttcaaattcgggtcccgatctaagtccccaacttaaactttgtaaatactatataatacaagttaatactgataattatttattattaaataatatgattcacattatattgaaatttatgattataataattaatacaatacaaatttttatttaaatataatattaattattatttaatataatacgaatcttatatgcctgccaaacgagcttgtttaaataattaagctaattattattttatttttttgaaattcaaaaaaatttattaagctcaacaacaacacgtacaagataaagttacttacaaagtttttgttaaagcttccactcactctctatctattgtacttagctttcaaagagtttactctagcacaaacactattagcaatacaattaaaagtgactttaacagtgggaagtttttgctcttaaagaattttatttctagcatgccaaatgaaataaattgttttgctataataacactcaaaagaacctttcttttacctctagaaacttttgctttctaaatctactttaggacgtcatggagttctttttttcgactagaaataccaatccaaagtcacactgcttaatgaaccaccaaactgctgtaaatataattaaaaaagaggtcagaatgactctctactccacttctacacaacaaaaagtttgtatgattaaatcaactaagttctgaggtatatagacaaatgactctttaaaattagccaatccacgatattataatgcctaccaaacttaattctttaataaatatataatgaaaataataaatattcttgtttatccaaattaaagatgattttgtttttttggtactggtaatccaattataaaaacaaccctatagaattttacttttgcgtcactaaaattgcagttaaggtataaattttggtttatatattaatgtgaccattaatcatgaatttccaaacaaataaatgggctttctattcaataaatccatgatttttaattagaatgtatttagaagtaattgtgtaataatttttgtatgaataagaattatttaattgctcaacaaacagatttcacctcaagaaacaaagagctttaattactaaggtaattactagagtagtaattacataatacatgtatagtaattatgtcaagagaaccaaagtcagtt

SEQ ID NO: 200866 - DNA, 1832 bp, Cannabis indica
taaaataccctaaaacatttttttacctcatctaagaaaaatttgaggatgtatctgtgacaacctcggtaaggaaatgagctctgcccacttcttgtgtccaccagaagtcattgacgacaccattgcaataaaggctaggggttcaagcggctacatctgtattgttctcgatctaggtaaaaaaagaatactatcaaagaaaacattagctaaatagaataacaagggttgtggtagtggatgacacaatagagaaagagaagggcggtggatgacgtaacaatgacggatggtgggcggccggcagtctttcaaaacgaataagaagggggaaagcttttggcacggctatttgttgggtttcgaaatggggctctgctagggttttgaaatggccaagggaagagagacgaaatgaaatcctattttgtgaaaattgggttttacaaaactacccttttgattcggtggataaatgtggaaaatgtatgaacctcaatttttatctgaagcaaaaataattggcctcacttatccaccgaatcaaaatgtaaaagataatttttaaaattctcatttttttcctcggttcttcttttagcgtcgcggtatgagctgacgctaattggtagttttttgcttcagttatacactgaagcataaaatctcgcctattttttgtctcggtcaaccattttggtgagatgcgttgaccgacgcaaatagtgttttttgtagtagtgtaaaaattgttctccccttgcttcaaaaaatggactatatatcggcacacataggataaagggcataccctatacccacataggataaagggcatactctatacccacatagggtttcgtactccatacgccactaaggtgagtactgctagagaacaatctgaccattggctggtaagaaccttcttcatcgtgtggtgtaaagctgcttgtacgatccaggatacgcatcgcgcaaaagtctctcctttgcatattactctctaaccaggatgttgggtaaaaagcatatttgagggtgcgtacgcgcactaccatgttctggcacgagggacaaaaattgatcctgtgccagaaaaaggtgtaaccgtccatggagtgatttttacaagacactgacgtggccattgtctacaaacctttattgcgctttgagtcctttactaaaggaagttactcccgaaggtcgtcgtctctcgttacctcctaagtctgggagacattccttttctttgttacctcgaataattcttaccgtagctacattcttccctccgattgttaatgaaaacttcgataacatttatccccaagctttcaagattctttggatcatgggagcttactttgttcccggtattgaccgttgacacatgctgaagattcaggtcgcgaatacacccccacatgagttgtattctactgtagatacatacgatatttgcttcctcttgcgtggtaatcacatgacatttcaagaagtatttcttgcccctttttgcacgtagcaagatgcgtttagcaaaaaatagtgcagtgcaattggcggctgaatgacgtgcaaaaaaggaccttgacatttttttgcgccctcggctgattgtacatgatttctcatctccttagccattggatctattgaaagaatttgaaccattgatctttcataggccctttttctttttaaaatataaattgtctttggtggcatcctttttactttatttacttgaagctgcatattttttctgcaacctctttttctttttcagcaatctcttgcatgcaagaagtgttagagggttt

SEQ ID NO: 200867 - DNA, 785 bp, Cannabis indica
atttaaaaaaaaggttgggcagatgagcttggtatggttgagggtgtcatggcccccatcaagatataaaatcttccttggttcataccaaagattggccccaccaatattattgataactaaaggaaatatatactattttttaaaataaaaaatatatttatttttgaaagtaaatactatttattactattattttaatttcacttataatatataaaagaagcttttggatgaatttatcatttttggatggattaattcgctaagataattccattcaaaaaaaattaaaaaaaaaaaaataagctaagataattttggataaagctagaaattataaatatgatttgatatgtctatagtgtgtaacccttcttaccaaaatacatttaggatttatttggtatgcagaattggattgaactaaaaattaagattgaattagattagatatttggtgtaatacaaaagtaaataaagtataaaataattttaaataagtttctaatatttttttataaataaaaaatactattttaaattaaataatatgtaataaatttagaatatattcaaaaaaaattaagtaaataaaaaatatttgatttattttcatagtaaatataatattattttcaaaaatcaaaaattaatttttaaaataaaatgaataaatattttatattaaaaaaaatagtacccttgcactaaattaacccatccttttggtgggttaaggataaaattatccaatgccatagtaactcaaaaaattttccaaa

SEQ ID NO: 200868 - DNA, 530 bp, Cannabis indica
ttaaaatttcgttctctatattgctgctttaggagcacattagaggcatgaaaagtagtgtatattttttttttctaatatttcatagccagtaactttttctccacacagtagtaatttagaagtgatattatacaaaaaagtagtgtatgttgtttttctaatatttagaagtgatataacttttgcagagttataatcacttactgatttaaaatattgcaacctcatgtgcaacaaatcattcttggtctttggcaatatgacagttttctgatggtcatatctttcttcaaattttttcgaaacacaagatgatcttttaagattaaatattcagattttacccggtcatgaagatgatgcaaaggaaaatcatagctttgaccttattttgttttgtttcagtattttgatctttgatggtatctccaagacccatagcatctaaatagatttcaacatcaagaatctacgataaataatttctttcagaaatatcaagtaccacaaagtcgagttttgcaagg

SEQ ID NO: 200869 - DNA, 939 bp, Cannabis indica
attatgcgtcgaattattattatcatcatatataaaagtctaacataaagaaaaattattatttaatgtggaacaatccacaaataaaatgtgagcaaagttacaaagctacctatataatctatatatatctatataatgctattgttaggatatgtgacgtgccctttcatttttcgagaaactaatttttctattttcttattatttcaagcgtttactcattttatttattttaattctttttaattaattgatactcacacattaatttgtaacaatagagccttttgacattctggataaaaaaatataaattatacatttaattaatttatattcacaaattaattttttgtaacaatggaacattttgacatttttaaaacaaaaatgtaagtcatacaatctatatatctatataatactgttgttatggtattattctttttcatattattttgattgaaatttttaaacactaaaaaatttaaaagtattatttttagttttcaatttgtaatgcttttataaatatataagttatatatatatatatttatactaacaagatcatcattatttttttttttaatgaatcaaataattatgtatatacatattaatataagattattattatttcacttatttttgaaagggtattattgtttttaggttaaatacatatatttataaaattattagtaagtataaacaatttaaacaatatgtacataattcagtttttgatttttaattaggctaattagtaatttttcccctcgaactttaacatgtactaaatcgtgtcccctgaacttttttggtcgttaaaaattccccccgaactattaagattgttaaatttaaggacttttatcaaatttcattcaattttactgtttcagtgattgtttatgtactaaattatgctcc

SEQ ID NO: 200870 - DNA, 627 bp, Cannabis indica
aagttttctctctctcactcttgctactctcgttgatatccttcttcttccttaacaaagcattcatgcttaaagacagaaaaaaaatatgatgttcttttctaatgatgatccagtcatcctcatcaacatcaaccctcgaagatgatgatgtactcgcctcgtctctggttttgccagtgctgatcaaagctccaatggttcagacggaaatgctagaactaaaactcgacccactctgtcgagcataaacccttcaccacacagattgaatgcaataccaaatctcagatttgagatctccacaactccgaacacaaagaaaaatatgagaaactacatatctgagcataagctgccatgtacgacctgcacaggcccgacccttttggtgtgcaaccagacctattgcacagggcccacacaaaaaagggcccaattttctctaatctatttttggttttttttttaagatgacttcggtcagcaacctattcttaacaaataaaaagttattaattttaagggtcgaattttcaaaaatctgttttggttttttttcctaaagctgactttggaagtcagcaagcttattatcaaaaaaaattattaatttttaaatcgttt

SEQ ID NO: 200871 - DNA, 1184 bp, Cannabis indica
gatgaattgtatatgaggtgtggaaatttaataaagtttttcggctcgattgaacttagtatctcgagttacgtggttcgagatgttagattcaatcgagccttacaattttacttgtgtaaatataagagaaaagaatggattattcttattattgtttgagtcgcagttatttaaataaaatatgataattttaaaaatatatacttttacaataatttttattttttctaattttactgagtggactctaaatacgtgcctaatgacttagccgaagaccaacattggttatgtgtatacttaacatttgtttgataagttgaaaaaaatatagaaaatgataaataattattagcatatttgtaacaatttatgataattagtcatattattttgatttttattaattacaagaaaaaatgtttaatctcatgtcaaagacaaagttaacaaatttttttttttaaaaaaaaattattgaacatatgatatttttctttttttaccaattctcgaaatagaatgttgtagtcgaaactaatattatataaaagaaattaaaattgtataaaaccataaataaataaataaataacatcaatttagtttgagaattatcaataaggtttatttaaattatttcccccctaaaattaactaagtaaatagaaaatagtgtattaaaagtactaacattattgaccacttgcaaagttaaaagacatttcaaatttatttgagtagagtagaattttatttgtcattgtcaaatttgtttgtctttctctatcaaaatcttttttcaaagctttttctaatttaatatatataaaaatattataaatatatatgtggggttaggtgaagttctataattaatttagttccaacaaaatttattaagattagaagtaatccttactaaaaaaatcatggacactttgattttttacattttctaaattagaggttttaccaaaaggattaaaatgcatttttttttaaaataaataaataaataaatgtttattttcaaaatttgaatttttaattaaatttatatataatttcaaattatcaatatataaactttgacattatatttaaggtaattacccgtttaaattctatgtttaattaaattattttggaccagtatttgacaaaattaaaataataat

SEQ ID NO: 200872 - DNA, 828 bp, Cannabis indica
ttttttttttttttaaaagttaataatcaaacttcattaattaacatccttcaataacaaggataacaaatctgtagggacaatccctctactaattatacaaccagttttaaaacaagacgcccttgcaacactatgagcgacattatttgttgatcgtttaataaacttgaccgacacattaactaattcagacaaaatcaccttgcattccttaataaccaagccatatggagataacatactggcattcttcataattgcagagacaacgtttacgctgtcggactccaaggtaacatttgaccatcctttttgcttaatccaactcaatgcctccttcatgccaatagcttccaccatgtccaaattgaaactcccttttgtgctagactgcaacgcctcaatcaaatctccatcactatcccgagccacaattccatatccataataacccacattttcaaatatggccccatcaacattgaccttaatcattccactttgtggtttcgtccactgctcccgactcccatcattattttcattgtttgatggagagtcaaaaatcttttcttgagcagccttatattgattaagtgtagcttttgtcaaaaaaaaaaaaaaaacatattatgaacatttggatctttcttattccacacaagctcattccttgtcttccatattacccaacatagaacagacccaactccatctcttccagttgccacaattgaacactattttgccaccaatttgcaaagctttcagcagtaaccgccaacattcttggactctcgggcagtcgactaacacatgcactgt

SEQ ID NO: 200873 - DNA, 1135 bp, Cannabis indica
tgtcaaagtcactccacttgagttgctcatcaaacctcgccttcctcatcacctctattaatttaattaattaattaattcataatgttcatatgtgtacgtaccttgaaagagtttatttgttgcttcatttggtgatactagctactctattatatatataattcagaataatgatgtaattaagatgaaatgggtacctacgtgtgctagccatagctattattgtcagtttgtatttagtgagagataaatatagctaagctcacacttattcttataatttctttaacttttactgtattatcaatagtcatcttcatacatacaacattaactaattaaccatgcataaaaccaaattgatgacatcactctacaagaattgaaggtacagtgactaaataaagtcgtttggagtattaatgaccacaacaataagtcggccataaaaaaaagttttttttttttttttttgttaaattatgacaatggtcactaatattttctgattttgcaaatcaaactgttgtagaaagattttttttcttgtggacattaatgacgacaatgtcgccaccgatgtttttgaaagtaattaaaagagaaccgaaattttcctttagataacgattcaattctctctctctcacacacatttcttctcagctatttcccctttcctctctaaaaaaccagatcgagctccatcgcagccacgtctaccgatctcctctaggtgtagattctctctcacacacacactctgtctttctctatctctctctgtataaatatttattttatgtaatattgttaaaatgtgctacacatttttagaatatttatatcttagaatattaatagtgaaaactttagaaacttagcaagataataaataaactaaaaaagcttagaatatttaaaaaactagaagtaaccaatcaagaagaatatagaagaatgtaaatcaattagaaaagtctagaaaagttgtaaatcatatcaaactagaataatctagatgaaattaaatgtaggggtaaacaactatgaataccccatcaagctttcaaattgtaactaagcttgagtagccaaaatcaaatctttttgtggtatttttagacataag

SEQ ID NO: 200874 - DNA, 609 bp, Cannabis indica
gcgtctttatgttgtcatcaatgtttacctttcttgtctagtatgtgatccagtgatgggtgatgaaggaaagctctatgtccctcctgagctggtatcagtatatcgtgaaaaggtaagtaatatgctcagccttttgtgggtgtgcatgtgtgtattgtttttatatttttctgtgtttgtaatctgaaacattggttgctgataaagtagtgaataaaggtgtaatgacaaatgaacacagcaattgtgtttccatatatatataaataagcaaattaagcttattttctagttttggctagtttctgaggcttattcttggtgcaaaacttgaattataaatctatggcggtggctttaatatgatgtttattgctactaggttgttccagtggcttcaatgttgactcctaaccagtttgaagcagaaaaattgacggcgtccaggtaatgtttgatatcattttatataggtagacactgttttaatattattgttattattgcccttgggatatcattggtgttgaaactgtacaattttcctaatagtttgtccacagataattgtgtgtatgatgacattaaaaaaagtcaagttatttt

SEQ ID NO: 200875 - DNA, 2395 bp, Cannabis indica
gtatatctatgttattaagataggtaacggaatagtaagtaaagtacagtatagtaactttcttgaattaactttctaggtaggcttactaggtttagtttttttttttgtttttttttttttgttttttttttttttaaagaaaggcttaaaaagtaatttagtcattagctttactcgcaaagtctagaaaattttagataggttattatacttctctagaataactatttcacccagagtaattaccatctcagatgtaaatttctaatattgattcaaatcttgaaatttgacacgtgtagcctaaagggctaaaacaccatccttctcaacatataggtcctttttaagatttatttgattatcttctaatgttcctttctaaataatattcataccgacttatagctctcactcaacatcaggtgtaatgaccacttagttttattatgactaaagtcggagcaacattacacaaaggagcccgtcccaaggcttggatgaggtacggcaacttagttgagatcacaccactagagtctttagtccagacccatctatccttaccctgaccactcgatttaccgtcgctcaatataaaatcaattgtttccttgtcaaagagatcattaagcttccggatgtcccaattcccgtcaggtaaaagtaaatcttccacaagttcaatctccccctggggattgtgcttgggcctagggtagaaatctctcccatggataatataagggtcgttccaaatgctcgtatccctcataactataagcttgcaagcccctttcttcaaaatctcttttgtacgcaccacattctttcaaaaccaagagtcagaattcttaacgcacagtcaaagaactatctaccccgaaggtatttggctctaagcacattatagcacaacgactgctcatcattgggaagatcccagccccatttggctaagagggcttggttcatttctaaggattttctgaaaccaagaccaccatgagacttgggcaagcacagatgatcccaggcctttaggcagattcctcgattaccttgctcatagccccaccaaaaatctcttaccatctcatcaattctagaggagagtttttgtgagagcttcatcgtctacatcgtataaactagcaaggcaaaccctacagatttgataaaagtggcacgacctgtcttagaaagcgattctaatttccacccatgcaacttatttaccaggttatccagaataaaattgaaatcgacatccttttggcgagatctaaacagcgggagtccctgataatttatattacccatcacacagttaagccccagagcctgtttgataccccttttcataccgttgctcatgttaccgctgaagaagatggacgttttgagcttattaattctttgacccgaccaattgcagaatttctctaaacactgccacaaccccttagcttcgtccaaatttgcccttcccaccaaaatcagatcgcctgcaaagaaaaggtgggacagtcttgggccatctctgctcaacttgatacctttaatggttccgcaactcaaggcattctcaagaatacgggaaagaatttttgcagcacagataaaaatgtatggagaaaggggatctccttgacgtatgccacactcagggaataaactactaatctttctaccattaaggaaaaggttgaaatatgtcgtagtgaggcactgacaaacccactggcagaacttctcaggggccctgaagctgcaaaaaacatggttgataaaagaccagcttaacttgtcatattctttaaccaagtcaattttaatcgcaaaaaagccttctctcccttttttttttccttaaaagagtggataatctcctggattaagacattattatcctgaatgctcctacctgggacaaaagcagcttgggtagggcaaatcagtctcgggaggatcactctaattttgttcgcaataattttggagattaccttatagataacattgcacagggagattggtctaaattgggacactttctttgagttgggaattttaggaataaaagtcactttagtagcattaaaacaaccgactctaattagcttatacaataaaaaaaaacctaatctttaagagaaatgctaaagggaaccaatggtgcctagcaccctcttatgtgtcaatattgctattagtccaactaagtatcgggtctcatagagtttaatatagtagcttttaaagagtatcgctagccaatcgcaacacgacatatcaagaaagtactaggcaccactggtatctaatagcaatgctcaatctttaatagtaacccatggctagtgatgtctctatcacaagcaaacacaaa

SEQ ID NO: 200876 - DNA, 1105 bp, Cannabis indica
acttgagttgaagtatgcgagcacgagatttgagtggtagaaagattttcgataagagaccagagtccatgggaaatacgacatcaaagaacatggcctagcatagcctcataaatagaatttagaagccagcttaatatagcttggtctgtgcgaatccagacagcgagttgggggtttacctgctgttgtatgtctgaaattaactcaggaggagcatcaagaaactgaggtggacacggtcttgtgccaaaaaagaatccatctaggtcatgagcatgcacggttgggacaacttgtgagcgccaataggggtagttgtctctatccaggtgaatgataattggagctaacagttgaagcaggggcgcaagtaacactagtgcggctgatgtaggcataggtgctgaagttggaataggaacatcaacaacttgagacctaagattgttgactgaggaatcaccttgagaagccattggctttgatatcaaatcaaaaagaaaaggatcgaaggaaaagaaaagcagagagaaagagagaaagggattattttttatatatcttttgtattgatttttctcagtgtataaaaaataatttttatagggtatttatagtacagcaatagggaataaaaatcctaacaagaaaatattcctttgctatctcattggctaattcaaaaaaaggaatcccaagcattttggaattttagaacaatcccctaacaactcataattggcacaacatctagaatgatctaatgacaactcatgattgggaaataatatggtgtgaacaaggctattttttatttatttatttattttttttgagagagtgatctaaatcacattatgataatcgtcgacgcagaggaacttccagtcaacaagctaattgtccagccaaagatatacagcgtcagaatatgagtcactacaaataaagcgacttatataagaccaagttatctcagaaatttagacaaaacaacttgattcaagaggcatccgatgtaaacaaccgcatggaccaaaactacctacaaaataaatagatgtataaaggtggattagcacactatacaataataatgttg

SEQ ID NO: 200877 - DNA, 907 bp, Cannabis indica
tacatggtgtgcttctttgcatcagtatgttaaccttttgttgtaaatcaaaatgacttttctcgtaaacatttcattaagtaaatttcgtagaatatcacaaaatctctctctcccaaggataatatgttagcattgattagaacttttatagtgaatttattgttagcatattggttaatttggtagagaaaacatgtgactgtcattgcattcttacatgggaaagtccagcccatattttaaatttccctgcctaacaaactgatgcaataaacaaactaaagataaagatatggagatgaaaacgacatcctatttaagattattgctgacactttggtcccaagcaaaataaaagataaataaataagagaataatgcaaacgttgccatcatattcacgtaattggttcctagcctatacatgaaattttctaaagccacaaaaagtgtcaaagagaagcaaatggaacaagggtatgcggaaatggttatctatctatatatttattatatattcatatatggtgggtcctcatgggatataacctagaaatatctataaaaacaatgacagattttgaaaaatattcgaggaatattgattatgtgatagcggaagttgttaaaacaattttttttttttggctttatcatcttttgttataattaatttcaatctatatatttttacaattaattaaatttaatatttaattatgatattgttagaggattgggtagtttaacaacttaaaaaagaaatttcaaataatttagaaaatattttactagctaagaagataatacaattctctctcaacgagaaagaaatacaaaaataaaataaaataaatttaacacatgtttaacatcataactaataatattgtttttattttta

SEQ ID NO: 200878 - DNA, 2057 bp, Cannabis indica
agtactgtcgtttgctggtggacattttgcctcagatgacagcataaagatcagattataatcttactttggttacttcaattttcatattcttcttcttcttcttctcatggctggagggaagcaagggaaagggaaaggaggactcagctgttcatgcattctacttataggtaagtaactatggttctttgatatcattttttgctttaaaaagcttcccaagattaatggaggggaccatgtcaaccttgttttgagttgtactaaaaactaacatgtgtttgtttaacaacagttattgctggaatggagagatttgcattcaaaggagtggcatcaaatttagtgacatatctaacagatgttgtaaacatgagtaattctgctgcagccaaaactgtgaatagttggtgtggtttcacatccatgttgccactcttgtttgcaccttttgctgactcttatttgcataggtatacaaccatattggcttcttcattcctctatgttgcggtaagtgaaccatttgagttttaactctgtctcattaaaggccaattcattgtccttatagtcaaccaaatatggtcaaaagcttttatttttctaataaaattttgtacttcttttggctctagggactagtggcattgacaacatctgcttcggtatgggcccggtctgctgcaaacaaaacaagatctaccacctttctcttctggtcactttgtttaatttctctaggccaaggtggttacaactcatctttacaagcctttggagcagatcaactagatgaggaagaagaattgccctgcagtaaagatgagcaaaagtctagtaataacatcaagagttctttctttcaatggtggtattttggtatctgtggtggtagtcttttaggggttacattaatgtcctatatccaagacacttttggttgggttctggggtttgctattcctgccatagcaatggttatatcaatagcttttttctcatctgggagtagaatttacatatacaaacaggttgagaatatggggcatcataaacctcttcttaacataattcaaaacatcagagaaactctatcaaagttgataagttgcaaaatagccttaccaaatgtcaatgacatggttgagctagagtaagtgttttaacttttgttttatgtaaaatagccttactttacatgtaagttatcagattgttatgatcttaactgtttgttttatttattacataggcttcaagagaaacctctttgtcatcatcaaaacttgggagccatggaaagcttggacaagaacccgaaaagcagtactactaattacatgctcgaaaacacaaaagtagtactgcggcttttgcccatatggacaatgcttctaatgttcgccgtgatctttcaactcccagcaaccttcttcaccaagcaaggtatgacaatgaagagaaatataggaagtaactttcaaatcccaccagctacactacaaagttcaattacattgtctataattctcttgatgcctctatatgacaaagttcttatcccatttacgcgattggttactcgaaacaaaaagggtattaatgtgatgcaaagaatgggagctgggatgtttctttctgtcatagcaatggtaattgcagcatgtgttgaaacacaaaggctaaagatcagtagaaaagaaggatcatctaatactgagacagtctcattaagtatcttttggttattacctcagtacatacttctaggcatttcagacatatttacagttgttggtatgcaagagtttttctattctgaagttcctgttagaatgagaaccatggcatttgctctatacaatagtgtttttggagttgggagtttcttgagtgcttttcttataacagttattgaagacttgacaagaactaagggaaggaatagctggttctctgatgacatgaacgaggcccgactagacaattactactggcttttggccttgtcaagcacactcagtcttttgttgtatgttgttttgtgtaga

SEQ ID NO: 200879 - DNA, 818 bp, Cannabis indica
agtatgtattaaattaaacgtcctacatttctatttaagagcttgtccaaattttgtacatttatatatgctataaatatttgcgataagtcataatgttatcaacatataatatgtatcatctaacctttttaattctgtattagttggtttctagttgtatcatgtacaaaatcttgaatgtagtagagagtgtaataacaccggccagttcttcttttttttttttgggttgattattgttggaatttacagaacgaatcaattaatttaacttccactaattagtaaacaaaatagacattagaatttctattaaaatatacttcaaaccaaataaattatattttaattaagagattgtaactaaataaaagtatattaaaaaaattcaaaatactaaaaaatatcaataaaataatattatattataatagaattatttttgagtaaatataatatttatatatgtattataatttaaaataaaattattgattctacataaataaatttataaaatatatgtatatatattattaaaatataattattcttatatagaagtaaactttattaatacgagacttaaaaaatatatataactaattactatttaaggattatttttatttataacttactcaaatattgaatttgagtattttatttataacaaattaaaaattatttttaaatatgatattttaaataaagattgtactacatataaaattaaatttaaattgagatgcggtgatcaaaattgcttagtgttggaacttacagtatggaatggtgcaattgattagttagct

SEQ ID NO: 200880 - DNA, 1022 bp, Cannabis indica
aagtagcagttttttgtagtggtaggattgaagggaaatgacctccgaaaaaaaaataacaaatatcaatatattctccaattgccaagtcttcttcaacatggtactatcttctcactttttggttctctcttagttagatgtctatctagagctttgtttgtattattttaggtgccgaattcaagtatatatcaaaggaacaggtgttgatggacgtattgtcaaagctgatcatattaaagatttggttaatacttatttgtcttcaatcttttaattgtgtaacatccattgtttctctctaaaatgactgagatgctctttaaatatatattagtgaatttagatgatcaatgccaaatatcaatatactaattttacactgacattcctcactctcaaatataaaaggtagtactatttttcattgtaggatgattggattctcttatgttgtctacccaataaattctaacaattctctgctatactcttgacaggtcacaattttagatatataatattattattattaaattacagaacttatgcttggtggttgattgattcatgctaaattagttattattaaattacaaaatgtgacatacttgttacttgtttattatcttcttttattcttacaatgtaactccttttaactatatttgcaagctactgcgttgaccctttgtatagttcctcaacggaatacatggactgacgaataaatctgccaataatcatgtaattatttcacaaatgttgaaagtaaaaacataagatctaattagcaacttttgtaaaaacgtaggatttaaaatagtatttacctaaatatgatagaaagtaaagagattgtagaaaataggagagatagaaaggagagtacatatcctctgtagttgtttggtagataagaatgaaggaaaagtgaattaatataaaattcatatcttacccttacataattattaatataaatttaattcttataggtaaagttttttttttttttt

SEQ ID NO: 200881 - DNA, 726 bp, Cannabis indica
ttccatggatccacttcttaatctcatacgtttttaattagcgctgagaagccttccgacacaaataataaataatatggagaaagaggaccaccttatctaataccatggcttggaataattggacccatctcatgaccatcatgaatgacttgataagacactgtagatacacacttcatgactaagtgaacccatcactcatggaaccccatttttctcataacagcctctagataagcccactcaattctatcatatgtcttgcttatgtcgagcttaaaagccatatagccatcgttacctcacctcttccttttcaagtaattcatgacttcataaaagacaataatgttgtcagaaagcacaaaaaccactttgagtatccgctaccaccatttccaaaaaaactttcatcctactggccaatacttttgtaacaattttcatcaaaacattacaaagagatatagaacgtaaatcaccaagtaaaactggactcttcttttttagaattaacacaatgttggttttattcagcccatcttataacaccccatctgtaaaaaaatgttgaaccaaagttactacatccccaccaacaatcgcccaatttttctaaaagaacgcaggggtcaaaccatccggcccgggggacttattcggatgcatctgaaatattgcctttttcacctcgtcctccgtcacaggtttaagaagttccat

SEQ ID NO: 200882 - DNA, 1524 bp, Cannabis indica
tcttgcttagctagccaataagcggagtagcctatacattttatgagagtgaattttgtcctgtcacataataatcttgtggtttctcagattgagttgattaatgattgaaagtaaatcaaatcaagtctagaatacattttacacatcaaaaaaaatttatagtacatcacggaatggtatcatttttttataataaagggacaaatttattctctacattttatatacattattaaaagttcgattttttaataaactagattaacttaacttggttgtgcacttgtactttctcaggtgaaaagaagaagtatgtcactattggtgagttttcttattggaacttaatatcttggattttgtatagactgataccatggatcttgatatatatgcaattttttgtcttcttctacaggtgctacccttggtgctgctgtagtgacagtagtgcttattctaatttatcgtgcttacaactctaataaacagggaaaagagtacaaattgagaatagagagatttttggaggattacaaggctctaaagcctagcagatattcatatgctgatattaagcagattacaagtcaattatctgaaaaattgggagaaggagcttatggaacagtttacaaaggaaagctctctaccgattttttcgttgcagtgaaaattcttaacagctcaaaaggcgatggagaagaatttataaatgaagttggaacaataggtcaaattcaccatatcaatgtggttcggttggttggatattgtgcggatggagctagaagagctcttgtgtacgagttctcacccaatggatcattgcaacagtacatatcttctccagattctgaacattttcttggatggggaaaaataaaagacattactttaggcattgccaaaggaattgaatatcttcaccaagggtgtgatcaacgaatacttcatttcgatatcaaacctcataatgtcttgttagaccaaaacttcattccaaaaatttctgattttggtttggccaagttgtgttccaaggataaaagtattgtgtcaatgactacagcaaaagggaccatgggttatattgcacctgaagttttctctagaaattttggaattgtttcttacaagtcagatatttatagttttggaatgatgttactcgaaatggttggaggaaagaagataactgatgtgaaagaggaagtttattatccagaatggatttataacctcttagaagaaggagaagatttgcgaattcatgttgataaagaagaagatgctaagattgcaaaaatgttagcaattgtaggactatggtgcattcaatggcatcctacagatcgtccttctatgaaagttgtggttcacatgctagaaggagaacaaaatttgactttgccaccaaatccttttacctctagtgattcaacaaaaacaagagttgatatgccaagaaggagaatgaacttggaattagaaactataactgagttggagtgatataat

SEQ ID NO: 200883 - DNA, 646 bp, Cannabis indica
attatatgtacattacattgtaattttatttattttagtatttggatgatcagttaggattatattagtttaatgaggttgtgtcaaatctaatcttctcagagtatatcccagaagcttgaacacgtacgtctttttttggaaagttggtccacatatgtatatatgacaaaacatgataacttaagtacaaaaaaaaaatccaaatctttctccttattgaataacttcatataacggcagcaaaatgtatgtcaattctaatttaatttttcttttcaaatatcacataatttattttagaataattggtacttttgatctcttacttattgacattgtcacccaaaataaggatattgttcgaaaaaaaaaattctttaaaatttaatttttacaaaaattagattctaatatatatgttttatttaaataattttttaataaaaaataataaaatttttaaattgtttaattagttttaaaaatttatttctttttcaagtctcttaaacattcaaaatgatttttttaagatctaaattaattttttatgatttaatctttctcatttttatttgaaggagtacgatttgataatttgaagttgccaatttacaaaaacacgtcaacatttaaacagaat

SEQ ID NO: 200884 - DNA, 1431 bp, Cannabis indica
tacacacagatgtatacagtggtcatcctgttagatatttaacagtaatatttaaaatagacgtgtacaattttaataaaaaaaataaaataaaataaagggtttaccacaaaaaaaagaaattaagtgtataacataagggtttccctgcaaatttctcttcttttttttactgtaattggtaacaaagatatgtcacaatagcaaaaactgaaaatttgtatctaatccatatgaatggccgaatgggtgtaagaatttgtataaaaatacacacatttataacaatcacatgccaataatattatatctgccctaaaaagaacatattatagattatgaatcattacctcacctggatggtacaaatttgcaataagctgatcaaagagaggttgtctccataacaaatctgatggaaaaggggaaaccagctcgtttcttctgccattgcagctttctaaatccgtagggacatgaatggagcaagaaagaactgcatcatgaatggaatctgaaagtgccattgcccaagatggaagctctccaaacctcatagcctaccatagggatgtcaataattgaatttaaaacaaaacccattaatctacattctttctatctagttcatatacaattatatgtaaaatattatattattgcacctggttatgagaggcttcagagaaccatccttctgcaacattgagtttatataatagaacatgtttattaatgtcgggtaattggattgaggggaaaaggaaatagcaacgaagagaagaaaaacgcaccgttttggagagcggagagcaaggaggactggtgatggggagagagaaagtctctgcaaatccataaccctctaatttcttcgaatcgttcccagaaacaaatatttgactcagattggtcctctgcttcttcttcttcttccgatgattcgccgaagagttgaacgagaagttgtttgtcagtattcattttgtctcaaaaatcaaattgcgagagtttggatgggcaatcactccctattcgtgttttgtccttagtaatatttcccaaaatacacagctaaatattatgatttttttgcaacacaatttttttcaatatttttattttttaaaaagtaaatactattttagactttatgttttgtaaaagttatcaattgaatcatttattttgttaaatgataaaatagactatgtatttttcaaaattgtacaaacaggactctgaactattttttgttaatcaaaataaagcttaataataatctgatttagagatgttatgacaaaaataattatattttatgtatctattcatattagaaattgtcttaaagttggttatattaaaaaaataaattttttttttgaaaaaattttgaagcttcaatgtcctatttttattcatttttgg

SEQ ID NO: 200885 - DNA, 927 bp, Cannabis indica
aagcaaggtatggaatatcaaagtttttcttactaaaaagaagtttaaaaacaatttttttaaaaatattaaccaaacacgtcttgtattttgaaaactacattttttttttgttttcatttcaaaaaatgcaattttgaagacagaaaacagaaaaaaaaaaaaaataactaaacaccactttagtatttttctttgaatcctcttttacaactaggaagcgtgtaattatttaaatgaatcggcaaagcttgtgaaatttatccatgaatcttttttttaggctatttttctttttttaggctatttttcaattagaaagagtcacattagttcgtaatgagtaatgacctagccttttttgtgcttattcattttgaccaactaattaacaattttcaagtcttttaagaatctaagttgtctaaccacttcattgatcatccttctcttttctaaattgatttgatcaaaaatgaaaaaaaaaaaaaaaaaacgtttaatgtatatatactaagtatagtttagagcatctcttatggagttctaaataaatgatgcaacattatatttaatatttttataaaaatcatttctaattgtgtgatttaacattaatgaattactttaatatattttttaaattaaaatattgccactgatttttaaaatatatatctaatttattaattctcgttaatataataattattttttattttaattttattcttaatttattattatacattgaagtacaattatgaaaagtgtattaaatataatatttactaatatttttgtgctaaattttatatatttggggagatccgtgctcccaaaatatttgatgcaaaaattaaaattaagaagcatattgtaactatgtttattcactaatctaccactgtgatttatgcatgctcc

SEQ ID NO: 200886 - DNA, 2618 bp, Cannabis indica
gtctgctatagccagcttgctacccaaaaaatcaaactgctttttgagtaatcccttggtaataatgtctactacttttgaaaaaggtaataatgtctactacttactctttggttggaacataaatcatgaaagtcaggccttactctatcttttttttgatgaaatttttatccatttctacatgctttgtacagtcatgcaaaattggattatgtgcaatcgagatagcagccttgatatcacagtatagtttcataggggatgcttgaaataccttcaattcttcaagtaaccttcctatccataatatcccacacatatcacgagcaacaactctaaactcagcctcaacactacttctggcagccacatttttgtttttttactcggccatgtgactaagttacctccaacaaatgaacaataacctgatttagatcttctatcaactatactcctagcccaatctacacctgtatgggcttcaatttgtaaatggcctcgactttaacatgagtccttttctaggtgttccttttagatactttaagattttgtagacagctttgaagtgtttaggtcaaggtgcatgcatgaattgactcaccatactcaatgagaatgctatatctgattgtgtgtgataggtaaatcaatcttcctactaaacgttgataacggtcatgatccttcacattcttagtttgtgtgggttgcaatttgacatttgtttccatgggtgtttcaacttgtttgcattctagcatacccgtctctttaagcagatcaagagcatacttacgttgatttataaagattccttccttggacccaaaaaattccattccaagaaggtattttagaatacgcaagcctctgatctcaaagtcttgagcaagtctctttttcaactcatcaagttcaccgtgatcatctccagtttaaacaatatgatccacatgcactattaagatagctacctttccttcctatgaatgtttataaaacatggtgtgatctgcttcactctgagtatatccatggcacctcaacactctaccaaagcgctcaaaccaggcactaggagattgcttaagcccatacaaagacttttgcaaactttcccaaatccaacacctttttcaaaaccaggtgggggtggaggactcataagcacttcttctagatcttctcctttaagaaaagcatttcaccatctaattggtataaaggccaactagaattaacaataagagaaagcaacacccaaatggaatttatttttgcaacaagggcaaaagtttcttgatcatcaattccatagatttgagtaaaacctttttgcgacaagcctagcctaataccttgggcactcttatcagctttggtttttattgtaaaacccatttgcacccaacaatttttttctccagtacttttacaatctcccaagtaccatttttactcaaggcattcacttcctccgtaactgccaaattcaaattcggatcatctaatccttcctgtatatttctaggcacaagaagttctgaaatatttgtagaaaatgctttatggttttttgacaaatgattgtaagaaatatatttacaaataggatatttagtgcaagtacgagttccttttcttaaggcaataggaagatataaattggtgttttctggaattactcctatactagattcaggttaagtaagcgaagtaggagaacaattacctaaaacatttggaagaccgttgcttagggcttccgtttgaccatgtgccaggatgattacctggcctttatttctttcaggtacatttctcctagaataaaccaaaggttcaataactcgtgtaccctctcctattaattctgggtctaacaataattgaaattatggaggtttttcatatatatccgtcggaaggtgtgctattccattttttccactaataaaagaaaaactaagcctataccgtgatggtattagtttaacacaacatatggtcatcaacctaattgacatggaatagcttggccttaggtttattgtacctttcttctgatttaggatggtgtcactttgatttgaactaacgattaatgtaggtttagcttgcatctccattcaaaagtatgtctattcttatgatacaaaattataccatagaaatagtgaggtgtttctacatatttcaattatggttacgtattattcattatttcctgtctccaaattttttctttttccttttggtacgaatttgtagtcttcatgaatatacaagtctttttgggacactcattattaacagtaacctttgcaggtggggttccaagcatctgtgtgggtgtctacagcacaggttggagacgaggtatgggttctggtagaagaagctcatccacgagatgatataatttatcttaaggaggttcctagttaagaattataaacaggtccttttagtcgacacattgccggacaaaattacttcaatgatctctactacaagtaagcattattttcgtgtaccatcactggcaaatgcatttgttgatcccttataattgttttgagactgaaaatcagtgtattgggaaatga

SEQ ID NO: 200887 - DNA, 602 bp, Cannabis indica
agttattttcttcatctgatgtccattgtgttgaagttttggactgtgttaatcaaatagttcccgagatgatgaaccttgaacttgttggaccaattacagaggaagaagtccgtaaggctgtgtttgacatgcatccggataaaagctcgggaccggatggtatgacacctgcattttaccaaaagtgctggcctattatgaaggcggatgtggtagcttatgtccaacgatttttagaatatggtgtactggaggagacgtgtgctgctgccaatgtagtgttaatctcgaaaaagaagtgtctcgattctatgaaagatttgaggcctatttccctgtgcaatgtcatttataaagtaatcatgaaggttatggctaatcaaatgaagccgtttatggatactataattgctgaatcccaaagcacctttatccccggtcgtttaatttctgacaatgtgcttatctcatttgaagttcttcattatttaaaatggaaaaggttaggcaagaccagcttcatggctttaaaaaatgatatgagcaaggcatacgaccgtatcgaatggtctttcgttgaagctattcttagaaggatg

SEQ ID NO: 200888 - DNA, 1072 bp, Cannabis indica
tttttttttatttttcttttaacacttttgaaaaatggcacaaataaataaatggagtatatattagactagacagtggcaaaactaggtgaacttattaggaggtgccaattttttttttccaagtgtatacatgtgtttatatatattttgtttatgtaatttttaaatatgtacatatatttttataaggagttttttttggaggggggtccaatgccactctttggcccttcaacatctcttctaagtttactaatttcaaatagaattttgacagtggctcattaaattgtattttctgtgtttagttttagggtactaagttgttaattttttttttgtctaagtcatgcattgttaatatttatgtagtttggttgttatgtatcaactaccttttcttttatcttagtaatataactttatccttctttattattattattattattattattattattattattattattattattatctaaatatattttcttattattgaattttattgttttaaatgatttcttattattaaattgggttgtcatgggggttgttgaggtatcctttagggataagaaaaaaaaataaaaacaaaatagatgcgtgctacagttaacctcttattttcaatctcttagtcaacttctgcgcctgaaaacttatgccggaatattttctgtttcaatttttttttcatgacgatgttcgttataattacaatatcaagcctgtaaattttcaaattttattgaatagtttacaatatcgataatatagttcctcatattctaatttaccacccgtattcagaaaacgtcaaacctattttcagcattgtaaattatttaaatttttcaaaaaatttacaaagataatattataactataacaagtactgctatgcaaataatattatgatatatattttcaggtgtggagattgactaaaaaaattatagaaaaattaccccatatgttattttcttaacttttttataattttataatttatggtttggttttaaagttgtttctcattgagtttttatgtggttgctat

SEQ ID NO: 200889 - DNA, 911 bp, Cannabis indica
tttaatttttgtattattttttagtttgaactaagcatcggttacagtttgatgcaaagcttttttgcttcaattaataaccaacacaaaatgtgcattactatttgcgtcagttattaagtgaagcaaaaagaaaattgtgtgggttaagaagcaaagcaaaaaataacagtatttgcgtctacggatgtaacatcggttacaccaactaacgctaattctttatatgtcactgaaaaattgaagcaaaaagtcctttttgtagtagtgaaacatttagaatttaaaattcaatgtttatgaataattgtcatttcttaaaaaattattaaggttttgttgaattaaaacatcttttgatgtaataaggatggaataagttaaggaacaacatatgcagttcaaagatcttttatatctgttgaactctagattacattcgaaactctacaaaatatctataacacttaggggtggaagaagttattgatgtatgtagttcaaacactttaactttgaactttagactatactcaatacaccacagaatctctatgacacacattttgattagacatggatatactataatatataaactagcaaataaatagaacttattcttcatcctgtaagtgttccaattaacatgttactatcgtaatagtaacatgataccagtaaaagtcctttgacatagaatcacagtaccttatcttagtgggagaattttaaagttctagcttcttattatttggatgacactagtgatagcctattatgatatgttgaagaaaggaactttaaataaaactaagcacaattcatgtagatagtagtaacttatcagaattatatggataagatatgaaattatgcaatgtctaatcgaaagactcaagcacaattcc

SEQ ID NO: 200890 - DNA, 817 bp, Cannabis indica
atcatgatctgtatgtccctttgacaaaacccttcccagtccttttgacagaaaccctatctggggaacattgtattcagacatgtataaatatacatagtcttttttcatagtagagataccaaagcattatcaatcgaatatatatatatatatatagtcatagttgatctccctaaagctcctctgcatgaatttatatatgttatatatatatatatgcaatcacctgagtgtgtatatatgtatacataacatatattaagatatcttagcagcgagtttgaaaaacgacataaacgtaaagtatagtggagaaagagatacgtacgtacgtacggaacaagagatcactggaaaaatatatatatgacgcttagcactagaatatactgtaatatatataatatctataggaggttttttaatttttaaataacaattttgttttttaataaaaattcacatattaatctacagaaaaactaacggagaaacttaattaaattataatcaaaatttacatagcaatctacataaaagaataactacggaacaatgcaaaccatataacattaaaaaaaaaaattataaaatgatatattaagtaattcttcaataaaatatgggacatgtatattgtatatctaccactttaggatagtaaaagaaagcactacacatgatcattgaagattgcagcctcttggaaaaaagaaaggtgaacccaacacctttaacctaataagctattaaatataaattataaaatataacggttaggatataaataacttaggctcaaaccatttgttgg

SEQ ID NO: 200891 - DNA, 1214 bp, Cannabis indica
taaaaataattaataaatcacttgtaacctgataataacctaatttgattcaattttttaaaataaaaaattatgttaatttgtaaaaaagttttattaattaaatattttaattaaaaaaataatttatttaattctaaatatagaaagtttacctgttagtgacatgttatagtaagttataaaaaagtgtaaccatgattacatttttattgtaactcttgaatactcacgcataatttaatagttaaattatactgatatttttttttttcttttcatcacatatatatggtatttgatcaaatgatcatattgggtatcaaatcgagatataagtgtactaacttatacatacaagatacgtatttatatataattaaagatatattttaccataccaaatatatatatatttttaaattagctcacctactaactgatctgttgccatcccacactaatggaaacacattttagaatattttctaattttaagaaatgagacaatttttcttcccattatatatttaataaaggacaaagcatcattatggggtatcttttggtttgataaaatattattaaaagaaaatgagtatagttacttttgacactcttttcctacaaaggttcgtagaaattcataaagtgtaatattggagatttatgtaatgtaattggaataataaataagatttgtccttctcaattatgacattatttttttcttttttttgcaaatttttgtataactataaataatatatacgattatattttgctaaatatttgttaatgttgtactgtaaggtgatgctaatttatcacaatttaagagtttagataaaaaataaatatacacaaatattataatctaatgaggaattatggaactatgtactatgaattttaagagctaattagtaccatctccaactaatgatgtaaaatttatgctaaatttagttcaaaaaataattcaatattatatttggctcaagttttataattgtgtctcgatatattaggagtaaaattaactttattttttattgcaatatatatatatataaaaaaaatcaacaacaacattagattttaattgtaaatgtattaaaattttattaaatatatgcacagacccgaccctaggcgtatgcgggctatgcgcgtacctagggcccacttattttgggggcccaaataaaaaa

SEQ ID NO: 200892 - DNA, 589 bp, Cannabis indica
attaattatactggcacacattcagatgctaagtatgtctctatatgttggtgatcttgatgcctccatcaatgaaacccaacttgttgagatgtttagccaaaatggtcaggtcatttcagttcgcgtgtgcaggggatagtctctttggttatgtctcttttagtaatctccaaaaagcttttgtcaagcaaaatagctactgatcatgttcgggatcagtccataggatataattttattcaaattgatagtgaagaggctgctcaatcatttaaacaaatgaatatggagttgttactagtgtagtagttatgagagacgagaaaagaaaatcaaaaacttttagatttgttaactttgaaaagcttgatgctcttaatggaaagaagtttgaggacaaagtgttgtatgttgggaaggcccataaaataaaataaaagagaaatggaattgaaaggcaaatttgaacaaggggatttttgttgaaaaaatgaaagattgaatctatcttaaaaatctatatgatagtgtgactgatgaaaagctaaaggaattgctctttgagtttggtaaaattacttcatgc

SEQ ID NO: 200893 - DNA, 760 bp, Cannabis indica
ttgacatttgctaagaagacctcccctattgtgaaaatagtcaaggagatgaagaagacctcctccgttgtgctagcaactggggggataaggaagacctcctccattgtcaagacatatgaggagacaaagaaggcatcttctactgtgaatatagttgaagggacgatgaagacctctatggctatgactaatgaagaaatggagacaacacctatgatcacttcaaggtccacccaagatgggaacacatcaccctcatcttgaatatattaatttaggagttggtcacatcctcaattaatcaaaaaatgacctacgacttcggtgacaatcatcaagaagaccttgtccactataaagacgaagggatgatgaagaccttcttcgttgtaaagtgaaggagatgacaaaggcctcctccactataaagtcgaggagataatgaaggttgcttctactgtaaagttgaagagatgatgaaggcctcttccattgcaaagccaaagagatgatgaaggcctcttctgttatgaaactgaggagatgacaaagacatccaccgcggaaaagccaaggagatgaagaatgcctcatctgtggtaaagccgaggagataaataagagtgcctccactgtgaacacaactgagggaacatttaagacttccaagtttgcaactcatgagagaaaaagactacatctacacctatatctactcaaacacaaagtatgaaaagatagccaatgctaagaaaat

SEQ ID NO: 200894 - DNA, 506 bp, Cannabis indica
aaaaaatattgttacacttcaccttcagaagtttttgttacataaatgagtttttgtcgtatttgatcagtttaatatataaacaataagtttgatgtatgtgtgtaattataaacaactgttttgaatgtcgtttgtgaaatggatattggctttgtggtgtatatatgcaatgagtatattttggtcatatatcatctacaaaatttaatatacatgtacatttatttattcatttatgatacttctcttctttctctatgatataattataaaatattgaagagagtggttgagttttgtccagagaatacagattggctaattggcttatgatatttgttgagaaaggaaatacattacatagagttctgcccaaaaaaaatgtaataagaaaaaccctttttcaagagaattacccccaaaaaacactaatagtctaaatacctattatgtattaatattattatttggtccaaactcagtatcatgtcttatataattta

SEQ ID NO: 200895 - DNA, 1121 bp, Cannabis indica
aaccaattttgaaaatgaaactggttcctgttaaagcattctttttatcaaaggctgcatccacataaagggcaggagaatcttcttggaaaccaatagtttgcagcccctgaatatgctgaaaaataggggtggcttttgaattcgattgatctgcactatagcttagctgagcctcattataatcctgtaaataattaataacaaactcttccacattgttaggaataccaggcctgttaaataaaattgagttatgagtattctaaatatgccagataatagcaataaagataggaaaatcctgtgtggagatatgattcaaagcttgaagataaaattctctaatgtcagttctatggtaatcatagtaaaattgcttaaatcttgaagacttccaaatgttctttgctctgggacaacctattagggcatgagtgacagattcagtactgttaccacaaaatgaacaagtggaatgaggaataatcttttttagaaataaatttaaggcacaaggtaaaatatgatgacaagccttccaagtgaaatgctttaatttggggggaacagaaagagaccaaagctgtttccaccattgctgaaaagggttaaggttggaagaagaaggagtatcaatagaagcaagggaagaagcaaagtgataagctgatttgacagtgataaggccagaaggatgtaatttccagatgagagaatcatctaaagttgggtccaggggaatttggagaatacgatctacctagtaagagggaaaaaaatgtttgagcttagacacattccaagtagtgtcatggtttataaaaaaggagacaaaagcttgagaggggtcaattgggtgcatgagagttggactgggaagactaggaatccagtttgatgctgataaagggatattggtaccagccccaatcttccaaaccagacctttcttaagtaattgacggccccaaaggagacttctccaggtgaaagaagaattatggccaacaggagcattcagaaaatcaaagtgtttaaaataacgagctttgaggatagaatgaatgagggaatctgtatctgtccacactctctaagcttgcttggccagaagagct

SEQ ID NO: 200896 - DNA, 901 bp, Cannabis indica
actagtgaacataaggtcacattgaatagtggtaaaaatcaactagcaaagttgttcaaatcaaaggaaaataatacattcagaaatttctctgaaaaaaagtcaacgaagacttgcttctgttaattatagctcttgaaaaatgaaggaagtgcatacataatctcattttctttgtcaaccataacaaaaaataactaaccatttcatctgtaaattgcatccaaaagccagccaaagctttttcataagagtccttgggcaagagaggagtttgaggtcaagtttcttcgatgtactcaagaatgacgagagactcacaaatgggtttgcctccatgaacaagcacaggtacctttttgtgaattggattgtattgaagaaataattcactcttattgtaaatatcttcttctatgtaatcatactcaactcccttcagtttcagtgcccaaatcactctcggaggaaatgggcttgcccaatatcccaccagctttacttcttcatccattatcattgagagcactctattatttgattacaagttctgaaatatcaccaaaatgctttacatatacaagttaatatcagctatttattatatggtaggtgagaatttcttgtttgactaagaagacaaccattgagatttatattaattcaatgttttttttttgaaaaaaaaaaatagaaacataaactggacattgggtttaaacaagaaattattttacaaatacaaatgaatatgacctatatattatatgttgggtgagaatttattgttcctcgtttgaccaagtagataatccttgtttatttgtaaaagataagaaacataaacttggcattttcaaacaagaaattcgttcttatctttttaatgactcgttaactt

SEQ ID NO: 200897 - DNA, 636 bp, Cannabis indica
ttaggagaaagtggtgggctatagggctgagatgggccggacttttatagaagggaagattgaccggcccaaaatgtgaagtttatatatatagggaattgtaagccttattattattattttttattatttttgggtaaatattatagggaattgtaagtagtggatgcaagtgtagatgacaaaagtgctcaactaacgaggatgtcagaaccagtgagtggggaaaagtgttgtcttcttcttcccaaagaaaagaaaagaaaaaaagaggtaaagtggccattttcacatgtcaaaggccaaaggaatctaaattttgtgcatcaaagaaaggactaatggtcaaaatagagtataccctatgagtgagtgactcattcattacccaaatatttggtcctttcttcatgtgcctcttctctttctttgtctttcaatattgtccactcctaaacttcaaaatacactcatcactatcacttgtgctcattctttcctcaacatgttttggtatattttctatagggtttatacacatttgttaccctatgttttttttttctaaatataagtttggtactttgtagttttaataatacttatttagtattttatattttaaaatcatacata

SEQ ID NO: 200898 - DNA, 1761 bp, Cannabis indica
aaatgggttttactttcttaccttacagtttcttaccttacagtattatctccttttgtaaatctcaccaattagaagtttagggtgtcgtttctgaagttctctgaaataggtattattaatttccattacctgattttgatatttgatatctttgtttgttttagatttttggttgtacttcaatatccatctctctttatttgattttatgtaagtttttttgtttttttttgctgtaaataatgatgtattttgagtttcaagcttttggagattagatttgagttaaatgagttagttttctgtttgcattatgtatggatggagttgttcatgtttgaactagtttgatttttagaataaatgttaccagttttatttgtgattttagttacttattagtgctattttttgtcagattagtgcttgaggttgagtagtactagtagagatgatggtcaatttgtagtagtactagtagtgatgatatcatgatttgtagtatcttaatgatttgtagtagtggtagtattggtttgtagtatctgaactagtattattatactaattggatgggtagagagatttatgggagtgagccaattgggattgtaatagttgcagtgacgattttggtataaacaacacatgaaatcttattctttttagaccgaataagagacttattgttatgtctcactaggcgtttatcaattgggagagttttaattttgttcttatacatactcttatatgatgtcataggcaattattatcataatagcaaatcggaatattcataaatttgttatagtatgataaaaatttggcaacctgcataagaattggtcattattattttattgttttgatatgtcaagaaattaggttcttttggttcagatttatttgatgggctcttattgatactagtgtttaggttagtcttttttaagcttttgtaattggttcatgtagatgatgagtacccctatgcagtttaaaaagaacctaaaattttgataactacatccaggaacctaagttttccacagacacagtttgcaaaggttgattttggagcttcccacttaattattttttatttttctatgtctttgttcatttgcattggtttgtatcaatctattttgaaatgctttatacttgaattgaatttatttagtacttagtttagttaacagtaagaccagaagtgagtctacatgatatgtctcactaactgtgtagcttaacatgttacaatataccacagtttttgttagccactgattattgctcctttgtgataaaacgatttttttttttttgttttagaagtaagatagccattacgtttgagtcaaaatgcttaggaatttcggaatagttagcatgagagagtgagctaacttgtataaagttgaacaatatgttttcacattgatgtatttaattggtttgcacaatctttatgcatttcttctgtgtttaattgttacttttttttttttttattgaattttaggattagtcttgtaattatatgtagatttactttatcagcattctcttatataaaagtgtaagttcggtataataatattttgtatattattaaaagaagtagttgaaactataatcatcataatcctgtattccaatcagattgttttgcagattggttcttataaatcttttataaggacggatgtgaaaaaaaacatatttagatagagatgaagacattcttgaagt

SEQ ID NO: 200899 - DNA, 1946 bp, Cannabis indica
ccattataatactagtactactgagcttttctatttcactacatgtaatcattataacgctgaccacaaatttctttccttttcaaaaatcaagaaataatatgcagtacagtacatcctcaaaatatcaaagggccctcctaagccccgttacacttcctcatcgtcaattatttttctcaatgtagttagttgactatgtctatgcaataacccccttcacttaatatgtaccaccaaaaactacatatccaataaagactcgtggagatggaataactcgcaaagataaataatgggatcactatatttttgtattccaaactttactatgtacaattaaataataaaaaaaaatgtgtcttaagaaggcaagaaccagtttttgtataacataagtagaatgaatggttaatcaagaacacataaattgttgccataaaaagatatcataatgtaattgaaatgagcaacaatagaggaatcttcccttaccccacatggggtaaagtgagtatgatccaaaagacaaaactaggcaccaacatgagaaacccacctttttggattgattacccaaaaccttcactttttattataccggggtttctactaagtactaataagtggtagttttcagttcaaaacattttaatatatccatggtgggtcatttcaaatatcatataacaaaaacaaaataacaacacttcactagtttgtgtgtttaacccttcctccaaactttcttcccccttctaatcttattaatggaaccttaaaatagacccaaataaaacctaaagtttaaaaagctataaaagagctcacaacggtcaagaatcaaaagcctaacttcaaaagtacccaaataataaaagagagagagagaaaaactgtagaaaaggtaagagaaggagcacctgtaagagtggattgaagccatggagagcggtttgaggtgttctgatggtcaagccaccaccaatgagatgactggttcttcactattccaaccatcttcttctcctccaaattaaccctagaaagcatatcaatacaaaaacaaccgcttgtgttcaaatactcttccgcaataatctcataaaagacacatcaaccaaatattcaaatataaaattaaacaaaagtagacctcaattgacaaaactaaccctcatttttgccaagaaatttggtcaatggagaaaaagaaaacaaaactgagggaccaataatgtcctttaatgcgataaatcctaagagggggaacccctaatttttaaaaccgccgaattaactatgcccacaaaactattttgtatcgactcgacatatagaaagaagaaaactttcttggtcggtctgaataatcaaggaaaaagaaagagacttatcccaaaaataacaaaaccaaagaaaacccaaatgaaactctgatcaactccagtttacctcaatcaacaatatgataaagaagaataagaagtatgacaaacccaaattcgaacacagagagaaaatacttgttctcttctgtaagctatcttcttcttcttcttctcctctccaggtcgctcttcagagaaatgtgggtttcacagacaaaactaagttgcagtagtatactactcctcatcctggaatttgtacaattttttttttcttttccagtaatttgattttgctagccaatgaaaatcgttcacgggtacttaaggcatggatgacaaataaggatgttcataaattaaatttttaattttggctttgtttttttgtgcttgactgtagattagattttgtaccatttatagatattcaaacttttttattttttgaaattaccaaaatgccaacctagttgagcttatttacgttacaacacgttttctaaagtgttacacaactttctcacaaaaacgcctttagcgggcggagggtcg

SEQ ID NO: 200900 - DNA, 1213 bp, Cannabis indica
ttaactagccttagctacgagtagtattattgttaggctttagcagtaatacctttgagaatgacaagaatatgtgttctcaagtttgcctcagcaaagttcaacgaaaagagttcaatccctaatctataggattcgagtggtatttatagtagtttgagaattatattatattttccttttccctctgttggagattttatagtaaataataccttaggctatctcatgagtccagtccataaagaagacgatctgctgactaggcaaatcagatttgaattgatttggtcaacaccatatgtacggattgtgggttgtgggcaattaatctatgaattaattgcataatattcgttataggaagtttctccattaatcttgatacgatattctattgtgatctagtagctagaatttccttatttgtgtgcaggaataaaaaagaaaactgaaagggtcttttgggaacgcactgtctcatccttctggtctcgtagtacaggacatgcttccaggtacggctcgccgaaggtagagggctttacgattgtggagctaagatacgtttatggaaggacatatctaagtgggctcggcccactttaccttttctgggtcccactgatggatcttggatgttgacttgaagtccatatgtctaataccggaaacgcagataacactcttcatttataaaagcattatttatacttcaaataatatttaaataatttctctcttctctttgtttttatttttcacttaatatttttatatttttttttatataaataaaatatattttaaaatataatatttaaagagatagagaaattgttgtataatataatataaaagtgtgaggtaaaatgaagaatatacaattttgataatatataagtataaattagaaaaattgatgagagtattttaaataaagaacgtgaaattttggtaactactttgatgtatgtcatttttatcacttttagctttaaattatagctagaaggtattttaccttcattaataaaagtggtctaataaataaactacatatgataggtttaataaataaattacacatgaaagcaatcaacactcatagcttctttgattagagcaccgccagttttatattctatcttttcaaatatatcattaattttttttttttattttacatcaaactttttatatatatcataca

SEQ ID NO: 200901 - DNA, 965 bp, Cannabis indica
cccacccttcgtcatactaaccgtcgcatggaaattacttaccattctcacaggtacaaagttattttttagttcattaacacattttcgcttcaaatgaaatttttgttacattttgtttgtaaatctcgtttaaggttctgtatctttgatttgcccatgtttagaaatattttggtattttattgggtcagattcttcttgccttgtttgcacataatatgtttgttaaaatgccgcttatgagattggtattaggaaacatcaaatttgttgcttctgttgtgtaaccggcatgttacttatttgtgtttttattctcaatttcatgtgtagacaatttcgttgaatacttagatttgttgagcagttaactaatccatctattagtatatataacttttctttgtttgtttttttggtatatttttttttattggcactcgttaatggatttattaggtgatttgtcttcatgtctcaagttattcagccccttttcaaatatggcttagttataaagaaacggcagtttcttaatttatctggttatcaccatatttgatggcatttagtttctaacatattggttgaagtcttgatatctgggttttgtatgcttttgctctatatattattcttgtggctttgttactctttatttattttattgttattgtactgtttttgtctttgggctgacaacctgttttagtgcttaattaaactttcgtgctttatatatgtttgtacgtgaaaagtatatattctagtgttgtgtttacttagaagagttatgttctatgtttgttgtaaacttgtcaaattttgaatacttatgtaaaatttattattttgctaaatctttacatcaggtactataattttgtttccaaaatttccttttcaacgataatatgattcaattagttttttcttaggcagatactttatttttcttatga

SEQ ID NO: 200902 - DNA, 549 bp, Cannabis indica
attacaaaagttaaaaaaaaaaagcaaataatataatgcacctattcattaccattacgaacgattaccatacggtgaaccaaacattatctaataaattttatttctcttaaaaagtactacataaaaatatgattgagtgtaaaaatttatatatctttccaactaggcatgtaaatgtatatagatgagtgctaaatagattctcttttgtaatctcttttgcactctttctataatttagtgacaaatgtaattttttgagattaatttttttgtacttattataactatatcattacaataaaattatcctactaatttttaacttagagttgaatgtaactctcaatacttttattttgctaagaattaatcatcaaaactcaaattttgacggcaaaaactccaaaactcgtgttctgttagcatttacccatttccattcatttttggcaattatctgctaagttggatgtccacgtgtacgtagaatgttgtccacatggacacaaaacatgatattactgactcacgtaaataaatatt

SEQ ID NO: 200903 - DNA, 712 bp, Cannabis indica
ctttaacgtactaccctggtccattcatgtggccataacgtatgggcctgttagataactttgttataagggcctgttggaacctacaatattgacactttattatgtttattcatgctttcaaagtaggtttttatttatttattttgaataaaaagttggttgatttgaatgtttttgaagattattgtctgtttgtgaatttttgtggaaattatatatacatgtgtatgtcctttgttttgttaacaggttaaggagacgagtgtaagggcacaatatgtggaagcagcttttgaatctgtgagatgccaaatttgttgatgagtactacgtacgtagtaaatcctcttttatttggtcaagcgcaaacaagtctgaatgtacttttcaactgatttaccttattactctacaatatgatagtatgacacttggaccttttgtaactcacaatgaatatacatattacatatgtttatttagtttagcactattatgatgagacctacaattaagtttacacttgaattcttcaacagcctcataataataataataataataataataataataataataataataataataataataataataagtattgctagtaagcaccttgagaactcactatggtataggcaaattagacttatgactaggacctattttagttcaggaagtttaaaaaaaaatactttta

SEQ ID NO: 200904 - DNA, 1176 bp, Cannabis indica
ttaattaacacctttattttgattttgttttcttcacatttagatgaacttgtaaggcttttaaaaataatgattatgcatgaatagtagattggatacacttgaccatataagtccctcaggcctagaacaaattttgagagctaagccatttttcattaaaaaatatgtattgtcacaataatatgcatgtcttttgtgtataatacacatgtagttgatggaattcaaactttgacctttcccatatatatttttattgactatatataatttagacattattttttgcatgataaaatatttaaaatttttcaaaaatagacataatagtagctattacagttacaatatacaataatgtcatatatatattaaaaaaaattgaatataattttttaaagtattaaaaataaaacccctctatagtaggagcaaaaataatacccccacctagaaactctcaatatttatatcttctaatattttagctgtatatatacttaattatttttaattttggagtcccagtctaagatgactttgcacttaactacctaagtttaaattataaaattttaccaaacataagtatctttgaacgtaaaaatgtaaatgggtcatcataacttttcattaaattcatatgaactaataataatctacttgacattatttcttaataggtaaggctgatagagaaggtggcatacctcttgaaatgactttggaaaatttcaacattagtggtttcactggaatgagtgatcctggttttaaccaattttttgcaccatttgttttctatagttctatgccccttaatctaaatcaagataatgataatcagactaaaaaggtaattaattaataatcaatacatactataatgatgatgatgaatatgtttgtttttttatattttttgcatatgtaaatattttatttaattgttttttttttgttgtgtgtgttttgaaggggtttcaaaataataatcaaacaatggttttagtatttatatgtgttccaattagtcctggtaagagcagattgataatgagtggatcaagacaaagatttccaagaagattttatgattggtttggtgaaatatatccaagatggatgcttcatgttttcttaaatgttattttggattcagatgcatatctc

SEQ ID NO: 200905 - DNA, 1236 bp, Cannabis indica
tggtgtagggtaaattggtaaaaacctacagtttcctttatcatttgaacttggagaccaattatgggcatttgaagattttgaaaaaccttcctaattgtgtatttaaaggggctgagagtactattcgaaaattaagagaaattatgagtgtagaagaagagcaaggagagcagaagacatcattagaggactccaaatattaatctatcttccattctctatattttgtgtttgtaattaaatttctatttttttagaatgacttttattagctaattttatttttaaggattattatatgaaccacttgaatttattttatggaataatgtaattgttttatttcttcttcttcatttaattcaattccatataatctattttaattctacaattatttactggtcatcaataattgttatgtatgaattcgaattataattctggaaggtgagatttgaatatgctctgattgtttgaatgcaaattgatttaggacgaaagtacctaagttatttgtatgattttattaattgttttgtttaatgctatcattgtgatcaaactttaacataggaatatagggagtttttttcacctatattggatttataagtcttaactagattataaactgcttaactcaacttgtcaattgaataggaagaagagaaataaggtaactacattaggaagtaaaataaaagatagttgtgaatcataataatctttatctttattatttttatttctttaaatttaaatcattgtctttttttatttacttttctctaataatttttatgaatcatatagaactaatgaattaattaattggtaattaataataaattctcgtgagaaagatactttatttattattatattacttatttcgattgcgtatgtggtgaatcctcaccctcaaaacaagtttttacatcaataacaatgtccaagaaacacaaataaaaactaaaaccaatcacaaaaccaaaacttgaacttaattgaaacaagacaaagaaaacttaacttgataatgagtgaatgatggatctttattgaataggaataaccagtagtagacaatagaatgagcctaagattacaactaaatacagtaagtaattacaaagatatgcctcacattgaggaaaatcacttcaagagtgatactcccttttacatccctccatacacgctcactatgatcttgactctctctctctc

SEQ ID NO: 200906 - DNA, 1136 bp, Cannabis indica
agtctagtcttatctcggcctgagaaagaaggcaacccgagatattcttcatggcaaggctgaattggcatattgagaagttgttggaagtaattttgatgatattgtctcgtgttaggagaaaaggatagcacacatttgtctgggttaactgcttggccactagctctatgatagatatccaacacctgctgaatagacctagctgattgggggtttgctcgacaaaagagaacactatcatcagcaaaaaacagatgagatactgatggagctgttcttgacactctcagcccatgtagagacccattgttttctttagattgcagcagccgtgagagtccttctgcacaaattagaaataggtatggcgagagagggtccccctgccttattccacgagatggcttcaaatctccaagaactttaccattcaagagaaaagaataggaaactgattgaaggcatcgaagaataaggttgacaataatggttccaaaccccattttcaacatgatctgagcaatataattccattccactcgatcgaacgctttggacatgtctagcttgattgcagcatacccttgtgaaccccgttttcgattcttcagcgagtgcaacaactcaaaagcaatgagaacattatcagttatcaatcgttgagacatgaaggcactttgatattcagagatcaccaatggcaagaaaggttgcaatcgcagcacaattgacttagaaaccaatttatagagtacgttgcacaaactgattggtcgatactgagttataaactgtggcttcttaacctttggaataagagtgattatagtgctattgaagagagtaggatcagcaccattgttgagaacttccaacaccgattctgtgactaaacttcccacaatattccaatagttggtaaagaacatgactgacataccatctttcccagggcttttgtcatcactcattgagtggagagcagtataaacttcagatgcagtaaatggcgcagaaatgatatctcttgcattctcatcaagcatggttgggacaacttctaaaattgaattaatagcatgatcatcaacttggtggcttgtgaaaatagattgaaaataatctgaaattat

SEQ ID NO: 200907 - DNA, 1684 bp, Cannabis indica
aaaaaaagtagaagaagaagataatgatgttattttttctcttcattatttgtatttttcgacttaaaaatttaataaagacatgagatctttagttatgttttaagtccaaaattatattttaactcttccttacataaaacttctaatggaaatatattttttcttaaataagaactttttttaattattgacttcacaataaaaaaaaaaatgtttacacatataagatgtatataacgtatatgacggccggcaacaaagttcagatctcttatcttgctctcattgttttcttaaaagaataccattaccctaacatttactgtacagagtacaattcatactcaaattcagataaaatttacaatcaaaatccaaatacattaatacataaatgcaaaggaaactaaacattatttcacaatcaccatttttgctcaagtgaaagtaattcttttgcccaaaaataccgagaacttttttggaaaaaaaaataagacagatgaggttttagttgtctcatacccatgctaaatcacttggttcatgagtggttatgaaattttataatagagataggtaattgatagaaagggtgggagagtatgatttggcattatcaataaatcattgtcatagaagaggaggctccctaaaacctcataggtctctgtcccttacttctctgatggtgttgagcatatatgaaacccagaataatgtgtgaagctttgcccccattgtcgactcgcccaaaagctttgcttagcagtgacctccgcccttaccgtcaactccctcagctgcgagctctgccgtctgtcattggctcactcatcttgcttttcgaaaatcacagagaaatgaaaattagagagaaagagatggaaattggagattaggttaatcgctgaagaaagaaggagagagagaactgatatttgtcttttcaatattttatataatataatctaaccttttttttaattattttggatgtctatatatttaaaaattaacatttaatttgatacacactagtacaccttaaatattgtgtacactcaaaagtcatgtgaaggattgatctcgaagtacttacactgtagtctttagaatcttccaccacacacaaagattagtgtgggcttgtaggataaagtgtataccaatattaatttctcaaaacatgagcaaaaactattgtagagtgattatggaaagaaaaaaaattaactggttaatcttttttagactttcctaaaaataataccttgttaggttttggtttatacggtatattcaaataaaaatcaataaaagttttatttaattaattatttaaattcaaattatttattaaattatatttaattatttgaataaataatataaccgaattctgttatagatatttatttcctataatcgattgagaaaatctctcaactaccttgagagaatatctcaattaatagaaatatctataactacttttcaaattcaaatttatattaatatttgtttttgtaattaattaactaacccaaaaataaatacagtgggaacaacactatataataggcacttatcactgtgttaggacacaatgatagtggcgtcacctatgtcttaatcagacattggtggtgtcttttgtccatcaactttatctttctct

SEQ ID NO: 200908 - DNA, 1159 bp, Cannabis indica
taaatttttcattaatgttcattaaatattatttaatatgtgtaagatatttatatttttttatttatttgagtgcagtgtatataggtcatagtattatgacgtgctaaaaataagatatagaaccgtcgcaatttgtaagcttgatagttttatattgtgctcaaatttgtatcgtgttttactcaagctagtccgtttttcttaaacataccaacatatttcttatacgagcttaaattctccacatttttctattttattaattagtgagttaaatactaatttatatttgttctatttaataaatttctcttctatataattttttaacattacatacaattatatatataaaaaaataattaagttattaattttaatatttactattattttaattaataactaaattttataaatattattattagattatcaagtttttttaacgtgtcatgtttccgagttagtttatttatgtttatatgtcttgttcatgcttatacctatatttttttgtgttggtttggtgtggtgtcattaaacctactatagctgggtgacttcaaacaaataaaataaaataattaataggaaatagaaagtatatacagaggtgttattttttgactttataccataaactcatagaaaaaattatttataaatccctccctcatacacactctttttatcagggaacataaagacatattataaagactatataatataacaaacatggaagaaatcaagggagtacttaaagcaaaggatgttggttgtgtggcaacaatcttagccattggcacagccaatcctttgaactgtgtgaaccaagatgaattcttacatagttatttcaaactcaccaacaatcacaacaacccatcgttcaaagagctcttcacccgcatttgtaagtaaattatatatatacaaatatagaatgtattactactaaaatttaggataacgtgaatgaggttctatttcctaatacgacatgttagaatttacgataaggtgaatgagattttatcttaaaactaattgacaatgggaggagtagatcattcatcttaaatattttattatctttctacatattagcaacgtgaaacacactctaacaattactaatatatattttgaa

SEQ ID NO: 200909 - DNA, 725 bp, Cannabis indica
gagtggtggggcccaaactcaacattatatttttaacacatcccaacaaatgcacattttgcactgctccattgctgcctatgattccacccatctcaatgttgggtgctttgttgggaacattgtgtttctgaaaaagaaatagaaaaatattaaaatattgtatggtttataatatattattgtagagtagctactcataataccctttcataagaaaaaaaatatatactatatggctcttataaacaaacatattaatataattatgtatatttatattccttaggcgctttgggagtgcgtttagaacacaacttcacaaacccatcatgcagatttgcagatggaatgcttctaaaattgctgccaaactagctatcatgtgaaccccatttgatgagatcaactgtatatgctattaattaaatatactatattattgtttattgagactcaaataattatataattatatactcatgttgtttttattatcatattcaagtatttctatcatggcttaatattgtgatatgtgagaaatcccatatctggcttataaaagtaaactttatgtatattaaagcttaattcatcatgcttggctaaatattaagagtacattttagtactataagtctatctataacccctcacttataaattatttgtttaaaaagatgatttttgatttgaaagcttagtgatgtacacatagaaat

SEQ ID NO: 200910 - DNA, 393 bp, Cannabis indica
taattaatttaattttatttatttaattatttaaatgaatcaaataaattgatacaatcaaagatatagataacaaaaaattaaatatatgataataatcatgttgatcacttgacgagtctagttagggttaaaattttttgatttaagattaattgattattcatgtcaatatgcatacacaatataaatacaaatatgacacaccaccattaatactacccctaacatatggtactttgtatttaaacaagtatatcttaagatatttttttataaaattacactaaatataatatttattcaatttgtcaaaaccttattaaaaattactggctgatagatattttaacgatattaattggtatattaaatctctctaaacacagtagc

SEQ ID NO: 200911 - DNA, 873 bp, Cannabis indica
ttttatccaaatcttagtataaacggacaccattagtttagagaacgtgttgtggtgcaaaagatgttgaacccaaaccagtaaactttaacttaaatacctggaaaaaaaaatcatatattatatatatacatatcaataatatggagaaatgttataaagtgtacttagcactgtctagtattcttcaaagtgtaatattattaatagtgtaattgaatataaaatttcgtctaatttaatatgggatgctttggattatcaactcctcataattaatggtaagatcactcattataagtgagataatagttaaaagttaaaaaaaaaaaaaagctagttaagagcttaaaattaagctccaataaatattgtcaacccttaattattatattttatctcaaactttttttttctcttttattccattaattaatttttaattattctttttactctttcatatttttttttctattttaattaataaaatataatatttcaatgatataaaaaatatatataaaaaattaatatataatataaatatttgaggtaaaataaagaaaaaaaaccaaaatttagtgaaatatttaaaaaatattaatgctgttgtgagtggtctaagagcatcaccaaggaggcatcaaatttggtgatgcagtagcattaggcctccaacgtaacatcaaattttacactaaattgccgtgtgtgctacatgccgtgcactgttcacacggcattactttttttttttttttattttttatataacttaattttgtatatgtctatattattaattgtatttattaaattacatgtgttctttttagttactttttttaataaaaattaatataataataa

SEQ ID NO: 200912 - DNA, 944 bp, Cannabis indica
taaaatacattattggtacttattaaatattgagttctacataacttaagaaaataatttttagaaaatattgctaaccaatcataaaacactacctataaaaaatgcgggtagccaataacaatactcaaactaaaaacataagcaaaacctatcatagatgccaccccatggatcatggatggcaatatcttacgtgtttaagccgaaaccatgaacatatcacatatgggacttctagacttgcacatttttagtaagaaatgtatcaaattacaccaattctttttttttttttttaaaattaaagaaaagattgaacttattaaattgatatttattctgagaagaagagtgatattttgaaaaataagctcaaaactccaaaattcatgttgaaaattaattaattaattaattaatgtatgaagctgctgaactgaaaccatcaaaagaaacctcaaaactcaccaccaatggctcacgagtcattcaaatcaatgttgattcaaacccaatacatctaatctacatgtatacctaagccaacccaatcttcgctgaattcaaatcttctctctcacggtggtctggttcgtgctcagtgatctcttgtcctcgtcatcgctcacggtgattctcttatccttctatttaagcttcaatgttaacaggaacacaatgctacctcttatatattcacttgtttgtttatcaagctcagtactgatattcattttcttggaaaattttcaggtatatcatccatatattggagtgtgtcgattcctttgttcttattgttttggttagttttttctcctactattcttacttgataagtttaatgcattattatgctatgcttttggtgtactttgtagtggatattgaattagaattaaacaattagtttagaacaaaattaattttattgtttaggt

SEQ ID NO: 200913 - DNA, 1208 bp, Cannabis indica
gtcttatcaattacattgtaagtttatcgagtttagcatgtaaacctcaaagctgaactttctaagtttcacaaagcttaatcttaagaaactccatatccatttcatttacatgctaaattccacatggtgactcattactactagaaactgtaagcaacagtgaagtgtaatatgcttgctttctacaatcttttaatctcataagcatgttaacaatgtatttggctaaagttacatgatttgattaggttcaaatatcacggttttttacaggaacgagacaaggtacatccaaatgcagtcaattttaggcaatatatatatcttatagtccatataacaatccaccatcagttcctctttctttaccacataatttatataacacaaactgttgttatgtagaaacaaagcattaacttgggaagcatatatattataagtaattttgatctgattttttctggaacaaaaatggatggttgctattctcttcatagtacccgcttatgtacaaaaacatttcttatgtataaaaaaatttgaataataaaattataaaatttgcaagttctaaatatttttgctgatttatgttatgtttgtataagtactcctaccaaaattaattttataatatttaaacacaaaacgatattttaaatagtaaaatatattattaatattttacagttattatatcaacaaaattggtaatttttttaaattatataaataataatttaatgacatgtttacaaatgtaagtgatataatttagtagcatttttaaaatgtcactaaaatcattttaaatataataaataaatatataaaaatttattagtcacatttaaaatgttattaattattattttagtggcattttcaaatgtcactaaagtgaactatttagttacatttgactttacctcacaccgtggtcatcagggacggatacagtcatgtatttccaaatagcattttcattctacaatattacaataataataataaagatacaattgttagagagaatccagagaattaaactaaagatacaaacatagaagaattacaatcaaatctcacttgagggaagccatttcttaaaatggcaatccctttaacatccctccaatctgatcatattgtacacactgtttttggttccaactctctaattctctctcaaaacaatgttt

SEQ ID NO: 200914 - DNA, 652 bp, Cannabis indica
tttaatttattagtacttaactataatttttgcgaaatcgacctcactcttcttctgagtctattacttgaaagagatacatatatttgcgtagaaaaattcataacaatgagatatttgatcaaatggatgttataatattttgaactgttagtaggtagaagtttaaacttttgtaatttggtggtggattgctaatgtggtccttccaaggaactaactaaaccctttccattaataagcttgggtctctctctaccttatcattttgggtactttaaatttaattatataactttatatacttatttgaagggtgcaacataaatagaaagtgaaaaaaaaattatgagaaaaataaaaagaaacaaaaaaaaaaaaaaaacaataaatataagaaaatgggagaaaaagaaaagaaaagaataagtagaaaatcataaagaaataaaaaatatttaagaaaataaaataaaagaaataatgacagaaataaaaagtaaattataaatattaattataacaaattaaatattttaattaaaaatcaatttattttaattatatagtaaattataattaatttaaatctaaaaataaaattttatcacttaataatatgttataacaaattataaaaaaatataattat

SEQ ID NO: 200915 - DNA, 804 bp, Cannabis indica
cgaaatcacatgccgaaatatttatttttatattgatatttgattgtagttaatctgagtttttaatatttcagtttaaaaaatttaaaatgtattttaggcatagtactactgtgaaaaggttaaggagagcagtccaatagtaaatttattcaattacctaaagagaaaataccaacatcacaattatttttgtttagaagatctaattgttatgttgatatattattacaatttagagatgttaacaaatcttttcgtgacttgctaagagttactttagagctggtgaatattaggatgtcccctctccggcctttcccatgtattcatgaagaagaagagaaaacaatgaaatgcttgcccaacatcacttgattcacttctcatttaatgagcaatatttttttaaaaaaaaattaatgttttattttttattgtttttttatagtattgctattagagagttagcacattttatatatgtcattttgtgattggctagtaatatagtaatattttctataagttaatatattaaactacatagtgtccaatacttagtttaaaggtgctagctcctgcttatgtctttaacattctttattttttttttattcccattgtaaggttattattattttgatttaattatttcaatctatgaaaggtgtatttgaaattttttttaagaggtgtttttatttttatactttaaaataatttttttttttagtatttttatagaattctacatagaaatttctattgcaaaaaagtatagaaacctaaactgtaaattaa

SEQ ID NO: 200916 - DNA, 581 bp, Cannabis indica
tttttttttttttttgagatgagtttcttaataatttctatgcatgtaggctgattaaaatttatttttagtataataaattaataagcatttgctaataaaattgattaaataaagaatttataggtaaaaaagaaaaatggtctctttacaggagaccattgcagaattcttggataatataatttttgccggtgtatgtatagtgggtcgttggataaattgctgagattattattaatttgacggcttaatattaagtggaaaagtatacaaaaccattaatatatatttctcaaaataattaaagtctatacaataaacattatgcttttggattttagctaccactattattggaataatatgttgctttgccaattatttcaatcaaatctgtccactattattgtcttgtaaggcgtggacggctatgcatgcttttctttctgatctttttctttttttttttatttttttttatttttcaatcttttcaaatttaagagcttggggttcatagcaatttaattatcaatcactcaatatatatgtatatatactagtaaaaagttacgtgc

SEQ ID NO: 200917 - DNA, 725 bp, Cannabis indica
aaccacttttaaaatttccttaacacatgtgtaaatttttacacattggtccaactcttattgaaaggaggttcataaccctgaaataattagactataattaagaatatatatataattacgaaaagtaatattaatgagattatttaaatgaaaattaaaagttaagcaaagtacacttcgttagaatttttgtcaagtttgatatcaattgtaagagtttttagatgatgaaaactcttaagcacaaaaatgacgccgaaaagttcattatcatgcgtagcagtctttaattaggatcaagtgtttgatatccaaacaattcctcaaactaaggagctcattcatggaaagaataacctgtaatgaaaataatgatataccactttaagaatacttttagaatatgtatagttaaaattagattatttaataacaaaggaatatttcaaatatatgtacctgaagtgtgtaactgcaaaccatcaaagtcttagcttcacaaagatcactaaataaattttgaagaatctcaccaagtttagaatattcagattcaacaccaaaattaaatagcctcaacttcaagtttgtcactgatttcaatagcctcgcgcgcagttccaacatttctttagacttaaaatctccaacaactcgcatttctggatcaaggccttgagagttgtcagcgacaatctgatccaccctatatatttgtacat

SEQ ID NO: 200918 - DNA, 793 bp, Cannabis indica
tttttttttaaaaaaagaaaagtgttagatcatattcatataacagcatgaaattccaatatgaaagttggaatgagtggagaaattggaatctttaaattcgtgttaaagaattaatgatctaagcttataagttaacaatattcatagcatcatctgtaacaattaaaaataaacaatattcatggcagctcatatcatattagctatttaatattattcacaaaaaatatattttattattacaaaattatattttaatttttactcagacatgacccaccctaaatgctaatatattagtgcacgaaattataaaaacaaagtctttcaagaaaaaatgaaaatgtattgtaaattatatatatactgataaatttatttaggatgtatttagaatttattttataataattaagcagtctacgtacaattaattagtatgtactttaataatttaaatttattcttaaagtaatgacataaggtaacacttaagtgttgtcttaaaccaatacttttggcaacacttttataagtgttgtcttttaattttctttagttaaaaaaaataagtattattaattgtgtttttttttagtagcggctacaaatgacatcttgcgaatggttaaagatatcctataaaattattagattaaattataagggatttaatacttaattacgtacataaatagcgatattatttcttagaaggttcttgctttttatagcatttctcttagctcatttggtatgtaaaattggattagattagactaaattcttt

SEQ ID NO: 200919 - DNA, 1045 bp, Cannabis indica
gtatacacgaataaaataattattccaaaatatatatatactcttcaggagttacttttatatttatcaaactttatatttcttccagaattactatcttcaattcaatgatgtgtataatttaaaaggtacaagaaaatttcatatgttgttgtaatggtcaaatatatagaatcataatatgtcatttattttttctcatatctttctaacaagttgtctaatttatcaatagactatttagcagtctaattattgcgacttgataaattatatacttaaatgtacaaccagtacatatgataattcattacttgtcactttcatgacttgataaaaactatccgtctagatacaaacaaaagtatttaactttttttaaataaataatatttaaaacttactagagcaaccaaaatcataaattgaaaaaaaaaacgttaaaaaataagtatatgaagtgattttctttaaaaaatcactacaatattaagtgtaaatttaatgtaatacagtatatataattatatactaactaccaaatttaactagtatatatatataaattatagtatttggttgtgacaggtaagatccaaaaatcatttttgtaaccaaacttaagtaccaatatcctaaaatgaaaacattataatattcatgaatatatcgatatacttacataatataaaatatttgaatgttgtttaagcaaagtctaacaccctttcttcagtaatcattttaagttactagaagagtacgtaattaaaattaatgtaaaattacgtacaaaacgtgcgagttatatatgattatgacacaatgagcacgatttgaaacacatttttcacgatcattttcattgggtgcattttcatttttttatcgctagaattgtgaaatgatgtagtgagaaacgaagtgcaagttacgtatttgcacgtttgaagagtaccgattattttgataaattaacttcaatacatatagatacacatatatatacgtattacatcactaattaatcattttcctttctata

SEQ ID NO: 200920 - DNA, 2240 bp, Cannabis indica
gtaattatatcccattcttatgggatatgagcattgaagagtgtaaataattgaggctggcctctcaattacctctaattaaataattatagtgtaattacaaacatacaaaattatataattaccttcaattatagctaattctaattcccacttaacttcctttcaaaaaataaataaataaataaatttccacttaactttccaaacaaaccctaaaattatattaatctcatgccatatatggatatatatatataaaatttcaactacagtactaccaataaatattacataaaacttgcatataaaagttccatattaattagaatctagtctttcttgatacgcttacaaatataagatataaaatatcttaaaatttgaaatgggaggaggctaatattggtagtggctgaaatccatgacgaagagtggcttcccaaactttgtgaatatttgtgtttttagtctgaaagccacactcatgctcattccagccttctaagccatgtactattcctgctatgcgccatgcactcatcacccttctcggcaaccaattctgttcataaatataatatatattcattaattaataatttattaaaatatattacacaattatcatgcacatgatcacataattatcatatatataataatgtatacctcacaggagtggagattctctagagatgtaggagtgtgcattgctggtgtgtagtggtaaaagcagtctttgcgaaatggatgaggtgggaattgagaatagggaatgaatattgttccttttggagcttttacttgttcttctttgctcacttcatcccccactaaccaaatctacatgcattattaattatattattataattcataaaaattgttatcattataaactttattattaactaatatttattaattaattaccttttcagaataacttttggagaccaccaaacaattattaatggtacttgaactggagttattgatcattaatgtttcctccactttcttgtactcatcctcttttgatgtagccacctgaatgttcataccattatataatatatatatatatatgtatgtatgtatgaatgtataatgtagacgcacaaagtttactatgaagaatttatcaagctcttgaattgcttaagtgagattatcattataatataacgatagcagataatagattatgatacatattcaaaaaatgcaatttttctaattgagtccagtaaaaatctgatttttgtatgatattagtgcatattcaaggtgactttattgtacagctacaatagttgacaattttataaattgagttttttttttcaatactgtttttccatatcaattaattttcctaacacatatttttcaagaaatatggcttgttttaataaatatggctaattagccaattgagtttcagtttttttcttctcatacactaatctataaactatctatgacttattctctcataaagtacttaaatttatatgaagagaaaatttttatatatttggaaggaaagagaaaaattcatacatatacacaaaaaaaaaaaaaaaaaaaaaaaaaaaaaatagaagtcccgtatttttaaatcaaaagagggaaaatattatttattaaaagaatgaaagatgatcgattttgttaaaaataatacttaaaaagcgcgctaatgtaataagtccaacgagagaaattcatgatgagttattttaatcctcagtttctaattctataccaaaacacatttgttttttaccctcaattattatcttgcctaatccaacaagaaaagcatgctccaaatctcatcctctattgtattatttaatattgtttgttatgattaaataaaaattatcctctgatcatgcccattttctttcccttcattctattacctctctgactaaaagattaagaatctattaaatgtgtatcataaataattaataattcattctaaattcaatcaactaaggagccatggtcattgtttgatagaaacaacaaatacattagtttaataaggatcagtagcgatataataagaatttgagtaataggaaaaataagtcagtagttgaagttttgtttagtttcgtatcatttttttaagatcattaaactcacctttgtatttgtattgtttttcaaactttcagagttttatacttcaaaacttcacatgtcaattttcctac

SEQ ID NO: 200921 - DNA, 971 bp, Cannabis indica
gttctttctatcatattcattcagtttatctaatatcgtaaaaattacattgatcaatttcacatatttaaatttaaatttaaataacgctactaaattatatcaatataaatacatgaaaatgttaacacaccctaagatcatattcgagcaatactgtaaaaatataatagctagtgggacacctatagttaaaaaacctcttcaaatatttcaaaaagaaaatcttcttcttattattattataactatatttttgggtggatataataataatatatatatttttttaaaaaaaaaaaaaccctaataaataaccctttttgttttctggccagtgatgccaagttctttaaatgccacgtggcggcggctaactcatatacgacattatactatgcccaattttcattcattgatttatatatatttatattttatgtttcgagtaatactagaaagaaatacttgtctataacaacagcaacaacaacaacaaaccatacaaacaccaacttcacaagatgatttcacaacacacaataatatttactccaagtcaaacaatgattaaaatatttatgctgttataatcatatgacataattgtcaaaatattaaatttgatatgaaaacaagggggaagttaactaagtatgatacactaatttccaatattttaattacactttacatcaaattaattgggtagtttttcacaatatcaaatataaatttggttttaccaaatataataataaaaaaaattgtattaattgaactgcaaaacttgtttaaattcactacaagaaaaactactttgtcggcgcataaactcgctggcaaaagtacgtggcaacataatttttcttaactaaataattagtgtgtatatgttgtactaattaattaaggatacacatgtatccacacactaaaaaaatgtttctttagtaacaactttttagtta

SEQ ID NO: 200922 - DNA, 506 bp, Cannabis indica
aaagctttgccggtgcattttttttgccggcaaaactaaataggaaaatcaaaattaaacccggttgtacttttttccggtgtaataatgcgtcggcaaaatttattggcgccaattcatctcaatagtgcaaacactgcgccggtaaaagtgtttgtgccattgagatgaattggcaccaatgacttttgcccgcacattattgcgccaggaaaagtgtttctaaaacccactttggggggattaagggttttgttataccgataatgaacttttctcggcgcttattatcgccagcaaatgcatgttttgccggtgcactattgaagtgcgccgacataaggtcttttaccgaccaagcatagcgaataacttttgcccgtgcagttcagcaccgataaaaatttttcggtacatatagtatacttttatcggcgcataaacgggcctacaaaaatgaacttttttgtagtgagtaggctcaaaactttttctaaaataaatag

SEQ ID NO: 200923 - DNA, 3168 bp, Cannabis indica
tagtgcaatactaataagtctcctttcctaagtctttaaagatcaataaaaacatacaactgtaatataaagttagggaagagatctaacaacaaaattttagttggactgggcctcctcatgacttcagttaactagaaaagttcacacttctatttcaactagactttgataagcattaactataaatcactaactaactatataggctgaaacggaaaacattatttattaacccataaaacatgggaaacatttatgtaagcccaaaataaaagtggtacaacatggttacaagtgactttgagctaaaataagtttatgtgttagtgaagaaagtgcctgccttttgtcttgttttgacattgtcaatagaatagtatcaactgtgaatagcttattaactatgtaagttgtcactgtaacttaaaacaggtggatttggaaggactaataatgactgggaagttaaatatgctcgtgattggacaagatgtccttaaacttaacggcgaggtttgtattttaatacatgttcataatatgtggttgattttgaggtttagataaagggagattttggaaatacactggcaatgaaactcatttaagttcattggtttttataggtaggatctcagtgcactattcttactgataatttctgtgaagatgcctatgatctacttcagacccccatgctgaagaaacttctggtaaattttgtttatttttcagaatcactaaaccaagaatatatgttgcaattacaggatattaaggtcctctttctggattggaattctcactcatttattgcagcttgcagctatcctgttagacactcagaacctaaactcatccagtcaacattctatggcaagagatgcagaggcagttcaattgctgttagttggctcaaccccaaattacagaaacactctttttgatcaatgtaagtgatcttgtcgatctctgaacattttaagattatacatgctgacatgattgtaaatctccaagtttttttggttatttctttcagtgatccaaggtcaaagagacaactcctttttagaagctttgcggcagaattatgggaatccatctaaagacagtaagctatcactgttatttctttttattaaaaaaaaaaccttttatgcagtttgcaataactgctacaaatttcagttaaaataaagtcattagtcttgaaactttgcacagtttgacaatataaatttcaacgatgtaacttcattgcattatgactttattctattcaagatataaaagattatgaaaatgagttatatgtgtaagtatatagacgtatagtcattttctaaatatttgatttaggatctaatagtttgtttttcaaggttacttgtgtttttattcttctaaattttcaatttaattcttatgctagttctctttgttgtctagcgaggttgaagccctgtcaacatggttttaattttaaagttctaacttgaccttaacttgttcattttatggttcttgaacatttatagtgtgattattcagcatacttgtttgcttttctttcaattcaaggttacatatttggagttccttaaaagcttaaacattcattatgatatgtttcatgttttatctgctcctaactgtatgatcactttgattgttctctcatttataggagtgtcatatttttagttctagtttctattgaaagtaagcatcaattgtcttgacataattatttttatggtttgtctcttttggtcttacttttataggtggtcatgagagtgaggagcatgtggggcataagactgtggatagaaaatcgctgtctgttaatcgccatgaagcaatggcacaacattcagaacagaaaaataatgcaaaacctaacaaggtttctcaaaaatcaggtcagagcatgttctcttgcctcctaagctatttttctcacacgttaacatttctagagacaaacgaaatgtttttttccctaatcttaacaagaagttcatgtgtcaagcttgcattatacaaccaagttttcttccaacttccagcatgtgatcatttttaccctaatagcctctgacatcattttcccttgtagaaaaaccaagttcagcacatgccaaaggttcttcaacgccgccaactaaagcaaaccccgacgcgtctcgtggaaagaacaagttcttccttgcaaagtggtttggtttcggttcaaaaaaataaaaaaaatcacagctaacaaccacttctattctacagagaaaacaagaattttgttctattttcttatcaccaagtcaaagataggttcaaccaaacaaatggcgtttccatttcacattactacaggtttttttttttttacctataaaagtggtgatgtcagtgtaagaaagtaaagcccaaattttcttttgagttgttgatatatttttttttctttgttatgtcatattttattgtttctcattgtgattcggacatgggtatttgatatataatataatttattacttgtacttgtcaaagaaatagttgattgaaatttttgcatggcatgttcacatctagaaatagatgggtgctaacataacatgtcttattaaatattaaataaccattgggtagttttcagaagaggacatgtcatagctctcacaacacaagctcacaaggtgtgaaaaatgtcacaactttatccttattcaattgtctttttggcttttctcatactatgaatatgatgagacggttcaagtggcaacagtcacttggcgggtttctttccaattgctcaattctatccccaatttaagcatagagagacaaaattttcccttaacataatacatcacccaactaggaatgacacaaaatggtatggctttggcttattattattatgaagaatgataactctattattacacatgtaatatatgatcctacctctatatataactatatatatatatatttaagaagggtttcacatgtatatatatatatatatatatatatatttgtttcggtaatataagaaaattattgtacatttatcaaattatgaataattaaatagtgaaaatatgatttaaagaatcagttacatttctaatttgtttttttattacttac

SEQ ID NO: 200924 - DNA, 912 bp, Cannabis indica
taaacaaaaataaaagagatctctcttgtagttctccgtcagacaagaaaggactatttcagtcactttagtttattttctatttattttataatgtttaaatagttaaggttaatctaatgaataaacagatgacacgtgtacatatgtatacaatgtaacacatctagttgttgtttaatggtaaaatttaactaaaattttaaatttgtaaacaaaaataaacttaaagcaattttgtcaaaagaaaaaaattaattggtgcttaacattttgaggattttttaaatataatttcctatattcatttttattttttttgcttatattatacacatatattttctatcaattttgattccactcactcggtataaaagatcagttgtctttattattattttcattaaatatacaaaacaaacaaatggttcatcattgattttatctttattttccttattggaaagcttttgggtagtttatttcgttggtacccaaactacaccaacggccactcaaatgagatgataagacattattggacattctatactttcactttcagataaacttctttaattattatgatctcttcatgtccaaatatgcatcatatctttttaagaaagtataattttaatttatttatatcacaaatatacgttataggtatattgttatactaagtttttatatctatataaaaattaaataatttgtttataatagataaggtttaaatattcagctacacatgcatattttagtataaatacatgcaattgaatactttaaactttattttcagtatattaaaattttctattataattataatatacactatcatataaaaaaatataattataagttccaaatggagtagtagcttatacccttgttttttct

SEQ ID NO: 200925 - DNA, 1697 bp, Cannabis indica
aaaatctcactttttttttttctttgctttctagaggaatttggataaaaattattgcatcttgcattcattttttcacttggaaacacgtcattaaggaactttttttttaaaaaaaaaaaaaacttttaatgtgctataccaatggttcttaagttttattttctaaaactggtgccatttctgcagatattcgagattattggctttgtttatcagtacctcaagttattgcgtcaagtttctccacaagaatggatatttaaggaactccaggatattggaaacatggattttagattcgctgaagagcaaccccaggatgattatgcctcagaacttgcaggtactctttgtttggttttcaagtttcctctttgtttatttatgtttttatttcccttataattgatttagggtcttaatgacactcttgctcatctatcataccataactcacagttggtatattgtatttggcctctcttggtttcttggactatgattgagaattatttaatctttgtgggtataagaaggtgctaactctcctacatatatattgcctctatattttgaagaatgatttcatttagcatattatttatattggcattatgaagtgtttataggtgtttgattgttatggttttatactttttgagaaatttatactcagttttttgttaaccataatgaaaccttttcattgcagagaatttactacgttatcctacagagcatgtaatctatggagactatgtctacaatacatgggatgaggacctgttaaaatatgttattggtttcttcaaacctgaaaacatgaggattgatgtggtatcaaaatccttcaagtcagaaggtaaatcccttcaaccttaagatgaaataaaatgcattcttcatctaaacaaacaatgctggaagcttttagtatccaaatggtttgagctgcataatgttaactttttggttctacttttaccaggttgtcaatttgaaccttggtttggatcgcggtacgtcgaggaagatatttcatcttccttgatggacttatggagggatcctcctgaaatcgatgtttcattacatcttccttcaaagaatgagttcattccttctaatttttccatccatgccgataatgcgtccaacagtactgcaaatgcttctccaagatgtatacttgatgatccattgatgaagttctggtataagcttgatgacactttcaaacttcctcgtgcaaatacatatttccgtatcaacttgaagggtggatatgacaacataaagaattgtgttttgaccgaactatttattcacctcctcaaagatgagctaaatgaacttgtatatcaggttagtagcttaacttttatgtgtaatagtaataccagtgattggttatgctagcatcatttcaaatctgattctatggacacatgtttcttattcaatctgctgtcagttgtttggcagagagattgaattgacttgcttctagaattattgtcaacctagaattcataactaaacaatttaataaatttgtcttcatgttgtttgagatggagctgtgtgctcttcaatatctatgatttgttctgtattgccaaaacttatgaaccactttatctaatttttcatatatttttaattttaatctctaccattatctttgtttagtc

SEQ ID NO: 200926 - DNA, 1222 bp, Cannabis indica
tttttcatagaactcatagaagacgccacgtcaccactatatgtttcatcatttatttaactatatatagataaatataaaatactaaaattaacaccatttgatattgatgttaatttttttattagttatatattttttgatttttttagttttatgtaaaatcaatgttaagttttgacataaaaatctaatgataagcataatgattatgataaaagtggtcatataaattgtgttttgctttatagatgtataaatatttataaattattgtgcatatttatatatttttttaaatatttgaaacattgttataaattttttagatatttattaaatattaataaaagagtgtttttatttttcaaattcaaaatatttttttttgtatttttacggaattctacacaaaaattcctatagcaactaatggagcaatctaaatcgcaattaaaattcgtataacaacccacacagaaattaccaaagaaactacgggaacaactcaaattgtaaatataaaaaaaaaatagtatataaggtaattctcctaaaaaataaaatttaaaaaataaaaaataaccaaaatttaataaaatagttctatttgttaaaataattaaagaaatttgaatttttgaccaaatttaaaaaatctaataatatatgttgcattcatctaagaaaatataactaattataagcaagaatcatcaattacacataaaaaaatacaaaaaaatataaaattaattttgcacaaacccaaataaaagaaatagtgatctatagactataaataagctctaactgcatcaccacatatattctaaacaatgtagatttttttttcaaaataactcactaaagagtaaaatcaataaaatttgaaaaattaaataaaaaaatataaaaaaagagataaaagataattggaatagattattgtcctatatttttcacttttatatagatatataagctataatcatcaattacacagaaaaataatgtaatattaattttgcacaaactaaagtgaaaaacatattgatctatacatataaataaactctaagtgtctcatatttatttttaaataaaataatgtgagactttttctaaaatagctcactaaaaagtaaaattaattaaatttgaaaaagtaaataaaaatatagaaaaagagataaaagataaatctatatctatatatcta

SEQ ID NO: 200927 - DNA, 1002 bp, Cannabis indica
agataatatttcagatttataaaccaacaatattttacacatattaactacaatatttatatatatatataatatatttaagatttataataaatattaatcgaaatattaactacaatttatacagacataaaaacatactttacacaaatgaaaatttgtgatctctcttattcaaaccaaaaattttaaacctcttctacaaattctgaaaatataacacaaaaaaaattaaattaaaaacagaacaaaaatatttctaaaatttctaaacacttcaaaaaattatattatagaaaatatattggtatatataaacacattaaacacatacctttttaatgagggaccggaggcagcgacggagacgaaagcggaggcgaagccgtaggcggaggcggagaagcgtcactggcgatgggggaggcggacctctccttcagatttttcagagagaaagaaatgggaaaataaaaattggacaaaaaatgaaaaggaaaaaatgggaaaaccggagggtggagggtttaaataaatgaacaataccggcgagggtccgccgctaataaggggtcccgccggtaattgtgcaaataataatattttattagtattagcggcagattcccgctggtatagatccgccgctaatgctaatttgaataaataagcgggcattttcccgcatttattcgtcccccttaataccggcgggtggggtccgcaactaataatgagaaatccgtcggtattgttctttttaaattatatttttaattttttttaataaacactaatatcggcggaccctctaaatccgccgataataacctcattattaggggcggaccttcccctatttgaatatcaaaaattgtgttaattaacacacaagctcatcttcattcttatttcccaacttatattttgataaaaatatatatatctcactacaacaattttcttattaggggcggaccttccccgctagtaataggtccg

SEQ ID NO: 200928 - DNA, 1232 bp, Cannabis indica
aaaagtacctactcatttcatttctctaatctcaagtatattaaacttttagacgtaagaaagtttaaaatacattaaaacatatatgtatctattgttgtttctaaaattttaaggtcaaatgcagttcgccagtgtatgttgagggtgacattgaaactagagtttacaatgacagcatcaacggtgaagtcaaatacattgcagagatatgtgttcgtcaagatggtatgtcagttagacagaatattgtcattctcttatatccttattctttgtaattatttgttatgtatagatacaatatacatgtttgtatattaaaaataaaaaatagaaaacaataacctgttctattggtcatgattagttgtgctaaaacaaaccaagtttatgtgctctaacttgtctcacttgggcaatggcggaactagagtaagaaaataagtaaggggtcgaagttgtgaacaaatactaaacgagaaatatataacaacctatttttttttttgaggggggggggggggggttgggttgggggtggggcatggccacctcttaggtacacatggttctgcccctgcacttggatgagatgagaaatgctcttgtttgagtttaagttataagcctgattcttttttacttttgtctcttaatttttttaaatttgatcgttttaggggttggggaaggggttttgaaaggggataacccatgaactccagaactttggaaatgtctactttccttgaaaaactcaacaaccttttcgccctatgaactcataattgagaagaaaaagataaggaagaggaagaaatttaaggtttaaagatggaaagaaaagccaattagctgtatatcagtcttgaaatgcattttttacactgtaacgtctttacactactattgttcaactttcaggtaggattcgcctcataaagactggcgaaagcgttagcaatatttccttggacgatttaagtaagtctgtctttatcaaaataccctaacaagccgttcacatgctaccatattctaatttgacatagcattttgatttaggagctcatctttcaatggcaggagagggattgttttagcttagagacgagaccgagcaatagtgaatgttggtcatgcctctttaattttgtaagaaatttatcttgcatcttagttttttagctgtaattaaacgcagacagatagatgctcaagattttaga

SEQ ID NO: 200929 - DNA, 919 bp, Cannabis indica
agtgtaactaatactatgaaagctccattcctttaatagaagaccatgtgaagagatgcaactttaagttatgagccaaactggaatattgtttggtttgtttcttatataatattttatgcctttgtttcctattggaatgtgcattgaccaatttatcctttctaagttacctaaattgaccaataacagttagaaactaatttaataagggtagtgaatgatgtacttggaatggaagataaccaagtgaaatgtcatactcatattagtttagttcttgattggatttaggattttaccaacaaaaagaaaatgtcaacagaaaagagtaagaaaaatgttcttcaaaagttttataattaaactaagttttttttttccttttcaaaaacttattattatttatttatttaactttttgtttgaattgggagaaagcaagacttttgaagaattataaaattatcctaaatcaaagatctaaacagagggttaggctttgtttagatcttaaaattttttttaaaaaaaaaaaaaaaaaaatacaatctcctaatcccacactattagttgtaggatatgagcacccctattagacacccaaataatgtggtacctaatactatttatatgtaacgtcttatatataattaatgatattttacaataattatgtcggactcaatatttaattaacaataataatgatttgacaatatttcgcattgtgcctattagcattttgtagcaatcaagacatattcagttgaaaattgagctacaaaattaatgttccttgaacaatttattagtttttcatactagtactgatggaatatatttttattagatgataatccattcctattaataataataatatattttattgtgaatttctgcttgcagcttgacc

SEQ ID NO: 200930 - DNA, 405 bp, Cannabis indica
gatgatgaacttcagaactcactgtatgagtttttttggaagtgagaggcatagatgatcaaatggctgtgttcttgcaccggtacatgaagaacaaagataaaactgagtttattaaatggatggaaactgtgaaatcctttgttgaaaagcagtagagttgttgaatcagttttattttgaactttggataaggatgtataaacttcatttgcattggttagtggaaatttaacagaatctgcacacatatattattctttttcaataaataagaagttttctcaccaattatgtcattgtaaagttttgtttgctttaaaaaaattaatttttttttcctgatatagtgttaatgtgacggtaatttggcccggggtttttagcaaaaaaatatatagagat

SEQ ID NO: 200931 - DNA, 1673 bp, Cannabis indica
ttggcttgtatggtcccgagaacaactttccacttctttttgcagttcttttattttagcttggtttgatttcctttgaattgtattccattgatccaataaagtgccacaagtgtgaattctttcatccagggctgctgccgagcctatattagttgcctctttccaagtgtcttccactatttgatagcactctttcttatccgcccaagccttttcataatgaaatctatgtccccaccgttgttgagtctgagtatcactagccatggtattaaaagttactagtaatgggctatgatccgaacaccacctgctaaggtgtttaactttagcaattgcatagatcttccaccagctgttattcaccattaccccggtctaacctttcgaaaaccatgttggctgccctgccattacaccaagtaaacttgctgccttcataatctatttcctgtaatgcacacatatcgattgcatggttaaaattcttcataagatacccgggctttccaccaccaccaagcttctcatggtgccctctaatttcattaaagtctcccccacagagccaaggaccaatgttatttccagcaagccgcctaagaagtttccatgaatgtttcctttgagaaggatcggggtccccataaaaacccgtaaaatgccaagaaaggtcctcatccatattgatccaagcatcaatatggtaagcattaaaagaattcaattgaacagtaaaaaggagtcttccataagagagctaacccccacttttgcctttagcatccacacagaagcaaccctcaaacctcagctgaatgcgaattgattccatataggagctttttgaacgagtttcagaaagaaaacaagaccaggattataatctttcacatgagtggccaatgctgtcactgtccaagggttgccaagcccttgaacattccaaaagggaattcattgttctcggcgaccctgctctgcagagtttgccgcttctgtattctcttcagaggttgaatcctttgtcatagaaacttcccctgtgaatgtgttgtcccgatatcccgattccatctttccacttatctggtgctttcctgcctcctgccctggttctttgttggacgatttcctttctttgtgacaaacttccttcttttttcctgtgtccctttctgttgattattgcagcattcgtcgaagcttattggcacctcaaagagagtgctatccggtcccttgatacaacattctgtctccattgttcttgctttacaagtcctacccccatttgattcatggctgtctcattggtgatatcttcgcccaatcttttacgtattccattacccatttgatccttttgcatagctgtagttgctgcctcattcatctcattcagcacaataggagatggaataaaattggtggtcagattggtattattagtatgtaacatattatgtttataattattaatgttagaattaatactattgataccttttggtggattgttgattaaaattgcatcccttttctctttgattctcttatctgccatttgaggagggcaaaggttgttcttttcatgaattttcttcatgataggattgagttggttcattgctggttttggtttcaatccttcccgtcgagtcgacttt

SEQ ID NO: 200932 - DNA, 1374 bp, Cannabis indica
tatatgtatttcttatattaattatacatatcaatatcagtaggaattaatgtccaagaagaatataaattaacatttttctgaattttaaaacttaaagcatttttacataaatatgtgtaaaaaaaaaagtgcaagagaatgttgtaccacttaaaacattgttcgatcagagaagagacataaagattttttcttctactaagggaagacacataaagtttataatctgcattaagctgggtagagctgggcctcggctatcccttaattatttatcatttttgtgggtatagagctactattgaggaagcaaaagggttttggaagtgccttaattaattttgtacttggtcaggtcaacgggtaaacaagattaacacttctaatttctttaataagaatattagtgagggtatgaggagaagtattaaagaggtttcgggtattaatggacctaatggtaacaaaaattatctagggctccccctttttaggtcttgtcacaaagatataggcttaaacttctggataatttggttgcaaaactctaaggttggaaaactctgttaaaagtgggtcgaacagctctgattaaatatgtgggtcttgctcttctggtgtactatatccaaactactaaactccaaaaaacttatttccaaagttaatggtatagttagggactttccgtggggttgtgaaaaagatttcgtgacctttatttgaagtcgtgggataaaatttgtctccccaagtctcgtggtggtttgggttttagaaaatgaaacaagcttttctttccaaatagggttggcaaatgatcaatgaaaaccaatctttatgttgcagagtgttgattgccaaataccttaaatgcaaaacagtttatgaagtgttcttccaagagttcgaattcctggttctggaaaaatgtcatcaaagctagagagatttgaaaaaagagtgcctttaaggtcactggtgagaaagatgtgaatatctagaaggactcgtatgtgggtgatccatggtgaggatgtccccgtccttcggggaactcgcctgcggacattgtaaaggtggtagacctgttacaaggaaacatggactaggatctatgttagagtttatgccctaaaagcaagtatttaatggataatatattataaaatatatgaaatacaattataagataaatgaatacattaattataaaagtatatttagtaaatatctaaaaatttcttattcatatagagatggtataatcttgtaagatcgtacaagagaattaagattatacaatatgaataaaacaagtcggtagtgtattacagtaatgaatcttaatatgaaattactaagtacggt

SEQ ID NO: 200933 - DNA, 961 bp, Cannabis indica
tgtgattataatgaactagattacaacattatctttattataatagaatcttaacaactcataacactttagaatttataatttaccaaatacttagctcagcttttttccacagttctgttacagctgtttttactcacaacatactataactactttttccaacatgctaaattggccctatatatacgtttattcttcttattctttgtatttttttttctatctccgaaaatccctattatatcattgataattgattaatttacatgttatgtttatttttctttgtatacatgttatatattttcaatgcagacattgtttttctaatatatatgtttaattggatcacaagaatgattatgagttgtcaattttaatagcacccgtgaaccttaaaaaccatatatttatttcttgcaaatcgagcacttggctcgcctttggatccatttttatcacaaatgccggaaacaaaatgatgcttaattaattatatatgaccattagtgcaaataattattacataaagaatcattaaatataatttggtacgtagacgccataataattaattattagcatgtagtcttacactacaagaggtatactagctaatattttaaacttattgctagcttaattagtggatttagagttcatttggcatgtattattaagtggtattgtattttattatattatataaaattatattttatattttatttgtatataatattatattaaatgttaatttatattaaaatattgtatatttatacacccataaaagttaataccacttacataattttacataaaatataatttaaaataatatacatactacaaaaaatctcttttagtcacaacaaaatttgtgactaattataaattgttttttctatattgtgactaaagatattagccaccaaaattacaattgttgtgacta

SEQ ID NO: 200934 - DNA, 786 bp, Cannabis indica
actcaacaccccgaaatgcatataccgagtttcaatttggacaactttagcacaagcacgaagcaagatgtagtaatctgcatgaacagaataagtcaacgagccttcgtccctctttctcgcgtaatgtagatacccaaattttttcaattgtttcctcggcggcatgtaatagaacctgttttcctccatgttctgtttcatttctttaatggattcttctttaagagtagaagtagttgaagttgtttcatctttcgggttttggtcattttgtgttgtactcttggaccggtcatggttttcacttcgagtttcactgtcggatgaattactaacaccctcgttttccttgaacttcttctctctatgtgggaatgttctactacgctcttcatcttttcgtaatcttttttgcttatcggctctactataattatcacagtctacttcagttgttttcgaatcctagattgcaagacaaaaataaataagttccagaagttaagagaaaaaacaccaaaagactcgaaatcttaccgttttgttctgataaaaaccccataactcttctatcagtttttgctcctcgtgattctcaaatgacggttctaaccccgcaaaaactacatctttacagtgctggagatatgttggcaagtctttagaatactctgtcaatgtaagttaaatcattactatcattatccttttcgaggaaaaaaaagaaagatctcaagaaataacttttaccatagttttcatgtattccatgatacaatgctt

SEQ ID NO: 200935 - DNA, 1031 bp, Cannabis indica
tttagtctaatttgtttcatggttgtctacgttgcaattatttaggacatcctgtaaaattttgaaaaattcaaaaaattttaacacgccgaaaatagggtttaaatagtctatttcatgcacatataaaataaaagagtttcgcgtgcaatagacagtttgaaccttgtttcggcatgttaaattttttcgaatttcccaaaactttgtaaaaagtcttaaatagttataatgtagacgaccatacaaaaattaagctaaaaaattatctcagatacaataaataaaagtgcatcgattgatttattttaagggagtgtattgtaaaaataacatttttaatcttataaatacaaataataatattaatatctacaatataaattaaataataatattttttttttaaaaaaaaaagaatgtcgtagctacagtaccacgacatatatgtcatgcactgtagccacacgacatatatgctgtaaattttggtgctacgttggatggattttatacaccaaatccaagttttagtgctaccttggagttgttcttatgcaaaatgcaaaggttatacaaaatttttaagatttttagaaccttatagtatattgtaagataaaatcaatatatatttttatggtttttttttttttcttttataattactcattttaatcatagttttgaacaagtcattgctccccataatgatgattttttttttattttattttaaaacaagaataataatgattgttgaatataaaaataaatgagagtataattggaaaaaaaaactcccaattgtaaaattaaagaaatgaccggttcaatttaattaaatttgttttgactatttatacgtaagatacaaactatatatttacaaactatatatatactaggcgtaagtcacatggaaatgcatgtgtaaatatatgttgcttatacattttttttcattataaaaaaattattaacatcatgttatttatatttacatatctctaatgaaaattaattatttt

SEQ ID NO: 200936 - DNA, 1856 bp, Cannabis indica
aaggaatgataagtgactatttttaaattgttgctaagtcagctatgttaagaaaaaaacaaatcctaattcgcattactcatcaaatggacaattttgctgctaatagtagagcttcctaacaaaaactaaaaatgtgtatcattttcctccccttccctgccaaataatcagaaatagaaaagttaattctgcctcaccatagcatctcctgccatccggagctctgatatccatccaatgtcagcattatgtctgccttctagaatcaagtcacttccttgactaccaacaatagcaacataagagaaaaaggatacaatcaaaatccaaacaagaatatatatatatagcttatttcacagttctttctatcctcccattctactaaaaagaacaaggaaaccaaatcatgcacagaatcataccttttcaggtcataccagactggtgataaatgtgtaaacttggagttgaatctcttcgctgattcatagcccctagaattcctgcactaattttgtgtgagagcagctcatacagatcaatcaaacttttgcaagcaaaatttgttgaaaatcagaatatgtattctaaacgtttgccaaagtaaaattagcaaaatgaccttcttactctgtctgtagtccgaaaggtaaatcttggaataggttgtgtttctcgtaaaaccattttctattcagtccaacttaaatggccaacgttaaaatatttttttgtttcattagtactagaacatttatttgcaaaataactatgttcatgttctcccattaaaaccatatttacatggaaaaacgttgaagattattttactattttcactttctcatatgttaaccaaaactaatacccttgccttactacttcctggagatgataatgtcataacaaatgtcaagagaaattattaccaacttaaactctgtctaaacccagaaagaaagacataccatggagtaatgtaggccaacacaggaaaggtatgatgccgcccagaagtattttctgagacctttgtgttctcctgagtttcatataaagaaaaaaaataatgtcattttttttcactcctctacttaaatatgcaaacacatacatacattataaccagataaatgaagaaaaatcaaagcttgatttataaagtataaggggaaaagataaataaaaatggaaacttgatatctggaacagagtccaaagttgtgattccgcacttacatcaaggatttcttggtaattcacatcaggcttaacaaggcctcgctggtacacggacgaacccgtacggttcgtacctgaagcgtatttgattcggtacacgaagatagagatagcaggagatacgatgaagaagacgaagattatgatgatgagtcttcgatccgaagaggccgaacccccatgtcggtctggctgagttaacggttccactcgatcctttgggcgattggcacccgatgcaactcggcgatctcgtttcttggccatctcgtaagtcagccgaactaaaactatcgagtcgagtgagtgaagccataagagtagagggactacttcgaaacaggattggcgataatctggtgtggccaagtctatcaaaagtaattcaaatcaaaataatcattaaatatctatctcagtttataaaagctgttttacgaattctcaaaaaaaaaaaagaaaaaaaagctgttttacgtacactgcatataataaaaacgacaataaaataggggtttagtcgctttatacaaaacaaaatatttctcttaagccaaaaatatcttagggaaagggttcttgtccttgcagataaaccctgaaacgga

SEQ ID NO: 200937 - DNA, 848 bp, Cannabis indica
ttttatgctattcttattattgtgttattgattttttatatttgtatattattttttattgttttgatgttattttgttatttttttaatattgtttagttgtttactttctatttatttattttttttttgttagattttctatgtttttattatagcatactataaattaaaaaattgtaaacataaaatgtaaatattttataaaaatgagtgttttatgtaagaaaagataaagaaagtgttaatagatgatgaagcttcctaagtgggtccactttgaagggcccaagcccacttttgtaggtgtgttctatctgtgtgaagatatgggtcctagtctctcaattacttctgatttgttctatcacaatcttcaagtgtattctctttcttaacaatggtccccaaatttcaagcttttacttattattcttcaacttctttcgttcattacatttacatgggtactcataatgtgaagtagatagctgaggatttattaaggacatgtccttttcaataaatgaaagcactcaagtctttcaaattccatgcctctctaacacttttcttctatgtcttgaactagaataattataacatttgcacaaaatagtatacacaataacacctaacaatgtattttcaagttttacaaaatggttctacacttaaaccatctataatggatgatatatattttagattaaatttggcttaaaaattaagtcaatgttatatttagtctcaattttacaattttactccaatactaaggatgacaaaaaaattaatccaatggattgactctaacacacaaaattcgggtctctattctaatttgc

SEQ ID NO: 200938 - DNA, 1231 bp, Cannabis indica
atgcacttccagccttggtgtacatcatttggtgtactcgaaacatcaaatattgggaaaataaagcaaagaatagcaatacagtgtttacacaggttaagaatataactaaaagtcgaatctcatgtatatggtcaaaaaaagtttatactagtgataaagtatgatttgacacattataaataatatagtctaaggtcctctattttaattgaggatgcttgtaggttgtacaaattgagatttggagtaataaaacatcacccgattgatcaaaaaaaatattttttaaataaatattaaataatttaatattaaaaaataactaatttaaaataatcgatccaattcgtacttttgcgtattgaattagattggattggatttgagctattgtccggattagattggatttaaaataagaaattcatatttagtgcagatcagatatactataagtaaaataatgtaaattaaattaaatgaataccctaatattagctaagcgacgagtgttacatgcaagctcttttcagatgaaaaaccttgataaatatagagtaatttaattcttatttaacattaattcttatttaaaagggtagtaattttatattagatgattctctagaaatttgatgttaataactaaaaataattttgaccaattaaatgttgctacataaacactgacttgtcaattatttctaccttcaaaatattaattaagtatttttactttaaattactctttaaaaaataactaatttttttttttattttctattttctaactattttttagtcagtaaaattatgtttcttaattgtataaataaaaagaaaattatcgtctagttcctaaattcaacgttggccgaacgaattaggtgaaattatggagaaaataaaaaatataaaaaataaaataaaaaattaaagaatgaattaattttggcagctaaatatggccttaatatctataaaatcttcacacgtgtcaattacatcgctcgtaaagcggaaaattcttctaaaatttagaatacgataggagggtagtttggactattcggtatatgcgcagcagcagcagaagtgttcatcaaatacaatcaaattaatcgaaaaaaaaaatccaatcaaattaattacttttaatattaaattattaagaaaattacctcatgtactattttttttaacttttttttaattttaacgtattagg

SEQ ID NO: 200939 - DNA, 1357 bp, Cannabis indica
atggtacaaaatactgaaagatattgagttgaacataagttggcgaaatctaaatacccattccggagttctcaaagtcaacttgggcgcagggctaaggacccctcccaggtcgactactatgactcgagactactcaattctgagatgttttctttcttgccatctgtcaaacattgatgtccacgccaccaagatcaatttctgggttaacaatatgatatatacataatacataaaagttaagtttcaagtcattatatacgatataattgagagttaaaaaataacaactcaagaaccaaaaagctttggttgactcccctctctttctcatcctacacgcctcactctctctctagagaaaggtgtttttcccctcatctcagttcacaatgtctcataatttgagtacacgttgtgatagaaaattcattcatctaattaatcttgtaagcccactcttatccagaatgttgatgattgatctggaagactctggcgtgaagtcttcatcaagttcatagcacctggattggttgatttataaaatatacgaaaagaattgagaataccatgataggcatcaagaagtaaaattcttttaactcatagtttagatttattttatgtaatcgtgttgagatcttgagcagttgagcttatagttcatattagattcaactaaaatatatatatatatatataaatatatatatatatttttttttgtaaaatccatttttttttatatggaccataaaaactaacacgaataaccttaactacttttttctcaacttttctctatcgacactctagaacctcttcttcctttcactaatgttttaaaatttgatttttttttcctttataaattattttctgagttgaaaaatcattttctttgaatttcttttattagttgtacacagattagaaattgcaattaatttccatatcattaaataatttccatccaaataaattgaaattacaattataacatttattaaagggccacgtcatcaattttaggccccaaaaaaaacacagagtataatgaaagaatgaggtttctttactaaaaattgttagaagagtattattaacaagcagaatattataaggagcaaaattcagtcgtataatctgttcaaggcaaaattactaattattttatagtttatattatattatgtattgagttttgaagtatttatatattttatatcttattttgttattgttttattattttgtgttaagatctttagttatattgtttctgaatgaattatatgatgtaattttattaatgtttataaaatttttaaaattaatttgcaattattgc

SEQ ID NO: 200940 - DNA, 2415 bp, Cannabis indica
ttttttaaaattgatttagtgttcacatgggccattatgtatttaccaattaccaactgaaaatagttacagttagttagtctttgagtttgatcttaaaaaaatggaaaaaatgaaaagatcaaatctttgatatttgataaattttagccaatacatagagttgacccactttcaagctttccactataatactatatatatatattattgagatttctctaaagactgaaacattttgaggtaataagttctttttttaggattaatataattaattaaatatggtctcattgtcattgtcaacgtatgcgtaacgtccatgctcaaatgtaaaaaagttcttgtgacttctatgaaaaaattactgtttttcgaaaaaaagaaaagaaaagaaagaaggtaaaataaaaaaagagaaaagggtagaaaaaaaattaagaaaaagacaaaaacatgataaagtcaaaataccaagtcggtcaaagaagcgttcccatattgcaggctgtaggcggcagccattcgtgaattgagattggttgttgctattaaatttaattttattaaaagaaaattcagcaaaaaaaaaaaacaatttaaaaataattaaagaaaaagaaaaatcagaatatgaaaatgcgtcaagctcgacgtactttttggctacgtagaaaaagtcgaaaaactatatgtggaagatggtctagttcagacttggaactttgtccgtacaaaacgagtcgttttgatcatttacaaatatgaagaattgatgagatttggatagttgggttgggttgggttgggttgggttgggttgggttggattgagtgaaaggttgaaacaacgtgtgatatatgggcatgacctgcatgaacctctcctcctcagtcaaaccgaacacgtcataggaaaacatgtgggacccactgccacgcgtacaaacgatagcaggtcaaacctacttagtttactaacattggaccctaatcgggtggggcccattaagttgatgacccgagataccaactccatcttctcgggtatgagtatctacccaccttcttgtaatatctcctttgtcctattcggtttttcttttttaattaaaaataataataattatgattaattattcgtattatattaattggaaactttatgcataataatcgacattaattggccctacgatacacaagctcagaatattagtaggcatgagttgtttcatgtttgtggaagaatcttgtaataaacggattattaatatgatttataatttattttaattattattttttatctttaggtaagctaattaatttttgtaatgaatttattgtaatgaattccatgccaattattatattatataaatattgatttattatatatggattatttatgtaattattatagtatgaaggctatatatataattaataatttatattatttaaatcgatattgaatatttgtgtaatgaatttaaatactatatattagttgtttattagtaaggcagcaataatgtgtaaaaccctgctttgcatttttacatacattttggtaacatttgacgtacggataattttcattaaaagtagttatatacatctaaatattatacatttattatacaaagatatttaataaatattagttatttatattttttaaaggagattatattatttttaattacatagttaaaattaattatttattattatatataaaaaatactagtaataactccacgtgtaaaatatatattatataattaaaaaaaaaattcactaattcctaatatcttatttggcaaaataattagtaattatattttttaatagttaatgtttaatatgaaattttttttagtaattacacagtgcaattatattcaattctcatgggaggtcatgagaattgaaaagtgtaattggaaccatttaattacttccaattatacaattacagtgtaattacatcgtcagacaaacatgacaaattgtgtaattaccttaaattacacacaaatccaattacattatgactttctaaacgcaccttaaattagtttggtaataagtaaaactcaatttgggaaaaataaaacaaaaaaataaaactcaaatatactaggtacgtacttataaatccaacaaaagattagtttcacaattttagttcttataattggtgtagtgtaaaataaattatatataagttgaaagtatagggttcgtttggtatgccgttttacactatattgtataactcaaatatactatgttcgtacttataaatccaacaaaaattagtttcaccattttagttcttataattggtgtgtaaaataaattacatattagttggaagtatacggttcgtttgatataccgtat

SEQ ID NO: 200941 - DNA, 967 bp, Cannabis indica
atgaaaggattgagtaaatgaattaacttgatcgttctcattaagagaaacccatctcatcctcctccattatcctctacaaaattctactctaccatatcattgttgtccactcaagctttgtaaaatgattgctcaagtgttgggttgctaaattgttagtgtgaagcctatgacctatgttaggcccaatgttggattctttttttttttgaaagaactttgagttcattaaataataaaagagatgggaatcacagggggatctccctccccttgatacaaacaagctgaatcactagctaacctagctttcttagctgcaccatccgccactacatttaaactacggttgataaaaaagaaattacaaacttgaaagtttttagagacattaacgattgagtaaaaaatactagctattctccaatccggaacttcaacagaagttaaagattggactgcaatattggagtctgacaaaatatgaacctggtgccacccaagttcgattgccctgttcagagcaagaaaaattgcataaaattctgcctccagcgccgattgagcttggatcttctgagctttgacgaaccatgtaccattgaggatgtccacgcttactgctgctatgccggcacctccttttacccaagaagcatctgaaaatattacattacaggctcttgctataggcacctggggaggtaaatttccaggcaaaatcctggcaagactagtagctaagttcgagttagaaggcacggtctggaggtcccgaatctgcattttaattctgtccaaagcaactacagcatttgcagatgtgctccgaatgcatacaccattcctttgttgccaaatctcagagcagatacaaccaatagtgttcagaagctcactactactcatactgtggtaccttaaaaagatcaaatcaaggagtccattaagttataaagtcatc

SEQ ID NO: 200942 - DNA, 1447 bp, Cannabis indica
gattaaaattttatttttgaaaattaatatttttaaaattgatatttagctatagttattttttaaaaaatccatttaattaataaatgatatttattgaaatataatccatatatatgtaaaaaaaaatatatccaagagatttcatatataaaaagaaggaagaaaacaagtatttgaatatatatttagaaaaatctttgatctattatattttctattagttttgatatttataaaggtttattaatttaattttttttcataataagttatgttgtacttaattataatcatttataaattttgacatatagtcgaatagtttgtagttgtttattatgtatattagaaaagattaattatatgtgtaattaatatatttaattttttttttaatttaagtcctaaataactatattgtatcattgtgagaaaaaagttcccttaaatactgaaaaggtgtatcaaaaaacgatgcttctaaattgtatatactatagaattaccatatacgtacattggaatactatacatatatataaatttatatatgttatattaattaagataaaaataaaaaataaaaaaaatctcccctagcacttgtcttttttatcacatgcatcgatcgtattgcctcacgttggttcttgtgttcctttcatttaataaagctagatgagtatgtgttttaaatattttgaaattgtgtacaagtacataccaaagaatgaaaaatacattacatgataaagcacaaattaacaaaaaagtcttgcaaaattccatgaattattattagaattcacacctatatacgtatgatggtcccaatagagggaattcacacaaggatgcatatcacatatattttctggtaatttatacctagcttataatagccattcactctttagctagcgttaatcaattagtacttttttttatcttatttgggtacaacttggtatattatatatatagccaaatttttatgatgtaataaaaaagaacatgtaacaaaaatatagggacccttccttttgtatttagcttatatcaccatagcgaacacatgttctaaagaatatagctataatatatctatgaattaattattgtatttttgctaggtcatttaaaaatgaaaattgactgctttaatgttgctttgaatattcttagcattttatttatttttaatttttttggttgggaatttctattttctaataactaataataatcatcacgtatagaaaaataatactactagctaatcatagtagtcagtagctatatatttatttctttaaaaattcttatatttgtcattctctatttttctgaaagcatttcaagtagtccattatctttttttcttttttgtcttaagtcatggatttactgcaacaatatttagccttaggattaattcgaatct

SEQ ID NO: 200943 - DNA, 1100 bp, Cannabis indica
aattttttttaaaatgtatataagtagttttcaaatgacttatatatataaatatatattaattttatcctttaaaaatttatattactgtcattgttttaaaattcaatgatttgattgcaaagttttatttaaaaaaaaacttaactgtctaagagcaacaattttagagggtgattataaatacatatacatataagtattgttaagtggtgagctttcatacaagtgaaaagaaaagagagatatacaactaattaatttattatattgaaggaagagcttaacaaggttttgtaattttatacaaaatatattttccatatttcatgtgtaggatcatatattaataaagaacattatatcgatgattacaactcattattatttttattttataaaaatatttttgtctttgtttgcaaagcatctaattaatattggccgatcagacaagaagctaaagccaaattgcccgtagagttttccaatcttgatcaaacaaaaccttcaacattttgcatgaataaggcactattttcatatgtttgtattgtatttgcaattttgtaaaatgaatgtttttatggagaattttattttttatcccagaaatttataaatatactctatattttaataatcttaattttacataaaatagatatttttaatttttttatttttttttatctaattcatatctctcatatattaaatatagttatttaattaattttaaatatctaaattaaatttatttattaaaatatgactaagataattatttaaaagtactaataaaatttgataattatttttcataataaaatatcttaaattaaatgttaattcaattaattaatcatactttataacaaatttattagttatattgcttaaaatatgtaaaattatttacttattgaattaatttgagttgttttgtttctgaaaatctatccaatatcaattgatgtacttgaggatttgtaatgaatgttgtttccaagtttgtatcctctgccttctcaattgtttcaattttgatagtttgtcaatatattgagcagtgtatttcatgtatggtttaatgtaac

SEQ ID NO: 200944 - DNA, 1025 bp, Cannabis indica
atacaatacaatacaatacgataatacggcgtttcaaacgagtccttaaacgtttatatattatattgtataacctgggacacaaactcaagaccttcaacacacgcacccttttatagctacttgagctcgcctcaagtggtcactgatacccaatatcgatgctcaattaatatgaattatacattctaatataaattgtttaattatattattataatgtgtaggatgatacaggagttggcatgaacaaaatgctcattatatcagataatgcatcggacaagaacgttaactaacaacaacaacaataattcaatggacataacgtcggacagtagtagtacaccagctctttacagcgaaaaagccgaaaagattaggcgcagttcgtcgcgaaaaaaggcggccgctgcagccggggcggcggtgaacaagatgataaagaggaagaagagaaagcaagaagagttggaggtggcggagagtattcggtggctggcggaggcggtggtgaagtcggaacaagctagaatggaagcaatgagagagattgagaggatgagagttgaagctgagactaagagagctgaaatggagctgaagaggactgagattattgccaatactcagcttgagattgctaagctttttgcttcagttgctcatgttggtaaacctgttgattcttctttaaggattggaagaaattaattaataaccaaataataataataataatgtgatcatatagctactacgtatatacgtacacattattattaagtgtatacgtacgtacgtatatagtagtgggcatgaattagttaatatgtatagatatttacttgttatattatatcttaagttgtactgaagaaaagaaaggaaacgagagaagtctagttttcgatgggatatatgagagagattttgattaacatgatgaatgatcatgtaatgattattatatacgacgagattataattaatgtaatatttagtatcatatatatatataataa

SEQ ID NO: 200945 - DNA, 1598 bp, Cannabis indica
aattggataaataagatttttatccttcaagttggaagtactagttgttagattttgttatctgatttatttatttttttaattttttgtgtaagaaattaattcatttgaattatggaaataattgcatatttaattacctctttgattgcactttgtaaataatttgatgatgtaagattgatcatgataatatatctgagagtctaaaataaaaaataattgtgtaaataattagatagttactttggtgaataaaattaaagactatatccataattttatagagttaatatatatttaaatgtttaagattattatacttagttccaattagcttaaattaattaaattaaatgagtcatctactataattatatgcatatctcgtggacaaaataaaaaattgaagtaaaaaaaatgattgaaatacaaaacaaaagggaaagtttacattatttctataattcaagagaaatttttgataaaaacaaaataattttaggaaacaaaatcaaataagtgttatagtttagggaataaaaatacatatgattaagtttaataatgaaaaaataaataataacaaattataacaaggatattattgaaaagtgttagtgtttgggagacttaaataaatatgattaagtataaataaatatgaattttttattaaattaaattaatggactagttgtaataaaattatattttcactttgttttatacctaaatctattattttccacatgaattttattttaaatatattaatcattataatatattttttaaaataaataaatatttaaatttaactcgtgcaattttttcttacaatataccataccaacaccctaaatataagagaaaagtaactaatatcataacccttcttaagacaaaaaaaagtctctcgaattttgaaaaagttcatatataagttataaattattggctcaaaaataaatttaactttgttaggatttagaaaattaacaaaaaaacactaattagcattataaaaataattagtttttttttctaatagtatatatatatataaatgaaagtgatgtataatatacactttataaattggcttatcagagtatcataaatttgtgcatgttctgtggctcctcttatatatttttcgtgctttttaaattgcgagtcatccgtattgtgtcgtgttatgcctttttggctagtttatttgtgtttatatattgtaccttttggacatgtcatgttctgttatgtttaagcacatatttttcgtatcgtgctgtacttatttataacatcatgttgtatcatgctcatattatttcgtgcccctgatcgtgcttctacctcctgaacttgtaccgatttcgtgtcgtgtcaaaaattcgactcgtatttacaacactatccttatcgtgacacacaaaaccaaaagtaggcatgattctatttaattaggtgaaaccaaaagcatgatccgatatatttgttctttatatcatttatattaactcattaaaaaaatatactttaaatacacaaatcttaaatcaagaaaagaaaaattaaatgtattttttttt

SEQ ID NO: 200946 - DNA, 687 bp, Cannabis indica
tttcttcattcttgtagtgataattggctttggtttagatgtaaactttaaaaatccaattagattggataggttatccaatgggacattagattaaatggataagtaactaaaccgatgctattatttaataatatatattaaattttttttttttgtcaaattattaattttattctttattacacatgcgtttaagaataaacaaatatttttaattatatatatatgtacatactaaatagtggcagatttagaatttaagttcacgggagcgtactttttttgtgaggggggtgtgccatttttttctacatgatataacatgtgaaaaattgatgtaaaattatatttttatagtatttgttgggattcaaactcatgatatctactatgcatatgagataacttaaccactatgtcatagcttgtattatgtttaatactatcacttttaatcacaaatatatgttttaactaactaaaaaatatatacatttttttcaggggcgactgccctatctcgccgatcaacgtggatctcctgcctatgtactaaggtgtatatgaatttagatagtattattatgtaagttgaatttgatttttattatattatcattatgtgatcgtaaaaattatgttggactaatgttgattatatatcattacaagaaatgtcacttt

SEQ ID NO: 200947 - DNA, 918 bp, Cannabis indica
ggtgtgttcataataatgatcaaactaacaatgggagggtctaactaattggagttgctctgactaatttattcttccaagtggttttgaccattttttttaaataaagttgagagatggttatattatcaactttcatgggctctaggacacctctagaaaatggtcataaaatttagaagaataaaaggtaaaaaataagcaatttgatgaaagtagattcctattgattcttaaaactcaagaaaatcataattgcatacactttcacttccacctatttggttcacaatgtcccatatggtactatattgtaaaacactacacaaattattcattgaagagaaaagtctagcattccaccccacattgtttgagtactggtccagtttgtttaggcaaaaaaggatcaattcgaacccaaatcattgagaagattgaagccaaaagaattgaccaaagcacaacaatagtaggagtcctgttttgtcttcccattaaacctttaaggaaggggtagagatggagaatgacccaaaaggcgaaaatagtttacataacataggaccccatgaagcatagccattgttaacagcatcagaaactccagctacaattcccaccatgtttattattataagggttgttggtgggattagtagagtagtccatttgaagaggtagagctccccaaattcagcattgtttgttgcttttgttgtcattgtaaaattggtgttaattccagccatgactttgagaaggcctcggaagactgcaaaaagatgtgcagagacaccgctaatgacccaaaattgctcgttgcgccaccagtcgtcgatgctaacgccactccatcgaagctcgagaatgctatgggcaatggtgagagcaaagagccaagagccatatgcttgc

SEQ ID NO: 200948 - DNA, 1371 bp, Cannabis indica
atgttatgtgtttaggggaaaaacattaagtatttgtatttaagcataaaaaaatcaaatttctctaaaacaatctagatgtaaaaaacataaagggctcctatactattttagaaattttcaaaattatattttagttttttttcactctttttaatagattagtttatcttatatgcaaaagtgaagtggattgaacatttaaaaatgagatagaatggaaagaatgaatggagaaagaagaatgggaaagataagtagcgattaaaaagataaatttggacaaatttagaaatggagtattgaggcttcaaacttgtgaaatgaattattgtcttattaagctgaatgatgatattttttttaggtgagcaacaaatatttcttattcctcatttaggaaagacagttggaaattggaaaagagaaaaacaaaattaaattaaataaaggttttatattgccgcacttttcttttcttccacagttagattatctttaatgagagatgtaaaagttgaactatattttgtatgtgatatttttatatcaacttttattattatactccaatgcaaaattataaatattaatgtaaaatttaatatgttagttaatgcgcacttaataatttattaaaaaatataaaataataataatgtaaagttaaatgtaaaatttaataataaaataataataataatgcaagttagctaaaatttaataataaaatattaaaaatgacataatattaaatataaaaacatagcatttattgtgatacaaatattacactatgctatattgtgatgcaaatttggatcacttttaattatgtgagatttttacatcataatttagcacaccattggagtacatttttaacaaaatgagctatattttacatttgcatcacttatttgtatctccattggagatactcttatagttcttgtttttttggctaacttttttcaacatattaagggatatttacatataaaaaaaaccttaaaaatattgaaaacattattataaataacaagaaatgctaaaaaaaaaaaatcgtatttttttacaagatacaatcattcaattatttacacaaacactgtaattacagaaattgtttttttttctttttcttttaattttaaaaaaataaactacaatagtcaaaacaatactaaatataattttattaaggtaataaataaaaaaaacagttcattccatataataaaaactaatttcttaataaaagaactagttatacaaataccactataagctaaaaaatttgaccatcaacctactactgaaactaaaatcaacgcaatactaccgctaaaaccagttacaaacttctca

SEQ ID NO: 200949 - DNA, 744 bp, Cannabis indica
aataaacttttcttacttaatctttatcaggtactaaataaataaaccagattttttttaaaataatcctaggttattattaattaattacaaggttataattcaatcataatattatgaatttagacacctacttcccactgagttgacaaatcttgacgacaacaaaactgtcggtagtactcataattgaatgtatatataattattttaatatatatatttggaattaataaattttgttcactgcgatcctttataactatgtgttctaatattaagattattatatatatctcagctgtgaacttgaaattttaaaataacatgatcatcctcttgaatcatcacgattcatatatatggacaatagtactctatggatcgatatggatcatataatatgtggtcaaaggtaataataaactgaaaagatagcacgcatggctgacccacacgttgtcgcccaatactagatataattcattttcctaccccacagacaaagatagacactgtcacaaatattttataagaaaatgagttagttttttttttcttctaaattccttcgactattatttcattttgaagctaaaaccctaaattactaaattgtaaatttagggtgtcattcattttttatagttaatttttaatataaactacttttgtatatgtgtcaaatttatattggtatacctaatattattatattaataatataaaaattatttcaaaatt

SEQ ID NO: 200950 - DNA, 1305 bp, Cannabis indica
atgtaagtaataatctttcataaaataagagtatctctttttcttcatgctttctaatttttttgattagtattaacaattgaaatttttcctattttctcttcataggtttataaaaactaaattagttttgtaaaatatatattttaaaaataatgcttcctcttataatatttgcttattaaataattgctctctatatattttaaaaataaatatttgagtatgtatgtaatataacattatttacatgtgctacggaatttagtcctttaaactttatcacaaaatttgtctattatttattatttttattttgttttttaagagatacttgcaacataagtatttaaaattttgagtttgtaaacgatattattccaatgatattttttagttacataaatactcaatgttaataaaattataattttcttataattctaggtgtacagactttattagtgtcttaaatttgcaaccaaacataatttttgaatttattaaaataagatttgaaaacaattgatattacacatttctgtccaaaagccaataatttagaatccgtgctttagacgtgtcgtgtttaagacactaataaagtgtattcatgaaactgaacaaaaaaaatataattttattaacattgagtactaaatattattaagtatatgtcgattatatatttaaaattttagatacttataacataaatatttatttttaattaaaaagataaaataataaaaaaatagggaaattctacaatgcacccccttaaaatggatacattgatacacccttatctgttttagcacccgaaataattttttagtcaaattttttcttttggtcatgtatgttatagttatttaagacatcctgcaaaattttaaaaatttggaaaagtttaacacgccgaaaaatacgttcaaacactgtgttgcacgcgtgactattttattttatacgcgtgtaaaatagactttttgaacattgttttctatattataaattatttttttaaatttctcaaaattttgtaggttatcttatatagctataacgtacatgaatatgaaaaaaaattagactaaaaagttcttctgaataccgaaacaagtcaacggtgcatcagtatatcccttttaagagggtgcattgtagaatcacccaaaaaaatatatatatttcgtaaaattattttaattttaattttttaaaatgagaattaaatcttgaaaatttgaaaacaacttacaccccctaaatgttagaacacattctaaatgtttgaaaact

SEQ ID NO: 200951 - DNA, 1290 bp, Cannabis indica
ctgctgggtaagtttgaatgaagccttctttctttcttttggcacttatcggaacacccatgtggtcgactaaattatacatcaaatccacatccccacatagaactcactaacataatttcttttttttttttgcttaattacaattagaaaaaagaaatatacaaaagtcaatataattttaaaatatatataaaaaaaattgatggggcgaaggccacccttaccttcaacataactttttgtttttgtagattgtagttatttacaaaattttagaaaattataaatattttactacactcaacttgtttcaataagttgtttgaagatttatttttatcagagtaaattatttaaaatattatgaaaaatagtaaaaaatcttaaataattgcaattaattttcatttttattgtcataaaaaaaaaatactttcttcactacccatagaaacttccaatcataactaatgatatgcatattagagctctcgtatcaattttattaattttattttatttcaaactagtaaatagattacgttttatttaccattgtataatttaataataaaatcatattaaataattttaaatatatttttatgtataatttaaaatatatatctattaaaaaaataataaatctatataaaaatacaataaagaattttaaaaaaatatattcatcatacaattttttctatagatattaaaaaaaaacacgcaaagaaatatttttaaaataattgtcattagtgtagttcacttataatcactattacataaagttgatatcatacactatctcatttatagtcatcattaatatgattctcatgatcaggccagtaagtttgatttatacataaaataaatcaaacaatgatcggtaagtactcacttttatacataagtgaattattttgttataaattaattaagtaaatcattgccgtaattcacctgtagtcattattaatattcttcctagtaggtttttttgtacataaaataaattaaacgatgatcgatatgtactcacttttatacataagctaattaatcattttgttataaattaattaagtgaatctagttatcatatacggttatttagtttatatatttttaaatttttaattaacactacaaaaaattttattttagctccaacaaaagttgtgattaaaaataaaaatgttatgactaattataaatcgccattcttatgttgtgactgaaaagttcgtggataaatgtattagtcacaaaaataacaatttg

SEQ ID NO: 200952 - DNA, 1211 bp, Cannabis indica
ttttttcttaaaaaaaaaaccctataattttattagaaataaagagtattagctaaatttaaaatgttatttttcaagaaaaattaaattaaatatatagccattttatttaaaagtaaaaaagaaatactaatgagcatcattgcttagcactcttttaaatattaaattattattgaatgaattaatatcagactttacacaatttaacataataactattataaaatataaaaaatgttaaaagatactaatactgtctagtaccttctaaataatattagtagtgtaattaaatataaagtcttataaacacaattaaagactaatagcaatgctcataaaatatggctaattcacattgtaataaattaattaatttttttataacataaattaattaaattgatgcgttaaacaatgataatctatcttaaagtgtaataaattaattgattaaggaatttattttttttcttaaaacccctttctctcttctgattctatggcctatcccatcctctccactctccactctctcttaaacccattctctctatctctctctctctctctgcagttcacagtctctctctctcactgtcatggccttcgccttcttatcatgtcccaaccttcattctcctcacttccactttctctctctaaaacgccacaaaacactttccaaacctttaatctctctccctgctctctctctcccactcacactccggcttaccgggccaccgtctgcaattggaccggacggaaaattctaccctgacccatcagacgacgacccacctgaagctccggaagattccggccatggagtttccaagttccagcaaattgaacgacaggcctcccgtgcccggaagctccaagaggaagactttaagaagcaccaatctactttcctcgccgcaattgccgacgtcgaggactctccggacaatcccgggtctgcttacaaggatgatgcaggggacgatttgtttggcgaaatcgataaagccattgccatgaagcgcaaggagtatgtgaagcaagggcttttggcgcctaatccgaagaaggagttggagggtattgatgagttggagccggatgaagtagttgatttggaggagattgatgagcttcaaggactcagggtcgtttctgaggatacggattcagagtcagagagctttgaagatgacagc

SEQ ID NO: 200953 - DNA, 1815 bp, Cannabis indica
gcaaatttgaagaattttttagagtagtagtaatagtaagctaaaaaaattgaaaaaaattgaaaaaattatatggtataatccgaattttaacttgttattaagcatcaataatgagggcttattttatttatgtatatataaaaattattagtgttagtaatattttaggagttttttttttatttttatattacttttgtatttttatggaaattaacgttgtaattcacataacaactaatagagtaatttaaatcgcaatctaattttatacagcaactcttataaataccatccgagtaactatctaagtaatttaaattgtaaaaatataaaaaaaaatatatggtatatgaaataatttttttaatatttattattattattattaggaggaggctaaaatgaatagagataagcattaatttgcatatgtgattgtttggccagatgggttatgttacttttgagtggaaaacaatttgttcatttactgaaaatagaagtgttatgtttttttaatttttaattatatataattttattgttaggttttttttttttttttaggtggggtttgtttttggaatttaggaaaagagtttatataagtgtttgctggcttatattggaagtggaagtacttgtgagatcacctggcaatcacatggcaaaagatttgtatgtttcattagaagatgttagaaactttatatttatacaatcaaataaaaagtggggttttaataacaataaataattataaaattaaatcattatgtatgtataatgttccatatgtggttacaaatttaagttctatttaattattatgcccatatattctttttaatatatacacgtgatttaaatataatagaagtaattttaattatttaaaaatatatatatgcactaataatattatacataataatgaatttgtttgttataattatttacatctattttagataaggttggttatccaaaaatgtaataagacatgattatataatattttagtgtattaagctggttgagaaattaatattattaatttgttaaaaaaaattaaataaaataaaagtatgcttaatggaagttggttataaaaaggtaattaatcttttgattatatttattatatttttaagtttatagcaaaaattagtggctttaaaaatagtggtgagagagtttactttctctttgaattggtatatatctatatgttaattagtggtcactaaatgaccaaaataattaaattattgagaacaattgattagggcaaggccaaccccacatacatcaaatgttaaaagaaaaaaaaaagttgttctccaatagtgtgatatgaaattgtatgaagaaaaacgatttgggaaaaaaaaattggaactttatgagttttgctttgtttgtatgtactttatgtgaattgatgattccatcatattattctccctagggaaacactatcaaccaatgccatattagcaagctatcactagtaccttttctaataatattattatttatttattattattattattaggaaaaatgttaaaaacactctctagtagtatccattatcacttcgaggtattatataatgtatattgatttaatttagaaaaagtagtagtgtttagtattttattttgatattatattaatatttatgtaattaagtattagattttataaataataatttttaaagaatatcgataattattcgtaaacaaataatgttacaaattattgatatgtctaatagtaaatattttttaattaaatatt

SEQ ID NO: 200954 - DNA, 1218 bp, Cannabis indica
tttttatcttaagtaaaacgacttgtcgtttctttaatctctaattgccttttacttttctgttatttatgtgaattgaatcatttactacatatacaatacattcattaatccccataaatacccaaataatacaattacaaacccacagaaactccaaaacacaactctattgcaaaaatacatttgctggtcctagctagtagaatttcttttgatgaactcagggtctaatcattattaactcataggaagagaatagggaggggtgttttcgtcatttcaaatgccctgttttgtttgtttatgagtctccatttgaatgagtattggagggaggggtgttttcgtcatttcaaatgccctcctttgcattcgccatcgtcttcctttcccaaaatttcttttaatttttcataaacaaaatgctattaaaataacataatttgaataaaaggataatatacacaaacaagcctattcatatgataaaacaaatataaaaataaatattaataaaagataatatatgagtaatatttatataaaataaatggataacccaaaatatcctaattaatatgtttttttaaaaaagaaaaagataatcctaattggagtggaattataactcaaaatttttgtataaatattgtattatgaatcaatgagtttcaaaagattttggattcatttatttttttgtttggtagaaataagtggtgtcattcaattcaattcaatatttaatccaaacttgatggagctttcaactgaacaggttaatttctttctttcttcttcttcttcttctatcattcaatcatactctctgttttttccaatacttgtatattttttcttattaatttatatatatacatagattggttaagaatgcatgcatatagtataaaacacagttgttaattttgtacgtattaattaacaatctcttttttattgaatatttgagtatgtaatatatataatatttacactctaaaaattatataaatatttttataaatattattcggcaccaatactcgtgattgtgtaaattggtttttaaataatgcgagtttagatttgacaacttagcaatagttaacactaattaatatgtatatattaacatattcttcttcttctttttcaattaaagtaatatttaattatgatgatatactaaagtagatttgttttttttttttt

SEQ ID NO: 200955 - DNA, 777 bp, Cannabis indica
gtttctgctttccatggccataaagggcatggaaccccctcgtatgcatggaaatgtctctcagaaagaggagaaagaagagggcatttcaatattgtttaaaatggatatatgtcaattatcaaagtggtaaagaggatttcgatgaccttttttcttcccaaaacaagtggggtttctgctttccatggccataaggagcatggaaccccctcgaatgcatgaaacgtctctcagaaagaggagaaagaagagagcatttcaatattgtttaaaatagatatatgtaaattatcaaagtagtaaagatataaatattgtgatatgacacaataaaactaaattatacatgaagataccatgtcaactacagaagtagaaaagatatacaaaataattgtcaaagacagatgtaatcatggtacaaaagaattgaagattgggactacatcaatttcaacaaacaacaggagaattatcaatgtttgtataaggtaataagcattcctactagaataagaacaacaccctttaatctcttcatgtaaattgtttttatttaatctgaataataggaaaatggtgtatatttaaaagctacttttatgtacggtgtagagacatccaatatgattaccaaataatcggtatttcaaatgccttagaaagtgaaatgctgcctgtttctattccataatttgatcatacacacctaaaatgcatggcctctagttatattatttcagaaaacaaatcaatttttcttttaattaactc

SEQ ID NO: 200956 - DNA, 699 bp, Cannabis indica
ttccattcttgaatctcaacatgatattagagtaacaattttttttcgattgttcttgagttttctctttgcttctgcatctcgttctgcttcttcttgtttcatatatggcgtccactactaatcttcctcaatttcatcttgttgtctttaatcacaagcttcttgtcaagcttgacaataacaatttcctgttatggcatcctcatgtgttgtctgccattgaaggtcatcaactcttccattacatctctgacaaacctcctctgatgaagtttctttctaaacaagatcaatttttgaatcgaatcaatcttgtgtatctttaatgggagcaacaggatcagctgttttactcctggttactctcctccatgattgaaggtgtgctcactcgtgttgttggtagtgacgcttctgcttagatatggaatacactcaaggtttatttctcaactcaaacttcagctaagatcgatcaatttactaatcaattgaagaatatcaaaaaagatctctctctatcaataaatacatgcttcaaaactcaaaaataatattaactcgtgaactacgtaaatttaactacaaaattacgtaagaatattttgtatttatttattattttcatctttttattttttgaatttattagattaagttgacaaaaatcgtggtaacaatatgaattaaatttat

SEQ ID NO: 200957 - DNA, 1236 bp, Cannabis indica
aaaaattaaaaaaaaggtgtggtagagcttcatactaaaaccatattattattccaaataatgaacaatgatcaactaataatgaaacctttggagaagtgccattaaagagatgaagagagaaaagaatgtcgaagccccagaaagcgacaatgcgaacccggctccagtttcggctccggtttctaacccggatgtgggagcaagggccaggtcttgtgccatggttttggttactaaactaaccaataatattcccatcattaatacaataacaaaacgagtaccaaagctctccattaatttttctattgttttttttgcttgtaattgtatatattaggtttggaaattatgagacaattctctagttgtggtgtttttgtggtttttgtatgagattgaattgaatgaactacttatatttatatgaaactattaagaggatttaagctatggctaggtaattgagtgaaatttcaaatgtcacaaaacaacatctagaatggttgatgtgtatattttggcttacctttttggtcacggttagtgggaaccacaatttttgtaaattaattttcgtagggagaaaggtgagcctaattaatattccaattggttataaatagagcattgctattgcctaatacctctagacatgtcgcattgcgattggttagcgatcgatacgctctaaaaattattatattaaattatatggacccgatacttggttggaccaatagcgatagtaacacataagaggataatagtcaccactagttaccttttggcatttctcttataaataacagaaaaaacatgtagtgtgaaattgagacacgtggaaagaaactattggttcataagaaaaattctacacttagttatttattgatttatatcaatcaaagacagctcatatcattccttttcttccacaccctctaatcaaggaaaacaatttttttaatgttacctaacaaggaatgtttttaattttttttttcttttttcaccatatattcaagttaaaaggacacatgagccatgaccactcaactcaaatttcaatagaagatgactttgggtaaaagatatatgaagaattttatgtaagcatatgtcttttcatttttgaccagtgaccaataaataataaaaacaatatactcatatttatatggtgggatgggatgaaatattattatatgaagaaagtaaatgaggtgggtt

SEQ ID NO: 200958 - DNA, 1228 bp, Cannabis indica
tcaaggttagttgcggtctctttcgtattctctgctcttggaattttggactttcgattgattattcaattttattttatagttgatcaaagacccttttttttttctatcttttggcgatctttgaatcctgggatttttgttatgctactgtgtcttgtagtttaagggacgactcatttgggtagtatcgccacgtgatagtggatattgctaaagttctatagctatatacccttgtgcttaaggtaaacatttcatttcattatctcttgagaaaagaaagcttctcctgaagtaagagatgctctgtttggttttatcttgagaaaagaaaggttctcctgaagtaagagatgctcttgtttggttttctcttgagaaaatgaagcttctcctgatcatattcatcctgtgcatttgctctgtttggttactgaagtaagagatgcctatttttttgggttttcgattaggtgtatattgtttgtttgttttcagttgatttgtagttcaatcttctttttttttttttttcattcgatgtttttggtcaaactattgtaaaatgcgggtagaaggacaatattttaatgtttgagctttgaaattttttattattgttgttgctgacaaaggtgtcaacgtcatgcttactagaattcagatgatggctaatagaacagttttagcttttcgtagataatgagcttgtgtagagttatcattacctaggatttttatttttctacaaatgaaaagtttttcttattcttaatgcgtgtgtgagattagttgggtgatagcactagttctctattttactgtaaattatctaaagtttttctttgtgtttatgtgctatctgtacttggatgatataaatcaatgggaaatctcgattaccagttgatagcactagttcccaattttcttactttgaagaaaggaatcaacataaatgcaatttgtaatttattcagcctatttacatactattttttttaatccccttttcaaaggtttgatttcattatctttgttggaaataagctcccaatctttgcaacttacagttaattgtttttatttttgtagtaccatctcaagagacttgaaaggagcaccttttgggtaaggtttttcttagtctcttatgtcttgtacatcttgttttgcctgtttaattttaagaaggaaaaatcgtaaagcaagagaagcaactctt

SEQ ID NO: 200959 - DNA, 770 bp, Cannabis indica
tctcatcccttacatttaaactcagttctccatgttccctctatcacaaaaaatctggtcagtgtttcaaaattaacaaaagataatgatgtgtttttggaatttcacaaatcttgttgttttgtcaaggacaaacaaacaggtgctgtcctactcaaggggaagctcaaagatgacttgtatctattaggagatgacagttcaagcttgtccaagcactcactacagtgccacctagccaccaccacttctcaaaattgtaccaactgtcaaaattgtaccaactgtcaaaattgtatcaataagtgtaatagcactgctactgcagtttctaattgtactcttcctttcatcaataaaaatgagcatttctttactaatttgtctcctacagttttcaacactactttgactaatgacatcaatgtgtggcactgtaaactgggtcaccctgcccctgctatcctatccaaggtcctttcccaaaacaatatctctcattccctcaaaaatctaaaattttgcaatgcctgccaaatgggaaaaagtcataaacttccattttctttatcctcaaaaagagcttcccaaccccttgaactcatacacactgacctatgggggccatctcatgttgtatctaaggaaaattacaaatattatatcttgtttcttgatgactatagcaggttttcttggatcttcccacttactctcaaatcccaagcttttgaagtctttattaggttcaaaagtttggttgagaaaca

SEQ ID NO: 200960 - DNA, 706 bp, Cannabis indica
tatggctaatttatgttaatttgagagtctatgaacaaaataattgcataataatattctaacgataaatatgaggttgtatatatgcaattttttgagttaatgtttgaatgtttaaagccattatacatttggttctagctagcattaatttggttaaatagactcttgtattgtaattatatgcatggtgtgtggtcacatcaataaattgttaaaaaatgaacaaaatctaacaaaggagaaaaattacaattatttctaaagttcgaagaacatttctttcaaaaaataattcaaagggcaaaattaagtgtcaaagtcgaggacaaaaaaatattatttacttaattatatttgtagggacaagttgattgttggtgtgcatctaaatatcgacatttgctggtactgaattatatatatataaggatggaagtatttttattgttaggagactttttgagtagagtctaaaagttaatctattaggtttatgtccaaaatgaacaatgttaatattataccaatatgaagatagatatattcaagaaactattataaaatcaggctgtaagaatagttaataatttttttttacataattattaaattaaaatatataaaatttaatatgtaattatgtaaataaaaatatatttaatgtaattaaatctctatataaagaaaataatatattatatat

SEQ ID NO: 200961 - DNA, 1845 bp, Cannabis indica
atattttagtatttaactcatcatttatttataataaaaatgcaaatacaggtaggtctatttaaaaaaattgggccgacccaaataaagcacagcacgaaatactggacttgcaggccgtgtcaggcctaccctataaaattgttgcacgacatggtaggacacggcacggtccatatcttttatggtacggcacggctcgtattttaaaaaacccaaaaatatgggtcgggctagcacgacaagcatgtatttacagctatttgcacatactaagaaatgtatgtattgtttgtaacggtattattagttaagaaagtaataacaagcaagaaatagaccaaaatttaaagataaaagtttgttagcgagagaaaaaacaagacacgagtgcattaccattgccctgtcgatgcataacaataaagtcctgtagatggatcataataatagcccaaaatgctgttgtagtagtatctgaagattaaaccaataatttccaattaaaagtaaataataagcagaatgaaagaaacaatgcattgcacatgaaacaatcataattaatacaacaataacaaagaacctgcagaacatgaaaaataagaaacatagatgaaaatcagggtcagacagtgaaataattgacttaattttaagcccagaagtggaataaataagacctaagagacagccaagaagcatgaaagccaatatttagaactttaatatgctaaaactcctccccacaacaacattcgttaggatccagttaataaggtcatacagattagaagaaatgttaagcgacaggtggcaagtttaaggggtagtttgtaaatacgaagtattgggacagctgcctatataatctcttacatggtttactaaagattttattaaaatagtgaggcagtgtggtaaactatcacgctttacaggtttccaggtcctttgaataacctgggttttcttgctgtaattttttcaattgtgagccatagaaatcttcattttgtgactgtttctcttttgggttcctatcaattggtgtcagagctgactctgataccaaccacttaggttgaacttacttcaaaaaggggtgcctaagtggtcaaagaccaccaactaaactaatcccacatacttaggaattgtgcgcgatcctagcacatctatagaaacatatgtattaaaataatctaaaatctttcttgaaaagaatacacaattgctaatgctagcagttaaaaaagattataggacatttaatgcattagagataccaaccctttcaatgatgtcagagagaatctcatcagcaatagaatgaatcctattctatacagaacagctatttttaatctcaagaaatgcttaacgtggtataaaaaacaaattttaataacaaactaatacaacacaaaccaattggcaatgtatcaaggggagagagagggaaagagagatacccggaagactcgtcaaacacataatcactttgtgaagtcccacctgcagcccaaaaaacaaccccaaacccaagctcagataatatatcaaattactttatcagaagatgggttgcagtagtctttttacacgcagaataaataaattcttacttccagagtcagcatttgcagcgttggatggttcatcagttccatcagaagaaggcttagcagcagcattttcatcatccccaaacatatcaaatgaatcctcagatggattaacagaccctgaagaactattccagcatctgttaaaccagacaaaatgtccttccctgcacttccagatgggccttcacctcttaaacgagcaaggttttcatat

SEQ ID NO: 200962 - DNA, 500 bp, Cannabis indica
aacaaaagaaagtttcaacaaggataacaaatacaaaataaaaaatcatcataaacaaaaaaaggttaataatcaatagccaaactaacaaaaacataaaatagtttatattaaaacaaaaactctttctatttggccaaaatcttatcaatggaaactttgcaaaagcgttagtagaattattaatcaaaaagtacttttctaagattattagcataaaatctcaaaccatatatcaaaatgcaaaaggaggtggtttttgaaaacaattgccaataaatcctttaaatttagtaagagttgatatagcctgaaaaaagaaaaaaaatacaataaatattatcatattgtctaaccttataaaaagtttgtgtttgtttcagttttgaaacacgtagaaaccagttacattttttatctacacaagtaaccatgtattcttttggttatgatcttttagttctaatttggatgtgtaccatagcataaaaacttattgc

SEQ ID NO: 200963 - DNA, 832 bp, Cannabis indica
gtagaatctacaaatccaaaaattaaaaaccgagttgttgaccgttataaacagcagtttgttagtcaagtaataaattaatgcttatataattaaatataaaagcggttagcttagctgtatacagctgaatctttgcctttagtcagagaaattaaaaagcgaatgtcatggcactaattatgagaagaggaattataataataataagaatactaaattagagaagcatgtgacactcaatcatcctttcccctccatccaattccatcccattatattttcctttttcttaacaaaataaaactcataataataacgttcttttttctccttcctttgcttttgattttaaaaataaactaataaaaacgacaatggtatgaacagtgggaccctataatgaaatgtctgtcgttactggagttggagttggaattggaaatacgcatgcattgcagggtcaaacatgagaacccccaccatcccaatatggcaatatcctattcctatggcttatggggtggggactcagctggctgcaccaaccaagccagcagaaagagaagaacactattactacaacaagttggactgtgacttggccattaagttttcgtgttttgcatgcttcaaatttgaatatcaaaataaattcagattagatatattcaaaccaaacctacactctttccttttaatcctaaactaatttgaacttcatcaatttttccattttagttttcttattacattcttttaattaaataaacaataatagtaatagtagtctagttttttttttttttgtttaacgtgtagtagtgtaagt

SEQ ID NO: 200964 - DNA, 834 bp, Cannabis indica
catatatcaaaatattcaaccctaattttttttcatatcataggcttgtggataaaagcatagtctacccatgcctacatgttattcatccccaatataacatggtaaaaaaattaccataaacaaaaattactgtcactgatgccctctctatagtttaggttattgggtagaactttactttgtatgggaatgttaacaaatttattatttaataaaaaatgaatatatatttttttcaatataccacttatttgactaacataaataaattatttaatagagtcaataaactataatctatgcttcattttatcagcacaaataaaaactaaattaggatttgatggagcattggttttgaaatcataggtgcaagcatgttcctctggcaagcgatggtggttgcagtaggcatggccgcatcgacatgaaaaacccgtcaatccaatcttcttgttgcaatgtttgcatctattgttactgattttgaaacttattaacaactttattatcagacacacaaacacttcccgtagtacttacacctccatcgttatcatcatcgtgtttagcagtactaaaatcaatatgtattttcgattcatgtgtaagaaagttgatgtagcacttagaacacatgtttttagtctcggcacttccataaaatccacacccctttgcacaaagtattggaagagtaaggtcggccatagtaattagaatgtaattatgcgaaccaaataagtaataggatgggtgatctcctaagaagtttttgtgttgccacttaaaaaatatgcaaaccaaataaatagtactaggatgagtgat

SEQ ID NO: 200965 - DNA, 2100 bp, Cannabis indica
atatatatgtatagataactaattcagtcgtggtttttagttgagagaattttatcttcggaagaaaactatggcggctagcctggcactccgtctcagatcccatctcctccgagcgacactaaccacaacccatatagccaccactaccatctatcgccaacccatcttccaatctccaccgttgattctctcccggccttccctcaaccgttcaattccggaagatctgtccctggggcttcggttcctctcaacagcccgacgcaacccaaaacgggctaaaaccgtcgacattggcgcccgagcccgccagatgcagactcggaggctctggctctacgcactgagctttagctgcgttgcaggcttcatcgtgttagtcctcaactcattccaagacaatttagtattctacgtgaccccaactgaagctctcgacaagtttattgtaaaccctagcaagaacaagttccggctcggcggtttggtcctggaaggcagtgtagtccacccggcttcctcaccggagattgagttcattgtcactgacctgataactgatattctggtcaggtatcagggagctttgcccgatttattcagggaggggcactcggcggtggtagaagggtttgttaagcctatcactgatgagattcgaaatgaggtttcggctaaaaacgtgtctgagaaagctaggagtggtgactgttactttatggctacagaggttttggctaagcatgatgagaagtatatgcctcaagaagtagcttcggccattgagaagaataagaagaagattgaggctgataaagctgctggggtcgaatccaaacaagcgtagattgatgggtatgtttcacaaattttgaatttcttattgatagagaattttgagtatattatacattggaggaaagtagaatagtttggttaaattgatatttgattagtgtttaggtgaggaatgctcattattattgagacacagggtttaatgacataagggagagaatcataagattccaatttttggtatttgtattcatatcttcattggtgaatttgtaaagtaacctcttacttttcagtgaaataaagtcatgaattgggcatggcaaattatcaggaaatttttggcactgtatttgtgtatgcttaatttctgtaaatgaactttgttgcttccttgtatacatttagataggattgccattaatgatttgcattcatcgaatccaaggtatcataaaaaaatttagtttttactggaaaaccatgtgaagatgcacatgtcagtgaaacttcatttggttttaggaatatagttatgggaacatatgcattttgtagaagatttggtcacttactttgtccctacttatcagttcaaattaatcatggtactttacatttaaacatatgaaagtttcaaggtttgtacagttgaatcatatttagtttaattcaatgatataatccactagaatcaatgctagcaatttgaaatctcaacagttgcgaaaaaattcaccttcatggagatgagctatacataaataaagcaaaaactgtatttctgctgtactgttcatgaagactcagatcctaaaccagatcataaaatagtagaaaacaactgaaatggatattatattattatatatgtgttgttcatttcatgattaactacagggtaatctcaataatcatgcctgaaccatgtggttgcaagagaaatgctcttattatcaacttgcttgattagaatgggactctttaatcttttacctttttatattattttttcccagcatgagtaagacttacttttttttctttttgaaaagcctgagattgtctttaatactaataaatggaagatatgagattgttttcttcttctttttttctttctttttgaaatgccatccatttggtggaagtattttattattattttccacatattattagatggtaaattaaaatggaggaaaattagcatattgtactgaagtttggaatgttaatatatagcttgtgtcaatggtatttatataaactacaaaataattatagaagtttatacag

SEQ ID NO: 200966 - DNA, 356 bp, Cannabis indica
aataattatagaagtttatacagtaggtagtagcaggtgcatacttttctcctaatgtagagaactgttttgtttttattggaaaaattatgatgtattttattttatatataatggtgtatagtgatttaagatatctgtgaaatttcaaataattaaggtaccaaaaacaagcttcaacataacttgttttgtataaatcatgtaattttatcaatggcaatgagctaaaataatgacttacaattcaactaggacaactaggacatctattttgttggagatacaatcaggaatagaattagaaaaactacttaaatattgagccgccttattctcatatcgtttgataaaaa

SEQ ID NO: 200967 - DNA, 679 bp, Cannabis indica
catgacttcaaaagctaccatgacattgtcaaagatgagacgtccaggaataaaagcactttgagtttccgagataacagcatcaatcagatccctcattcgattcgccaaaactttcgagatgactttgtaagaacattacacaaagctatcggtctaagatcacccataacagcaaattttttttctttggaatatacacaagattagtggcattaagtctctctggcataagatctgtgtcaaagtactctttcacggttttaataacatcaggaccaacaatgtcccaatgatgttggaagaagccaggtcccataccgtctggcccaggagctttatcggggtgcatagagaacactgcctgcttgatttcttcatcttgtatgggttgtaagagagcttcattgtgtgtggcgctgacagagactttaatattatcaatgacttgggcagaaaaattatctgtagaatgataaagttcctcaaagtactgctttataaccaagtgtagcccggtattccaactttgccagattccattattgtcttggagttgctgaatatattttgatctcttacgagcactagccgtagcatgaaaatatttattgttcttgtcacccgagtgtaaccaatactgcttcgacctttgtttccactagagttcctgctgtgc

SEQ ID NO: 200968 - DNA, 1058 bp, Cannabis indica
ctttatctgttagctcatgagatgcagccaattagtttacgcaaatgtttcagatttgtttggtttagtgccttgtatctgtgttgcttttgcatgaaaatgctttacttattatttaaaataccctctacagcatccctggagtaaaactgttcgtatggctattgatttggaggccatgggtattggagggaaatctaccatatttcaggtctggtagaattttacttactgttctgtattatgtgcaagcataagttcattcattaacatctgtatcttttggttaataggcgggtcctaatccatgggctattgagaactttgcattagtggcaaaatatccttctggccagattatttcacaggtttgtgctatttctcgaatcatgaattagcccccaccccctgctccttctcccaccaaaaagtatatgctgtttgctctgcgaaacattcttagaccagagtgactttgttacaacaggatctattttcttctggagtcattaaatctgctacagatttccaagtatacaaagagcttgctggcctttcaggacttgactttgcttacacggataactctgcagtatatcacactaaggtcttctttcactgctacaaaatatatgtcattttttatctcattgtttttcagcattctgattatattctggcttgatgaagtgaagtttgcaacaacaatttaatgggagtttgtacgaagaaatccaatctcttgctactattatttgtcttgatttagaatgatgtcatcaaaatcaaagctgaatatttgttttgtacaaaaaatcgaagctaaattgactttttcattgcccttgactttttccatagatttgcaagttaaattggttctgtgaaatgtaatttttgtttgctagtcataatagttagtgttcatacaaatgatgcctatatctataaagcatcagcatatatatactttgatgaaaacttttgaggcggattttttttctaaccctccaaatatatgcagaatgacaaagctgaactcctgaaaccaggatctc

SEQ ID NO: 200969 - DNA, 899 bp, Cannabis indica
ttatactgaaaagtaaaattaaaatagtaaataagcaaatatcaatattcatatttagggataactttatttcaattttatataataaattattttattttatgtcacttttttacttatttgaaatttaatttttaaatatttatttttcaattaattgttatatatagagtaataatactaattagttattatatatctcattaattcacaatttcatgcgttatctattttattttattttttattaattactcattatcaatatgtatatatttatttttgtggatattattatttacttggacaatgccatttttattttatttattatggataattatggaggtaagatgaaagtgagtaagatattataagtagttttttttttttgtattatttatatttggaaaaaaaaataaaaaatatcactatttataaactaaaatgagattacacaggcatcactaagaagcaaaaagaattttttggtatgttcaattttataaattacccattttttttaattttacttgaaattatgatttacaaaataatcatgtttttacttattatgtatgatttttgatagttttacttacgaaaacacgtgtatattgatcatcactaattttaaaaatatttataaaaatacgtaatttttgaaaaataataattttttttaataaagtacaatgtcataatttatattatgaattttttttgagatgatttatattatgaatttagtcaaaatatactcaaaaactacaaaagatatacgaagttttttttattcaattttattggctgaattttgttttgtagcaccaacaacaatttttttcagaaacatatactgaattgtcatcctacatttatctttgtagagaaggcat

SEQ ID NO: 200970 - DNA, 563 bp, Cannabis indica
tcttttttttttctttttgaatgcttgaagccttgaacctgggaaaaagcttgttacgtagcttgcaaaagtatatatgacttattttttctcttccattttcttaatcttagtgaccacattgatatttttacatgttgttgtatctacgagaagcagacttaaatcatgtaaaagaaaatctattgtatgatattatcaacatgacatgacatgacatccttgatgagcaaaatggtgcttgctcatagttagatttgatcactgaaagctgaacttggtataacaactgcatcacttgttatgtcacatctagttatccaaacccttgtagagatagatagcttaatcggtagtcttatcttatcatggagatatatatatataaattatatgtatgtgatgatagtattatcatatgggagggaccccaataagaagggaccaaaaaaaagataattaactaaagatagaatgacaagaccattatcctaaatgccccttttggcgaaaatgtggctcattgaggaagccatgctgaactagcacgtctctctctctct

SEQ ID NO: 200971 - DNA, 1534 bp, Cannabis indica
tgaattatcatacaatttagaaatcttaaggaatttttttttttaaatccattaaaactcattatatgattttacaatctttgtcgataccgtatctcacttgtatttttaaaaaaaaaaaatactcgcacaatttgaaagtgaaaatggttcgaaataaaaaacaaaacttatttatccaaaattaaaatacaacaaattaaattaaattttaattaatttaagttctttaatgttaaatttacactattacaaaaagacttatttacagtaattttgaactaacatttacgttaattgtgtcggtttcaataattaacgtatattttattgacgcaaaaagatatatatttatttatgctattgtttgcgttaattcccacagatgcaaacaattgtaaaaacacattttgttgcacgtgcatcatgcgtcggtccaagaccgacacaaacattgaaaattaaaagaaaaaattacaatatgatcaccataaaacaaatctaaaactagcatatttgaacattgaacaaatttttcaaaaagggaaaaatagatcgagatgaaaaagaaaagagagagaaatgagtgacacaaagttaaaacttgtaaaaaatgaaagagtgagagaaaaatcgagccaaagataaaccaagaaaaaaagagaaagaagttctcactgcctattggtgcggtggtcgttaacttatgcaactaggacgaataaagatcttctgttaaaaaatggtacatcataatatattaaaccaatctaaatatgacacatcaatttattagagagtattttaaagaaaaaaaaactgtctacatggttggttaatagtatttaagaaaaataattagttgagttggtacatttggattggtttaatacattatgaaccaattttttacaagtgatcttgattccgactaggacgggatgaggctctagattaggccgaggctggacttagagagagcaggagagaaggatgagagatttagtggtttgatatgtgtggagcggctagattgtttcaaaaaaactaataaatatatattagttatatttggtatggatcgacttttaattacttagtttttttttctatgtgttggtttaaaatcaatgcaaatgatttacactgacgcaaagtcgcatcggataaaaacatacataaaacttaaataaggtagcaatcgtgttgactcttgttaataagtttttttagcagtgttaatagaattcatcaagcacaaaaaaataaaaatatagatagtaaagaataaaattaagagataagtaatattatttcatttttttatataaattaaataatttaactatgtaattatataaacatatatatattatattgaattgtaccatatctcatatttttatatagtaatatgttttgtctattgacttgtaagaacatctccaactatatgtttattattgacttataaaagcatcttcaattatattatgtaaacatactctttaggtgaaatagggaatgtttaaaa

SEQ ID NO: 200972 - DNA, 1336 bp, Cannabis indica
atttcatcagagataattgacattattgacactgataatgtttctatctctaaccattgcttttcaccattattcatttgaaatttcctaggtcgctcatactcatagccaagggttttcattttctttcatatgaaagtatagaaaaagatggttgagaagttttaggtataatttatatatataaataatttttatatgcaaaatattatagtattttttttttttttgtagataatacaaatggaataaatttgtttgttttcttttttgaaaaatgaaataaatttgttttatttagatacttaacatattgttttcataaaaatctattgtaatatcttttcaaaaaatattgttatagattttttccgggtcaaactcttccaaatcttttttcagaaataaaaaatgactaaatttatcaataataacaatgtatacataagattttaaaaaatacttattttccatacaatataaagttaaaatattttataattagtaagtttttataaaatgtataattaattataaatattctaattagtccgattttgattatcaaatgtaattagttaattaatctgttgttagttagctagttattagtttactctattttgtcaacctgtaacagaatttagttgaagtgaatctttgttctattgtaatctttggcttataaataaagctctaaatcaatgctaagattttctagtattgttttgaggttttcttttcttttcattttcttttctttttgttattctttgattggataacagtagtgcccaacactatctataagttattacaaaattttttacttttagtcacaataaaatttgtgactattttcttaagttatatgaaatttgatactaattaatttcaccaataacattatgatactgagtaggacgataaacactaataatgctttttagcaaatcttactaaagttagaaacacacaaaaacaaaagatcataataaagaaaaggagacagagacatgcatatgaaatattttccttaattatacataatgtaaagtagtagtaagtagcattgtgaatggatgaatgaatacttaagatttagtaccttcaaattctagaaaataattagggccggagtgatgatgagtagtactactgtcattgtactgttgatcagtaataatgtccttcatttctatcacaatcccactatgatcatttgtttcagttgaagagataaatacccacgtccactgacatctctctactctcagagtttccaaacgcataaacgagggtgaccagctctgtaatctgctacaccctactaaca

SEQ ID NO: 200973 - DNA, 1159 bp, Cannabis indica
tttcaacatgccccctcaagctatgttgtggtgagtaactaacagtgagcttgtttttgagatagtgaaaggttaagattggtagggacttggttaatatatctgcagtttgttcatcagttggtatgtatctaacttcaatcattttgtttagcactttgtctcgaatgaaatgcacatcaatctctatgtgcttagtccgagaatgaaaaacaggattggaagccaattgccttgcaccagagttgtcgcaccatatgacagcaggactttcatgcttaattccaatttcagtaaataatgattgtagccaagtgatctctgtgcaggcttgagcaagggatctatattcggcttcagtgccggatcgagcaacagccttttgctttcttgaactccaactgatcagattaccaccaaagtagacacaaaaagctgatgttgattttcgatcgtcaattgaacttgcccaatcagagttgcagaaactttctatgacaggtttagttgctttggtgaattggatgccttctccaattgttcctgcaatatattaatatcctcttacaagccagccaatgtttttgagtgggagcctgaagaaattggcttagtttgttgactagaaaagcaatatcaggtctgctaagagttaagtattgcagtgcaccaattgcacttctgtactgagtgatgtcttcaagaagtggactgtcccgtaggtgtaatttattactttgaagcataggtgtaggacacggtttggcatccaacatgtggtattttttgagaagatcaagggagtatttggtttgagacaagtgaagcccatcttgccccctagttgtctcaaagccaaggaagtaagtgacagactcgagagatttcagagagaattgtttgtttagctctgaaatgatgtgaagcacacgatgagagttgttcccagtgagtaggatgtcatcaacgtaaacaagaacatatagacgagcatcaccctcggcaagatagaaaagagagttgtctgaaactgagttgcgaagaccaagccgaagtaaggccacacaaagagtgtcaaaccaggcacgtggtgcctgttttaggccataaatggcatggtcaagtttgcatacagtagtgggaaattggggatcaacgt

SEQ ID NO: 200974 - DNA, 1131 bp, Cannabis indica
taaattttaatttcaaaaacatatccggttactatttttttaactctaaatacccctagatcaaccccagttctcagatcaaataaccatctcatctaacggctgccatacaactcggaataaatccccttaaagtacactaacgggacaaaatcgtgtccctatattaataatgaatagaaagggtaaggtttgagaatattacttaattaatatcaatattattttattataaatattatttagggttggatattttaatttttatttagaaaatagaagaaagattaaaaaagagaaaatagttaaatagatttagaaagattttgattttatagatattttttagggttaaatattttaactttttagaaaataaaataaataaataaatttagaaaattgaaggaaaaaaataaaaattgagacatctctagtgaaattaagaaatctaaaaaaaatcattaaacaatgtcaaatctagagaagaaagataaataagagatataatcgaacaatatagggaagaagagattaaaaattgaagactttgaaagaattcacgaatattaaaatctctagaaaacttaccatataatatgacagattcgaaatctttaaaaaagaataattaaaaaaaaaattaccatacaatttagagtagaaaaataaataagtaataatagtatagacgaaaggattaaaaggtaaaaaaataagtaaccctacaaatagaaaaatatgtaaagaacttaccatacaataccaaatttattttcaaaagttatagagaaaaaaaatattaaaattgataaatatataagatttaaaaaataaaacaataaacaatgtctcaagaacaacaaacaattatatatattatacatgtatatagatcaccatcaattaatgtactattgtaaaagcttttctcttttttcctcgaagaaaataggacatggctaagtttttaggtccgttctatgatcttggtcgtttctatcgccatttcctactgatctcaggttgtacgggttagttgctgaaatagggttgttgtctcggtcgttcctctttatcgattccactaggctaggccattcttatctgtcttcatcaattctgatcgcg

SEQ ID NO: 200975 - DNA, 628 bp, Cannabis indica
tatatatacatattaattattattaatattctaaaatattgtatttactaattgctaatttattatgtgtatgtgtatgtagagaaaactcatcaacaatgaaggacggaagaatgatacgaatttttaatgatttaaaaaataaaaatgaatatattatcgtgttgcttactattgtgaacggtaaccgccataatatttatgatgtgtgtaacaatgttaataattttaagtatgaaaattttgaaaatattcaaaatcttggaactatatatccaggtcaatttatagatgtaccttatagtaaacttattatgaatcgatttccaaactatatgacggtgatacaatttcatctgagaacaaaatcaatctctactccgtgtgtcaatcgttttgcaaattttaattatatagattttacaacaacgacacgatcatcattatcatcgtcaaaatctaataattctaaattcaattactatagtcattctttagtagaaaatgaatttaaaggctgtaaagaaatcgaaatcttcggtcatgatggagttattgttattcattccaaattaggatctctgtatctccgaaaatcatcgtaagtttttatgtgtatttttttttt

SEQ ID NO: 200976 - DNA, 1048 bp, Cannabis indica
tttaaacaaaaatattatattatatcatatgtggccccagagtagttgctagtagtgctatgacaaatgaagtgatatgtatatcaattatcaataaactccaaaaaagttggatatatttgtacatacatttctctttacattattacatgatctaatattttattttattttatttttctttgaattttataagtaaatacttacttcttcatacagcgcaggcccttgtttactgtagacttcaaatctctaattaatagtatacctactttcaaaaatgaatcaattaacatttattatacaaggataagaagcatttaattaacataatttaatatatggcctaccaaattaaatcaatggccatccatggttaaagacttactaatatgctttggtttggagtaaatgtttttgaaataaaatgctattttcaataatggtctatgactatatatcactatatagcataagatagacattgtcacattgcattacatagcaatattatattttttttaaaaaaatctttacatataaataattgaaaaataatcggacggctgatattgtggagtctggacacaacatgggagcaagtacaataatatctaaaggaatttggaaattaaataaaaaaaaaataagaggaaacttcaaagaagccaactctccggacaatttaagctaaagaagattacgtctactcataaaatctcctatttcctacaacagaactttcctagaaactgttggatattattttctttcaatacaaaattaaatccttcttaaaattttaataaaataaaagataatatcaaaccttaataaaacctctttcacatgtcttgtattgtatttgtacccatctcaataaagagaatcgaatcgaacggttcattttcatagccaactctaatcacaaaccattcatttggaaaccccaaaattctcatactaataatgagtagggacagagacttagttatgagattggtaaatgtaatttgaagggttagattgaaaacaccaccacacaaaa

SEQ ID NO: 200977 - DNA, 2228 bp, Cannabis indica
cttaattccttaaataagaattagatggtttgtctaatattgaggttaatgttcgggtttttgtagaaagctttggaacttaaaacttcctctaaaggtgaaaatttttctttagtgtacttcaacttcaagtcttcctaccaatgtcctactattgtcagaaagggtaaattttggtaggtcgtataagggttgtattgtattaaataacaaataatactatctttggataaaatattatattgtattaattattacgactataaattttaacacaatgtgagtcggatatggggtccgagtccatggggtcggatatggggttcgggatttaggtctcagtccaggtccaagttcaagtcccggtttgggtctagggtccagggtctgggtccgagattcgagtccaagtccggggtctaggttcaggttcgagtccaagccatggtcgggattgggatcgagtttattgtgaagaaattataattttacataacctattagtacaaatcaataccaaacatagtattctattaaataatattaatataatacaatacattacaatctaacacaatactatacaatgttgtttactgagttttttagaaaactaatattaaatagaaaagttaaaagaaaatataactcagagtttttacgtggttggggcgtcaacgagccttactccataagtaaatattattaagtattttgctagaaaaacttaaaggaaaggattaccataagtatgagcactctattctttgcctgagtaagtgagccaagatttttcaactctttgcatgaaggtttcaatgagtatttatagtgttgtaaaagtcaaactagttaccattttctctctaatagggagtttacaaataatatattgactttggacttatcttgtgaaattaaatcaaaaaatattaattttcacactaattcaatttctcactaattttgagaccaaacatatcaaaattaaatactaatttagacactaaaaatgtctaaatgatgcatcaattattagacaccaaacatgtctaaatatcacatttaactttagacatcaaacatgtccaagttacactttattttaagacactaagtatgtctcaaatatactcattcttagttttagacaccaagcatgcttaaactaatcatattggagtatcatccccacactttcagatttcattatcaagataatattttgtatcttgatttaaaatatctagaagaccactttgcctctatactctttttaatttctttcttgaaattatttttacaaaattttgacactaaaatttctcatatgcacaaccaaaattgatttagaaattttaatttaaaatcaaataaattaatcaacaatatctcaacacattttgattcaatttgtagctcaccctatatttctaccataaagtgaaaatttaaatttactttaaaataaaacatctacattttattttaatctcaacatacaatctttcaagataatctcttaaaatagcactttgtggattattctctttctcttaatttaaatgattctttgatcactttaaaaatatcaaactcacatcactactcacagaataatggaattatttctatccattatcttaagattatctccctattgagattagcccaaaattataataaatttaacaaaattttcatcaattttttatacaccaaattaattttttaagactcaaaattgcttctttaatcttgtcatctttttttacatttttaaatctaccatgattcacttactttaagtctaaaattgttctttcactttatggctcattttataagtttgaatccacttgatccatttcacaagtttaaaagatttaacttctaataagttaatctttccttatctcatcaaattgaaatggttatcttcttaatttctcaacattcttcataaaatatgtgactatgaaagtcattttttcttatcttactatgtaagatgttcatcattaaatgaaaaaataaattcaaaaaatctatttattcacaaaagatgatgatttttaatcatcgtcactattattatcatatacactaaatatgataagttatatatacatatattattagacatcaatattatatattactcaaacgcatgttaaataagactggcgagttacttttattttggggctcttctctatcgttgtcgt

SEQ ID NO: 200978 - DNA, 1297 bp, Cannabis indica
tatatatagagagagagagtgatcatatatatataatttacctttgtttagttcactattttgatttttgtttatttggcaaatgtgccgtcacatctcctactttggtaaagagtttaaaaataaaataaaaataataaaaaggttgaggaggccaggctaggacttgagtggatggaatgggatcagaatatgattttttattattgtttttggaatggattatgattcttctttcccatcactgtcttccatgcatatataaatatatatatatatatacatgtacatatatatgagaatcctactggatatagcagtatttgatgattatgatgatcagtgcatggtacttaattaattttcgttttcacattatttgcttgtgtggggcgtacatatatttgattaggcgtatgtacatctttgagttttgtatctattatatatgtattatataatccctccaccattaaaaaagaagtatattttaattattcctataattaaagatgattttttcccaaaaatatccaccatatatattagggcattttataattttgtatacattattttaattaattataaatatatgaaaaaaaaatttattatcatttttacatttttatatataattaaaaactaatgacaagattaataatacataacaaatgaaaaaaaaaaaacagaagataaacggagtactcaaacgagaaatgaattaaagaaataaaataataaaatacaatacaaaatatatactggttcaagtcatattgatcaatatgatttatggctccattttaatttttggtaataactaccaaaatacttctttattaattgagcaaaaataatatatatagtccaaatcaaatctgatatttaaatgatatagtaaaaaatatagaaaaatttaaaataaaatgataagattatgcatattttaaagaataaaagatgatatatactcactaacaatatacacacacattgtacatgatataacactggtttataagttaaattttaaataaacatgaatatttcattgtatgtaactttttgtattgtagatgtcattactctagggttgttgagggggctaattaaactccaccttgatatttaaaaatattaatatataattattgtttttatatatacataatagaaataataaaataattgattaagatacttcaaatttacatgtgagactatgttgtgttttaaatctccttataccccatttctttaatatgtatttccattttatttattttttttaaaa

SEQ ID NO: 200979 - DNA, 1141 bp, Cannabis indica
gaattcaactaaggttgcgaagaggaagggccctaactctgtttcggatgttcgaaaaactaatcaatggatgcagttttaggaatcgctcccattgaatttttggatgttgaagatgaagattctggtgataagattggagcgattcctccaggatttcaggaacctgctccactatcccctaagtcctctctcaggtcaattgttcagcaggatgatatcaggaaggatttcgtgcatttcttagaggctaatgagcaatgctttgctaagataacaaatgatgatattcaacatttcgagcaacaaagtgaagataacaaatgatgatattcaagatgaagttgatttctggaaaccttctattgtgtgttatgttttaggagctcatcctccccttgctgtgttagaaggatttgttaggagaatgtggtctgataaaattgaaagagtagggttgttatcatatgtcatctatatagttaggttcaacaacattacagacagagatgttgttcttcaggagggtacatcttctttaatcgaagactaattgtgatgaaaccttgggaaccctcaatcaatgttaagaaagaagacattaggatggtcccaatttgtgtccatcttgatgacttagatttgaaatattgggggtaaagtctctctgtacaagattacagggcagattgaaaaccaattatggatgatgaggctactaaaaggagagaaaagttaaacttccctagggtactcaatgaagtggctattaaacaggatcttccagagcttattgagttcgaagatgaaaacagttgtaatacaacatttgccatctcttatgaatggaaacctgtgatatgtgctaattgtaatggtatggggcatgctacggatgattgtagaaagaaggagccaagatagaaacaatagtgggtgatgaaagaacccaaaaaaaaaaaaaaacaaatagtgagaacctaacaaagcagaaagaagttgtggattctgatggttttcaacctgtagtttaaggttggaagactaagacagagaatgctattggtgttgcctccactagcaattcgtttcaactgctggaagagaaaaagaatgatcatctgatagatgaatcaatgaa

SEQ ID NO: 200980 - DNA, 600 bp, Cannabis indica
ataaattatcatgcttgcatatctaccatttgagtcttaaacaattattttaataattaggtatccaatttataaaacaacatataaattatcatgcttgcatatccactatttgagtcttgaacaattattctaataattacatgtccaatttaacagaataggcaagcatactattttttaggtatatatatattgtcaaaatttccaaagttatttaaagcaagatccaataacttcaattgggcccaaattaaaaggcccataacaggtacatatgggccagcaatacaagaatgaactataaagaagcacaaacctcaacaactagcttttgtactataaagccattatttttatctttaatttggaccataacaactcatttgctttcagcttttacatattgtccctctcttttttcatatgctctgtatacacttttttcaccattattcactaaattttatttccctatttaaaaccactcaattataactttcgtacaacaaaacccatgaaaccattttttgaagaaataataataataataataataataataataataataatactcaaaacataattattgatgat

SEQ ID NO: 200981 - DNA, 1742 bp, Cannabis indica
aaaaaaaaaaaaaaccttactaactttacaggcccaggttctagctacatgcatacaatttgttctgcgagtatatcacatgaagaactatcatcacccactaatgatagtgatttagaatagaaacaaggaaaacactatagtgaagaagatgatagtactgagtatgaaatggtatcactgacaaatagtgatgaggatgctcatggagactattatgatagtgatgaaggtagacatatgaacttgaagaggataaaaagagagggagtggatccaaactgtaacattccatttccccattctgatcaaatttatcaagatggtaaaatagtgcttagactattcttgagatttttaagactatcgccactttgctgatattctaaaagattatgcgattcaagaaggttttgaattgaaaaaaaattaagcatgaaaagagtaggctcacatatggttgtagagcaattggctgcccatggaggatacatgcctctgtcttgcctgatctgagtaactttgttatcaagactcttactgaagaccatacatgtcaatgtgtaactagaaatagaacagctaacagtacttggattggtaagaaattagtgaagacattacaaaggcatccagaaatgaaagtaaagggcatcaaagctcagttgagggatgactatgggatagatgttgataatagaaggctatggagaggtaggagatatgcaagaggataagttcatggtcggcatgcccaatcttatgggaaacttagaaaatatgcagcaatgattttgcacacaaatcctggaagtgctgcaatcatacaatctgagttagcacatgaaaaaatttacaacgatgaaggtgatttagtgcaatctgttcccccagtaatgaaacctcgatataagaggatgtttgtgtgctatgaaggtgtgaaatctggttttctagctggttgcagacccttctttggtcttgatggttgccatcttaaaagcccttacaagggtattttattggctgctgttggactagatgcaaacctccacttctacccgatttcctacgccatggttgaggctgagaacaatgacagttggaaatggtttattcaacacttaatggagaaaattggagagcgacatcccaatggtcagccttggtgcataatgagtgacaggcaaaaggtaattctttcttcctaatacttgtgcttttttcctcactatctgttttgggtgaggtctaatacattctttttagtgtaatgattattctttttatatcgatcttggtcaaatattttattatactaaactcaatggttatattttaatatcatggtgtagggtttaattgaggttgtgactcatatacctgatagtcaccatcgctattgttgtttccacattgaaagaaacatgacgaaagaatttggcacttctgagcttaaaaacatgttttgggcagcagctgagacgggaaatgttcatacgtttcagcaaattatggaccaaatcaaggaatttaataaaaatgcatacaactggttgactaacattgatgcaaaacattggtcaatgagttgttttgacacgtcttcaaaggtagagcatctaacaaataaccatgttgaatcattcaatgattggattgatgaggtacgtttcaagccaccaatcgagtaactagaaggtcttcgaatccaaaacacagaaatgatgtactcaagaaag

SEQ ID NO: 200982 - DNA, 932 bp, Cannabis indica
agatttgaggtactcagtgcatgtggtatagtaatttaaactaaccctaccaaaactagtacatttgaggtacagagtgcatatggtaaagaggttaggaggttcaaactaaccccaccaatactagtacattagaggtattgagtgcatgtggtaaagaggttagtaaaacatcaaaggggtatgaactatttgtactcttatgaagtatgttcaagactcgtacgcattgtacatgtgattatactttgtaattgggtgtttgggtgcctaaattacaaaggcaggttatatgttatgtttatgctttttttactcagtttgttgactcatagatatgttcttcatgtgtaggtaaaggaaaggagaaaactaaatcaacggtgagtgtggagctccatggagattgtacatatggggacgattagacctagagggttcagatttttaggaagctcaattatattagtcgttgggagacatcttttaaactgttgtattttataaatgcttgaaaaatgtatacgacatccagagtttgtaaactttatattttttttatagagtgaagtttatataaattttaaaagtttttgttattcttgtttttttactaaagcctttgattagcaaaggttagcacggtaatttaaaaatcaatgtagcacgcctaagctagtagggtgttacaaggcatctatgctctagtgaggagcaatcagaccaacttgcctaaggttaattgcttgaggtcacaagcttcgctactttcaagtcctctggaggaaagcttcgataaaaggcctccctttcaaccaagaaaggggtagcaactgaacgtgtagtgttgtctaataatgaagaaataattttttatcaaatatcaaactaaatgatgaaagagaattggaacatattgttggaaattattt

SEQ ID NO: 200983 - DNA, 963 bp, Cannabis indica
agattagacactatgaaattggttgtattaatcttttgtatcgaaaaggtttggaacgtaaagtttgataattgtgccttgcatgatcttaattgcatctgtatttattgcattattattcatgaacataaataacttagagcacatcaagccctaatccttattttgtacaaaaaagtagaaatctttttaaatccttcaattcggacatctactcgtaaaacagatttcgagctatcccacaaagcaatatccaaatgggcaaatccaaaaatccttcaagccaactaacgctacgctagcacttgtcctcatacaaatcactctgaaaccgttggcctatttcgtctcgtaataactctagatattctttaacaaggcttttgttgctgcacaactcatcaacaagttcttcagggccatttacaattccagataacctaagtgaattttcaactagtgactgaaagatgtcttccggttcactcatgttttcaatcttttgagtcacagattgaaggtcaccctgtaaagcctggtcattgttctcgtatccacttaaattccgttgattgtactgtggcaatgcttggagccctgtacttccaagggctcgagacacaatgggcatcatctgttgaaacattcttggaaaatcaaatccgccaccttggcctcccagtcccataaacatgtttccaacatcctgaccgtcaacctgttgagcaatttgatttactacatttctcatttgtgggctttgcgtgaactgctgcaacatattcctcaaggcatctggggatgccacactagtttgctcagaaacgccagacagcataccatttagagcaggactttgcagaacctgagacataacagcagcaagatcatcttggctggcagaacctagcccccccaaaggttcaccatttctggccaactgaaccacagaggaaggatgtc

SEQ ID NO: 200984 - DNA, 1252 bp, Cannabis indica
ttgctcaaaattcaattatagaacctttgtttgccggtttcctaccgggggacggaggctgagcaatgggtggccccacatattaatagcattaagattaacgttgatgcggtattgtttgaggaggccaagaattttggcgttgggtatgtggcacgcaatgcaggtagtttcttgatagaaggttgcacaaaactattccaaaggtcaagttctcccgaagttgcggaagcaatggggatctgagaagcactgagttggataaaagaaaatcaatggccacaggtgatacttgaaacagattgtttctctgtagtgcaagtcatttgtagttctattgttatgattttcacgtttggtcaagttgttaatgattgtaaggctatacttagctctctgagaagtatttcgatttattttgttaaacgatcaacaaatatggtgatttattcatttgcaaaagctgctgtatttttcttgattgtcgttttaatttggcatcttttctaactattttgttacctcatttagtaacagagattacttgttaataaagtgatgactttgaattcaaaaaaaaaatataatctattgtaagtttttttacttttataattaaattcctgaatttctatttcttttgtttttttttgttcttgtagaaaaattaagtatttttttggggggttttcttttctttatttttacactttaaaataatttttgttttgtatttttttacggaaatttacataaaaacccatataataactaacgaaaacaatctaaattgcagccgaaattaacataacaatccatataaaaactatcggaacaatcaccgaaagaacccaaactgtaaattaaaaaaaatttaaaaattgtataaggggtgattaccctatttttttgctagttttattacatatgttaaattgaatatactaaatatattatacatatatatatgcccgaaaacacatgtttgaatattttatttcaaagaaaaaaatattattggtagtgtttgttatgcttacaatatcagaaactttatttgaatacacatagtaaattagaatataaggaacttcattttcagtactgtaaactatttgaaatttttcaaaaaattatagagatgatactgtaactataacaaatatcactacgaaaaagaaatcaaaatgtgatttcagacgttgagattgactagtctctcctttcatcactctttttagtctttacactc

SEQ ID NO: 200985 - DNA, 1015 bp, Cannabis indica
tttattttttattttttcattggctgatgagaactttttcgcctgagttttggcatgtactaaattttgtctctacaaaatttttcagatcattataaatttctccgaactattgagattattgaacttggtatatatgtaaatataatcatcctgttaggcatccgttagtaaaactgaataaaattagacaatcttttttgaatataaataatacatgacaaagattcttttttttgagatacttttgtttggttttaaaattaaaattagaatatgacgtcaacctcatatttaagatattattttgtttcattttaaatcaaaactttatttgatatggtatcttgtgccaatacaaagaaattttaagaccagttgtataaacttttgagctaaagaatgaattaggtaataatacccataagcttagtttatcaagtatcataacaatatgatcttacattagctttaaattttcatgaggactttttttttttgggcattttacaaaaatactggatttggggtaatacttttcaattttactgccacacggcagaattaacatttatactgtcctccccttttttttttcttttatactgtcaataccaaaacaaaagtatgaggcctccatctttgacaatcacagacataaccaccacaacaacaccaggacaccggaaaataaccattaattccgacaagaataaacaaaagcagtaaaatcgacgtcaataaataatcatggcaaaacaacggtaaaacaacactaaaacaatcaaacaaaacaaaagaaaaaaatgattaaaaaaaacaaacaatctgctgcacaacctcaacaccagatgcaaaatcaactatatttgcaagtctattcctagaaaattataataaaaaaaactactaaaacaacactgaaacaacacaaaaacaaatgaagcaaatataactacttagaaaaatataaaagaaacacacacctcaaaactctcttgtgagtgagctcgtc

SEQ ID NO: 200986 - DNA, 874 bp, Cannabis indica
aatagatgatcctttttttttaaaaaaaaaaactaaaccaaccatttaaactatatacggtatatccaactaaaaaatattttgtatattctaaatcaattaaatgtaattatacgagctttaatctactttttcattctgtttcaaaaaaaaaaaaaaaatctactttttcattatgttgatatacaaattaatattggagtgtaatagtttctaattttaagataatttatatagcctataggtatacctactcccactattaagtatatagatatacaaagaaaaaaagtttatccaatagccactcattgagtcattgcacccaaatgattccttttgtctatgtatgtatacattgcctttttatttaatctctaatcataatataccttagcacacaatgtgacaatgaacttcaaattatttttcttttgtaatatataataaactataacatgtattataaaataataattatatcgtataatatagaaacttctggaatgaacatatctaaatggtgtgcacaaggtgttcctcgtctgggtagattagaaaaaaaattacaaaatttattttacagaatctattttacatgtgtataaaaaaaattaatatgcttgctaaaaaaatatttaaactctaattttcagcattttaattatttaaaatgttttttaaaattttagaaatattttaaataattacaaaaatattattataaaacaaattaaattataattatctaggtaccaaaaatataagataatatatataaaaatatatatatatcataaactctttataaaaatttgtaagaaaattctacgactagaattttcaatattaagagtgtatctattacccttaa

SEQ ID NO: 200987 - DNA, 1216 bp, Cannabis indica
aataaatgatttgagtgtttgtaaaaaaaaggaaattaaataataaatgtatataagaaaattatgaagggtcccaatgattcttgaattatggtattgtttggatgttatagctatatagatctataaaggaagtttccatggaaccaagcacacgtgtaattcaataaaatcactcttcaaaaatcttaattaatttcttatcttggaacttgattttattctttatttatttatttatttttataattatttatttcacaacatttcttaacagcttcgcaacaaaactatatattaaaataataataataataataattgtaatttaccaaagtgggattcacgagactgtgaattaatgaatattcttaatttattttaattttttaataacccctttgaattttcatttttttataaaaaaaattaaaaaaaaaattcaactcctttgaatttttatgagctaccgacaataatttcaatttctattatgcaaaataccaactgtcgatttctatttttctttttgagaaaaatacaaaattctttgtcaattaattttatttatttaaggaataatataatatataaattaagaaactttataaccaaactttcatggctactgacattgtcaattctttctagttttcacaattagtcataccacatatatactatttataattttaagatatgtggattttccatttttatatgtaaaagaataaaaatatgtaattagagtaataaaaattgtgatgataatgcaaatggtatattgggttagatttgatacgaattttgctatatgtgccacccaatttttaatacattaggatgtaaaatttatgttaagtttggtaaaaaaaaaaaaaattagtgttatatttagttcactatttataatggtactttaatataaaaatgcaaaaaaaatataattatcattgatcatcatttaatattgggtaaatactattttggatcctctgttttacaaaagttaccaattggaccctgtgttttgttaaatgacaaaatagaccctgtatttctaaaatagtacaaataggaccctgaattgatttttgtcaaataaagtttaattataatccgatctaaaagtgttatgacaaaactgtttacattttttgttatctgttcgtattaagcattgtcttcaagttggttgtattaaaaaaaagttgtt

SEQ ID NO: 200988 - DNA, 716 bp, Cannabis indica
tgatttggataattataatgaaaattaattagcatcgatgttcgaataaaattattgttgagatgtctattctatctggcttataacatgacaccatagtttaatttgtgtatactatactacaaattaattagataatgataatccttcttttcttttttcaaaatacattgatcactaaatcttatctaggtagccctaatccgtcagcctaattttatttactcaccaaattcttatatgttaattatgactctaagattataacacgtcatcatcttataatatattaataattataataaataaataaaatattataaatttataatagatagtagatggtacgtcaataattgacgttatttgaagtttgcttatatatataatgataaacaatacatatacaaattaacatatatataacatccattaattaaattacattaaaaaaaataagcagttttttttttcgtaaataaaaaatatataagcagttaaatggtttaaatgcacctttcagaaaaaaaaaaatggtttaaatgcattatatatgtaaaaatggcacactgatgttttatataaagtatatgatcattaatctggtaataacaatattctctttctctaaatgtatgtccaaattaaatcgtgtgaaattaaaaatacactattaattttgtttttctttctttctcaaatatataaaaattaat

SEQ ID NO: 200989 - DNA, 1463 bp, Cannabis indica
gtttagcaacttaacatacaaataaacctactattatattatagatagcattaacttctttttttttttatttttacttacaaaaaaaaaaaacttctttttttttaatttaaagtgtctctattactattagtgtttgtacattatttcaattgtggattaggtgtttgatatataaataaaaactttagaacatctctaatagagtattaaaatagtagtgtagtgctatattttaaaacttttaagatttttttttttttgaatagactcttttaagaaaattagttctctaatagtgtgctaaatttagccaatgttaaaagatatgttaaatttggcataagatataatattgtacaaaatttaatacacaataaatataattttttatattaaagttttgttattgatcattaatgaatatacattttttaattataatattgccattaattatttttttaaaaatatttatttattaatggttattaatgatattttacttttgttcttatttgtatcttaaaatgttattatgtattggagtacaataataaatattgtacttagtgtaacatttatttatttttatatcaaatttaacataatgtttacgtcttacattgaacataatctaaaacaatttagtatacttgtattcttttaatttttaaaaatatatatacttgtattaatgtatacagtagtataatttttttgagcagtggtttttcaaattttataaattaaaaaacccttaagatatgttctgtaataattatttaagtatatttttttatttattttaattgtcaaagttaaaatatatatttggtagaattgtttctattttttattatttaaaataagaattaaaattctgaaaataaaaataagttacttttaaatttatgtaaataattttttaatcaggtttttttggtactttcttccattaatattcacttttttttctctcatctttcacactcaccacttctacagttctactcatttttactttttctttatcctttctctctcctcacttaaattattaaaaataaaataaccaagagtatttttaatttttatttttaaaatttaaaaaagttataacttgtaagtatcaagcactattttttttttcaaaatcaaaattatactttttatctttgtggtaaaaaataagaaataaaatttacaaactcacttttaagatacaaaatataagagaacccattgattagttatctcaaattgatgtagtatatttctattggaatgtaaattgtaaaaaatgttgagtcaacaacttttacaagacccttcccaattgataatttttcagtgatttaataatatgttagtactccatactctagaatatatgtacatatttttaaatgaattctcattcttttgaatcactacaacactattctcttcatttattaacc

SEQ ID NO: 200990 - DNA, 639 bp, Cannabis indica
gtatactacttttgctgataaaaaaaaaaaacaatatgcatagtttaaaaaaaaaaaaagtccttaatttaatttccttttccaaatcattatttatgtagcgttttttttaagaccataaaaggccctatgttttattatttaattatctaattaaattgaaaattatagtttagctataattaataaattaatataattgtaattttgtataattattataaaataatatcatataaattaatgtaaatagtaatatacttatatatattgattattataaaaaacatcaatccaaaacaaaaatatttatatttatatatactgaatcaagaaccaaataaaaaataaataataataataataaattagtgaattgtgtagtctgcacgatcccacatatatacagtatccccaccatatatacatcttttatagattttttttcgaatcacactaaaaataataaatattttcaaattcataaataataataatgcagattatgagaaaatataaagaaaaagtagtattagttaagaaaaaaaaaattaatcaactacgatccataaaccattattaatttattttttacaaaataacactaacatcatatatattatataatcttaaaaaaaa

SEQ ID NO: 200991 - DNA, 1214 bp, Cannabis indica
taataattgtactttctgtagattgataggctccacatatatatataagaaaattttataatatgcagctattaaacgagatgtacggaaaaatttttgtatggtgatatacttatagttatttaaaatatatattttctaaaattttaagaaagtttataaaaaaaagaaataagctgaaaatagaattcaaataatgtattgatgagtgtctgttttattttatatgcatatgaaatagattattcgaaccctgcaatctatattgtaaattatttttaattttttaaaattttatataatatcttaaataactccaacatacacgaataaaaaaatagattataaagttcttttaaatatcgaaatagataaaaagatacactagtatattcattttaagagaatacattgtagaactcatatatataatattttaaattagcgtaccacctttacttatattgtaggaatattatttattatctaaattacgaaaaattatattttaattttctaatttttgataggacgttatatataatggtaataatatactatgatgtaaacaaagttataattataattatttaagatattttataaaatttagaataatgtacgaataaaaatcagtgtttaaataatccatttcacatacgtataaaataaaagagtcaagcgtacaaaaaaatgtttaaatcttatttttagtgtgttaaatttctccaaaggtatcaaaattttacacgatatcttaactataacgtacacacaacacgactatgaaaaaaaattaaactaaaaaattctcttaaatactaaaataaataaagagtgcataagtgagaatgcattgtaaaaaaattgaaaaagaaaaataagcccacagataagtgcttgtttgattcttatttttgtcattataattatttaaaattaattatttgaaaacaagtaaaatatagattataattattataacgtacaatataaaatcgagacatataccgaaaataaaaagtatttctacttaagaacatattaatttttatatgtaactgtgagagcaataatatctataaagatctcaaaaggaatttatcgtatctaattagtggtcaagtcatcacattcacaagtactcgtgtataatctaatttgaattgtatgggttcttattcagcaacaaataaaaataacaataaaaacaa

SEQ ID NO: 200992 - DNA, 3008 bp, Cannabis indica
actgtaaaattattcataagtttacaatgtgcatgatctgatactcgtatactatttaccttattttctagaaaaaaaaaaattacacaaagtatccaaaattatagttttttttttacatttttcacgaatttataggaaaaacaagactattttcatgttaccgcaacattatattatgttttcacgacatgcaaacaatgtctttttattaaacaaccaaaaaacaatgttaactttgttgcttttgggtatttttgaaataatcaccaaaaaatgcaatcaactaagtaataaaagcccacaaagtttattgagatgtgaaccctcgatgtgctgatccaattaagaaggaatgaagtataatgtctctatagttagcacgtggttcctgagattgtctgagctatcgaatgggtggagaagagatttgtgcaacaggtgatccttttttatttttcagcgaaaaaaactaaataaaggaatacttacatgaaacactattttaaataacaagaatacaacataaaaaatacactaaaattctgtattttatgtaaataaagtttaaaaaaaccgtaaggatattgaaaattccgtacaaaccttatttttgtaattttttttttgttatttttgtattttttttttaaaattattccaaatatgaaagattatttacactatatactgaaatttttcaatttgttttactgtggagcagaatttttttaaaaaaatactgtgtaagttttataccgcagtatactgtgttaaattttcactggtgttctaccggtgttttttagttgttctactgttgttttgagttgttctgttttgtattctactagtgttttataaaaacacagtatttttgaaaacttttccgtgtgtagtatttttgtaaaagttaacctaaattccagtatttttgtaaatttcccaatataaatgctcccaaggtggcccagcccattaataatctaggcccattagctacacatataaaccgaagttgggcccgaatgagatttcagatagcaaagttagaagaaaaaagaaagaaagaaagaaagagaagaatcccaaaaatggtggtagaggaaaatcaaacaatcccaacaaaccctagagttgaagaagatgatctcgaggagggagagatcatcgccgacgacgattccagctcttctaaccctgccaacgcccccttactccatcaacctcaccctctcgaacattcttggaccttttggttcgataacccttccgccaagtccaagcaagctgcttggggtagctctattcgtccgatctataccttctccaccgtcgaagagttctggaggtaaacgtctttcttttcttctaaaaagttgggattttgggtttatgataattgttcgttgttggatcttgttcttgttgagagtttggtgattattgattgttttttcttttttttttgagttttggtgttcgtgtatttaaatgttgattctttatattttgattaattgtaatgcttatatatataattgtcattgttgttgtttgagttcttgatacttagttgagagtttaagaagttctctttgtgttcaatcaaataatctttatgaatgtttagttagtttcttggacttaggcctcaagattgaaacactagtaaatttagatttaggtctaattcaccttttgccatcaattcctctgtttttctaggattttcaagattgagacagtaatagggtttagatttaggcttaaatcaccttgtgccattaattcctatgcttttatagaattttccagttcagagcttctgatttgttatggcttttatctatttccatatctttcatttcagcatgtacaatagcatacatcacccaagcaaattagctccaggggcagactttcattgcttcaaatttaagattgaaccgaaatgggaggatcctatctgttcgaatggagggaaatggacaatgacatttcagaagggaaagtcagatacttgttggctgtatacggtatgatcctttataatgaattggtaatagaatgctttaaaatgatcccatctgatttcttgttctatctttgtagttgttggcaatgattggagagcaattcgatcacggtgatgaaatttgcggtgctgttgtgaatgtcagagctagacaggagaagatatctatttggaccaagaatgcagccaatgaagaagctcaggtaactgagctgttgaattcgtttcatttctttaattcggttttaacatggctttgataatctcagacaatttcgattattatgatgcaggtgagcattgggagacagtggaaggagttcctcgattacaaggaaaccataggattcatatttcatgtaagtatttctatatataattggatttcaatgttttaattacaatccaatttatttcactaatgaaatcatttcgttcattttcaggatgatgcaaagaaacttgacagaggagccaagaatcggtacactgtatgattttgtatagtttttcttttcgttcgttactactactactactagcgcagagcagaagactcgaaattgttttcttttaatctgtgatagcattctagacactagatactactagagtgaaatgtggctgttctttctttccatctctaaaggaaatgttgtggaatggatttcggtattactgattagttttcgaacacattttgagttaccctacttcgaatgcatcaaattttctactgctcttggggtttttgggtctctataatgacaaacttaactctgagtagaaatcatgttatcaaaaccataagcttttttgcccaattttcccttaaaatagagactagagaagttatttgtgagtagatcttttatatttatgctcttttcagatgagtaattaaaaaacatacattaccttccaaaaaggaagaaatgtgttttgatatttcagacattagaagtggttt

SEQ ID NO: 200993 - DNA, 755 bp, Cannabis indica
tggtgccttatagcaatgctcatcgtctaatatgtaatctcggtctaattcaataataagaaccctcaaccaataataaaaaactacctcataatggtgctagctacctaaaattgggaaatgggtgttgcaacttacaataaacagtcttcattttgcaaaaaaaataaaccttactttggtattggccaatttcaaattgttgaaaaataaaataaattgaatgagaagagttcacgtgaagacttaaatgatattttaagatgataattgtccttccccttggttggcattccaggtaatgttaggtaacaaaaactcttttttgaaaaaaataaaataaaataaaagctaactaactcatccaaaatatggttcataacttgaataggctcttaccattttgtcaaaaggtgaatatgatatataatctattctatttggttaaggtagcaagctcttttcatgctatcaaaaaccataaatctatagttgtaatttgtattcagttggcatatgactttcagaagaccacaaaaagatttgcaaaaacaaaaatgaaaaacaaataaagataataatgaaaacttgtgaaaaaagcaaggagtttgatgcccacaattgatatgtacaccaacgttcttacattatatgaattcacgactattttgttgcccaattccaaccacagacaactttgaccagttttctttttccgatttacccatctcactttatatttccttttcgtactc

SEQ ID NO: 200994 - DNA, 1224 bp, Cannabis indica
agttggatgtggtaaacaaaacaattgtggtgtctttcattggacattacttgggccaagcccaagagcttctttcacttctagaacagagatttcctgaattgcatttgaagaaaaaagagtgttttgaaatgagttgggcggaatccactgtcttttggatcgatggtcaccctgctgaaaacataacatcattggatgagttgcttgttcagccaaatgggccaggagagtttttcaagttaaaatctgattacatgaaaaaaccttttacaaagcaagcattgaagatattatggacaatgatgatcaagattggtcgtgtttggatgaaatggaatccttatggagggagaatgagcgagattccagaatgggaaacgcctttccctcatagggcaggaaatttggctttgttgcaatattacgtattttggaatgaggatggaaataatgtaacaaatcattacatgaatctttccagacaattgtacgagaagatggctccctatgtttcgagaaatcctagagaaacctttttgaattatagggatcttgatattggtgaaaatccaaataatgagacgttgttcaagaattcccttgtttatggaagaaaatattttaagggtaattttgataggttggttaaagcaaaaacattggtggatcctggcaatttctttcgaaacgagcaaagtattccacctcttcagacaacgaatttagtttaagctaattttaagcatttcttccgtggaaaaaaaatattatagactactttatcattattaataataatgtatatgctgttttttaacaaaataacaatgatatatacaattcgaaattatgcttttgagttttatatttttaactttttatgataatgaagttatgcttttagttttattttattttttaaaaaaataatgcttaatataggaaaaatgctctcgcaccttaaggtgctaagtactaagagatgtgacatatactgttacattttattaagttccacatattttgattttataaataatgatatttggtattttataattaccaattttttatttaattaattaaaaatattatatacataacaaacatgttagaactgaaaatcaatatcatgtagctaatgaacaagtagctgccaatacagaataataacgaagtgataaaattaacaaaaatgacagaataataaaattacaagca

SEQ ID NO: 200995 - DNA, 949 bp, Cannabis indica
atttaataagatttaacgaaactaagattaaaaattgcaacaaaaaatataatatataatatttaatttgtcaaaaaaaaaaatatgtaatatataagtgtataaaattaaaataaaataaaatatttatgctgtaaatattttttttttttaacaatgaaaattgcaacatcagacaatagatattgaacaatgtatacaaataaaattgtaaataaagtaaatccttctattttgtttgtacattaattttcaaacataggtcttttatttgataaatatatagattatatatttaccaacatatgttttacatttattcattaaaatatattttttaaatatttatttaaataaaaccttcagacaacttaaaaaaaaaataattgttaattttatttgtaattgtttgaaatgttcttacacagacatgtaattaataatcgtgcaagcaaagtttataaaataaaaaaaaaaaaaataaaaaaaaaatcgtgcaagcagatttaaattaagagcgaaggtggccaagagatacggctaaacgctagtagagttgtagatttatttgtagtaatcaaaaacgacaccgtgtttgttgttcatttttatagtgttactattataataagtagcctagcagtagcagaccaaggcaggcctatttgatcctcatgctatatatacacactaaaatttcctatataattttctttaaacaaactctaaaaatactaatgctagctatctccgcgttgtatatttcaaagttcaaactgctaggctgtattttgacactccaatttctcaagatatgataccctttcaagatatctcaatgagttggtgttttcccacttatgaaaaagtctatcagcgttgaaaaaaatattatattaatcacattttccatgaacaattcaattgtatttttcaattttcaaaaaaa

SEQ ID NO: 200996 - DNA, 651 bp, Cannabis indica
atcttcaaacatgtcgctgaggcagcggtgccaccactactgccgaccacgaacaatagcgcagagaaggaggaagactataattaggttaattagaatttttaatccttaaactatgacatgtacttttcaaaaaaaaaaaaacatgacatttactaaattatgtcttttgaattcttttaatcattaaatttctcttgaaatattgagattattagatttaaaaacttttgtttaattttattcaattttattaattcgttgattgtccatgtactaaattatgttccacagactttgatatctactaaattatacctctcaaattttgacatatctcaaatcatgtcccttaactttcatctatgttcctttaaaaaaaaaactttcatctatgttagacttttcttactaaaatttgacaattccttaaatctaacaatatcaaatagttcagtgaagtttttaacagctttaaaagtccaagggcatgatttattatgtcaaatttcgagatgcaaaaattctaattagccctataattgtacaataaactaagattgacgactgaactacaaacaaaacttactttcttatacataccacgaaatgtagtaaattttacatatgttgtttgtttttttttatttt

SEQ ID NO: 200997 - DNA, 606 bp, Cannabis indica
gataattttgtcatcatctaatttttcaaatgagtcctttgataaaagaataaattatttgtcaatattggagcatgcacaaaagtgggtcccaatacctaagaaagaaagaaagtacaaggaagaaagaaagaaagtacaagtagtgttttctattaactctgttgtgtgggagtaatttttattttattaattgtagaagcttctcattcatttcttatttgcaggtttccctttcatttggttcctaagcatagtattgtttttatattttttttctgtccatgtgtatttaattttatgggtttttattaataatttgattcttaaatgattttacaaagcttctataatcaatcaatatatcttacaaaataattaagaaataaattttactattatttttatttttatgaaacaacaaaatgaagaagaacttgaagaaaaaaaattgctttttgtacgagacaaaattgaaaaatagaaaatgaagagattttttattttttcttttattttttgaggaagaatatattagtaaaaataatctatgtttaatctcataaaaattgaatgccatcgtttccattcaatttcttttttctt

SEQ ID NO: 200998 - DNA, 1073 bp, Cannabis indica
atatatattacagtactcatagctactaatttataattttatgataaagtttgggtaactaaatcaatgaatttgattgaaatttattaaaaaaaaataagtggtttttagattttttttttaattttcataaaagacaatatatattactaaagagattcaatatattattcaaatttatagaatctcatcctctagattgtatatagtacatatctaaattttccaaatttaagagtgtattatgtacacatagatgtccagaagcaaattttttaaatacgcttatttgtatgtactgaaataagatttaaaataaattaattaattaagcaattgtaaatcaacaattacttattattttatcaagattttttttaaaaaaaaaaaaaactaaccaaatttttggaccatatatcatgaattaatgtacattaattaataactaaaaaagagtattataatatttaacacctaaaattttattaagataccctattattaattaatttttttacatcaaatatattatagaacgaaataataaggagacatatatgctaattttattagttaaaagcttaaaataatggttattaagcataaaagatatggggacatactttttgcttatagttgggctggtgttatactatgaaaatattataggagtttattattagtaattagaaattaatgtgtaaatatgtaattggatagttattaatagatataaaataaaactttaatttaactggaagattgacatgtctcgaaaagtatatttaagaatttgtcctcttgaagaggacctcttacctatcatcatttggagatttcgtagtgtgtaacaattgagcactccatttagaatattttcatatatatagatatatttaattaattaaaaaattgcttcttatttataattattgaataattttatggtaggtatttttatttttttaaactaatggtaggtatttgcataaaatagagacattttctaatatctatataggactactgaatatacacattaattaatatattaatacataataaataattta

SEQ ID NO: 200999 - DNA, 697 bp, Cannabis indica
aaattaaatattatattaacaaaataaaatcaatttccatatcagcctcacttatcaatctcaatgtcaatagcctttgcttttggtgatgattccttcaccttaatttattttctacaatcataaaaaacatagttagccaacttattataaatacataaaaacataataaaaaaagaaatgcaattaatattgattataaataaaaattcagtaaaaaattccaacaaaaaatcggtaaaaaaatagattataatagtaattgcaactaataaaaaatttatatactcaagatcataacaatacaaaaataaccaaataaaaaataaaataaatatcgaaagcaaaataaaaaaaatattaacaaatacttattttctttcacaaacatcccaatataattgctctatatattctgaatatatatatatatatgttattttataatattaatagcaactaatattcttattatatacattatatttattcacaaagaaactatatactaacttttatataccattgtttatcagaaaaaaaaatcaaaaaactaaagatgaagattaacctgagtttgtgaggtgtgagtgtgactgttgtgcgtcattgtaggagatcgaggatttgagagcgacttgagaagcaaactccggcgtcggccaatatagttcctgcaacacgaaacagaaaaaaa

SEQ ID NO: 201000 - DNA, 1077 bp, Cannabis indica
attgggaagttgcaatatcttgtaattacaaggcctgatatagcttattcagtcaataagcttagtcagttcttaaccattccaagagctaaacaccttgttgctgcacaaagggttcttcatttcataaagtcaagtccagaacaaggtattttgcttgctgcaacttcagaaattcagctaagagcattcacgggtgctgactgggctgcttgcattgacactaggagatctacaacaggtttttgcatctttcttggagattctatcatctctcggaaaagcaaaaagcaacatactgtgtcaagatcctcagctgaagctgaatatcgagcaatggcaaacacaactagtgaggtgatttggttattgtcattgctgaaagagttgaaaatagagcacaaagggcctgccttgatgtattgtgacaacaaagccgctgaatatattgcagccaattctgtttttcatgagagaacataacatatcgagattgactgccatcttgtaagggaaaaagttgaagaaggactaatcaagactatatatgtttctaccaaagaacaactggctgacattatgaccaaagctttatttccaaatcagtttaaggctcttaaggacaagattgggttggttgatgtataccatccatcttgagggggagtatcaaagttagttggttagttaaaattgtttgttatagtcagttgattagtttgttgatcaatctgttatgacagctgtaataactaactgatatgagttgtataattgagctataaaagctctgcttctgtacattgttcagtaatgaaaaacagttggttttctcattcaattcctctctcaattctctctgttactctctcttcttcttcttctttcttccacagctaataaagagcaaggtcttaagtccttgacattacaatcaaaaccttactgttgattcttatcttgatcatcttgtctgacgctgctcattagataatctaaacaaaaatgttaaattgaaaaacacatcttcaatcggaaacaatcaaaaagcccatctattagaagaaaaactcatta

SEQ ID NO: 201001 - DNA, 1059 bp, Cannabis indica
ctaaaatggattatgtatcaatgtattaaagttttaacagtagtagaaaatagaatcatataaacgataggactctttaacttggttcaagttttaatctttagctacatgaaaactggaagcttcataaatttttgatcctcaatgaacccccaatcagtatctgaagcaaaaaatcggtaatcgcaagcatgaactgatcattacaaacttataacgcataaacccagctcaaagatccggaccaaaatccaaaatgaaaatgaaactacaatcaattaaagctttacgattctaaagaagaaaaaacaaaacccaaaataataataaaaagaaaaaaaaagaagcaattgaaacaaaaatgaaatttagaagtacaaaaataaaaacaaaaaattaccagaagaaacaagggcttggcgagaggtaactgaggtggacggggatgaaaaattggggaggcatcgagcggcgtagtaatggcggagcccgtggtggttgagggcagccatgtgataagatctagtccagagtgagcggtagagtgatcgcagaggtatcatcttctccatttttctggtgcgaaagcggaagagagataagaatgagaaagaaataacaaagaacaaaatcaaaacacagagataaagagatgaacaaaatcaattatcaaatatagagatgaatagacaaatgaaatgaattagcctttatcttccaatcttccaacaagtgcttatactaaaatatagtcaaatcaaatgttgatactattaaaaattatcaaatggcattaatgaggaaagaaggtgaattcagatcaacctacgacttcaaccccaacaacaaaaaggaacccactccaattttgaaagggacaatctaaatcacacatgaagagttgaaaacaaataagagagagagagagagagagataccggtcagaattagaagccgagagagatgtgcagatggtggagttcttgcaggttgcaccggagaaactcagacggccggagagatggcctgacgcgatttagggaaagagagagagagaga

SEQ ID NO: 201002 - DNA, 2483 bp, Cannabis indica
aagaaatttagtagaaataacaagtatagtgcaagtcatacatgggaaacacatgaagacaaaatgtgaccacaagcatatatacaagtcaagtcaagaaatcaagcaagggaataaagaaagaccttatcctaaagctatatggccatcacaaatgatattctttttgcttgtgacataggtgcaagtctatcttggttgagtctgattctgctattgcagttaaggctttttctacatgatagctcccttttgcttggggttcttttcctattttcaaggactatttatctttatcggttaagtttgttcttgtttctttaagtttttgcctcatgtggagaactctgttgcagaccgtttggcatgtcttgctagagctaatcgttgttttgtgaggactatgctaagggaagtagtcccctctgtgactactatgtgaactctattttggttttgttttctttaatatatgaggtttattcataaaaaaaaaaactaaaaatattaggctatattttttataaaaattcttatttctaaatattttattttcaatggaatgaatttatatttatataaaaatatggctaaatataaaaaaataataaaattaataaaataaaatagagatataataatatttatggtaataattaatttgagtaatttgaaacatgcatataatattcataataataataataaaagtaaaaattgaaacaaaaacttccttgatgtccgtacacattattttcctttgataagagtataataatgtgtaagtatgtctttaataaaataaaataatcataaggtgtgaatacatttggtgacgtataatatgtccctttttcttttttcttttttagccgtaatgacgtataatgtctgataatgtaactttgttaacatgtcaaaaaagccttttcttttgaggctaaacgtttaaaattcatttgttcaagaaaaaaggtatcatattatttagtactatctaggcagcctttttgagttatacataataactttaatctattatgtgtgtccaaagccatttctcatgcattgtttttttaattgtaattgtagtgtgacctccacccaagcagttgcataattcaaaactaatgaccagtcatatagactatatttacaaaccactaaaagatatataaaatgtattatatatatatgtgctcttggcttcttaataaaacaacctaaattaaagctcaagtatttattataaaattctagtttttatttttgcatgaagtttgttaaatgaaagtaacctgctggctgtgttgaccgaccacgatttctcttatcaaattattaatatctatcatattttgagtactatatataaggctggattattaataaaaattatgtgacgtactccaactcatacatcaaataaataaatatttaatgcatattacaataatatactataaatcttattaattacgctgtacgcatataaataatgaaatgcttccaaataacgttgtagagtcggcatacataaataaatgggcagcgcaacacttataagtcatgtatttaaaatgagaaatgctaaaaccacttatggtctttacagcctccgccatggggtgttggaaaattattgtacttcaataaaaataccaaaataagaattacaactctatgacaagaataacatataatataagataaagacattgatgagataataatacaaatactaaataaaaaaataacaaaaagaaaaagaaaattacaacacaaagctataaacaacacctaaaatacaatatatatatatatatataataatatatatttatatatatttagatgtgagagtaatcgcaacactaaatatatcacaattgtataataggatcttattccaatttttgaccacctgacgtggcatgttcatatgaccaatattaatgtcacgtgagagtacaactcaccaacaagaatgtcaagccatctactcagcacttaaaccaacgaggtgtcctagtacttaagagagacgacgaattgaagaaccaactacctcaaggggactggccggccaaacctggtcggccctatggccagcataggccggccaacttccaagtactgtgtggccgaccagcttttgcatgacatgattttggtgcgcagcattcatccgtggactgtaagtgaagctgcaaattgagccttgacaaaccacgaaaatagagagaaaatatcagcaacttcccaatttttaaggggcaatttagtcatttgaactttattaattaattatataaatatagctttatttacctattttgaagggatgtgacggatgtaatctctactatacaaagagcattagtcaaccctacctctctaagtcttaagtatatgttctaactctcaagctctaagtttgacagtcatctcttctgtttttctctcacatgcatagacttttt

SEQ ID NO: 201003 - DNA, 785 bp, Cannabis indica
ccctcattatctccacaggttactatactctttcatctttaatggattatattaatgcattaaaaagttgagttattatgatgaaatatttggtttttgttaatataaagtttatttaatatatctgatggcagtggctggggctgcatatttcatagttgctgacaagactgttctggcaacagctaggaaaaattccttcaagcaaaatcaccattgatagagaatcatataagaacttcaaattcggatttataggactaattaattagtgttccttgtatacacatgtaccaacatgtcttgatccttcatgtattattacacttgctactttcaatagccccaatgtatgtgtatacaaggattaataaaaagaatttcaaagctaaaattattgttataattcgtactattggaataaaggtagttgataacttactatggtagtggtgtaattactagcatatagtaattacaaaatataattatattatattttaaaatacaaaatttgtttggatctcaaataataattatatatgaatttttatttttatgtttcgtagttggtaattaatagcttaataatattaattaattaaaaataataatattttgtaattacataatagtcccatcaattttaatggagtcataaaaattagataatgtaattgagactccctggactatctcaaattatatgattactgagcaattatttaactaaacaaatacttcaaatcttgtaattacttagaattacattaaattttaatttt

SEQ ID NO: 201004 - DNA, 798 bp, Cannabis indica
ttagattattacaaaagtagagaaccacctcatcgggttaagtttgtcttttgtcaaagaaattataaaattcacatgaatttatacatttatatatctatatatattatatagtaaaaaaaaactaatttaatgcaaaaataaaatcctaaatcaatacaaataattcaatctcatacagataaattatctcttaaattagatataataaaataaattaaataactaataaattaaatttgtaaaataaaatttagataaaatgattaaaatgcttgaaatattacacttttattggaacacatgtgttatttctttttttaaatctttttattttttttttaggaataaatactttgtgatcataattaatgttgtaaattatttacaataacagagtaaacggatggaggtatagaccacaaccaaaaacaatcttcatccaatactagatcatactttgtccaacccgtcgagttgccatattggcactatgtttgacatgagacgcagtaactctaggaaaaaaggacaaaagactaaaaaaagtctacaatttaatcataaaaatatatgagattctagtatgtggctaatttaaagcattcgaaatcatcaaagcatctgtttcaatttgggcaataggcacttggacttgaagaagccagtttagagcatgaaacattgcatttgcctccatttcatacgattccaaattttcgacagtcctctttgataaggcagccataacattaccatgagcatttcgaacaacggcaccaacacccatgatacttc

SEQ ID NO: 201005 - DNA, 1460 bp, Cannabis indica
aattatttgacatctcgtcgtaccaacgcagtaaattcaaacccgctaactctcgtgctggtttcaagctgtgttattgtgtctcacctattttatcgggcctattgtatgttaacatagttcttttattaattggtctggtgtggtctcttattctatgtcattacataaattatgtgtctaaaactcctacacgaaaagccttccatattctatttaattcaacgattgttaatcaaatccataaatcgattagcacgagaaaaataagataagagaaaatgcgaagataatgtagaataaaaaacatgttaagcatgttccgtactcctctttttctatctaggcatgtatagttatgatatcaacgagtgtatttagtccaacaaagttgtctgttacttctgtcataataattaaaaatttccgaccaacaacaacaataataataatgcgaattcattcatgactatttttgttactcgttaattagtcagtttggcttaacatagttaccgatgcaaatttgccttttcttcaaccatttctcaatgcaaccctttactttttctttgaccaattagtagtaattctatttttcttttttcttgacaaaagtagcaattccattttgtttggcacatttaacattgtatttgtattttacttcttgcgttaggtcaactatttaattaaaaagttgagaaacaggagaaaaataataataattatgaatatcatcaattatattcaattatattcatataaaaaaaccattaaaaaaagaagaaaaaaaaaaaaactaagatgattgcaattttcttccatagagctatagcaggcttaatttagttttagttattaaattgtatgatgacagcactatattaatagataaagaccagatcaggatctgatatttctaccaaaaataaaaaaaaaaaaaaaaatgaatggttgtacagacagactagggtcacgtgatttacttgttttagggaaattagtcataattattccataatagagtattttgaatcattgtttaatttggatagcgataagattattcagtatgaggtggcaaccggcaaccacgccacatcatctccagtcaccaagctttgaacctgactagagtacacgcttcacatttcagtttcccttttccattattttcaaacaatacaaaagtgaaatttcttcaaaaagaaagttcttttttgtttgtttttcttttttaccaaaacaataaataaaaggttatatcaatatctatccacttcatagaacgcggcgatacgatttggaattcaattttggttggttgggaaatgtcatcttggaagagttactaaaataatcctcaagtcaagttgaatttttagcataaaaatgaagttgatgagtaataaataacattcaaaattatgattgcattaaacaataaataaataaat

SEQ ID NO: 201006 - DNA, 695 bp, Cannabis indica
aaaattagattttgtaaaaaattcggtgtgatgtaaaatgtaaattgtttccaaaaatccaatatttttataaaaacccctattttactgtgtcaatgggaggatcaatttgaatttaatgggctgaggaaggcccaataataatggctttgtgaaaaccctaaccttctttcatctgcagtgcttttatataaactcccacaacctaacgagactgtcagaatcctaatcttcatctctgctctttcgttgttgtgtataagcttttcttcatacgctgatttctatttttgttttcttttatttatctaaagcaggaattgtgtgtatcggcgttgtgctaaattcagtgcacactttccgaaagagtttcctgcaaaattaatttggggaaagtgggcagttgtgtttcaagttcttttggttgaaattcaacaatcattttccccatatcccattttccaatgattatctttttttcgctatatatgaatggattgtatatttttcttcattttttttattgtctattttgcaaaatgttttatgttgttttgactgatgatcatttggcagaagcctttttaatgagaaatggtttcaggtctatgctttcatgaaaaggtttattcttgtccttttatttgtagtctgtcaagataatagtgtcgtgaatgcatttttgatttgagtca

SEQ ID NO: 201007 - DNA, 626 bp, Cannabis indica
atatatacacttgtgggcttaagagtgagtgaatggaagatttgaactcatgttaaaaattaaatgcatcattaaatcctcatcattaagactaactaaacttgtttcatagaatttgaattcaattttattattgggtccactaattcacataacataattatttgataaatgcatttgcttatgcaataaaagaaaaaaaatcgattgtagtggttattgtttcaatgattactactacatggccatgtcggctgttatggattcatttcttatgaataataaatatatatatatacatttatatataaaggaacaattcaattaatgcttaatgggaatgatttgaattgaattacaaattttaactgctcttgatagaacgactcctgaaattgtatgacaaatcgtagtctaattattattattattataattgtatatatgtttatagtttttgtgattaatttttaaaatcatgtgatctaattatgtagttttaatcgatcactttttgacaattaattatcattaatacaagaaatatatatatatatatataaaaaaaatacataataatatttaggagaaatctaaagtaatacatatacatgtttttgtgttgt

SEQ ID NO: 201008 - DNA, 428 bp, Cannabis indica
acagataacaaaaaatcaacaagaaattaacaagagttcatcataaaaagaccgtattttctgtaaataaaattataaaaaatcgtaaaaatatttaaaattctgtgaaatcgtatttttgtaatttttttgttgtttttgtgtatttgtgaaataatccctaaaagaagagtatgaaaggaagaacatcaagtgaatgaagggagatggtcaataatttaaacaaggtctaagcacttttgttcaaaaagcttagagcatgtttggtatgcatattaaagaacaactttttgtgttttaaaacaaaacattattttttaaaaacaaggtatatatttggccaagtattttaaaatcaattttttaaatgcagagttaaagaaaataaaaattataaaaatatttctaacttatttttagaaaataat

SEQ ID NO: 201009 - DNA, 858 bp, Cannabis indica
tttttttttttaattttctctttcaaagaatgatgcaccatccaactctccatttgaccttcgataacctgttgggcggctagggtttcagctgctacaaagaagattgggagccaggttcttaagattatcatcaagaagtaatctctcttcttcctttttgtgtttgatattaaagattgatttcgtatttaggttttggatggaaatggatttttttatatatatatttattatttgatttgtattactgtctgtccttcattttttgttcttgatatttatggttttaatttgtatccttcaactcttgagataatttgtagtactgattttgctcaatttttttattactttttttttttggggttgggggggggggggggttcaacttcttattcttcttttggagtatttgggttatgtgggtatctttagattattatctatatatatatatatatggatacaactccaccataggaaccattttacccttcctcgtcggtacctttcttcgatttcaaagtatgtattccccttatatgaaggtaaagtaaaattttatcccaggttctcaactgtcacacacacacacacattgacccacgcgcttcttccttttatgagaaaactccaaaacccaacaccatttttaactctctcatttcaaatctattaactttattaaagtgtattaaactaatcagtgttaatctcaagcttaccttcaatagagaataccataactaaaagatattggttattttttctttttagttttttaaaaaataattgggaaagttgcgaactcaaaagatagtgaaaataattatttttcttaattgagtagtcaca

SEQ ID NO: 201010 - DNA, 938 bp, Cannabis indica
cattaaagtttctaagtgtacatgtcatctaaaagacatgtcttcaagtttaaatcctttttttagtgtatagggtagcttttcaatcgtttctctaaagattctacatataacatgtattttattccaagggtttctttaatttccccatgtgtttgtgttaatctttaaatattggattaattaacatttttatattctcaaaaaatatagatctataataccattaacttgttagtcatattcaaactactgagaagtgagatgttttcaaagcgacttacaacgaataaaaatattacaaatttatttatataacacactaggtttatttttccaggtatatttcttctttgtaaaaagcatatatatttctatcttcagggtatagttataattaattaaattactaagagagttctatttgcagaaaaattataaacttatctaatttttaaaaattactcttaatattttttttttctctcacattattttatattaattttaatacttattttgattttatttttataattttttttctaacttacgtatatatatttttttattttttttaaaaaaattttgcataattttttattttaatttttttatcataatatttaaaatataatttatttttgtttgatagatatattttttaagaatatgaattagaagaaaaaagtttaaaaaaaaaatagtgtaaataaagatataaattttatataaaataaaaattattaaaataggatgtctttaaaaaattttggagtgtgaataaaattttccaataattattattagtcatatttgaggtaagattatagctaaaccctaatgtttaatttttttttcatgtacaataactttattattgagggtcatagattagctaagcatgcttttaggatagacaataaactttcttggat

SEQ ID NO: 201011 - DNA, 881 bp, Cannabis indica
aattacacttataataatattaacacattaacacgtaggagggtaccttttaagcatttttcttattataatcattgaattaaagcactactaattaaattctcatatttgttgtgccaataaagagatatattgaaaacaaaggggatgggacatttagctaaccaagtaatgatttattataattagtttattttctcccatattttattataaacttccaatattctattttttcttttaattatccataaaactaatattattattgttcccttaaaaaaattgaaaaaaccaccacatcatagatctaaaagtaaagttacaattaaggagccaaagatatcatgtagacactataaatacatgggtttccaagttccattccatcacgaactaagtaataattaagactcttctacaatttccacacacaaacacatatataaataatattatttctaattaaattaattattagctatatatattttaagtacttaattggtgttaataataattattactataaatataattatggcaagaatgttagagcctcttgtggttggaagagtgataggagatgttctagagtctttcagtccatccataaaaatgtctgtctcttataacaagaagcaagtctgtaatggacatgagctctttccttcagttgtcatctccaaacctagggttgaaattcaaggagctgacatgagatctttctttacactggtaattaaaaatatatatatatattatgataattgttttgttagatctctaaatgatgaacaaggttttgtttaaatgttttaatgttcttttttttggttatttttttttttcttctctctctctttattttattttaggtc

SEQ ID NO: 201012 - DNA, 606 bp, Cannabis indica
agttttttgagtccaacttaagccccttccaaaacttttgtcacttgactggtggcttgattgttagaattggcagtttaatagttctttgttcttggtggttttgtagcacttcgtcctttagtgagtagtccttctgacatggttgatgataatttttctcaatggagacagcctatggtacaacaagccatatctcaggttacgttcaatgtcatgtgaattcgttttgtttgtttccaattgttgcatttgactttttagtttggatgtaagccataatttagattcttttagaatagcttgctgacaattctggctatgattgcagatcgtaataacttcgtcgtcatcattataccgtccgctactccatgcctgtgctggctacttatcatcattttctcaatcccatgttcgtttctctggattcatttagtttttttgtttgtttgtttaatcctcatcatggctgtttttgtgtttatatgtatagacatatatgtgtatacttttaccaataactactatgctgattattgctgaatagagatatattttcatgcaaacttaaatatcattcgattgaagccaagctaccaaaaa

SEQ ID NO: 201013 - DNA, 758 bp, Cannabis indica
tcaatccaaaaactaaatcctcattccaaaaccaattcaaataaaagaaaaagtaaaaaaaaaaaaaaaaaaaagacctaacctttcccttaataatgagccaacagtccttgaatccctctcaccaacataagccaaaactcgtgagagacacaagataatgtgatggtgcgtctttactaatggcctcccttttcggacttccctgaagagactctttcaatattagcacattactaatatgtagaaaaataatagaatatgtaacataaataaattactcttctcattatcaaatgattttaggatgaaatctcatgcatcttattaaattccaacacaccattgcaaatagcagcgatcatccaaactgttttgcttggttcatgtttatcctatctatgtggtggtgcagtgcaggaacaagttaaccaccatgcaccatcagttcattatgctcaatctcagcaaaaacagactttgggttgtaattttaattttgtaataaccattcgtggtcatttctatttaatttaatcctaacgtttctattaaaccaacaaacaaacaaaaacaatccttggtcttgttatgtttgaagttattattcttaattgaaaacccacaaaaccttgagttatataaacagaataaaataatccatcaaagtcgacaaacgaatcaaataaaaaaaaaaaaccccaaaaaaaagaattgagaattgagatcacggtcagtatctaatttttttttttttt

SEQ ID NO: 201014 - DNA, 1641 bp, Cannabis indica
gtaattcaattctggatgcattgcttgttgcatccatatccatgactgaatataaaaaattattatcatatataataaactttatcattagaaagaataataaataatcaagataatttattgtgaaaaatattaataattaattaaagaccaaacagttcgaaataaatgtacataataaagctttaaactttaaaaataaatacctagctaatttgttatgtacatataggataattttatacaattctttttcggtacacattttatctgtttacatatttagtagagttttttaattatttttttttcattattgtacacgttgtagttgtttagaattacatgtaactttttataaaattcagtataagttactgtgccaatcgaaaataatgaataaatattttttgcacgcacacgtgactatttttcttactgctttaactttattcacgtacctataaactatttagaatttttaaaagtttacaaataatcttaaaagactataaagtacgtaattataaaaaaaaatagattaaaaaactctcctaaataccgaataagagatgtaaaaactatataaattaatttttccaattgtgaagatttttagtacgtacgtaccttaacatcattggatttccatggtggaagagacttggtatcaccctcatccatctttgtgctctatataattaaatgatcatacatattaagataattaataataataataatccaaaatgaaatcaacaataaataaacatatatagtgtttatatatgcatgaactctaaccatgtatggggaactactcttattagtagtagagttggtatcaattttcttaatgaccattggattattctgatcaaccagagccattgatgattggtcatgatcataatccaagggcaagagtagttgatcatgttgataatgataattattatgatcatatcatcatcattatgagtttgaggttggagagcttgtactgcaaaattacaccatgcattggaaagaaaatccaatgtctctggatgtgcctctgaaggactttgaattggattattacacaaactcgaatccatgaaatatagtaaatatgagtttaaatgaacaagaacatatatttacatatggctatatatatacataccaaaaataaaatagtgcatgcttttctatatatatttaataagttggtagtaggggaacaaataatggtgtcacactatatctatatatatatatataaaatcttctagtttgtaatgtcactatataagtcattattatgattgatgattttatgttgtatgtatatatagagaatgtatttttttttcttctaaattaattaattaaattaacagctagaaagtttttcttaaaagaataatttttttatagccaggtatgatatcaaggttggaaagggtatacatagttctgttttagatatagataatataaaggtttccaacatggtgagaccccacttagatatatgtatatatatatatatataatttaattaaaaaaaaatattctcattttgatttgtgaagatatcatcagttttccctaagctccacatgccaagcatataggctatataaatatatatat

SEQ ID NO: 201015 - DNA, 829 bp, Cannabis indica
gctctcttttttttttgctcactattcccgaatcacaagttacatttttttgacttcttggctcttggatcagtttttttagatttttgatggctcctttttttgtgctctacttcgattgattattcttttgttagatagttatttttttttgtttttgctctgatagcatgttagaatatgggaataagatgaatgaggttccatctcaaaaccaattggcaatgagaggagtagctcattcctcttatatattctattaatttccacacattaataatgtgagactctctaacaattaaaaaaagtacttcaaaacctaaagaagaagatttagtaggttagtattgagctaccaatttgtattatctcaatttatcaatgtggtatattttcttctaacttatctgcaatatattgatatgatgttctatgaatttaatcatatgttttcttacttggataatagttcagtggcgtagagatgtagaatcccatgggagagggctgtggagccttctaggaactccaaagggaactttgcttggtatactgaaagacaaggctgtccacaccaataccaaggaaggaacacaataatctgcaatgaaacttctgaaccaacatgtagagtatatatagtaaataatgtttagattttgtaggaattaataccctacaccacagcaaaataaaccagtcaaagcaaggtcaaaattgacctttaaacccagtcaaacccacgtgtttgaccttctgcataggaaaccaaaaaacgacagctctttattaatgagctacaaatcgtttaaccccaaacagtaaccct

SEQ ID NO: 201016 - DNA, 1811 bp, Cannabis indica
ccttttgtctgacaagcattgtcgtttcccattagcacaactccaccattaagttcttcaaaactagagaaccaatgtctatttggacacatatgatagaacttcaaaatcaagaatccatctgtctgaatacaattttaatgaaactgaaaaggctggatcttctttgatgtcgaccttctgtgcaacatttgcaattgacttgtccttgtttggacaatctttcttccactgccctttctgatgatagtaggcacactcatcttttgcaaaatttcttcttgatgactcccctctagtctttgatctagatcgcccctattattcgctcaacctgatttcctattatatccaatgcttctggtgttgagtctctacgatcatgttgatccttctaccgatactcattatttacgaaagcgttagaaacacctataaacttaacctcatctttaccatataacggggttatggttaaatgttcatagcttttaggtaatgaatttagcaacaataaagctttatcttcatcattaattttaacatcttaattttgcaaatctgccaaaatttgttaaatttatctaaatgttcaatcataggggtacctttcttgaactagaaacgaaaaagtttcttcttaaggtagagacgattctctacactttttttcatgtacttgtcctttagctttttccaaaggactacagctacactttctttcatgaaaaagtactttcgatcttttcccagacacagatagattgcgccagaagcttaacaattgataaaattccaatcttcaaggtaatattaaatccttctcaaaacaatagatctaatactccacattaccacatgccaaagttatttgtacagtcaaattcctccacctcaaacttttcaattgacaacattgttcttcccatagagcctcttgacttgctagaattttttacatcagcttgtgcatctttttaagatctctgttcttagccataagtgcaagcaaataacaaacttttcagcttatgactttaggcaattttttctaaaatttcaatgacttagtttaaaaatgaatgtctcggttgaatttagaatagtccaaatagctaggaataagtttaactcaattaaaaataggtgaaaatgggctgactcaatcccaaaatcacaatttgactgagttaactcggttgctggcagcaacactctaacagctactggcgagcgtcagacctccaattgaggtggttcttacggtgtttaattcatcttgtcaagagcttcaatctaatatatatatataatataattatatttggctctgagactaatttattgtgcgtagaagtaataaataacaaaaaataacgatgaatatatatcagagcagtaaacaataaaacacacagaattatgtgatttgacaatttgcctactccacagaagtcaagtgatattattgatctgaatagaaaatataaagaatacagataacaaattttctactaataatatctctcaggtattttctaatgtatttcccaaactcaccaaagtctttcccaaagcctaaagtctcatagatcaatcatcgcaattgtaaaaagttgtacccgaatagttgcttttaattgagatacaaatgctcttctaaaagctccatatttttagaagaaaaacctcaactaccaatcatatgtaataaatgaggtagctcattttttaaccataaataataagtgagtgagcatacttcttgataaataacaaatagtaagtcccaaaactcttaaaatttaaac

SEQ ID NO: 201017 - DNA, 1208 bp, Cannabis indica
tggtggattccaaccatgttgtccgtaagttattgtgtcaattgtaatttatcttcaaaatttacataatttggtaaaatatttattgtggcgttgtaatttaatgattcttctccttagagacctgaacctagaagtcatgagacgttaagtgaacctggaaagtggaaggagtggtgtggagctatacagatatgtcagaaagtatttactcctcaatatgtctcattttttttatattgtaagttaatcttttgataaatcttatgatttggtgcaggtttatgttcccatggtgatcaaaaggcaatggagtttgtcagtactagttatgaaattgaagaaggctaacgtttacgataacttttcgatttgttctacaccttcggttgacaattatggatacattggtactatgttgtgattgtattgattgagtagaatagtattagtgaatttgttcaattattatgtggtataacaaatattgttgtgatgatgagcgtgtagttatcttcaatggataatgcatttaaggagagcagaagtgaagcctttggtccaggttggaaattttacgactttgttgtggcagaagcacatgaccaccgaaggtgtgttggaaagtatgatagtagcttgaaagtgatgaacaaacttcttggagagtacgtggatggtgtcgatgtcttttgtgcacaagtaaatacttttaatttaatattattacaattattatttatttaagtgtagattgtaaggtttgatattatttgatcacttgtaggtgcctgaatccattcggaggttatatactgggtcgttaattctcacgtcagaagttaacaaggttcgagacattacaatggagaaagctattcacttttcaagcgccaaatgagtagtgtctttagttttctattgtaataatttttttttgtgtcgatgtacttaagtttaattcagtgaccattgaccgctttaagttttatttttatcttttatatatatatatatatatatctggttgttgatcttgataacttgcccattcaacaaccatggttaacctcgacgaattgtatagaaccatgaggaatgttaattatcagctttcggatttacaagcaacgattcgtatgatggagaatagagaaaagaatatggaagagcttggaaagaagttcaaagagttgggaaaaagggtc

SEQ ID NO: 201018 - DNA, 1039 bp, Cannabis indica
accaccaaaaaatcagtttatgtggtttgttttgccacaatatcccctggtaaaaatttgccacgtgtacctttgtgtacacagtggcatgtctaccgtgacacttaacagagccttttgaattaaaggggtaaatagttaacagaagtgagatttggaaaattttaccaccaaaaaatcagtttatgtagttaagtgtcactaatcatagagttaatttatgtagttttgccgccaacatctctaatatttaattatatatttatttttaaaaaataaaaataatattactaattaaaaatttattattttttaatttaaattattattattattacttttttcaaaattattttgaataatttttatatacgggtattctctttatcctttcaaatgagaagattttagttgtccctttagtttcatttctgtctacttttttcattcaaaaaataacccacaagtacttcgatctttccaaatatataagtagtttgggggcctatagcaaaaaattaaaattaaaccttttattttttatttttttaaattatcaatcaatactttataaattcagttttccaaaaaaaaaaaaaaaacttcattaatttagaataggtaaagattttaaaatcatgtttttttttgaacaatgaacaaaattttattgaaaaaaatcagcattgagtacatcaaaaataaagaaggaaaatcttccatccaaattagctcaccatccagcctaagtgcgtgcacagctaattcatgagtagccttattggccgaccgatgaacatgaatcaaggacgtctcaagaaaattagacagtagactaaaaatatcatctaaaagagaaccaaggtcattacaaatagatgatcttttagtgaaaacagagatcacatctagacaatcagattcaatagaatgaagaagaaaacctattccaaacgaccaatccaatccaatgtcaccataaaatcatatattgagacctactaagtttttttttttttttttttttttaagttagttg

SEQ ID NO: 201019 - DNA, 1175 bp, Cannabis indica
tgtatcttcaactttgaaaaaaagtaaaattctccttcttaatgcgtataaacatgtatccatatatattatgaatgaatcaattaaaatacatttttccttttactaataaatgacctgaatatattacaggtaaaatacactcagtactaaacagaatgaacaagcttgggaagaaagctgacatttttgcacatggaattaaagaacatggtaagtgatcaattattcttgcttcttcaaaagggtttcaccaagactttgttttggttacatagttgagagtattatatgttgttgtatctaatatataaacttttctttgaaactgcagtgagaatgggacctaagattacagaaactgtgaaaggaaaactgagcctaggagctaggattcttcaagttggtggggttgagaagattttcaagcaattattcagtgtaggagaaggagaaaaactattgaaagcttctcaatgctatttgtcaactacagcaggccccatagctggccttctcttcatctcctcaatcaagatcgccttttgtagcgaaaaatctatcaaattttcatccccaaatggagaactgattagagctcgttacaaggtaatattatatataatggaaatttgatgaatttcatcatggctcatgagatctctctctctatatatgatatatttttgtgtaaatttggtactaacagtttgtatgatcttttgtcatttttccaggttgtgattccagtaatcaagataaaaggagtcaatgaaagtgagaatgtaaagaaaccatcacaaaagtacatagagatagttacagttgataactttgacttctggttcatgggattcttcaatcaccagaaagctttcaagtgtcttcaacaggcagtttctcaagcttagagaaactacttgcaaaaccccaccaaaggatttattagtgctgtagagattgaaaagcaaaattgtctatttaattcagttttgcttaaaactcacatgtatttatgtgaagagctagctagtaagggctcaatacggttacaaaaattgtacaaatttttgtttatgaggaaaaaatatctctttttcattcttctacacttgcttactgtacaaaagaggctagacaccttgtcaatacttcctcttaactatttaaagttt

SEQ ID NO: 201020 - DNA, 1266 bp, Cannabis indica
atgatctcacacattattatttagtatatattctaatttttagcaacaataactttttagctttaatattttattaaaaagaaaaatggtatcaatgctactatatagcattcatgtaaatttttaaaatatgaactagcccaagtcatgcattattaaatacaaagtacttttttaaggagcaattgttatacctaaattttcgttagcaataagaaattgacacatgtaccatggctagaatatgaaccaactcaagtcttgcattattaattgcacattaaataactcgcctcgggaattacagttaataaaaaatttgaactcgccaccatataggcgatagcgagatgtaaataataacgattaaatgagattggcgatacaacaagtccttctcaggataaacagaatacacaatgaaagttgctcaaaacgagtaaacaaagagtttgcagctcatcgatccacatactcgtgagtaaaagcttccagctcattgatccacatactcatgagtaagaacttacagctcattgatccacatactcatgagtatgttaaggagtggaaacaacttcaataattactcacctcgcttttgacatatggaagtaactacctcgctaatgccattcaaacgacaaaggagaatcatgagatgcattgcatcttaacacttaatattttttctacaaagacagttaagaaagagaacatgcacttggcgagaaccgtccaatacagtcagcataaccatctatggataaagacaaagagcggttgaatagttatttaatattatctcatgtgcacaaagataaaacgtgagaaatatccacatttcatgagcggttatgaatgagtagatcccaagagaataattgtcttctcgtacatctataaatagtgaagaaccttgggcaaaaagggacagccaatttttagaattactaaattacaccattatattctgtattcaaagatattttatctttaataatatagactcgtagactataaatagttaatttcaaaaccacgttaaaaatcctcttgttatttattatttattttgtaattaattactatataataaagtctgtatttattacaaaaaagctaaattttagttaataaaaatcggcgttaacaattattattattatcgagtttataatgtcgaactatgtactgcgcacattatttaggtggactccgaaaagtcacacaagacgaaatgaagaaatagaatagtaaaaaaaa

SEQ ID NO: 201021 - DNA, 544 bp, Cannabis indica
ttgaatggaacatattcattgattatttaggactgaaccaagtttaatccgcacccgatcaacctatcaggatccaacccagtcaacctgccaattaaaaaattgttcgggcgatttgggtcctactcgatactccattgagtgggttcactggttaggttttaatgatcaccgaattttgggttggacccaaatccacctgcaacccggtataatatatatacattatttttttattacatatatttacatatatattaattaaaaatggccatgcacttccttttttttttttggtttaaggaatcggcattagcattgtactgaaaaaggtacggattggtccataccaattatacttgttggtgtagcttggtatagcggttcggtcatgttccccaccagtttttcgtgggatcattgtgtcaaagttttacttgagtgatgctcagctcaaattggtatataaaaatatagtatggtttgtaagggtaagtagttttatgaacttaggtggtttttgtatttcatcggctgttatagg

SEQ ID NO: 201022 - DNA, 806 bp, Cannabis indica
tgtatttcatcggctgttataggaattacttgtggtttttcttgattgttgtatcgacttaaaaaagaaaaactaaatatctgtaaataatttaaattttgtagagtataaatatttaagttttattatcggttgaaaataaaaacttttaagtttatttgaccaaataaaatttgatttttttaaagagttgagagagtgcaacccgttaacccgagtctagatccaggtttatcttttagactcaaaatttaagaatccgaaaccccaaattttcataaagtttttaataaatcatatgttaagcaaagaagagacaaaatacctcttttttaaaatttcaaaatttcaaatgcttttggacttcagaagcatgagttggcatattttctttctgaaattatgtacttttggacttcaaaaatgttgtaacgatcaatcttaataaaaataacaacacagtcgaatctatcattactttgtgtgaataagtcataaaacaaccaaccaaatacagtaggagaggtcgagatttaataacttgtttaaagtctgaatgcaatcaacttatactaaagaaacaaaagtagagagatttctgtattgaaactctgtaactaatcataacaaacaaggctaacaacagtacagagttgtaaattgtcatcactcatcagaatcaaaagtgaaggttttaatcggcagattgcgatttagctttgtcaacttccttttcaactcagccgtgtattcatcaggcatgttactcagcttcaattctgtgagagtggctaacttgggtaact

SEQ ID NO: 201023 - DNA, 1040 bp, Cannabis indica
ggtttgtctctagagtttgaggctgcaagaaaaggagaggcagcaaaaatggagcagaagaaaaggagatggaatagaatgtaagagattcgggctgaggctgggattggggtagggcaacccctttttattttaaagctttctcgtcggttatttaagcacaactgacgttgttgaggttctgctccactctaccactctttataatatatataagtggcttaatctgaaaggttcgagtcaggggattgctccacgtgtcccaacatttatagtctttctacttttcattgtaccgcatcaaccgcaccgttgtgatcgacggcccaaatttcattgatacagggtttctgcggtgtgattattactaactgattgtaattgatatagatatgggatggggtatgaatcagacgaggggtttttgtaagttgcttaactgatcgaagaatcttcaacatagtctttacccctttttttattctattgtgctctttaatccaggtttttctttttttttcatcatttatttatttgtagtattctttcttttcaatgattttaatctaatgtttttcttttattattattattgatgtccaaatttttgaattttttttttaaaaaatttgattatttggaagtgatagagagttcaatataccagatcgaaacttgttattctgtttgcatttctgacttacggtatagtctaaagttatgtgaattggttatttgagaaagaagcaatgagtttgaaaattgaaatgcagggctaaatgtgtgttaaaaatttgacatgaattgaattgtgcttttggatgttaaacgaattcaactaaagactttggcattatatttactatgaatatctttttttttcttcctgaaagggtactatgaatatcttttactcgatgtttatctacatattgtactttggaaattctgttactttgaagtagtattgctcaaatcaatactcctgatgcaagttccctcatgatccaggtattacatatatcaatgggttctaaaag

SEQ ID NO: 201024 - DNA, 1017 bp, Cannabis indica
cccctccgcctctgtgtatcatataccttattcacttgaaactttttttatctgtatatattttttgttataataaaaaaaaaatactgagaataatttgacaattcattatgacatttgacatttctttatcttatattatctctattttatggagaataaatatattaatttttcccaacctttgcctttttctctcctactaaaaacacatttttactttttctttcatttttttcctctcacttttctacctactggacatggaacaaaaattgcagttttgtccttaatttttttttttaaataattttaaatatagttttctattgaaatagtgtgttaaaattgaccaaataatatttatccaatctatgctattccaaaaagatgaaagtgcatttcaaaaaaaaaaaaaaagatgaaagtgaaaaaaatagaatacattaaaattattattttctttatacatttctaatttgttgttaataagattgatttgatactagaggttcgatataaagttttgatttaagtttttgaaaatgattttctttaaattaatgaaagtaatttgatattcataataatattttttttctcctccattttcacaggccatatatcaatttgtttgtactcaatataatttctcaaccatctccttttttttcttcaaccaaacaaacatatattttcactttatcgtcactttcttctcttaattttttccaccacttttctattctacctaacaaatgctaaatttaactaaaattacagttttgtccttctttctaatattttttttaaaatagttttctcttaaaaattgagtgtgttaatttttttttttttgtaaagccttgagtgtgttaaaattgaataaataatactggataagtttactatacagtatacaacccctcaaataagtgtttcggtagacttcctatctgtttcatcacttaagaagttttttttagtcctatctttttttttcataatcatttatag

SEQ ID NO: 201025 - DNA, 800 bp, Cannabis indica
caaatcacaatcttctatcataaaatctcctttcaaattcaaaagtgatgaaagagtaacaaaacgaaaagagacaagattatagtccgtaagttccttttgttcacatagttactccatatgataatagttttttacaattatgggtacattttaattggtgatttttctatttcgagtactacgaaaagctcgaagagaaaagaaatacagatgaggctaaaaagaagcgtcaacagaccaggtttgtagcataactttactcccaagtggtcattccatgctcatttgtgttccaacccaaaatgtgattttacttggcctatgtcgttaaattgagaaggataaggaaaaataaaatgggaacagtcacaactcacaaatgtagatatgcattgaggggttttcaactctttcaacaatgtgaatgtatcttgagaaaaattaatcaagaatttcaagtcaatttgataagtcatttgatttagacttttaaatttctcccatctatgtagtgtttagaaggggctaactgaatagttcagtaaatgttgagttgtaagaggattagctcagctctaaagatatgtgtgagtaatggatttgggcaactcacactgaagtgctcccatgtgagtcccgttgtgatgactaaggctgcgacatttatgctataatcataaactcaaggggatatcgtgataaaatttaaaatgtttgcgtaaattgttcaaatatgagtttgtcaaatggtgcatcttgaaaatatgtagggaaaaacattgcatgatattatgaaa

SEQ ID NO: 201026 - DNA, 999 bp, Cannabis indica
catacaaacacgtagctggatagttattatcggcaatcaagaaaaggaataatcaaatgtgatttaatacattgtttttttgctaattactaatactctaccattgttattcactataaagttttgtattaattttttttaacatatacttactataattagttaccataaaaaattattactcaattagatgacatcctatgataactattgtaaactgccccaatatatagggtaaatattattttggatcatgtattttgtaaaagttattaattggactctctattttattaaatgacaaagtgagtcctgtattttctaaatgtacaaataggaccttgaactaattttttgtcaaaataaaacttaatattaaactgatctagagatattgtgataaatttgatcacattttctgcgtctgttcgttttagaaattgtcttaaaattggttatattaaaaaaaataaaattgttaaaaattgagctcagggtcctatttttaccatttccattttatcatttaacaaaatagatagtcaaattggtaacttttacaaaatacaggatttaaaatagtatttaccattatataaactagggaattaatgccgaaaattccacaaaattagcaatatattaatcataatcttcactataatttctgatatcaatcataatattcactattattatggtaataatatcattgaccaaatttgcatttattagcaactatcaatggacaatatttaagatatcaattttttttcttttttttaaaaaaaataaaaataaaatagcaacttcattaaaatttagtattcagagtacaaaaggtcttgaagattaggcggtaaattctaaaatgaatgctacaaccagataaaaatcaagagtgcctaaccacatagtggacaacttgactaactaatcgtttaagatatcaatttctcattcacacgttaacttaaaattaactatttattatatatt

SEQ ID NO: 201027 - DNA, 562 bp, Cannabis indica
ataaaagtaaaattttataccaattttttttactttttttttgaatttgataaatacttttttttgataaattaaatttttttttttaaaaaaaaaaaatacagaactattgtgttgcttccatccatatttacaacttaacagaaccacagaaaggctttaaatcgatacaaactttacttgttttgtgtttctaatatccttatagttacaatttttttactgagtataaattgtacataactatttaatatatttataaattttgtatatattcaaaataaattatatataatacaaaaagtataatttaaaacaatcttctcagacgtataaataaaaattaaattattttatttttgacacgtttgaatattttaaaaatttacatcatatcctaaataattatattttgacaattataaaaaaaaaaattatatatatgtacataaaaagaaatatagtatataggtgcatcaagagaccctgtaaactttttgaggtagggtcatattttcttattatatataaacacacataacatattatgatgagtctaaaa

SEQ ID NO: 201028 - DNA, 1313 bp, Cannabis indica
cctatctgctggggctatatgcctgaaccatagtatagaggagtagtcatcaagtgtaggatgaggacatatttgagttcgagaagcagacgacctagctagccaaattgagtgaattgagaagaaaattgtttaaactgacaaatattgttttgattagattgaatgtagtgtaaaaaattcaaagtgggaatacaatattttgatgaaccatttatcagcatcaacacagggtatattgtagttatttagaacttatagtgtgaaaacaaaatatagattgtttaaaagtctatagttttataccttagtaaaataagttattttaaagttaattttgtttaaattatttattgaatttttaataatattaatttattattttaatatacatacttataaataaaataaagtttaaaaatatatatatatatttttttttatcaagaagaagaaagtttcattaatcatactaacacaaaggaatacaccctcaaggctctcacaaggagacctcaccctcacttaattacaatcaaccgcttaagtaaatctaatcccactttggagccattcctatccttgataagaagcaatctatattattgacatcttttttaattttgcttactatacaattgacagtatttgagtaattcgaaaaatgacaattgttcctattcctccaaatatgataaatggtggctgccaatggttgttggttgttgttgttgttgttgttgttggttgttgttgtttaaaaatatttttcttaagaataatttaaattttttaagtaaactatatttggtaattaatttaatatttttaataggttttttaattacttgtattaattttttcaaaattaataaaacattataattttaaaatattttttaatataaaagggtaaaatatttttaatataatttttcaaaattaatatttttttaacagaagggacataattatatacctgttatattttaaggaaatttttaataaatcctatattttagaaagtatgatcaaatagtgtcaaaagttagtttgagtagacaaaaatattaattattcttatttatttctttcaaaacatctctctctatttttctctatctctcttcctttctctttctttttttcctctccaatatctctcttcattttactctctagaggcaaaatggttaacattttcttttgaaatatattgtaactttattaaaatgaaaacaaggtgcaagctacaatttgtaacagtttggaatacatctattccaaacaatttctctcgccctaatgctttt

SEQ ID NO: 201029 - DNA, 814 bp, Cannabis indica
  modified_base (55)..(55): a, c, t, g, unknown or other
gtttagtggttcttctattatacacttgtggggtattaagattagttctcactanacttctattatatatatttatgctatttatatattatattttatgtgtaacttattgctttgagttgtaattcttctcttcatctctatattatctattttatgtgtatattttgtttagtgttataacattatttaatctataattttcgttcctttgtattatttgtcatagagtttataatcttgttagtttgatatttctattggattacaataattttcaatttcatatatagcatagtatagatatatagcacatattataatccaaagattgagaaagtttcaccaatgcacaaaagagtgttaagtttgaaagtaatatttgtagaatgcaatttttacacaaaagagtgtcaagttctaactgatatgattgtgtgattatataccttttcaaaagtagtagcatccatcttaaattgatgcatatcatctctttaattatcattagtcttcagcaaacactattgagataattaattgtgtcaattcaacaatattcaatcctctcttttctgtattatacaggttcaatcacaacaaaatagtatttatccattatcaaaactctattatattaagccttgataatagctacaaagtagcatttactgaatgctaatctcaacttctttagttataaaccgcttgttccttttctctagtagtgaaaatagacaaatgacaattcacatatgtaaactcaacaatttttattaagaaaaatttaaagaatcacatataatatataatt

SEQ ID NO: 201030 - DNA, 906 bp, Cannabis indica
taatttttgtggacaccaccaactcatttgacatctctataaaatataggtgtggggtttaattttctttacttgcaatttattccatggtataatgatattaattatatataaattattccataagaaaagaatagttctagttggatttatgtatttgaaaaatatcaattaatttttttttttttcaaattaattgcaatcacatatatgtattattgttgtgaatataatcatgtcgtttccacttaaagtctaatttgaacaacactgaaaactcttacaaaccatcttttcaaactaatttacaactttattacatctaattggtttggacaactcttctcaaaatacaaaattatatatgtcatatcattttagacatttcatattaatgacttaattattagttaattagttttaacatgtatattattggaactatgacgtgttttttttaatagattaattatgatgtgttattagtacatatagttaattaattaattccaaattatctatcaactcaaattaatgtcactatatataggtatagccaaatttaaataaacaagttatacaagtacttaagaaaacattttttatatctttattaattatcaaaatattcattcctatatctatgacataaattaaacttatatcacagtgttgtttttctctaaatcaattaattatcataactcggatgtattaattaaattggtgataattaatttaaaccccaactgtgcatgcattgctaaaatataatttattaagaaaacaatgtatccaagaataatgttgcaaaattaatgtgttcttatcgcggaggacattttgtcggtatatagagaaattataatcttaattttttaaatagcgatataaattataattata

SEQ ID NO: 201031 - DNA, 755 bp, Cannabis indica
caatcaactaagaaatgaaacccaaaattggcctcaaaagtgaacaaaatcttggtttacccttaattaatacaacgttcacagagattctaccttctctttttctcaaatgcagaaactgtagtttccagagacaagttggtgcctaagatgctgtcaactgttgatcaacaaatttcacctaatagacctaacagaagctgagtgaagatgttggctgttgtagatatgtttgtttatatatctcttgggtttctttcattgagtcgtcaaaaaggcctggcagttgtgctaaattgatttgatcagattgtcaaatttttggtggttgtaacatcgtttgtcatgttaatagaatgtaaaaatatttgattggaaatatagctttgttgatgatgcttgattgtattaagcaattccatttcaaaattcctttatttatttatttctttttgttggatctgatttttttaagcaaaagtcatgttgtacatgtgaactttttagtactagagtcacacacatcgatcctagtagatatattcaaacttaagactaagcatgtttattaatttcatttggtactagatgatcctactggatacattcaaacttaagactatttattaattttcagcttatgcattctacaagatatgtctcttaccaataattaaaatgtacattggtcaagaactacaacatatactgctcaaacgttaataaaaaattacaagccaatctataagattatc

SEQ ID NO: 201032 - DNA, 617 bp, Cannabis indica
ccaccatttatggtatttagcacttccttaggcatttttcttataattctttttttgttaattttattgagctaaaaaaaataagtcaatattatatttgatcaaaattttataatagtgctcttaacgcatttaaggtagaattaatccattttttatagatagatataaaaaataaacaaaaaacattaaattcttattaaaagtatatgaaattctattaaatatataaataaaatgtaaaatatatttaattatattaataaatggtaaaagagtaaataaaaatgtaaaatttattgcatataaaatttggtccagcatatattttgtgcaaaaattttcacaaattttagcatgtgctaaatttttatacaccaacattggagttcacatttatgaaaattgtctaaaatatgcatatatgtacaccatacttttaactatctattgaaaatgttcttaatcagaatttatacacatattcttatttattttaattagaattttaacattatttttttaattgtacataactttataagctttatttttttttttgtaccgtttgttcaccgcttatatgagatttttctatagtttatttttgttaatta

SEQ ID NO: 201033 - DNA, 807 bp, Cannabis indica
cacaattatgattattacctaccacatgtttcctactcaatcagctacagatattgaaacatataactctaatcaaattagattaataatctttttttaagcccagtaacattttaaggcaatgcaggtgtatcgggaaggatagtgtttttctttcttccagaaaaggaatggtggtgtgtaaagttgaaagtaaaaaagttaatttgacatttttcctttagaaagaaaaaaacaatttggaaattttagtctcgagtaagtcgtgtcattgtagggaagtgtaatttgtatttgtgagagaaaggtctttgtaatactgctattatttttctttgaagcttccaactaagatgaaagaattaatgccccgtagactttaagagattattcaatcattattaaaaaagagattattcaatatctactcttcaggaaaaaagacacgagcttttaccttttacgtttctgttttgttttattaaaactaatttttttattggtgattgaccttatcttaagagttttttatctgataaacacccctgtttcaaagcttatcttcctactctctaatcccatttagcaaatctgtttgttgaaaggttccatatttgactgaactaacacccttcaatattttcttgttagttaatccaactttcttgcctaactcattattctagagtctaggctcttgtttacacactaaattttagcatgaccactttctttttctgattagtgggagcagacccccatctccagtgttgaacttttacaatttcaaatatctaatatcgtttc

SEQ ID NO: 201034 - DNA, 1104 bp, Cannabis indica
ctgttattttcaatactaacagtagctatattcaggaactttcactgacatcgaggattgggatggctaaaagaattgacaatctctactacctacaacaaacagactttgaggacaataattcagttcaaactagtaatgctcaccaatggcacacacgccttggacacccatctgtaatgatttctaataaactcaataaacatttacagattcctgctattccaagttcttttaattgtcctacttgtcatttgaaaaaaaaaatatttcgacatttgttttcgggagtggaagttgactaaggggttgtaacaggaggttgacggtagcactcctcacccagactataacactaacaatagtatgcaattcaatgactagtttctattggataaaaaaatttaacatcataatgcaatgaatggtttctattaggtgtccaattaatatataaaaagtgtgagtaaaagaggttgtacatttaggctgagctttttgggcacgatacgataccgatacaagcaggagcatgggtggaatgaaaataatataggtttgggtctgacataaaaaatataaggataagtacgatatgatacgataagcacaacacgaaaaaataaatttattagtacaaaagcacgacacataaacacgaaacaaaaatacgaattaaatccacaaaaataaattttttatctaatgattcatctatttttttatttatttttttaatgaatgttttaaaatttatatattttttaaaaggattaaactatttataaggaaaatatcatatttttctaatcctatggtttctacccctgtggtggaagaagctatattttttaaaaaaaaaataagaaaaaaataattacttgttgaaacaatcagttttactttaaaaatatgggtccggtcggacacgtttcatgaatcgtattataaatatatgggtcagtccattttacaaaaataggttggtgttacgaaaattatgaataatacgcaagtgcacgtaatcaagtagtaaactcacacgagtgaggtcgaaccacagggaattgaactgaataccactaaattagacttatgattcta

SEQ ID NO: 201035 - DNA, 1888 bp, Cannabis indica
acttgcaaagcctcccatactcttaaaacccctaaagggagaagaattaggaatgtacatggttgctacagaatacgctataagtgtcgtgctgataagagaagagaacaacgtccaacatccagtctactatatcaacaaaagactcgttgaagctgacggatgttatcctttgatagaaaagcttacttactgcctaatcttagcaacatggaagttaaggccttatttctaggctcaacctgttcaagtatacaccaaccaaccattgcgccaagtattgcaaaaacccgatgcttctggacggttacttaaatgggcagtagagttgggtcagtacaaaataatctttcaaccctgattagtggtcaaaggacatgccttagcagattttgtagttgagtgcacgagcaaagaagaaagtaggataagggataactcagagccagtataagagcccctgtcgaacaacaacgaatacagacctacctagaagttgcacgtagatgggttagctacagatcaactgtctggaatgggaatcgcccttgtcacacctgggggcaacatctacacaaggcagtcaaattatgattcgaagcttccaataatgaaacaaagtatgaagacctcattgctagcttaaaacttgctcgagaactgcatgctgaatacattgagttctgtagtgattcgtaatttgtggtaaatcatgtctcaggagagtacgaggcctgggaagagaaaatgatagcttatctacgtaagatacaggatttgcttgcacaatttaagggttacaccctgaagaaaattccaagagaagaaaacacaattgttgatgcactagcccagcttgcgagcaacacagtaataaataaggccaatatagtccctattcaattcttagaagaacttagcatcaactgtgtagaataaattgaaatgatagacacatcaccaaaatggatgacacccatagcagcctacctcaatacttgagaacttccaaatgacaaaaatgaagcttcgaagatgatgagaaaagatgcacgatacatcatagtagaaggtgtaatgtatagaagatgattctccatgccattacttagatgtgtattaaaggaagaagttgcacggctcctgtccaaagtacatgatggataatgtggtaaccacgcagcagagcaaagcctattaaagaaaatactaaggcaaggatatttctggtcgaccatgatgaaagattcaaaggcctatgtaaagaaatgttgcaaatgccagagatttttaaaaataccttgtgcaccgcccaatgagctaactgagatgcaaagtccttggcctttggctatttagggaatagacctgatcggactattgccgaaaggtaaggtggagtacaatatgcagtgatcgcggttgattactttacaaagtggacggaagtcgagcctttggcaacaattacatctaaaaaagtattggactttgtggtgaaaatatataatatgtgggttcaaactcccacaccaaatcatctcagagaatggcaaactatttgacaaccaattgtctacatatttttgtatgactcatggaatcataaaaagtttctccgttgtggcacaccgtcaatcaaatggttagctcgaagtagttaataagacacttaaagacaccataaaaaaatgaatcgaagaagctaaagggaactggccaaaggaactacctgaagtattgtggtcgtaccgcaaaattgaaaaaatagaaactcgacaaacaccattcgctatgggcctatggttatgaagctatgtttcctgtagaattagttgttccatcacacagaagattgacctatgataaagaagctaatcatgctctc

SEQ ID NO: 201036 - DNA, 1772 bp, Cannabis indica
tcttacagcctcacagcctcttacagcagcattgcactcacatacgtgcacacgctcgcatgtgagcccccgtctcgctgtctcgtagcctcgcatcattgtacccgcacacatatccacgctcgcatgcaagccccacattgcctcgcatgcgagcccccatctcactgtcttgcagcctcgcatgcaagcccctcgcatggacgttaccatggctcgcacgaatgcttcaccacagcttgcacgaatgctcccacttgcgttaaggcaccacgactcacacaaattctccatggatcacccaaatgctcctcgacttgtccaacagctcatgggctcgcacagtgtctcatgggctcatgcaatatctcaagggatcgcacaatagctcatgggctcgcacaatggctcatgggcttgcacaccaagttgtcacaattcagcgatcttagaatttttccataaatctctcgatatgtgctagaattatagattcaaaatgtgttggaaagatgagaaatatatctatggattttatgtttatgacaagatctaattctgaatgcatcattatgaaaatcctccaacaattataacttagtaagttgatcttactaactctactcgtgagttgttacggggttgaccttcgagttgcatggatataccccgagacttgcaagcattgatcctcaagattaatgagccctaagctatatgtcttgatttagtcattcctcgactgactattacagtcgatgtctctcgaccactgagactaactattgactaatctaaaaaatccactttgtcaatttttaggattaacacataggttatgttatagtatacgagagtcatatgttacacaagcattcaaatatttttgcacatatgtgtaagtactcttatggtaaagataactttaagaagcagtgacattactcccactaatcgagtttcttaagacatggtgtattgtgcaagtgttaaacggtcaagcggtaatgaataaagtaatataaaaaagcaaaaatcagaataaaagtttcattaagttagaaataatttctaatttaactaaataaattttgataacattttactaaggcttatccacattgaaaggctgcccgagaacgactaactaacacactaaagttaaatactaaaaaaaaagaagagtggaccaaggcaacacccttaaagcttatcacatcaacaatagcttcatccttgcccttactttctgcaactggcacatcaacatcagaaggaggaaagtcaggatgcttagggctgtagccttcaacgtttgaagcctctttgaccactggctcaccaccattcacagtgaagtctattttctggagagtttctacactaaaacctcgctcatagtgcttgacaaacttcgacacctatgtgtaggggtagcctaaccaactaaatgactttgcttctccattggcaaaccaagctttatagatggcatcaaaacataagcaatcatataaggtgacatcaagaagagcctgatctttaagagtagtcacttgctcttttaagacctgacatggtctctaagatcgacagctattgaagttcatccagtgcaagacgataagactcttcaagatatgaagtctattttgagcaactgccaagtttttcttcaaactactctctcaatttttggcactattagccacttctcgaagactagtcagctcactctccagagaactgatgtctttttcaaagcaatcact

SEQ ID NO: 201037 - DNA, 502 bp, Cannabis indica
aaaaaaaaaaatacaatcaaacatagaagacccatttctacccatacacgttacaacagctttacatcagttcttgccttggtaactatatatgaattgtagtagagcacgatcaaagattacccacattatgcattattgtattaagcaaaaccaagcaaagaaaaacaaaaagaaaagctaattaacacagaaaatgattcgaagctatgaaaagtacttacagtaagttgaagaggcagacgatgaaggcggtgagcaagagagcgaagaaggaagtgacaatggagaagaaagaagagaaacccagaaggtgagaaattagtttggtgattagcggagaggaatgatgtgattttatgagaaggagtaatgcaaatggtgcatttctaagttgttctagagcttcctagattgtaagagacagaaccagtatatacttcccaaatgacaaggtcggtttctagaatgtgcatactcttttttcattttttcatttttt

SEQ ID NO: 201038 - DNA, 1186 bp, Cannabis indica
caaaataaagctttattgtgtccaataaaagtgtgacatgaattgctaaatcttatgctcttctatcatatgttactatcaatcacactattccaattacaaaaaaaaaaaaaattataatttaattgtacattaattacacaatattatatagattcatctcctcttcaatttcatatcataaatttttaaatttttaattctatataataagtagtttatatatggtgggagctaacatgtatttttattgttaattaagatttagaaaaaataaataaatttgagtccttatattatttgaagaaattaaaatatagtaattttaaaaaatatcaaaaaattatgtattagagaaattataatttaatttatatatatataattacacttgctatttttttttttttattttgaaaagttgaatataaagatgtttgaaaacaactttttatattttcaaattattattctatataagtagcttatatgatgggagcatgtatttttattgtttaagatctatggaaataaataaatttgaattgcgttcttattcgaagaaaatataaaaattttaaaaaataccaaaaaattatgtatcacatttatttttttatatgactgtgtatattgtaattattaaatattttcattgtggtgaaaagatgtttcaaaacaatttgtttcacgattgtataaaactcacatcgagtttaaattttatatattatttttctaaacaatacatttctttttttaaaaaaaaaaataattgtagaagataaatacattaaagcataaaacgataattctcatacacagcctctcgagaataaatgagtgtgaccttttgtacgatgcaatttaggactaaaattaatttttaattaagtcgttttaaactatagtaatatagttatataagaaaatattattttttgtgttatataaccacaagttatatatgtgttagatctataatagttaaggctatatacacgcttattacttagggcccacctaacgcaagaccaaaaataaaaaaaaaattaaaaatatatgtattcttggttaattaataatttttgttcttaaattttaatatgtactaatcatgtcctataaacttttaaaggtctttaaaaattctcctcgactattaagattgttggatttatgaatt

SEQ ID NO: 201039 - DNA, 579 bp, Cannabis indica
agacatcctaacaatctctaatagttagtggaataaatggtgcaaagaattcgagtttgggaatcctagaatatctcattagctagtagggtcacattgataaattctggtctcatttcaattcactcttattgggcacaagttatggtaattccaaagagagtgctcaaaaagattaatgttatttgttggtcttttatatggcgaggcattgctgattcttacaccacagggtatatagcttgggagcagttgcataaatcaaaatgtaaagggggtttgggggtttagagattcgaaattcattgctatggaacacgactgcgatatcaaaatatgattgggctattgctttaaagcaagataatatatgggtgaaattgatacatagcgtctatttgaaagattataatttgtatgactatatttctcccattaatggcagttggtattggaagtagattgttcgagttaaggaaaaatacaaacttctttctaaataccaaactctaatgatagggaagtatagtgttgacatgagctacaagatgctttgtgaggagcaagagaaggtgactt

SEQ ID NO: 201040 - DNA, 1420 bp, Cannabis indica
attatattagataacattgtagtctttttgacaaaacgacaaaaaaaacatattgtagtctttttatgaatttttgttttatattttttctatatttttttttttttcactaagttttttctttataattaatttatatactttttataagaattactcaatatactattttttgtatttttttagtagtctttgtgcgtgtagatacgttgcttgaagtctctttggaatatctttctacctaagtacaaggaatgataaacactgtcactcttacatgctgccacgtcatagtacaaaaaataggataacatttgcctgccaatgcgcgggacttctgaagttgcacgtggacttcactcggtttgaattcttatttgaacaggtggcacgtgttcgaagtgactgttggtgatccgacgtgattctgaccaagggtctcttcaatatttggctcattaatgctgactaatgtgcacctcaaattactcccaaaaattagcacgcttagacggttgctcttcagttacaatttaagttgttccgttagttctcatagatatttctatgtgaaatttcgtcaaaaaaataaaaaaaaattattttaaaaataaaataaaaaaaaaaacaaaaccccaattttttttatatatttcttactaatatatatatttttcacaatcgttttgtatatgtttttcttacgatttctttataacttattctggattttttatatttggttacattttatgatgtttgacactaataataagagtatatgaccatttatggttaacattctttttttttttgaaagggaatttttattactaagcagcactaggcacatctgttattaaacaagcagcaacacaagaaggtaaactatcagtccaaacttcagacttttgaatcacacgactccacttagctaaactattagcaactttattacaatttcttgtgtaaaataaaaaattaagcgactgaaaatgggtcttcaattgaatgattgtctgcaccaactgcccccaatcagttggagaagaagcaccatttacaatagcagaaatgatggtcttgatgtccgaagctatccaagcatttgagatagaccagctaatggctagccgaattcccaaatgaatggcagcagcctcggccaagttaacagccatacaaccaggtatgtacacagtttcagcaacaactaatccatcaatatcgtttcgaattaccgcacttatcccacagccttcctgtccgtgcacaagggaagcatctgtgttgattaggaacatatccttgggaggaggctcccagaaagataatggctttaatgaagaagtggctggactgtgttgttacagtcccaggtgttggtcgattgtctctatagcccaaggaatccaatagt

SEQ ID NO: 201041 - DNA, 993 bp, Cannabis indica
ttttaattaattattgtattgtaatgtatattcatttttaagtgttgcaatatgtacatatatataaattagttaaaatttattgtgtataattgcgtaattgttattttagtgcaattgtaattttaaaaagagaaattttattttctatatttacatatacttaatattttccccctaaatctataataccccatattccccatatatgaccacattaccatattccccataatacccctctcatttgaaatctcaaatctcttcctctcgcccccactgcctcctctctcttcatctcgcccaaacccacggagaaacatcccatacccatcggattaaaccgacggtgatgacactcccctggtacaccgtgacggtgccccttgctctcgacacaatatctaaggtgtgtcccttttattcttttttttttgtgagaaattgttaaagattgtgattttatttatgaaacctaaattttgttagatttagaaaaattttgttaaacaattaggtcggatctgtggggaaatcgcgatttggacctgtgatttttcatcgggtccgatggtcacgcgaatggggtggggaagatgaagacctgatgggtccgatgggtctgatgggggacccgatgctcgtgctaaagtgaaattttcatttaggtctgatgggcccgattctgggcccgatggtgttgagttttttgaaaatggtgtagggtttgatggacccgatgcctatgtgtcctcatttttttgggtgttaggtccgatgggaccgattgtgggcccgattccttttatacaaaatttaattttttgttggatccgataggaccgatggtgggcccaattcctttctgtagattatcatttttttatattggacccgatggggccggatttcttttatacagttttaatttttttgttcggtccaataggaccgatggtgggcccgattcctttgtgcagattttaatttttt

SEQ ID NO: 201042 - DNA, 1904 bp, Cannabis indica
ttttattgtgtattaattttatattggcaggctaataagaagagcaataaagggaaattagataaaaaggcatcttcaaagttaataagtgaaagtgcaagattcaattatcgagtatcgactaataatgatggttttgattttggacaaagaattttatctagaagtgcatcggctttggctacatcttcatctgctttagccattgctaatagtattagtaataatacttgtaatactaatcctacactttgttcttcatgttcatcatctttgatcacccaaacgacgccgtttgatgagtcaaagtcaaagaaattggtcaatgatgatgatgatgaatacggcaaaggttacaaaagtagtgattgtggtttggttttgatgcttctaattctattcgtgctggtcttttggggtagaatttgtgctattttatttacttccacatggcttttcttaattccacgttggatgcaaatgaagaaatcattcacatcatcgccgtcaaaatcctcggaatgtaagggtaagattgtaaaggaagaaatttcttagggcgaaggatatcttgccaaagaggctaagagctttcaatgtgtgtgtagataaaataattttagcttaaagagtttcgattggtggtattcatagtacatttacatgtgtgtgttttaaattttcttatttttaaaagtgaagagataatattggctgagagaaatttatccaaatattttttatggcgtaatcatgctgttttttttttttttctaatcatatatatacatattttataaaagggctactgtaaattctatatggattgatatatggattattatgaggttgttatgttgatttttaaaaatgtacaaaaaaaaaaattgttttgtacatgctgaaaaagtccttgttattaaaaaaaaaaagaattatgtattgagatgtttataatatttgtttgttgaacttgaatatatgattttgtttatgtaagcaaacgatttcattattcaaaattaataaataataatattaataacacgtcaaaaaaaaaataataatattaataagattgacttattttctcttcagaagggtaagggattttgtgattctaaacttacaatatataatattaaaattaataagacacaaggcattgcgtgttttaaattaagtagacttggtccaatttttaataattaatcgctatttataggcattttttatttttatatttatttatttttgtagaaataagcaactcaaatgaaatgatggtaatataaattgaaatttgaaagaaatggaaattaggctagcatttttattggatactagtggtacttagcactttttaatatgttcattgtgattggctagcaatattctttaaaaattattacattaaattatatgggacccgagactcataacaatattgacacataaaaagttactagacatggtgtaatttgtaacttttagctttctcatattggctttaaaaaaaatacggaagctcattatcaaaaaagaaaaaaggaaattagggaagctaagcaaaagagattgaccgataatcaaaacaattaagaacatataaagtgtctctttaggtttttaatgtgttcaaactaaaagtctaagaagtaagaacattatgtaataaactattttcaaagttcaaggacaaggaagttttaagagtttgaaaacaaaacaacaagtctttaagtaatatattaatctcatataaatttatatgttctccaaatggctaaaattaagaggttgatgatgcaatatagagggatgcaaaaatttcaacgccccatgacacaaaagatgccaaattatgcaaataaaaaaattttgaggagtgctaaggacactct

SEQ ID NO: 201043 - DNA, 1075 bp, Cannabis indica
gtgtgattgcagatataccacttctgtcattgaccactttttaggctttataaatggagatgttcatataatattaacactttacagaatatttatagatataaacttacattacaatgctatagttaaaaaaagaaactaaaatagaataatctactactccaataataaatttatttacaattttataattacactaatattatttttaatacattattaaataatatttcaaatataaatatttaattttttcaaacaaaaaatttgtaatctttaaaaataaaatacattcaaaatcttaaaaagaccaaaatcttaaatgaaactagcaatacgtggctcggcacgtacattcacctagtaattcataaaaaaactcaatgaatattaagtatatgtatattgtatataatattaatttagtatatatatatatatgaaaatagttaatttagtatgtatatatatataaatagttaactaatatttgacaataaaaattaatttattttatgatttttgtatgttttttttttttaaaaaaaaaaaattaagagtaatagatttatttttttctcattaatatatattatattttttcggtatttggtatgatttttttaataaaattttgtatttatttatacctacaaaatcaatatcatatttagtatataactgatataattaatataatttaggatttttaacaaaaatgaaaaatcatatattgtattattttagttggttcagtaggaaataaataatgtataatgtaatatttaatttgaatcttatgggctgaaaaaaaaaatgaatttggagattatatatcatcactttttaaaataaatatatctttttttgtttcattatttatatatttaaaagataagttttatttaatataataatcagtattattgtcgagagtcaaataatatatggtttgttaaataatgaggaatttcttccaactaaaaactctccttcggtagtgcataaaaaaaaattattattgaataatgatggtaacacactcaaactatatctaacttatacataatgatat

SEQ ID NO: 201044 - DNA, 1360 bp, Cannabis indica
aatgcttctttactaatgaaaggtgaattagttcatatgaaatgttctgctcatatcttgaacttgattgttcaacaaggattaggagcgattcaatgtagccatagaaactatatgtgagagtgtagttttttggattggtactccaaaaagagttgaaaagtttgaagaggctaagaaaggattatcatgtgcaagcaataaaaagttagtgcttgattgtaagacaaggtggaattctacttatttgatgactagtgccattgtttataaagatgtgtttagtcgcttaatacacactgagaaaaattacaaaagggaacctagtgagcgagattggcttttggcaaaagttatgtgtgagaaattgaagttcttttaccatgtcactgagatgttttctgggaccaaatatcctactactaatctattcttctctaagatttgtgatatttggttgttgcttaaggagtgccttaagtcttcatatgatgagattaggataatggcatcaaatatgatggataaatttgagcagtattagacttccattcatggcatattagccatagcaactgttttggatccaaggtttaagatgaaattaattgagtattactttcctaaactttatgttggtgattatcaaaataaagttgaacgaattagaatgttgtgctatgatttggtgaaagaatataaaccaaatgatggaaaagaaaatcttattgatcctttatccaatgcttttggagttggtggggatagtgatggatgtgtggatcctttagctggttatgacttgttcgttagtagtacttctaaggtggatactttcaagtctgagttagagttctacttggaagaagcagttttgcctaggagtggagagtttgacattttagcttggtggaagacaaatggtcttaagtatccaacattacaattagttgctagagatgttttggctatcccagcatctgcagtagcttctgagtctgcttttagtactagtggaggacatgcgactccttgtcgtaataggcttcacccgaatatgttgggggcattagtatgtactcaagattggttatgggacgagaaactaggtatacttattataaattactcttattatttatttttcttttatatccaaagcaaagtgcttaaaatgatatttttttttctctcgtgacaacaagtgtgtattttttttatccatttatatatatacattcctttctcgtaaaactccactttggctagaaaagaataaaaaattagtgaaagttgttattagaaataatatctttaaaacatggacaataattgttatatgcatatataattatttttg

SEQ ID NO: 201045 - DNA, 702 bp, Cannabis indica
aatcaaaattttgaagtctaatcagcaacttactctatctaactgctacaagaacagacataatgtatgtagttagtctcctatcaagattcatgcatgatctaagtcaagttcactatggagtagccaagaaaatccttagatacttgcgaggaacaaaactctacataatatcgtacgaagtcacgaatgagtcaaaacttattggctacacaaataatgactaggcaggatccatggacgacatgaagagcacgtcaggatatgccttcacactttattcatgattattttcttgggtatcaaagaaataagcaactgttttgcaattatcagtagaagcagagtatattgcggcaccaatgactacaagccaagctatgtggctcaaaagaatacttgaagacatgggagacttacaagaagagactataaagatctattgtgatggcgaagaatctcatattttacggtagaacaaagcgcataatcatcaagtattatttcattagagaagcagaagcaaacaaagaaatagagctcaagcactacaagactgaagaataattagcagacatatttactaaggcactaccgaggaccaagttcgagctattatgagacttgatcagagtgaaagaaatatgtattaaggaggagtattagaagttgatacatatttctaaaatatattttttttat

SEQ ID NO: 201046 - DNA, 667 bp, Cannabis indica
tttattttatttttatgtcatttttattattttattagtatatttaactataacaataatcatgaattatttatattatttattattattttacataataaaataataataaaattaatgataaaattattattatatttataatttcaataaaaacattaatttgtatcaaaatttttaattgtgaatgctaaaaattgatgcaaatatatcacaaggtctttttatgtgctaaatataacacaatttttacatttcccattgaagatgatcttacgtaacaaaaccaatagttaaatacagaaactattaaaattaagaaataagatccgtaaataataaaagatcaattgaaacgaaaaaatcagttaatttaaaaaaatcatagaaaccagttgggtgtattaattaattaaaaagtaagacacaaagaaactgaccatataaaacaactaaattgaaaactaacgcacacaaattagttacatgaaataactaaatcgaaaatcaatttctaaaataattaaataaaaaacaaactaaaaaataacacaaataattaattattataatgcactcataaatattaagaaactggttctaaaagagaaaaaacaaaatataaaaactaaacatatccaataaaaatgtaagaatttaaaaaata

SEQ ID NO: 201047 - DNA, 1084 bp, Cannabis indica
aacaaattatataaaatctattttgacacgttaaattatttaaaattctcgaaagtttataaaatattttaaataacacattattatatatatattaatatatataattaaaattatttggatataaacaatacacatctatatttgccaaattaaaattacaactatcttgttaattaaattattataaatttctcaaaattttacatgatactctaaataactataacgtatacgaccatgaaaaaaattatactaaaaaattatctcatatgccaaaatacatcggtgcatcccttttaggaagttgcatattgtataattttccactactatatacactagtggagtaaatatgggacagattttttgacatggcgcaagctcgagaggcacgagcacgatctgacacgaaaaaatataggcttaggcatgacaaaatgttgagaattagcatgacacgacacgacacgaaaaatatgaacttaggcacgacacaatatgataaatccaaaacgaatagattagctcgaaaatacgacacattaaaaagcctgataacttgataatatttatttatcaattaaaatgatagtgatatttaaattctaataattataattattttttatatgattgtgtgcaactattatcaaaaaagatataaaagtcattaataaaattataaaatgcacataaagtttagtatttagcccatcacttgtaataaaaaagtaaaaatataaagcacgacatgactctaagcacgatatgaaactatcgatcttatgagtcgtcccgagcataccctaaaaaattattgcacgacatgatacgatccatattttcctatagcacgatacgacatgacctgtattttaaaatgtctaaaaaatatggatcgaactagtatgatacactatcatattaaaataatttaatttaaaactatccaatatggaaagaaaatttttataaataatgctttaaactttacccaatataaaaaattagcttcccaataattttataccaatatatgctttttattttccctccctattctaccccttttaattaaaaa

SEQ ID NO: 201048 - DNA, 811 bp, Cannabis indica
gatttgatttttatgttataataattatagcgaagattgaaatgaaagtgtctccgtctcccaacttggcataccttccaaacctcgaccaactcttacaaatcatgaatttgagttatacaatttaggcagcagtgaattaaatgagtatttgtaactctgataactacttacttttattcctcacaccaaatataatatactactagcgtttgtgtctaaaaatgattggcctagttttaaatcttttatacggtcacatcgacctttattattgagacatgttagtaaaaaactccaccttctacacatgcacataacttattaaattcattatacaaaatcaaactaatgtattgagtggtaaattttccatacagtccaaaaacatacgtcattcttaaaagaattattaaaaaatattatttgtgttgaacattactataagagtggtagatttattggtacagttttttatcctattttacttattttaatcttatcattattataaaaaatcacttccgagagcgctatctcttaatcgtattgtacaatttagtaatgcttaatagcaatactcaatagtattggagatagtcataaaatttgtacatcaaaattcatattcctcaaataaccagcaaaataggagttccaaactaattgggaaataaaatgatggttgaaaagagcaaaaaagcaaactcaccgtggtcttcgtcgaagtattgaggtttcagtggctaacttatcaaagggctattataggctaggcccagcacattttataatgggattttttcaataa

SEQ ID NO: 201049 - DNA, 1878 bp, Cannabis indica
aaaaaaacaaacaataaatacctaactaaaaaaaaaacaaaaaaaaaaaaaaaaacaaacataaatagaaaataaacaaatcaaagatacggatatcaaatgaaaatattagtatctaatattttcttgaccggaatagacaaataaaaaatacgaatgctcactatgtctttcgaaatgtattaattgaccatatgtagaaacaccataataattaaaaaattaaattttgtaagtgtgatttttattttatttatttatttttaaaaaaaatgtgtaatgttttaattgatttaataaatatttaattatttttaagattttaaatttttactagtatagccatgatataattggtttatcaatgtaaatagtataaaatacaagattttttttagtaaaatacatttatttaatgtgatatttgatgtgaattattgaattgttgcgtcaaaagtaaaaaattctacactaattggtataaccattgaagatggtcttataataactataacaaatactatcataaaaaaaatattctgacatgtgtattcaaatacaaaaattaattaagagattataatagatagctgaaaataccacttaactctcttgataaaaaacaaaaataaagggatcttaagtctttggtcatatatatttttctctcattttcaacaatggtataatacaataatcaaagagatacgttaatatatcccaacccttttacacttttttcatttttcatttttctcttttaagaaagtaatgttctctagttctttaactttatctttacactttcataggaaaatatatatatattattccctagctagctttatcatgaaaataatcgatcaatataaatatatatatatatatgtatatatatacatacctgcatctgcatgcaatttacctttaatgatttcaagtagtttaattaaattaatcaatttgcaaaaataaataaatgaattattattaattaagtaggcattaattatgataattattataatttcatacaaaaagaaagagacaatgaaggacgtaaagtatgttatgtccaatgtattattattgcctggaaatgggaccattctatattttgttgtgaataggtaaataattaataacttcaaaaaagtatatgataaaataaatataaggacagaaattttggatcaaataaatgcgttacattatataaactcatcacttatctattagttggtagttttagattttagttcagaacactttcatcgttgactttcttacgtaagcaattacgtcacctatatatatttggtaattaataatattaattaaactcaaaagttcttaattaattacctttctaaggttttctttaagaagtagttctaactctaatcgattaaaattaaagtttttcatttctaattcaaatattcaaatatataataataagttttattacttcattattgaatttaacaaaggaatattaagtcatttgtatatatgtttttatggcaataatttaaattcttaattaaactttaagttatatttatacatatatatatacttcaaagttaagaaaaaggaaagcaatgtgtgaacataatttttctgcaaaaaacttaaaaaaaaatatgtgaacataattccatatacacaaacaaagattctcatatatatatatatatagacaaatttcataaatttatacataattatttggttttttttttatgaaaagtaagttatattactataaaaatcactattaccgataatttttaaaatgtttcttttgaaggaacgttactaacaaaaattgagtgagtgtttaaaattatcgggaaaaatgagatttttttt

SEQ ID NO: 201050 - DNA, 1035 bp, Cannabis indica
cctataataattgtataatcatggggtttcatacattttaatcagtaaattattatagaaaacaactaattagtactaatactattgccgccttattattatggtgttggactggtagtaatacactgatttatagcaaataacaaattctctacctaatggcatgcatgcatatattataaaagaaacagaagaatctgattattaattattaaaatgaaaacatcatagctacataggcttgtgcatagtaatagatataattgttttatatagatggagaggttgaatccaagtagccacatccactcaaaaactcaaaaactcaaaactcaaaaatcaaaaaatagcttccccatataacgaagggttgcccttttggtactcataaaccaacgtttcctagcttcacctacctttacccatttatataaaagggaataagtttgacacataaactttaagacacaaaaaaataaaatcaatagagagagttatataaatctagatcagaaactccacttattataatatcattattctctctatttttttgaactgatcatataattaatatataagattatatattattattgaagatggtggtgttggggaatattaaaggtggtaataattttattaaaaagttgttggaatgtataccatttggagcaatggtgacaatggagggttgcactatcatcttaaccatttgggctaagacagttatcactaatgggatgagtccattcgtttttgtggtttacacacatgctctttcttctattttcctcttacctttttctttcttttaccatcgcaacgacaagtacgtattacctcttattatctctctctctatctctctctatatatatattgtaattgttttatatattattcatgtattattgttaattgtttgttaataattttgtgcagaactgatgaagagccaatattcaacttaaacttctttctgagaatcttccttctcggattaacagggttagttatatatatatatatact

SEQ ID NO: 201051 - DNA, 1229 bp, Cannabis indica
tataaattttaccattaaaaatggtctaatcatacaaataaggacttgatgggtagggtctatttattttatttttttaataaactctcttaataatattttaacaaaattactattacattttcattatttcataaaactaatttatatttaacaaattcaaaatataaaatattattaaaataatcaaatactaattaaagtaaaataatgaagcaacaacaataaaaatataagtgtaaacataattatttattttgtttcatttttactttggggttggttgtgtggctcgggattattgtggaaggatggttgaaacctataccattggtaagtttggttgtgttacacctgagattgcagaggtcattagcattaaagaaactttaagttagattgctcgacactcttgggggcaagttcttattgaaactgatagtttagtttgtgtccaagctataagtaatgtatccatgtcgatttggtctttcaatacaatatgttcgtactttatttttatcttacaattatattaatttgtgttttgttaaacgatttacaaataaagtagtttattatcttgcaaggagttcttgtttctctatagatcacgtactctagttagaggactagttctctaaagtgtgatttattgttttgaaagattttactttttaatgaaagttacaaatttattaaaataaaaaaggaaaaggaaatgagaaacaataaaagtaaagaacatatgcagtgctgaatgaaactcatagctgtataaatttggtctgaaaataaattgatggtagaatctaccacttgtggagttgtgggtttcaataaggttttctttttttttttcaaaataaggaacagaagacttttctaagacaaaattgtaaaagtgggaacttgtctccttagccagatcagatcagagtatatgctatattttttaaaaaaatataatatttattaaatcagagttattggggtagaaaagtaattttaattggctagtggatgagattgagaagaatgtgtgttgtaagttgtgttaagtatgaatattaataatgtgatagtcattgttcacaacgtgcttcgactgctggcttttaattttggtattagtcaacttcaagtccagcaatccacttcaaaaattttaaactacacctacttaaaaatgatggcattttttttcattaaaataaaaaatgatggca

SEQ ID NO: 201052 - DNA, 730 bp, Cannabis indica
aaactcatggaggaatgcctaagtcttttcgaggttcattgatatttctcttttatcttaatcatatgattgactgttactgtcatttagtttacttgtttaggttctataaacataaaccatgcatacatatcatctttctgacctccaaatgctgtaaggccacatccggaattttttttgccttaattttatttaattgagacacgagtaataatataagccacttggtaatgaaaattgacatacttggaatgaaaaaagtttgcttgtccttattctttaaatgcacatcctttgtctgtaaattaactttttttgttatgcactatacgtggtggggatttaatagatattcattagttttttcttaaaacaacaaatacgtccctttctgtttgagaattcccccaaaatattcatttttttacgatgggtttcatattatatttatttagtacgtatataagtctattattattatatgatatgagcctaaaaaagaaaaaatgacaagataattgaattttgtatttcaataaaagaaataaaaatgtggaaaacaagacaaggattctctacaatgacactgtagaccaattgaaagggatgtagcgcagctcggtagcgcgtttgttttgggtacaaaatgtcacaggttcaaatcctgtcatccctacctattacttatcttatgagcagtaacgaggaatcaattgagattgattaa

SEQ ID NO: 201053 - DNA, 1036 bp, Cannabis indica
tataactccaccaagtagacagcaggaagtaaagaggaataaagtagatgatagctgggatacactagatgatatgattgatgacgcacattatggatcagaaatagacccaaataagtttgagaagctacttagtgatgctgagaaaccaatataccctagttgtacaaaatacactaagttatctacgcttcttaggttgtacaatctaaaagctagacatggctggagtgataaaagtttaactgaactacttggttttttgaaagatttgctgccagaatgtaatgaaatgccaatttccttttatgaggcgaagaaaacattgtgcttattaggcatgcaatatgaaaaaatttatgcatgtcctaatgattgtatattatataggaatgattttgtacatgcaaaattatgtcctacttgtggtgagtcaagatggcaaaagaaaaaaaatggtgacgatgtcaaggaaggaatacctgacaaggttttgtggtaccttcctcctactccccgtttcattcggttgtttagaagtgttgaacatgcaaaaaatctgatgtggtatgctaacgagagaataaaagatggtaaattaagacatccagcagacaccctagcttggcagagacttgatatgaagtttcctgcttttggtagtgaatctcgtaatcttcaattatgtctttctactgatgggtttaatcctcacgcttctcttagcagcaagtatagttgttggccagttatgcttgttatttaaagttttacccccatggctgtgtatgaaaagaaagtttatacttttgagcttattaatatcaggaccgaaacaacctggtaatcattgacgtctatttagcccctctgattgatgacttaaaaattttatgggatgaaggtgttaatgtttacgatgcatacaagaaggaagcatttattcttagagctgcattattatggacaatcaatgactttcctacttatggaaatttatctgggtttagtgtgaaaggatatagagcttgtcctg

SEQ ID NO: 201054 - DNA, 1548 bp, Cannabis indica
tagcaagaaacactagtggttgtatgcattgtagatgacaacgacttcgcattataatggactcattatttgttttaagtaatttaataacaaaataatactaataaaatagaaagaattaaaaaaaaaaaaaaaaaaaaaaaaaaaagaacatgggtgctgaacaaaacacccatgctaatgtttctattgaaaaatcaaaattttatacgtggaaaagttccactttgctacaggcatctcctataggaattgcattagagattccttataagacttatccgttgtgcagcttgtggctgttggtggtggggcttccaatatgtataagatagtacattggcttcacttttcatttttctaatgaattataataattatgacatttatcattgcctttgactccatgaccagaaaaatattaatcaattaaatagttggtaaacaatacaaatcatccatgaacgacttcggaagatggctccttcagtttatattaaacgagtaatattgttatataggtttcattttaaactagagaactttatagccgtgttcaactgctttattatatgcctatatttggatttaatggacttaataattccaagtctcaataaagcacatgctcatatatctaaattggccagagcagaataaccttcatatatataggcgttgttatccatgcttttactacacacctagcctatctagatagtagatacagttaccaatattgattaagaaaaaaacataaatacataaagagaaatgctaaagggcattagtggtgcctagcaccttcttatgtgtcaataacgctattggtcaaattaaaaatcaggttccatataatttaatataatagcttttagagagtatcactagctaatcgcaacgtgacatgtcgcaaaggtactaaacaccactagtgtctaataagaatgctcatacataaagcgaatcaatgttaccgttatataaggtaagaaaaaaaaaaaaaaagcaaaactaaagcatgcaccaccaccaccattgccaacttgaattggtctctcactttagtataatgaggtcttaaaagaccactagtatatatttatggttttaatcttttttttttttgaacatatttatggttttaatctaattggtatcatagccacttttctaccaaacctccctcaaaaccaatagtgtaacaaaatttaaataactaaaataaaaataattttttttattatttattcacatcaaacaatataataacaaaatcaaaacccaacatacaaaaaaggaaaaaggaatgctagaattaaaaaacaaggtctctattaatgtaaaaaaaaaaaaaaaggaaaagaaataataatagtaataataacaaatgtgatcagaaaaaaaaaaaatacagagactcatgaaagaagcgatgaatgaatcaaagaatcaagatcgcacttggttctctggaatgctccaagtccaacggtggactttccatcagcagcactaagaggaaccttcaaatacacactcaattct

SEQ ID NO: 201055 - DNA, 680 bp, Cannabis indica
aaaaataaaaaataaaaaatatggggaaaatagtataaagtaattgattaccagttaccaattactccacattgttttctcatttgtttgttttatttttgatgttttctcataaaataatttttttcttcaaaaaagtcatattttgtaaattttgccaaaaaaataataataaaaattctccaattgattattttcaattttttaaaaaataattataatttggaaaacattttagagtcctctaccatagcacaaaattaatagctattaaaaaaactctcttttttttttaatgaaaaacgtttcatgaaaaataattaataatgtattaaaattatcttatccatcacatgtatgtactaatttgatataatattttgggccgtttggtattatattatattatatagtattattttaatataattttacattgggtataaacttatatcaacaactttatcaaattaaacattgacttcgagcctagatctaagtcttgtacatatattctaaccttgaaccccaaactctagacctagacaaaggaactagaccctcatcttgaatccaaactcaaactcgaattctagccctaaacatcgaccctaatctcaatcccaaaccccaaccctatccatgtccctgatcacaattctggacctaacttgagttca

SEQ ID NO: 201056 - DNA, 600 bp, Cannabis indica
ttgagcacgatggtcaataatatacctaccctgaacacttcaagtacctgtttatcttatcatcataatgaagaagattgcataatatcagaacaacctccataaaaggggaaggacattcaaaaggaagtttcttgcatatgttcatcacagtggaaagagtaactccctgatacagaataaataaatagcttaaacaaatgcttacagacacttcatgtagataagcaatgtattaagacacccacaaaaaaacatattttcttagtataaacacaaaggaaaagtatcaagtttaccttctttgccacatccaagtattcaaaactgtatagtcatgtgtcgaccattataatatagcaagttaatattacctgcacaatggcttaatattacttgtacaagaaaacgatataacaaaataaaacacaagaaaccaaaatgaaacataaaaattgaaactttgcttgcacaatattacttcaaaaataaacaaaattaaacatttaacaaagtaaaaatgcaccatcaatacccatctcagaagcaaatttcataagaaatccaatcacaagaatattatagagtaaagagaactac

SEQ ID NO: 201057 - DNA, 1785 bp, Cannabis indica
caagagacattgcaaagaaaaggattagtggcagctgtctcttgttgaatgtagtagagtttgccaaacttcttagcaatcccagtcctcaatgtctgagaagacccctgaatgaaacaagaatcagatgtgaatatcagtttgttagaacaatgctgcaacaaggagcttactgataacaagttaaaacaaaattgagggacatataaggcattagtaagagttatttttggattaataataaccgtgccaacctttgctattttaactgaggtcccatcgggtagggtgacacaattagcatgtggttttgattggaaagaattaaaacatctataatcaaaacagacatggtgggttgccccactatcgataatccagaaattatatggaaagtctaatttgttaccagaaaaattggttgaagcaggagtgttgttcgaagttgaaggagtggactgaatttgttctgccagcattgatatcagttgttggcattggtcattggtaagttgtgagggatttaactcagtagaggaatctgagacttgagaagcatgtggcagattcttattgttcttaggtatttttgttgaagattcctggggtctcctattaccatatcccgggggaaagccatgttaaaaattaacatttgtccttgaaataccaaggtttatggcatgggtcgcatctttttgttcttggaagcaagatttgcagcaggatctgtacttgtattgggagaaaaagtagtagtttagcagttattgcagcagcaacaggtaaattgggtcgattaccaagacttctttgacgttcttgatgaacaatcatggaaaaaactttattcaaaggtggccaaggatcatatagtaaaatttgagctctaacagaatggtaagattcatttaaactagttaggaattgaagaacctgatcatgataaatttgagcttgtctttgagttgctacaacataggtgcatggaattcttgggcagagttgattgatttcgtcccatattgcagtcaacttggtgaagcatgtactgaccgagtcttccccttgatgaagatatatcaaagattcattgagttcaaagattcgaggtccgtttccttggttgaaacgattgttcagttctgtccacattgttgctactatttcaagatacattatgctgcttttgatttcgggtgaaacaggatgcaagatccatgatataaccatctggttacattgaagccaagaactatggagaggatcttcaagaggaggttgcagaagcgtgccatcaagaaaagggggttttgtttcgagcccctatagagagtttgaagtctcgtttccaggggtgaaaattgcaatccgtgagtattggggtggcaagggccaagtctgggtgatctgctgaactgatatgtaaggactactcacatcttcataggctgggtgatcttgagcagtggatcgagtggctggtacttgagatcgagtaataccagctgagttttgagatggtggaggagcaacatggttagtggcatcgaccgtgggatttttgccagcggtggtagcagaggatgttgctcatatgtgcaccattgatgaattctttatctctgtaagaattcttgatggttgtacaggcttacgtttgacaccatattagagaaatacacacacacacagagagagagagagagagagagagagagagagagagagagagagagagagagagagagagagagagagagagagagagagagagagagagag

SEQ ID NO: 201058 - DNA, 785 bp, Cannabis indica
cctgggatgaagttagatgttgccagcaaaagttcctggaaactgaataatctgcaagtagctgagtacttttcatgtaaattcaacaattctttaggaaggctctctaagccaatgttgggtaaaagaggagaggtgtccatactagagccaaatggcacaatagctccactatctccatcaagattagagcaatgatcctcatcctgaggacacagactgctttgcttctgatctggataaactactgctgaacaatgccaactcggcagtctcaatatccactgtaaaacagacgttttcttaacagatttctcaatgaattgccgctttggtaaaaacattcgacggagcaatgcccaaccaggtttcaagcattgtgaatctcgaatcaccaaagaattagaaggatccagatgtgcttgaacaggtaccaaggctaatgaattatcctcagagtcactggtggacaaattgtcttctaaatctgattcggtggtggaattctccggcaacaccgtcactgttgtacagctaacacaatccctcttctgggttttgtttctacacttggaacaggatttgcgtatacgatgatgacatttatatttatatctctctccctcatccactacctttacattcatggtaagtgatttttgaagtagaccaagatagttatcactaccattcgactgatcagattctgttaaagaaaaaacaatgggaaatgaacaaatatataaatcatagttccaagattaataggcgatttcatagtgaag

SEQ ID NO: 201059 - DNA, 1764 bp, Cannabis indica
tctttaaattttagattccaaatagaaattttatatttctatttccagaatacaatacagttacactttcacaagtatttaatatccatttttctattaatggattcaaactgtatgttaaagcctggatatgagtttagtactctgtgaccaggatccacttggactattctaaaaactctttattaaactattcaagataagtcttagaaacaaggctttctacataatgtagttacagatcctagagacaaccacgctatcattggataaaaatacaaaattgattttttgtatatttttttatttattcttttatttccttcaggttcacttctcttggttaataattaaatattatagaattactaaatattcaattccttttcaaaatttgaaatttaaaactgttatcccaaattttatccacctgacatggcatgtctacataagtcaagactgaggacacgtggaacacagcttatcaatattatggcaaagtccccttacaaggcatagcaaaatcatcaagcaacaagaaaaaggagtaaagcaagctgtcaagaagctacacaaacatgtctagatgaccaaggggagtacaggtcagccagaggaagcttgtatggctcgccagggtttgagcacaagatagcagactaataagatgatttttaaacaaaaaagggcttgttagaccaaggaagcctgaccttgcataaagttgtacaaggaagctactaagactggccaacacctactaaggttggccaatacctactaagattggccaacacatactaaggctagccaacacataataagactggccaacacatcctaaggctggctagcacatggaaaagctagcaggcacaagaaagctacgcacatcccgaggatgtaggagcaatatttggctggccatggtgcataggtcagccagccagcctccaacaaatggtaggacagccaactcctcttctagcagacacttttggtgtgtttgtagctttcaacctagacaaacactctcaattatgaatggacttcaacaactcgcaagtatagggatttaacatcagttattaacctattttttagaaacaactaataggttattttctatatatttaatattcaaataagaggcgatatctccttattttaagagagattaacctactttgaactagatctattgtaagccctacattatataaaaggccttatctcactcaaaacctaagtcatcctaagtcgggctaagtccttttaagtcattccatttgctgaaaagcctttcttaagcctcatacacgtgctcctctctaactccctctctcatgtctcatatctcatctatgcctcctagacactaagtctctcttctttaatccttcataagaactcatcagttcttagtctgcctagcattgttctcactattgtactattcaaagagagcaatagctagaatcataaggttctcacctatgatctgcatggtattatctctagaataaatacaactaaaagaggagtaggtcattatcctctataaatctccatgttacttttatcatttattgttcttatttatatgaggtgattgtctatcataaagggctctgctattggttgaccaaattctgagtcaacagttcggtggtttaattgagagcctttctttaattaatttgagtgaaatcaataaatttagaaaagtagataaaaattctaaaaattaagaaggaagataaa

SEQ ID NO: 201060 - DNA, 500 bp, Cannabis indica
ttagcaatcataacactatgaacacaaattttgcatttgattattatctaacacaaaactatatatatgtttctaattttaacttcttagcaatcataacactatgaacttctgtactaaaactcatacatttggttgagagtcgtgaaaacaaaagaatgagaaaaatagaattaaaggttaagtgcatatatggaagataataaatttaatgtaattttttttttaattatcttttagaatgactacattttcatttaattttaaggaatataatccttttaccaaaatagtgattataattttaaccaaataaaagaaaaaaaaaatataattcaagcatcagttgaacaactgacgccaataatagtgatgttgctggtcacaagaattggccgaaatacctgattacaaatagagtcaacccaaacatagataaagacctcttatattaaaatggcttatttttttattatctctttgtataatataataaatat

SEQ ID NO: 201061 - DNA, 712 bp, Cannabis indica
atattgaagaattattttagcacctggaaaacatcatttgtgctgattccaatgcatttttcattgtggggttttgacttaataattcatacaagtcatcatttttagtgactcaaacactaacaatggggtggtgggttggtgggtgggttgggtatcttctctcttattttatattttatcattatacacacatacataattatgtatattattattatataaacatgggactttttcaatacaatgtgaggaaagaacagacaattaacaatgatgggatcttagaaagattgacacctggtcctctagtaaacaatgagactgttataaaatattctattcaagtcatcattaaaaatctaaacttttttttattggataggaaagagaaagagtaataaaataggtaaaaatggcaatgaatgatccaagaaaatgttcatttttggtgggtgatccaagaagggcacaatccaatccattaagaaattgagtttggtaataattcatattcacatatataaatgcttattatatcaatggccacttatggtgtgtgttaatgttctacataagggcggctattaaggacttcaaacgtagctttcacagtacacaaccaagaaaagtggccatggcaccattgagatttccaagggctgtccttaatttcaattcataaatagcaacagtgctaagttggtgaaat

SEQ ID NO: 201062 - DNA, 831 bp, Cannabis indica
ggcatgatttggtagatgtcaaaattcatggaacaaaaatcctaattagcacaatgaagctgtcatatgtttcttaaactattccctcaattactaccagttggaggtgattaatgattcataagaacaaataaaggcttagatataaggctttcaaacaagcaaaaagcaaaacacaaacattctattgcaaaaatatggatcatgaagctggggccaaaaatacaagaattgattaacaaatataatagagaaaccaatacctgattaaagaacggccaggactccatattttgcgccctacatgtgtccacattgatagcttggtagtttgcaattgatcttaaaaatttaggtatctgtcataataacattatttatgtcaacaggtcattttactattaatgtgacaagaaactgtagtatcaattgccatattgatgtcttggtagtatattctcttcttgtgccaaacagaaaatccattgatgtattaaaaacaaatgatcaaactaactgccaaaaagatgaagtaacataaaatgactaaagtattatccttttaaaaattcctaagaaagaaagataactgggaaagacattacagaatttgagactatgtaaaaatgtgcagaccttttgtgataaaaagttagaagaaacaaagaagagatgtttatgtttttatggagagagtgcattttcctgaggtgtgttgtaatttttcatccccaacacagtgcaacaattctacgtgaaaaagaacataattactttatcattacaaaagtaagcatataaaatcaagattttctagttttgggtttaagc

SEQ ID NO: 201063 - DNA, 761 bp, Cannabis indica
ttttcttctaatttcgttgaaatatatgatgtcacaaatgtgtgttcttttttatttttttgaacatacacaaatgcgtgtctatgatctatcttcaccaccaacgaaacaaatatttccaagtttagaaaatttgataagaactataacgtatcatccttctctacaatataaatatatcacatatataataatgttttaaaacgacagctgttgataaattagttagatcatatgtccaaaatttctgcatttgtaaatatataaagtggggggtttgagctggaaagaaagaatcaccaacctccaaagaacctaaaataactgaaactaacctccaattgcacgtgtttttcttttttcctaattaatactttatttgtgggtacgtattattccactccaaaaataagaacaaaattgattttcttaataatatatagtaagttttatttatataattaatagaatcaaggccatgatattcatttttttttttttaaaaaaaaagaaacaaaaaaatatactttcttattctagagggattattttattttatttttctttaaattttaaagaacaaaattaataaaacttgcgattaatttaaatttaagatcactacaaatacaaaataatatgtttccaagaacccacccggttcaaaataattaagacacggatctgttagattaagttattatatatggccatgtttatatcatcacttatataattatctctttttaatatataaatat

SEQ ID NO: 201064 - DNA, 1457 bp, Cannabis indica
aagagatataattagtcatatatataaaagtatgtaccaaagaaatcagtgtctccaagacccttagcattcaccaaaaagacctccataattccagttgccatgttgtatataatctctccctaattaagaaagaaacgtctaatataatgagattagatgatttttgattttgatgtaagactaatatgtaatgaaaaatgataatggaaagtgatcttgacatgatttgtatcaaagtatttataaggttaagattcacaaatgcactaaattaattagtcaggtacggtcttctacgtcatagctagtcaaaccagccgccagtttggtttgcctccaataatgaatatatttggctttaccccaattgactctttcattttgaacatcttacttgaatgtttaaacaacaacacataagatctcatctccaatagtactcattttttagctttaaaataaagaattattttattattgttgcttcaatcgctctcttctataactagtatttaattattttaataatattttataatttaaattaattatcacatataaattaatatcataaaacaacaaaaaaataagtaataataattttgattaaatattattaaaaaactagagagtttcatgttctgttatttattttttcattatagagagtaattttttatatggttaagtagaatttatttttttaagtttcacttcctatttcaactaaaaagtgtatttagagagcatagttattaaaaatgcttattactaatgtaattttgtatcccatcttacttattttattttaataataattatataaaatcactaactatttacaaggtattattttacaatagcggtggtctggtgggcactataatgcgcaagcaatgctgttatattattattacttattaaaggatggttttgagaagatactataaacttttatgtttgtcgagtttgttaattagaacttttattttttaaaataatataaaataataatatcttaagctaattacttgtcataagaaatcttaataataatataatcattatatatttgtatatatttgtgttagaaaaattaaaatataaatttactaaaattacgagatactattttataccattataaaaaatataataatttaatttattgtttaataaaataaaaagtatgatcaataattacatatagaactctttttttttttttgaaaaagaatttacatatagaacttttgtaataaaaatatacaacttcttcctaattaacctccaactaaaaaaataaaaataaaaacttaggcttatttcggcatcggaagcacgtgtgatctaaaaaacttttgctaagttcatataataaaatacttttggggtcaaaaaaggtaagatctgacggcttaatataaacaaatttatcgaggatacataatctt

SEQ ID NO: 201065 - DNA, 1314 bp, Cannabis indica
attaccttttaaggaaatatatataaatttataaaagtagaaatgagttattattttatatgaaacgtgattttcgttaaatttagaaaagaattaagagagattaagatgaaatttaaaaaaaaacgcattattttcatgtagtttagattgtcagtgaactaatttatgagtgagatgtattactattaaaattttacaaagttgatatttttagtaatggtatcccttcattttttagaggaataccactactagcatccacttatttccctaactaaaggctcaatgggtcggactgtacacagtagtgtattccgcccttgagtcaatcttgtctcgccgtaatgtgataagcattgattacctctgtatatgtaggcgtaggaaaagtgtgtgcattttgagagagaacaacatatagtgtgtcactcattgtgttagaggcaatgacagtccagtgcccacactagtataccaagaaatgtttagaagccttccaccttgaaagtggaattatagagtcctctattctagagatgtagtagcaatattagtactattgcatgtgaaggaccttttctttgggcgagtaacctatctaatttgggagtggaatgtaaatggaaggagcaatttaggttcgaagtagactaccatccttctctaggggcttacttcttcaagaatagatgcatgtctttgggaataagtccttaaagtagctgtaaggagactgcaattaggtggtttgaagttgcatttgtatttaaggagacttcaatattatctcatcaaatttgttgtgtgactacagtgcatgatatatatgttgtggcattgtagcaacgacattcactcttttttcaatatagacctttatttattttggtatttgagaaatttttttattctaatttttttttatagtcgtatacattataattatttaaaatatcttgtaaattttgacaaatttaaaaaaatttaatatgttagaaacaatgctcaaattatcagtagcatgcatgacttttttatattatattaaagaaaataatataataataataaagtattttttttgtataatttttagtgttgtaattggagtgtaaatattttttaatattaaatttaataatagtgtaatattaaatttagtgtatgagttaaaaatacacctagtaagggcccacttgcagaatgtcaatttttcttatgaattactcttaaaaaataacacacgtctttaaaaaaaacgatcaacaataagaaaataaatatatgaatttaaactagatataaatctaa

SEQ ID NO: 201066 - DNA, 996 bp, Cannabis indica
agctctttataattccatgtgtcacgcagaagtcaatgaacttttggctgttaaattattttctattgtttgaaaaaatctttatgaggaagttcgtattaacaaataagacttttcaccataaaatccaaaactttcataaaagtgatagtttctaatagttcgacttccatcgatttggtgaaataatcaacaatcacgactgcatattgcacgccaccttttccatgggaaattttgtgatcaggtctattccccatatagcaaaaggccaccaactttgcatctatattaactcgttgggtgatgctcgggagattttaggaaacctctagcacttgtcacatattttcacataggcctttgaatcttcaatcatttgtcggccagaaggaaccctacctcagtattttcttgaataaacttttcccccaacatgaatccacggattccttcatcaacttcagacaagagccatgcatcttcttcatttatgacacatcttaggaatgacatggagaagcctcttgtgtacatcacactgtccactattagatatcgagcaactttcctcatcatttttcgagcctcattcctgtttcttggaagttcactagtgttaaggtaggcttctatgggagttatccagtttggtgtggtgtccaccatctcatgttactccttgcaagtgatgctaggttctttaagaaactagattgggacaagttacactttttgtctaactgtattactcgctagttgtgcaagtgcatcagttgttgcatttttgttctcttagaatctacttgagggtgtaacccttaaattgtgcgagcgtgtcttggatcttacttagatatgccactagtttttctccccgagccatatattcctccaggatatgatttaccacaaattatgagttactacaaatttttagatattttgctagttgtcttatgaccaacagtggtttaggcggtggcttgcctaact

SEQ ID NO: 201067 - DNA, 923 bp, Cannabis indica
atataaagatatatttttttttcgatcggatttgaagcaactaactttgagtgtagtttttatttttgtttaggagatctaatttaattaagtgtagaattaattcactaagcatccatatattattttccaattgaagctttctctttattagaaactatggtattgtgtgacggactttcttttgtcgatcacaaatccggctcattaatatttttgatatttgcatgaaattttgggtacaaaaatttgtcatcactgtatatatatacgttacgtgtattcttacgtagtatcaaaatataaattgagatgaaagtaaaaattaaataaatattttgataaaagtatcactattttgaataaaggccagttgctccagcagctaattaccaaatattaatttttttgaaaaaaattaaatatcatttagtacttttagtagtagtatagcagtttgtgtacaaccgtgtaaagatttttccttgtgaacaacaataacaacagtaacagcaaactacatagtgtccctttacctttctatatagactatatacctggacctggtcaaatgtccaatttctccttttccttaattaattattgtgctcttttaggagagacacactgaaagaaatcatttcagtttattggatcgatggaaacagcacatattgcaatccaatttgaaatgcacagcggtagaaaatgacccaagtaaaaggaagacatttcaatattctttaaatacaaaaaggggaagaagaagaagaagacatttcaattaattatgggaacaacttttcaaaatatacaaattttgtaacttattcagaaataacgcaaaatacataggacttttccatgcaaaacaatttcttttcctttctatgattatatccattaattaagactatattggt

SEQ ID NO: 201068 - DNA, 626 bp, Cannabis indica
tcttctttatatatatatagattgaatgatattgatgattgaaaaattatttagagataaaaaaaataattgtgaatcttttaaaatttattatattattattaaaatggtaatcatatgaataattttacaaaaaaaaaaattaaaatattaaatattgattaatctagtaacgtgaatttataatttcatgtacaatatataaaataatagtagctcaaagtataatttacttttttcaagcattatttttttttttttaaataaagttatgatattgcggtgacatatataacacaattataaaagatgaattcagttttagttaaggtgataaaatagtagaacacattataaattaaaataattatacaattaatttttaatattataaatataggtatattacatctacatgtggctgatatatgattaagaaaacagaaggaaacatatagagagagttaactcaagcccctatattcacattacaaaaatgtaaaatctatacataaattaatatgcataaaacattcaatttttgaatattaatatatatacaaaaaaatcaaaattcaatattaacgaaagtaacttaaaaaaatgaatgtagaagtggaaagtta

SEQ ID NO: 201069 - DNA, 1139 bp, Cannabis indica
aatattgagatgactgttactgaatttctgccaagagtgattatattgagtatcatgccaaaaaacttataatggcatagaaaggaaaatattttattcaaatatgttgtctattcgaagagaatttatacatctctaatagtaattttaagaatccattagctggactagacagaatttacatgattagtaaaaaaatatgtccaacagttagattggcaaatctcttcttgaaacagtcaaaccgcatgccaaattagctttatgctttcataaaccagaaacatgacgtgatctgttgaaattataagccttgtttccttgatactgaaagtctgaaacttgtttatttgtgcacacagtgtagatgacttgaaatatatttaggtagcaatagctaatgtttaaacaactactctgttgttgatttgtcatgtgccagaaaaatctgatcaattctcattattcgtttaattgctaaagcacaccaatggttttaagttcaacatgccagacagtatactagatctagaacggtttaaaagaaaattattgagcataatttgtctaaataatttagtaaaattcaacatttttttttctaatgaacttggaaaagtattgctcataaataatatccgtcattagggataatagggaccatcacatttgacaaaatagattattattgtaattattttgtaattttgtacatgtgtataatatctattaaataagatcaactactctgtaattttacattatatattatattgattgttacatcatgagacaaaaagaaacaaatggaacaagcacaaacattagtaatagctagagataacaattaataaatatattttcttcaagaaaaaaaaatagtgtatacatatataaattttcattgcttaataaaagaaaaaaatacaaactttgtgcaaattaactactcatactttcaaagaatcatctcagtaaggaatttataattctaattgacaaacgcacttcaggctttactaatacatattattttgtatcagtgtatgtccatatcgtgcaaaacgacaaatattatctcttagaaacaaacaaattagttaaatcacacatcacaaccactcaaagcgaaaaaaaac

SEQ ID NO: 201070 - DNA, 836 bp, Cannabis indica
aaaaaaataaaggtcaaaagcaaatatagaaagaaccgtgatcttattccctccgaactaagtgtataggaggtagaaagacaggtttccgagtcttacccaaaaccaagctcgtccatgacagtcctaccaacacatttagccccattcttcagcaaagaagtcactaccaacgccgtcttctcagctgcctcatgagttctccgccaatccggattcccaaaccccgtcaaatagtctttcacttcaaatctacacaatccacaatccaaaaacaatatatctaaacacaaaatacacgcatacatacatgatatcatcataaaggataaatattggaatacatacatgtcggaaatggcgaaggtgagttcagaaagagaaagtctagcggcagggggaggaggctgaaggaaaggaagaagttcaaatcgctccaagaaagcaccgaaatcctctttattaccaaccatggcgattctcctcctccggcggcggctagtctcaaccaaaatcaagactccggcgaccccgagtccaacggcgatccaggttttcgggtgcgcagacgcattctccttcaccagctggagtggcttcaacatgatcgatcgtgcgaggtcgtcgatgaacgtaaaaattaatcaaagggttttgcaagggttttaggaccaaccaaaaccatatacaattaaaattaactttatagttgtgttttgactaatggaaatttgctatcttgcgctgggggcgtcagttaacagaagagagagaagaagtaaagaaggttgtaggcgcgcgagtaaatgtgttgtgcgtgcgtgcgtggtgacttg

SEQ ID NO: 201071 - DNA, 1956 bp, Cannabis indica
taaaacttttaaatcaatccaaacattaaactcaaaaaatattacgattagaaagaaatcgagaatatcgtgctatataacatgaacaactcgatttaatgatcacctaataaaacataaattgacgttatttataaaagagagcaaaagttggcaatcataaataattaattcttataatttgtgatctttttttatatacaaatcaattccttcattattttataagtagagaacactcattcatattaatcgtcttagccattgatgaataaggaaagaaaaaataggcaaagcgattgagaaagagagaagaagaaagaaaggaattcttcattcattaagataagaaaagtatcatacatttatacacaatctagagcaataagaaggaaagagaatgaactaacataatcaattaaaatagttggatactaacccattttctaactaactttaacaaaaagaactaactaccactaacaaacttttattgtcttaatgtccccctcaaacttagaattgaggcattagtttggttctaaagaaatgaaacctttgtcttgaaatagcttttgtaagatcatcaactacttgatctcattagatatatgcttaacatggacaactctgctctaaactttctccttaacaaagtaaaaatcatgttcaatatgtttagttctagcatgtagaacagggtttgttgtgagcaagtgctcatattgtcacaccaaaccgtaagagttcttggtagcataatttttaactcaaaaaacaagttatttagccatgttaattcatttacaatattggctaaggacttgtattctgcttacgtgttcgatcttgaaatagtgtgttgtttcttgcatcgccaactactcaaactttgaccaaagaagatagcaaaaccagatgtggaccttatgtcatttggctcagtagcctgatcagcatcacagaaggccataagctctgttgaggaaggttttctcagatgcaacctaaactctaatgtgccttcaatgtactctagaatcctttttactacaacccaatgtgactgaagtggttgttgcataaattgacaaattttattcacactataagcaagtgagatattgcaaaccccccacaataaacctgtaaggttgcacatcctcaactggatcaattccatatgcttacaatctcaagccacttatcatgagagttgagcaaggcttagcattctacatcttggctttgcagaaaatatttttggcatacttctattcaaacaactaactgcattccttcagtattgtacttgacttttatgcctagaaaatatttcaattctcccaaatcctatagagagaacttgacataaagatcatgaataagttaagacacaactttggaatcactgcctgtaatcaaaatcatcaatatatacaaggatgattgtagttgactgtgttatatgacaaattaaaagtgattaatatgactttgaagaaataaaaccaagctgcaacaaacacttatgtaacttttcaaccatgccctctaggcttgttttaagccatacaaagctttgtgcaattcatacaccaaatctggagcatttgcaacttcaaaccctaggggctatttcatgtatatttcttcttgcaatgtaccatttagaaatgaattaatcacatcaagttgtctcaccatccatccttgagctaaagccaaagtcagcaccactcgaattgttattagtttgaccattgagctgaatgtctcagtgaaatcaaaaccctgctggtgaaatatttttgccacaatccttgctttgtacctacttatagttccatcaagattttgcttctctttgtaaactcattacaacctatggtttttcttctaggggagtttaaatattgtccaagtagcatttcttaaggcaagaatttcatcttg

SEQ ID NO: 201072 - DNA, 1711 bp, Cannabis indica
ttttgtcactgatcgataattacttataccttaatagtaatatgtggagaaataactggtactcgtagtaaaatatttatgcaactgttatgaaacattaaaaatcagaacaatatttccacatgcgtaactttatttacatgtctcttcgtgatttaatatgaacaaattcaccattagagatttagatgaatatacaccaggataaacattttactattgtattgttgtaattttttttttttggattatacttaagttgaattgtttgggaactccagtttaactttttgagatctacatttcatggatataaaaattggagtcgggacattcgttttatgtgaattaaactggaattctagttgaattttagtttcgtaatagtttttttttgtattttttttcatgaattcgaaacaatccctatttttattgattctagtcgtcttctcttgttggattttcgtttcagttgcgttgggttgctgcgtggttgaccgatgattgtctaggaagcatggatcttgggttgaaagtatatgtaagaagtatttgtatattttttttttaatttcaacggtatatttatgtatttttaaaagtatttttgtaatattattatttttttttggttaaaactaaaaaaaaaagccaaaaaaaaaaaaaaagcttattaattttcgccagtttctatcaaaaaaagaaaataaaataaaatttcgccagctaatttttcttattagacttagattttttattaaatataggtgtctgacattttaaaattacatatataatgtctctttttttttttgaaatccaaataatgtctcttcagtttcttttttctttgtgattgaatttgaatggaatgacttgactcttcagtttgatatgtccaaaacttgttattttaagccaatactgtttttttaaaatacaaatgaaatattaaaataattccttttcagtaataataataaaacttttggcagtgtcctgatataatggtgccctgcaaaatagaagtactgtcagaatctccggagactaacccatttaggcatggctggccctcttctctttatattacctattatttaatttaaaatttaatacttacataatgaaagtatttaatattatgatacctcttttaattacaaaattaccaagcataatttacctgactggcttgatacgtatgaaaattcacaatataatttgaatgactatattacatgaaataaatgtgatattattgggtgaatatttgtacatgtaatgtaactttaattaattaattaatattgtatattatatgttttgattttgggttgaggcaagttaaaaatagcaagttaaacgaaaataaaataaaataaaatgttaacaaaaattgtcgaaaaaaccatttcacaaattccgaaaggttttttcagtattaataaataaaagtgaagaaataatattaatatatttaattttttctctgctttctctgcttctgatcttcatctcgtttcagttcaaactcagcttcctttcctcgttgcagaggtaactctattgtttttttttttcttcgtttttttttttcaatatatatatcttttgcaaatattagagaagtgactctatgatgtttttgtttttttaaataactatgcacgaatatttagttgttttgattatttatttttattat

SEQ ID NO: 201073 - DNA, 1593 bp, Cannabis indica
accaaaatatgttacctcttatgtaatccatatatttgaacttactcttcttattaagaatgttatcaaactgacataaaattctctaactaggtttttatttggttggtgaagatgtgtgacagacaatgaccacccatagactgtattaactcacgaatttttagaaaatatttgagcttgactcaatacttaggccacagaggacgaacacaaatattatcttgaagatgaagaaacttatcatttgagtaaaatgggggacctgaaggaggtggcttagatagactaggtttagatgacgaaccaagttcaaacaatttgactttcttaggaacaggaaggtttcgagagttaaaggagattgtattacgtttagagaaagacttaggacaactaatcgtggatggcaatgaggaaggattaagaggggacaagggttgagataatggttcaaaattagtagcaaacatagaacgagtaaaacacctagctaaactagaagagtgtgaagacaaacctgggtcccgcgatggtggaattgaactacagacaacaagagaggagctaggacgtacaaccttgggcactaatgatgatcccccaccagatgaagatcccttaatcttgcgacatgctttcttcccaatatccgaacaacagagacagaccaaaaatcaccaaaggaggaagatgaacagtattgggagtaggtgagaatttacttaatgaaaaaaaaatgggaggatgaaagcacaaatggtaactttaatctgattatattcctaagacaaaagaaaaaaagtgactgaactaccctccgatccaattaacaaaaaagaacaagcctattaacaccaaaaaagtccacaacaaccaaaccaaagacaagggaaactacccaaacatacagaaaaaaaaatgataatggaatcagatgattttactattttaaaaagacacacagtgatcaacttgaacaaaaatgaaagaaagaagcaacaaaggatactagacattgaagcttagctagacccaaataaagacacacatggaaggcatcacaactagatttaggcagtaaacatatcaaacaattgttattttttttattcattttgtccaaatcacatatatgctcacaaaaaaaataaacaattgatatcgccattagtgtgtgaagtgacctcatgtaagccatcaagagattaatcaaggaagcacactcatctctctagagcaaaggccaagagaatagccaatgaacatttttttaatttgtaaaaaaaatgccttttgataatatctacactcaatgacttttttcaacaagttgcggctttcacgcccccatagagatgtagtcgtcaccccatggatttttctcaataagtaacaagagaaggagcaaactacttgagtcacatattggtacaagggtagctcttcccattgcatccatggaaggtagcattctcaactggggtgacacaatgttcaccaccatacatgagcaattaataagtgatctgactcaagaacaacaaacaacaattgaagattaaatacagccacatacacagttgagataac

SEQ ID NO: 201074 - DNA, 2121 bp, Cannabis indica
atatgtaaataaataggccacaacttaggaacactttaacaatcttttgagttccattacaacttgaaatgaatcatgttgcaacattaaaaaattttgcaaccttaaattattatgaagtaaattattataatgtcaatattacatcttatatgctatttacgtgcggagcacgtaaagctacactagtatatatatatatatatatttatatatattcttgggtctgattaggatccactaattaaatattcattttccatacaattacattatgatatatgtatttgataataattttaaaatataagtgcattctaaaattaaaagaaaattttcagttctacactaattagccaactcatttcatgtgtaccttatcaagctttcttttttttttttatagaacactactataagataagtagtgtcttatactatcattatatcattatgtacctaacattttacaattggttaacaaattttcattgggcaacaattttcgtatacatatgaaacataagtactcataataattaaatgaatagaataaggttataattacaagaaaaacaaaagtacaataattaaatataatagtggactattctatatggtgagaccttaaattcaagggatagtgtaattggtacaattaatagtggaagtattcatatgaattaattatgatgaattgacctttttcattgattaaaaccaacaaaacctagtttaatctttatcatttagtgatcatcacaatcactattgagactaataattgaaatcaaatcataaaagaattggaagaatttcttccatccataatgtttaattattgtctaaccttatgatcaacattatccacatgtgataattaatattaatataatagtcaaaatgagaaagagatgtcattaacaagtaaaaacaaatttgtgattatataactcttagtccaattactaatgtgttgtaattaaaaaaaagtacaacaaattaacacaaacataaatagctaacttaatttatatttgtgtttaaggatgtttttatagttcaccctctaaaaatggatatattgatgtatcccatcgtatttttgatacttaaatagttataatttcaatttttttttataaaacagtataaggaaattttaaaatgcacctcttgaaaaggggtgcgtcgatgcaccttcatttatttcggtatctagaaaaaaaatttagttcgattttttttatgactatatatacgttgtagttatttaagacatcctgtaaaattttgagaaataccaaaaaaattaacacgccaaaaatagtgttcaaagaatctattgcatacgtaacttttttattttatacgcatagtaaaataaaaacctagaactattgaaaactatatagtagttaaatttaaatttcacaaaattttacatatgtcataaataattatagcatacacaactataataaaaaaaaaagttagactaaaaaaatcttctagatgccgaaacagttaagggttgcactggtgcatccattttagtgggatacattgtagaagtactctatataaatatattgtagttatttaaaacatcctatgatttttttaaaattcagaataatatttacaatgtgggaaagtaattcaaataaattatttcgcatgcatataaaagtaaaaatttatgaatgtatagactgcttgaactttatttttgacatgtaaaattgttttgaatttctcaaaattttaatttcagttgttcttatataactataatatatattgacatatcaaaatatattataattaaaactatgttgatatcaaaaatacaaaaatagtacatgaatacacacgattatattttagaaggtgcaccataaaattttattttgtttaatcaaatgaaatactaagaaacaaatgcttacactatgattagtatgcaagattttaaggtggataaaaaaatattaaaaagtatagaaatttataacaatccaacctcacaaaatgttaaaaaaaaatataaaaatttatagtatgatttttggtaattaaataaattttatatttggtgtgcatttatatatatatata

SEQ ID NO: 201075 - DNA, 1024 bp, Cannabis indica
ctaaaagtaaattttttatagtgccatatagcaattaatgctccatcttttgtatatattgttcgtccgtgatgttagaaagtagagaaatgctaaaagacactaacgatgttcttttacgtgtcaatattattattggtgcaattaaatatcgagtctcatataactaaatgtaataatttttagggattattactcactaatcgcaaaacaacaagtttaaaaaatgctaagccctgctaagagcaatgctctagaaatttgtacgaattaaactaaaattagttaatgataaaaatgttaaaatctctctctagatctaattatatatacatatatacgctttgcattacaacattactattaggcatctcataattaagatgttcaatatcaaactgatgtgttacattataattggattttttttgactttgggaacgagagatttgaatttggaatctcctctttataagtagaattgtggaaccactagactatatttatgatcacttttacattataattagatagcggtttcgtatattatttatcaaataaattttattggatccaatattaaaaatacaaacaatatattacttccactacaaaaaaaaaaatatcttttctcggcaggctaggcccgtcaagattgaccaaactcggcgggctacaaccgcctttaatttgtgtgccgagatagattaagggtcaatcacggcgggctaagcccctcgagatatatgactaatgtcggcgggttaggcctcacccatctcgactgtcattttcaactttcaaatgccaatcttgacacactaagcccaacgagataggtccccgttttaaaaaaaaataatttttttacagaaatcaaaataacaattacagtaaataaaattcatacttcaattgatgatacatccatttacttctttcaattttaagtagagaatacaaacaaaaagatacaaagataaatttcaaatagatgactgggacaagtttctatacaagaata

SEQ ID NO: 201076 - DNA, 1439 bp, Cannabis indica
attgaagcagtaagaacattatcttacaaaaatataaccataaaaagtaacatataatgaagctcttcaagaaagacatcgtacacaattagctacagcaacctgatgatgtgcttcttctgctaaactgcatgtcccatccttctttcaacgcatgaggtccgttaggaaatatattcggactaaacaactgtatacttcttgtaatgatgcctgcataattccaaaatctactttttaagaacaaatccagtacaccccatttccccacacacctacccccaataaaattatccagatagaagataccataaacaacatagtgaagacaatatagaaatttgaagatgcaaaagcaaaattactcttaaaagcaagccattttttttttctagagattgttattaactttttaatacattatacatatgaagaacattcttattcaagggtgatattctctcagctttaatggttgctaagatataacggaatttggttgaataggaacaagtgtatccatgatagatgctcttataatgttttgcacatggatagtcttatacaaagagatgttaaacttagaaagtggagccttaggaagaagaggctctcaagttttgatcagggtcttatgcattcattgaagagcctgtaaaggttggctgtaattggtagctgctagtgcagctttgtatgggtttagtttgtttgaaacgaaagcttttctttttttccaaaaaaaaagcaagtacttaaatgggagtcactttcttattcttttacttgtcagaggaaatatagaacacatactatccaagtatccattcaaaatgaaatcaagtcctgtcaaaacccattcctacattagatacactgaattcaatttgaacagtaagagaagtctttatcttaaaatcagtgaaatgggttccaccaaaaacaaatttaacatgatatgctaaattggtttactactttataccgcaaagaacacacaaaaatcatcaaaacgagcaataattatatgaaattgacaataagttaacatcgggctcttctcttgtaaaccaaattatgttcagagataagttatttacaaaattaagactaaaactatatagaaaaaggaggagaaaggtgtaccagctgagagcagagaggtgggatgagagtgaagaagaggagattgtgctttgggaaataagactggtgaagtggaaaatggtaggagagtgttacgggtatgaattctgttgagagagtgtgggagcttgaagctgcccatggccgtgggtggtggaagtgaattagaataaaggaaatttcaaatgggcgcctatatacgttggtttcttaggagaggataaggctttgtgagaggtccatgccacacattctcagtgttaaggccattcaactcatttgggcctcttcta

SEQ ID NO: 201077 - DNA, 1053 bp, Cannabis indica
tgtatagcataaactcaactaaaagcaagacagtaagatacccaagattttattataaggtcttctcaaaacaagaaagtaaagccacaagagcattgttattaaacactttaaagtatccaacactatacctatgtagcacgttgtgaattgttagcggtttactatgttatttattaaatcaaaatgtgtaagaccctttgatgaattacaccaatagcgggtatgccacctctttaaagtaccccttagcatttctcaaaacttaagggtactactcacataatgtattttctcatttttagttatattatcgattggaagtaaaacacattagaaatgagatgttaacactttcagagggtaattactgcttgttgagcgccagctggttggatcaactgagaatatatgtattcgtcaactctctgcttggccagtgcaacctgttaagcagtcaaaaattgtcagtgaagaacaattgaatttgaatgctgcttttctctataaaacttaaacagcacgcgctattagtgagcaaccaagaattcccactcttacaaaatgaattaaccatcttacatgtataaatatgtatatatattgataaataacagatgtgggtaaaaataactaattcgtgcatacaaaattttctccaatttagtaggccagttgcattgttcagagtttctgaaacagctaaggggctgtttggtacagagattttcttactcgggaatgggaaaactaagtctaacctatgtttggtatatattttcaatttttttggagggggttttcattttacagtgggctaccttaacatctctcaaaacattgtgtttcatttgtctggaaaattaagatttgctagcttagcttggtgaactcatcggtgagttaactgatgaagttaaccaaagatggctcaaatgactttctttcgtataatttatttacagggaaagaagaaggaaggaaacgccagcatgctgtcaagcatcttcaagtcgatctacctctttttaggtcagtatattattctcaaac

SEQ ID NO: 201078 - DNA, 1574 bp, Cannabis indica
tttgtaaatagtttagtatgtggactgtataaatgtttaatgggccggcccaaagtatttttgtaattttttttctttttttgtattttttgtttttttcccaaaagtaaactctaaacattgaaaataaaaatattggagatttgaacaattcactcttattatatatgtcaaagctagtattatatttatatatataacctttaattataaatatatgttgaataactaattaaaatacatgtttatttttttcaatttttttggccaccctcacctctgtgtgggtatatccttggggatgattttttatttattttgttatatttttttattaatttattttaattctgaatattagatacgaatttaattagtaaacgtagctaaatgtcccattcccactcctagtaagtgtaacctatagctaaaagccacgtcattagctagacacagattccatttttaatgcttcaataatgaatatgttctgtgtattattttctataattggggaaataaactgcaaaattcatgccccactaaaataaaaataataatattatttataaattattaatagccaagtattcaataacctaaaaacaaataaaaaaacaaactcaatcagaagaaggcattttcacaaaatatccctaatttagtcggtcgaaaaataattttaataaataaataaaagtcttacaataaaaaatatcctcaaaccaaagaccgttattgattaattaattacgtcactacgtgcgtaatggaccttgaactccaagttaacaagatgggcccccaatactctggaggcccatttactaactctataaatactattctctttgcatcaaactattcgattcccatttccacgtttctttctctactttttttcattttcacttctcagaagaaaaaccagaactaaaagacgtaacaatgtgcccttccggacgaaccctagccacggcgacgacggcgaacaccgcaaccggaactggtttccgatcagctttcgaagtcctcgacacagaccgcgacggaaagatcagccgcgaagatctccgtgctttttacgcaggattctcgagctccggcgccgacgagagcaaaatcatttcgatgatgaaggccgcagactcaaacgatgacggattcgttgagtacgacgagttcgagcgagtcctcggttgcacgacgaaccgattgcgcggcggcggtggaggagtaatggaagaagctttcaaggttatggataaggacggcgacgggtggctgagccatcaagacttgaagagctatatggaaattgcgggttttccgactggagatgaagaaatcaaggccatgattgctttgggcggaggtaatgaaaatcaaggtgtttcttatcatggttggcttaagatcttggccgttgattaagctttgacaaagatggtataatttttgtttaatataaaattttaaaaaaaaaaaaaaacaaaattgaagcggtgataggagtagaactcgaggtttccagctcaccagaaagattcgatagtagtttctagaagaagatt

SEQ ID NO: 201079 - DNA, 1202 bp, Cannabis indica
ttacttcaaaaatgcatatatttagttatttatcgctcagaagacactacattagaaattgttgtagcaagttcattcaacccccctctgaaatagcatacttggagacgatatcattaaaagtcgattcatattcaaataagaaattcgggtcaatcaaaggaggagccctctttgtagttgacttggatttgcatttagggattcttaaagtcatgaatgcaaagtacataaagaagaagggaaacattaaaggatgaatggggagaagggtgggaaaaggagaaatattaacagtgagaaaatattagggaagttactgaatttttttttttattttccttttaaataaatatcaacaaattaaatttaaataaataaatcaagggaattagtaaaggcggggaaaacacccaaaaatttaaaataattattccattaaataaattacgactcattatgacatgtgaaattatttttgctaaccggtttcacaatatccaagctcatactagaaaggtcacgggttcagaaattgtagaaccgaagggtaattataagggaaaaaataatcacgagggtataaagtaatttttctcacaataattatgttgactgtggatttggccaatcaacacagagtctgactaggattagattttgcttatgattgtcacatgagaatgataataaatgtaaaatacacccagatttatagaggttcaaccctttttatttaggtaatgacctactcttcttttaattgtattcactctttagataataccaagcaaattacagattgtaaccttgtaatttctagctaggctctcttcagtattacaatgagaatgtattttgcaggtgagaagtatgagaaaagagagaggaattattgttatagtgcttctgagcgtgattgaaacttaagttctgagtgtactagccctttatacagtaatagggcttacaagttgtacatagagatattcctaaaaaataaggaagttacactgtatatttgaaatacaaagtaataattaataatccctaaagaataggattgttacttgttgacggagagtccctatctttgtgggcagtttgaactgtttcgaagtcgtaggaatgctaaaggcgagttggaaggcttgtgtgaacaacacaagcgttggtgtgttcttgtacacttgaccgactag

SEQ ID NO: 201080 - DNA, 1674 bp, Cannabis indica
actaaatgatgacaaatatcaaagatatcataaaaagaaacgttgacaaaaataataccttgatgactaagaatattttaaaacaaataaataaaataccaattttcaccaatgctacaattaattcaacacttctttaaaaatccttgattttttcattaatgataaacgagaatgccataaccccccaaaaaataaaacctatgatcaatgtgatttatcttaaaaaaagacataagacaagccatataaaaatagacgttagtgtatgatagaaaacacatgtgatttttgaaaaaatagaaggaatttttgagagaaaaaagaacaattcaatcacaaacacatattctttaagaaattcaattaacatgtaagagtctgacacacatttttttttattaaaataaacagtgtagtagttttcttgcaatgtttcaagcataagtgtttgatagtgtatgcaaggaaatattgcccatttgacaagaaagtctttttctgaatgtaaagattgtaacccatgaagaccttgtcacactacacccgtggtagcccttttctatggtagcatatcctcttcatatgtttgaattacaaagtaccaacttactcaaaagatagttttcacacactgatgcatgtaactctattcttacataggagcttaaaacaatgctatacaaaggatgctcaaacattaaccattgattgattgacttgaatatgtctaggaggaattgattattttactctcaagaaaatacctctaaaaactcaaaaacacaagtcaatttatctttcaaaaacaaaaaaacaaaattttcaaaaagattgctagatttcttaaactagaaataaacacatttgatcacgcaacaaaaataaacttttgacaattaaagggaacacaccccaaagattttcggagaaaattaaagcgaaccgaatcaagagtcttagtgaaaatgtcagcaatttgtttatgtgtttcaatgtattctaggacaagaactttattttcaactaattctcttatgaaatgatgacgaatgtcaatatgtttagttcgtgaatgttgcacaggttttttttttgaaatattggttgcattagtattatcacaaaagatagtttaagtgtcaagatcaaactcataatccatcatcatttgcttcatccataaaagttgagcacaaaaacttccaacatcaatgtactcggtctcaacagttgagagagatattgaattttgtttcttgctgtgccatgaaactaaattgtttcccaagtagaaacaacctccacttgtacttttcctatcatcagtattacctgcccaatcagcattactaaaatataaaagattagcattagtttcctttgaatgccaaagaccataatcaatagtcccatgaacataacaaatgattcttttaatagttgttacatgagactccattggattttcttagtacctggcacacacaccaacactataactcaagtcaggtctactagaagtaagataaaaaagactaccaatcatgctcatatacagtgtaggatcaactttgacaccattctcatctttgggtaacttcacagtcgttcccattggagttttggcaatctttcaacttttaactctaaactttttcaccaaattcatag

SEQ ID NO: 201081 - DNA, 1157 bp, Cannabis indica
agctaatgatattcgttaggaagggtgtttgtaaagtaatcaccaatggcaatgacactaaaatttaggaggacccttgggtcaatcatggacaagtgttctacccaaagtcgactgataacccatctcctgatttcaatatggtttctgagcttttgactgcttctagtgactgggacacccaaaagctgcaacgtctctttgatcatgaaaccgtttctgccatcttgaaagggggaaaaccttctggccatggacatgatcattgggtttggactaaggagggtagtggtcggttcacgagtaagtcagcttacttaatccaagcgctgcaacgatctccccaatgtaaggttgccccctcactttggaacaaattatggaacagtaggatccctaaatgctacaaagttatgtggtggagcgttctttcaaatgctctcttaacaagggggtctgcttcaaaagattttatattgtcgacaacacctatcctatttgtggggaagaggaggaatccattgagcacctcttcctccactgtaacctggctttccatctttggcaattctccccgtgggatatctccccaatctctggtattggtattcgtatgagggttgggtcaaatttttatggagcctaaaaagcaaaggcgtaaacgaagacaaggtctttttttatgcatccattgttatctacgatttggagggtgcagaatgacaaggttcataataatagaatggataatatgagtcagtgtattaactatgtttctcattcttatgcagattataaagattcccttaccccctccccttccccgaccctctgccccgctgtttggtgtcctccccctcaagaatggatcaagttaaattgcgatgttagagttggagggaagcacatgtgcattgaagttgtggctagagactcctaaagcaaggtggtttgggttcattcggcgaaactggacttttttgatgctcttcgaggtgaagctaccactgtttgtttggctcttgaagtggcataggattacgaccacaagtttatcttggttgaaagcgattctaaagtagtaatcaactccttcaacgatattgatcccagatgggagttggagaattatttcttattttgtaaaagagtcgtct

SEQ ID NO: 201082 - DNA, 1132 bp, Cannabis indica
tctttaaaactttagttgtggtgaagaaattactcctcgtgggtagactcatccttttcttcacgtttttagacaaaaacccataaataaattattgaaattttgggataatttatgaattctagctatttcgtctgagtaggatgtttgattgagaatctgattgtcgtagcggcctctcgttgattcaataaattcacttctaatgtggatgaaaatttagggctacgttttggtcaaagtttgaaggataagatttgatacatattaaaattcgggggaaataatttggtaaggataattattacgttaaacaatatcaatagttttgagagaatttttagcggcttagaaagtaggtgtatgatttggtttatgttaaagttcgtggtcgagtgaattctaattagcttataaaagaatggggaggagagtaataattttcttaagttgtttggggatttatttatgaaattaatatagtttttagaataatatattatttcttatagaaatttacaataatattttaataatatattagatttataaacttaaaactattgaagttggagagtggatatctaaattggagttttaaaaggatctactgttcatcaaattatctctgcccgtcctcaatcaatcttgacaaacaataacaccatgtttggtaggagagatgagtggatggatggagagaggtagagtgatggaagaaaagattgattctcttgtttggaaagaaagagggggagaagaatgttggaaaatcttctctttctaaaatttgcaaatttattctctcaaattttaaaagaattgtagaaaatgaacaaaaaaaaaaattgctaaatacaataattattcctttaaaaagtgataaatatttatgttcaaaaaaaggtaatattgtaattatactaattaattttcacttatcattcacgcctaatgtcaaatacaattatcatttccattatttttttcaactttctaagctctccatccatcctattatgcatccattctactaagcatagtctaagaaattgtcatatccttccatctctctcatttctttcctctccatctaccaacttctctcttctatagacatagtctaaattag

SEQ ID NO: 201083 - DNA, 632 bp, Cannabis indica
aataataataatacaatccttgaagtaagtcaacttgtccacttgtttgagtacgccagaaaaattgttaccatccactccaggcaccaaaataccactgttttgggtgttacaattttcatctcggtcctcaactaagaatttaacaccgttaacaatacatctaggataagaataacatgtaggattagagagatctgcgatggtgtacaactcttttgatacttcagcctgattacatactcaaagttgattgatctatcactgagtaaaaaatgtaatcaatactagaacaataaaccgtatttgaatgaaaaaaatagtcgaaagcaatacttactcaagacttgaaccaactatgaaactcattctcttgaattgtgtcaagattttgatcacccctaagttgtagctcgttctcatgctcactacacataaatattatcttattagataatatcattactggaaacaactaaattaagaatccaaaaagtatcttacgtgatatacttctcaacttcattataattgttcagaatgtaccgctctgccttaagtttatcttgcattggcaaagaaacgatggtcctcttacaaattggtcaaccaacatgcttaaatatagagaa

SEQ ID NO: 201084 - DNA, 594 bp, Cannabis indica
tattcatatagtatgatcttaatacccttgtatttctttacaatatcatactctttatataaatatacaattttttgatatttattaattatatttttatttataatatattcgcatttcatatattatccataaattatttttagggcgtaaatcttaacacaatagctatattggagccaaaaaaggaaagatcacacaacacaatcaaagaaaataagttaaactattcgagatcccaaaatatcctctccatctccctttggtcgtggttcaaccaaccacgcacgtactcattggtaataacaattgacaaccaccctagccgagagaaaaggaagaaaagaagaaaggagaagctctaattttaggagggagacatagaattggagagaaaaattgtgcatattaattaattataattttaaaaagataattttagaccaaatttattattggtttcttatgagataaaattaaatgatatttgagctagtaacatttgatgttgatttattcataagataacttctctattagctaaattgattattgttccaggtataaattgacttgtgttataatagattgaat

SEQ ID NO: 201085 - DNA, 736 bp, Cannabis indica
aagcatcttgtccgacccacttcaagttcctattatgaccttgtgttcactggagggttcatttggcacggtgtattagatcgtgttatattatataatattatattaaactgtcttgtatattatatttttatacaataatattgttaaattttgatttatatatatatgaacacacaagtcaatatcaaatatagtactttataaaaatatgacatataacacaattatatttaatattatacaatatggtgtattatggcgcaccaaaaggacccttatcctgtaccaaataggtcttcgtgtctgagaagttctaaatcattaaatgcataaacgttaaggtatcaatttattgatagaaaagaaaaaatgatttaaaaataaaaaagtttggaaaaccatactcttaatactagtgcacgttctggcatcattctgtgaggactccttcacacttgcgtttcatgagctcacaactgaatgtaaggttttgttctgcatagaagaagagattttggcctaattgaaaaatatttgcagggtttgatgcagcatcacaaggaaatagtgaagtatttgaaagtcgaggtgttactgcaatctttctctttcgtagaaatcttttgcgcaggatgatctcagttctcgcaaattcttatgatagagaagtcaagttactgaatggaacacacaagtcccatgtacattctccccttgaggtctctctctctct

SEQ ID NO: 201086 - DNA, 590 bp, Cannabis indica
ttactcatctccatacacataattattcctgctacaataccaatagtaggatggtggcacaacaccattattcaaaataaaaacaaaattgaaagataaaacatcgcaaataaaaacaacccataaataaaagcttcacaaaccaaacaccaccctaaccccatgagaaattcaaatccctaataccagtaatcgaggtcagtccttaaatttagtggatcatagaaaaaaaaaacatttgagcccttaaatttagaaaaaaaaaatgtgttatttttaaaattagtaaaaatatatatttttaaaaggagaaaaaaaaaattgggcccctgggataggtgggtcctaggcaaagacctagcccgcctatgcctaaggccgggcctgccagtagtaaaccttaaccacacagttgcctcttcaccatccagactcccaaagccacgacccaccaccaccaacacaagccacaaccttcgtattgaatccaacaacccatcacaagacccaaaaccccaaccaaccaactaccaagatctattatgaaagattgaattaagggtgttcatccaatctaattcgtactattt

SEQ ID NO: 201087 - DNA, 830 bp, Cannabis indica
attaaatactcaccaaaaaatatgagctacacgacacgaaactagattagtttgaaagtataatacattaaaaagttcaacatttaataataataaaaataataaatatttatttatcaattaaaataataataatatttaaattataataattataattatttttttatataattatgtgtaactattattaaaaaaagatataaaaactacaaatacacacatattttagtatttaattcaataattgtaataaaaatataaaaatataaagcataaatttaaatccgtaaaaaataataagttggtctatttaagaaaagtaggctgtacaaatctaaacaagacacaaaattattggacatgtagatcgtatcgagcctattttataaaattattacatatgacaaaatttatattttttatggatgtgaccaccatatatgtagttttgtgtatttatggaatgaggtccacactgcacacacacaccttaatgtggtgtttggcttatatattataaaaatgacaaacagatcctgacctacttttattgcttattaagttcttttcttttatttctaaagaataattaacaattttattatattgattttgattcttaaaatatacatattaaaaaatatattaaaaactaattaaattttactgtaataaattaaatatattttattttttggtcaaaaaatgtagatttatttaagtaaacataatatttttttagtttaatttataacttttttaaaaataatttatatttttattgaattgttagttagctttctctatttgttaatgtatgagtttat

SEQ ID NO: 201088 - DNA, 750 bp, Cannabis indica
aaaaaaataaaccttcatgtagggtataattaggattcttatagtcatcgtttggaaattgatctgcagagcgaaactttttagaaggatgaggtgccattgacgatcaagatacttgactaaaacgttgatcagtttctcaatgaaaatttaagttttctttgttctcaaaaaatataaagacgatcgatcatagagataatcctcctcaaatcctactttcgcttgttcttagactatatcggcaaaaaaaaaccttcattaaatcatataaaagggtaaattgtgacataaaatccatgtttcaaaaaaaaatctttttaacattatttagtgtaaattgcgggaaaaaattaaattgttttaatatttttttaagtttttaaaatattttaaatcaattttttttttttttttgtttagaatttgttaccatttgtttgtcttgttcttttgtacaaagtgataatgtaatctctctggttttaccaatgttataagtcttgtttggttgttttttgtatctgttatcgctaccatggctacaacatggacaaatgaatttagtttagtatatcagtatatgaacataacgttagaagacgatgatgatggagtcataagatatggtcatgggtccgaatgacctatcggagattgatgactgttggtgcttggttgggcattttctcacgaatcgctcactcgattttgatgcaatgcggcataagatggcatcactgtggagcc

SEQ ID NO: 201089 - DNA, 566 bp, Cannabis indica
ttttatttttattttttttcatattatttttagcattcttacttctaaaatcactcgaatagtatagcgtcttcaaaaatactataattatgatttgagacattattatttaattttatttttattaaaaaaataataatagcatcaatactactagcatttacacatattcttataactagaatagtattcttttctctttaatggtataacatctcaatattttactactttatttatccacctaagcaagcatccggagatggtctaacttgaaatgtgacttcttagccctacactgaatactatattgaaatatgtttacttattattttatattttatgtatatactactaataatttaatatgtatatattttttttacaatttcaaagtcctcaatgttaggaaacgtacagcttgctcgtcttacctcaagtcagttctattttcacaatattaagtcttttttgcctctataattaaaagtgtcttgtaaaataactgaaaattttaccatacaccttttatagtcatgtagttatttaaaaaagtttgtaaaatt

SEQ ID NO: 201090 - DNA, 740 bp, Cannabis indica
agttttcttcttagttatgttctcatatcttcctctacatagccaagccttaggttttaggtttctctttttctaataaacctttgttaaattaattaatcaaataaataaaaagtaaattagaccaaaaaatcaattattggccgcctatcacatgaattaggtcccattggattttcgctatttgttttaaataacatcttaatttaaaataaatttgtttttctgatattatggtggtcaggcagcgtgttccgttgataattatgaaagtacaagattaagattggtgtttggggcttgtttcgaaagtcttccacacaaagttgatagtgaggctgtgaattttgctggtgatagcagcgacacaaggtggttctataagaagggagaccacgagtatgcggtccttcgtttcatgggaccattatcagggtatcaacccaagtcccacatcggaagaataagcaagatattccttgaatataaatgtttaagctactccattggtatgaggaattttgagaaagtgcccaaaaataacatcttgagggcttagtcccaaagcgaaaaatatcataatggcaatgtgcgagttaaggtggggtggcagcccaagaaggtttaataacgggtgacaacacataattacacttacataagtaatgtcacaaaattttgtttacaaagtatatttagatacaataaattaaacaattttacaaaacaaaccatagtga

SEQ ID NO: 201091 - DNA, 589 bp, Cannabis indica
ttttttttttaagagtatttggttcaatccttggttatcccaattcttaataccctcaccactagtccaattagaataattttattagtaaattttcaatacaaaaaagaaaatagttcaattcaagcaaagtttaaaagttcaaagataatttttttaatgggttggtaaaccttttgataaaatcaaatatgtataacacatgacttaaaagtcctatacgattgttttctgtttttggcaaatcctttataattttttaatggaaagagttgcaggcatttaacgtagttaaagtcttcacttcaagttagttacttgctgaaatgattatatgatgacagtattttatggtggcttgtgagaatttcatatatattttcagatatagttgtaaataggtacatgcatgttgtgcctgtttggcttatattttaaaaagtatgtaataatataggtcgtgtcgtgttgatcggcacataaaaaaaatataaaaaaaaaatataaatcttgccacaggactagcttgggccattacacaagacttcatataaaggaaagcatataataaatttaggtggcatcttag

SEQ ID NO: 201092 - DNA, 773 bp, Cannabis indica
ataaatagacgactcgaagcttaagcaatatcagtgaaaagcgataatggagaataagaagcaagaagaacggagcagtgagaaaaaaacagtgaatgataatattataaatgatgatgatgataagagaaagagtgagaaattagaagggctggcgatggaggatagtccgtacttgcagtacaaagacttggaggattacaagatgaaagcgtacggcgcccaaggacatctggagcccgtggccggccgcggtgccggagcctcaaccgatgccccgacttctcagactaatcataataaagcttccgcaactgataccatcaaccgccttggggttccctagctagcttgctatagtagtcaattaatataattaattgtatttcatctttattattagtttttgcatgatatgattttacaagcacttttcttaactacataataattaataatacaatagtattatttaatatcatgcaataatatatcgtaatgaagactcttgtctcccacgccaagttaattcttatatattatgtaattttaaataatatataattcttaattttatggtatcagtttattgtctcagtaactaaaatttatacaattattcattcaaaaaaaaaaattatacaattatgggatattaaattttgaggtttaaatagtgtaagcttgataattttaaccttaacgatcaatgtaattttctgtcagctttttaaaaatctattcgctacaaaaattgtgactaaagataaaaa

SEQ ID NO: 201093 - DNA, 731 bp, Cannabis indica
ttttttttatttttttattattagaatttgggataaaataaattaggtttcatctaaaaaccaattgataatgggaggaatagcccattcatcttataatatacgataatttatttacacacattagcaatgtgggactaactctaatacaccctcctcacgtttgagcttagaatgtgtgggtataacgaacggcctttaaatgaccacagggctaaatgtgacatttgaaagaatcccacaagaccaaatatcggaaaatttgtgggtgtacacgtcgggaaatttgagaattttaaaataggtcaaagaccccaaaattagaaattggcacacattggctaaaaggtcccaaatagaggttaaaggggagacatcagaagtatatatctttttgcactgatagcacttctcacaacagatcacaaacgggtttttagaccgatgacactttgggctcacaacggatcacaagtggctctgataccatgttagaatttggatgagatgaatgagattctatctcaaaatcaattggcaatggaaggagtagtccattcatcttatatatgacaatttattttcactcattagcaatgtgatagtaactctaatatttttagaaaagtactatgggttttcatactttttgtaaatatgattttttttttcaaaaatgtcatttataagaaaactaaagaaaaagtcaaaaaatatgaaaaaaatcaaat

SEQ ID NO: 201094 - DNA, 701 bp, Cannabis indica
tgttcatatggtactaatttcatatcatctcatccttttcgggtctaaaagtaatctcgagtatcatcgaaggacaattaaaacatatcgagttttctctttacgaaaaatccttaaactcgtcatgttatgttaaaccaaatagtttcattttcattttagaaaggaactaaaagtgagtaatttatggtaccctaagttttaaattcaaatttaattacttaattacatataaatgactatagatttacctaatgaacattattaagaacataaaaatataccttaagaaaaatataccccttttattataatgtatagaaagataattgtagaggtgattttgcatatagaaaacaaatgaaatctaaagatattatatccaaagaatagagactatagaagaaaattcaaaaagtgacaaaaaaacataaaataatatcaattttggaatttctttgcttgaagattttggtgggtttccaaattaagtgaagcctgacaatgttcagtattgttttggccactatttattaatttttaataagaataaaaaaattaaaaacatatttgattttgcatgatatgatctattaattcaaatagactaacacattcacaaatcacatgacaactcaatgcacaactagggaaaaacattaaaacattaatatataggacaaaagatgcattaatgacat

SEQ ID NO: 201095 - DNA, 938 bp, Cannabis indica
gatcattccatcccgaggcatcattctctgttaaatcctccaaatacacaggagacttaaccaacgggttgaggtggccttcatgcacaataatactatccccgcatttccaatggtggctccaaaggttaagagaagaattctgaccaataatccacacactattagaagcaataaaatcccgagtggcccaaatgcctctcgccaccggagaagccttggcaggaagaatagaagaaaggaagccagaatgtttacaatacttggcattaataactgaagtccataaggacatagagcccgaggccaaagaccaccccagtttagctatcaaacagaaattaatgtccctggatcgtctgaatcccaacccccacaaaacttgggtttacagagactatcccaagcctttagagaaagatatctgccctctttacattgccccgtccaccagaatttcctggaaatcgaatcgatgcgatcagtaatctttcgggggactaaaaaggttgacatagtgtagatagggattgaagccaggacacttttgatcaacgtcatccgagcggcctgggatagaagattagccctccaaccttcaaaccgagaggaaatcttatcaataatgaactcaaagtcagagcttcgacgaccattgaagagaatcggattacctagaaatttttcatcacccgacatcacgtcgaaacccaggttctgcataaaatcttcacggaaattctcagaacagttctttgagaagaacaacttagatttggatacatttattctctgccctgaccaacgacaataagtatcaatagcttgaataaccgaatcacggttgcgatgatccgccttaaggaatataaggagatcatcagcgtacatcaggtgggatacagatggcccctcacgagagaaggagaagccacaaa

SEQ ID NO: 201096 - DNA, 541 bp, Cannabis indica
atgagtttgaatatcttaaatatttatttgtagtaaagtaaattttgtggttagctgctattggatgggtaataattttatatttgtcatgttttttttgttaattgagaggtgatttattaaattagtaaatattgtataaataaaggatattctgcatgctgaaatttttaatatttatatttttgtatacttattacttaattaaattgaaaaattttaaaaactttgatagattgatatatttcacgataaaattatatgaaattttataaaagtaattgtttgacagattcctcgtaactttgtcaaacaataataataaaatgtatatgtattaaaaatataaccaatacacagtgtatcaatttatacatttatcggttcaataatttttccactaataatatgtggacctactattattactacatgacttttctatgaaatatggtgtgaacgcattgaaaggtcaaagggagatgaactaggatggcaaagagcatctccatgatacgtgccaaaaaagtgatgtattgct

SEQ ID NO: 201097 - DNA, 1649 bp, Cannabis indica
atatttttataagtctgttaatttttttaactaatctattaaataataataaaatgccacatatgtcaatttttcattgatcaaaatcataattttaataaaaataattaaaattgaaaaaaataaactaagaaaattatttaaaatcatatatatatatatatatatcatttcttataaacattcatttatatgtttttctacaggaaagatggtagattgtaccaatgaccattaaaattaatgaaatgtttagaaaatttaatacaaataaatttaaatgataattgtagtatgtatatatgatctatctcatttataattatgataatttgttgtccttttaataatgatctataaataaattaaaggtgtacaactatacatttggatgtgaatctactgagcttgaagattgttactccaaacatttttggttctcaactacataaagtccttgaaatttttgtggttatattccttggtatgataatataatatatatatattatatttatgaataatacataatttttttttattgaaataaatggaaagcgttccttcaaaataaataaataaataaataaatggaaagagtgaagaaaagaaaaaaaagagtaattgaggtccaacaagttcacatagttgcagagtttgtcgtatatatatttatatatttgtcaacacattattattattgtcatatatccaacatcttgttcagtccttcctaagcaatatgactacaatatagttcgcctatatatatagtctatatatactctctttttctcaataataatattaatttatatttcggtaccagtatagaagagaatatagtaaccaacatatttattttattgaaataattaaggtaaatacgaacacgacatgtttattaaacgtatcttgttagaattgttgagttatatctcaaaactaattggcaatgagtggagtagtctatgttcttcaattctctaccatttattttatgtgggacaatacccacaatatatcaaaaactcgaacacaaacacgacacgattaattagcatgtcatatcgcatgacatgataagacgactatctagataaacacgattttttttttaaaaaaaaatattaataaacctatgaaaattaatttgtgttatcgtatcaacataattataacacggcaagattattaaatgcgttgatacgactatgatccgttacgactaaggtaaatacaaatacgacatgattattaaacgtgtcaaaactgaaacacatatatcctttattaaatgtgtcatctaaacctttcaattttgtgtcatttcgagttgtatcattgtatcgtaatccatatgttagaatattttatatacaataatttgatttataaaatataattaattatatttcaattatttgataactaattaagaatattttaattatggtcaccattcaattaccaaatatttcagttaccccatttaattttatttgcttctatctttaaaagcctaatgtatgcaagtctacatatgacctagcattacatttgttttaagaatgttaagaagtattattagattaattaacttaagttagacaactttataattacatacaaagtgatgaaatatcttt

SEQ ID NO: 201098 - DNA, 689 bp, Cannabis indica
tttttttaaaattttacaaggataatatcataactataatgaatattgctataaaaaataaaaaaaaaatattctaacatgtaattttagacgtgaaaattgattaagtggttataataggatattgtaattagtactcctcaaatttattagaccatcaataatatcaacacaattgtcaaaatactaaaaattacaatgtaaaagtaagaaattaaactttatcaatatttttcctaaaagaaaaaaaactttatcaatactttagctttaatttattaaacttaaaataatttcaaaagaaaataaggtatagtttgacaatagatgacttggacccaatcaaatattaaattaagaacattcatagtggatgatccattatcaagctaatggaggaaaatgataaaaaccttctattatattcagtacaacacattcatattgttatatgtactaattgttattattatatattattggatagtgggggcacttttggtggctttacaaattagatggttcttaggagctcaacatgatagtttcataatacctaaatagtgtaagagacacttttttttatctcctctataagatatgtggtttaatttttagtacttgtttataaagcactatgtaatatgatttgtgtataattaaaaataattacaacaatttggttatgt

SEQ ID NO: 201099 - DNA, 591 bp, Cannabis indica
tttttttttttttttttacacgtttttatggtacttgacgttaataaatgtatgccaccacttattggtgtttaaagcctcccctagtattttcttaaaacttttttaggaaaaagcacataataaaaaaatcagtcccaattataaaatcttgcaattttctacaatttcatctatgggccaagcccatactatgtggagggcttacacttgcttttgttgggagaattaacaagggcatttttcgttttattgaaaaaaattaaagtccacttttatatgaataaaaaaataatgtaaaagaatatggagctaaaaaaaataaacaaaatttaaaatatgtgaaagcaaacaaaaaattataagtaaaattggtaaaatttataagaacaaatattactgaaaaagtcgtcagagcaaacatagttgccaaaaaagccattagaattgtcatcattgccgaaaaagacgctgaaaaatccattatcgtcagaaaagttgttagagttttcatcgtcaccgaagttagatgtcggagttggatattataatataagataaacaaataagttacatttatcaactagttaa

SEQ ID NO: 201100 - DNA, 1049 bp, Cannabis indica
atatatattaatatacatacttatttatatatagaaagttagaaactacaaaccaacccaagctagcccttgggtaatctaaattagttgacttaaataagagagaggacaagagtccctatatgggacaaccgtgattcttgacaaatgaacagtattggcattaatttttttgataaaatattatataataattaattaagtttaatattgttgtgagtgacgggccagcataccaaacactaaaaaaaaaaaaaaaaatggtgatcttgatcctacttaaattagggactatgcatatatatatttatatatataatttatatatttttatcttttttgtgatgctctgtgtaatttatatacatatgtaacatgtctttaccaattcacaagtcacgagcagacgaactaataaaccctttttattttaaagaggcacaagattcttgattcgtcgaagttgactactttgtccctgcagttatttaattataactacgaaagattctttaacatattaactttttgtagttactactaaaaatgaactattattcttttaggtttcacatcaaaattatgagaaatgttgttaaaatatatcattttaatattggattcgacgtattttaatttaataaataatataaattttttttctaattaactatttataaaatgttgcttagtaattaattcttcataattaaattaaacaataatattttatttttctgccaatttcctccaggtgactattatttatataagtacttttctatgagttgaagattatttatcaattgttattaagtaatttaaaaaatttaatactacacagcggttttttatattatttattacattaaaatatataaaatttgatattaaaaatgcactaatcataatatgtcactttttgtggtacttgagactttaaagtttctcttagcatttttttcattatttatatatataggggacatgttccttagacacaaaaattttacacaaatttatacactagttttattctatgggatcaa

SEQ ID NO: 201101 - DNA, 1167 bp, Cannabis indica
gtattagtgatactttagcatttaccacgaggtggtatttttgtaatttggtttagtaatatttttataaagtttagtatattaaattatgtggaacctaatacttaattgcatcactagcaatgtaataccttaagtaatattatgcaccactaatggagcgatatggtttctaagtacggatatttccaactcaaaaaactagaatacattttaacaattataaaagaatactaatgaaaggagaagagaggcgtaagaagagcagtttttattaggtactagtgttacctagcattactacgaggtaatattttgtgattggttagcgatattttataaaagataacactgaattatatagaactcaatacttaattgcaccattgatatgatcttaggtggtgttaggcattatatggtgtcgagtactgttttttccaactcaaaaactatttttaacaattataaaagaataataatgaaaggagaagataggtgtgaaaaatatggtgtcttttagttcttggcatgatctaggaagatgtatatggctgtatttatatatgtatatatatgttatatgactttacagctcacttgggttttttgcttactgttaaaactcttaagtttgcatgtgggtgagtctcatttttcgaaacaatttggaattttgtcatgttttgttgctctgtttttttctttttcatgaaagacaactctcatttttacctcaaagtctatgctgtggaaggatttttaggagtcttaaatgggaccccataagctcttcattatgtttttttagtgaaaaaaacaattgacattattaaggttaagtgtcatttctgaaggtgtaaaacagtacaatcttgtggaaagggatactcttacttacccaagaactctagtgtgtttttgtctgttgaaggttttttgatttacttatttccatattttatggaatagattctttttaagacctcttttcagtcatggtcatcactgaaattcccctatttcaggttatgattcaacttttgaggtaactaataaatagtcattgatgagatgtcgttttcatcctttgcttaaaaattcatttgtaaaataactttgaattcaaatatataaatattagatgtattctataccacacccttt

SEQ ID NO: 201102 - DNA, 509 bp, Cannabis indica
tagaaatatatttttgaattaattaataagccatttttacaaaaaagaaaattatttacctcctaagaccataatgataatgtaaattttgttctaaatttaactcaagaataaataaatattatatttggcttaaattttacaattatagttcaatccactaaaagtaaaacaaactttattttcatagaaatttgtaaaaaaatcactcaattaaaacattaaatttttattaaaaatatattaaaactatattaatatgtaaatgaaagtattaaaaaattattaattatattaatcagtgacaaaaaaataaataaaaaagtaatacttattatagtgtaaaatttgatccatgctatattctctctactaaatttggttagtccaaatcatacaccacctttaaaattaaattttataaatatgctaaaaatatatatacatatacaccacatgtaatataagatgcactaaggatatcataagaaaactcacaacaaaaataa

SEQ ID NO: 201103 - DNA, 882 bp, Cannabis indica
taaccaactacaccacgacaccagtttgttatttaaatttgtttttattaaatactacaataatattgacatcctttattattttattgcgtatgattacaaacaacgcaaaaaaaggccgtactttgaattttgaaagcaaggatttttatttatttattattatttttctaaaaaaagatgaaattttattgggtagtacagctgagcatagattagcggcaagtttgttgggagtcttgttttatttgactttacaacgcatatatagagttaaaaatctctcaaaatctacgctgccaaacacgacttattaggtgtaaacacaaacacactttttcacacctttgtttctctttttcttcttcccactataaatacagaaccataggaaaatgccttcgatttcttaatttcttctctcgccgatctcttcttacatttaccggaatggcttcctccaccgtcaacagatggttaagacctgaggtactactttctttatctagattaacaaacaatatataatactagattaatcttaagaatatgagtattatatacattgattcactgcttctggatctgacgatggtctcttagtctccgacttttagatctataattcacatgttatgtttttgtaaatcgaatggtcatttatttttaattttattcaaacgaataaagatattatgattttttttggggattaatttagaatgtataatttaatgatggttgagtttggggatttgattaggtgtatccattgttcgcggcggtgggagtagctgttggtatctgtggtatgcaactcgtgagaaacatatgcactaaccctgaagtcaggtacctctctccactaccttcctctttctc

SEQ ID NO: 201104 - DNA, 1389 bp, Cannabis indica
accttacaaaaaactaaattaaatgcttgaacatgtgaagatcctgctaaatatagtagagttgaccaaaccttttagttgtcccaatcttcaatctctgagaaggatcctgaatgtagcaagtgttagatgtgaataatacattattggtgttgtcatctattagaatgctaactaatagtaagtttaatttgaattaaggcagagataaaatattataaagtgttatagcagagtttagtatgacagtgcctaagagttcaatttgaactgttgtagcatttggtaatgtgacagatttatttgtaatggatttgtgtattgagaaaaaaaatctaatattgcaaaaaaaaagtggtgagtatcaccactatctataatctaagaagtaggagataaagggtcaaggatacccgaaaaattattaatggttggaccatctaatgtggaagcatcatgaccaggctgtagttgttgactgatcatggagatcaattgctgacattgagcaggagttaattgaggagtgttttgatcacttggtggaataaagacttgcaaagtttgtgggacattgcgagatgtggatccagtctctggtttttgattgttcaaagcaaaagactcatttgatcttggtttgccataaccaggtaggaagttgtgaagaaagtagcaattatccttataatgacctgacgtttagtagtgagtacaataaggacgatgccttttatttcttgaagtttgattagctatgggattgacatcaaggatagtaggtgttgtagcaacaacaagtggaggtgtaatgcgatttcccaaagttctttatgtttcttggtgaataaacattgaaaaaactttgttaaggggaggacaaggatagataagcaagatttgatcacgaatggcgtgataagatttgttcaatcctttgagaaactacaaaacttgatcttgattttgagttgctgcagcacgagtgcaattaatccaaggcccgagttgattaatctcgtcccacattgttgttaatttggtaaagtatgcactcacaaattcatcaccttgatgagggtaggtcaagattttattgagttcaaagattcttagaccatttccttgattgaatctattgttgagcactgtccacatctcagcagcagtgccaagatacagtatgctacttttgatttcaggagacatagaatgaagaatccatgacataaccatttggttgcaccttgtccaagaactgtgaagagaatcagtagggattggtaggagttttattttgcgtgccaatggagagtttaagtctcatttctatggctaagaattacaatcggtgagaagtagtgttgcgagtgtcatgtaacgtccccg

SEQ ID NO: 201105 - DNA, 752 bp, Cannabis indica
aaatcaactataataaatataaatccaaataattttcaatcaatgatattaattagctatttgactaataaatataaatccaattcaatcaataaattaaaaaattattttaaatgaaactaaatgaaaacataaaactcgaatcactttgtcaaaaaaaaaaaaacataaaaacccgaaattaaagatacaatcccataaattaattcaaaaaattgattccaattacctaaagagattaatatgataataaagataatatatattaatgtatattatacgaaactaatatatttggtatattaaatataataaaattaatgaaaattacaatataaaagttttatatatacatatgtacaataataataacaataatagaaagccatcgctgagttgaaagaggatgatgaggaaaagaagatgcaagaggaaatggggtataaagcggcgtcgtttttaagaaatagtttcgcgtggtgggatgacccaatagaggagatgggctatgaagagttgaagaatcacttggctttgttgattgaccttcgcaataaggtccatgccgccatggccgcccatgcaaacaagctttcggaagcttcgaattgaagacatagttttgttttgggtaaacagcggcataagtatttaaaatttcatgtttattgttttaatattgaaacttgtattctaaatgttcttttaataaatttcaaatgaagtgttattattattatagtagtgttaat

SEQ ID NO: 201106 - DNA, 957 bp, Cannabis indica
taattatactaatagcaataataaaaaagaaaaatactaagcaattctcattttaattagtggtttttgttcttttgttaaaaagaagatttgtgtattaatgagtttgattatgcctttaatataatcagagaatatctacttttgatttcaatcactataaaatctattcaaatcgctaaaattagtgaaaatttgtagtttttgcctttaagtttgtaaatatattgttatttaaaaaaggaaagaaaaaaaaaacaattatacttttttttaataccacaaacaattatacttaactaacctattaattaatattgaccttttgtgaatatttgacaaaaatagtcagaactccaagaaaatattaacatacattataaaattttttttaactgcattataaaaatgtttgaatttcataacgtcattaggttttaattagagatccgttatgtattttgtttttgttttttttttaagggtttaattataaattatatttattccaaaaatatattattgttttttttaatacaaaaagttcaaacaaaataatatagctagaatcattcaaaaaaaaaatatatatagttagaaaaattattgactacattattcatcaataaagaatagtcaccctagctaagattacttaaaacactctataaatttaatccaaaaaaaaaaaaatttcaatttttatacttcaaaatagtttttttttactattttcacggaattctacatagaaatttctattgcaactagcgctgcagcctaaattgcaacaaaaaattcgtatagaaactctcattgcaactagctctgcaaccacattagaaactcaaaccataaaatttaaagaaaaaaaatttaaaaaaaaataaatatacgaaataattcttaaaaaaaaaaaaaaaaatcaaaagctaaataataaaatcttaacaaatt

SEQ ID NO: 201107 - DNA, 1853 bp, Cannabis indica
attatattaattctatctctcattgttatatattataagtaattgtttgtttccatctcatccacttgttacttctctcctttggtcccaacccctagaagattggatcaagatcgattgtgacgttaaggtggggaatgaggctatgtgtgtggtgtcgttagctagagatcacctgggattggttttgtgggtggctaccaacaggttcagcttttctggcccattgatcggcgaggttgtggcttgtttgttattcatggagacggatggtggcttcttggaagcatctttttgtgctaattggaagcaactctgagacagttatcaaaacgctgaagggatcctattctagttggggtattgataaatatgtgcatcaatataatagactctcaaatttatttttgggttgaaatatctcttttatttttaaactttgtaattttgcgacctataatatggctaagtgagttttttcccaaaatataattcttatagtttaattatcaacaataccagtaacgattattttaaatgactatgagatcttgtttttttttcttgacattggggaggggttttgaacttgcgacctaccctttatgaaaagtgtggaaccactaagctatgtaatagccaatttaaaaaaaaaaaagtcccttaactattttcttttgcgatttacaccctagttttctaatttgtctacataacttgcttgctctttttttttagggtaacttgcttgctcttttggtttaaaccaaaaaaaaaaaaaaagaaatgatcaagatgagctagttcatcatatatgtgtcattgttgcaaatcttataggacaagtgggctataatgttgcttgttctcttggtaatggctgaacagatcacatgtatataaatgtctcaattacaacttaactttcataaattgacttagaagacaatgccatgtgaacttcaaatacttacgtctcttgcaaatttttcaaaccttatcaaatgtctttagaaccacttatttaacaagccttagataggtatgcattccatactcaatcatcaagttctcacattctctactacaaaatattttagtaaactctaatagtaatatttcttctaaagagaaaaacacacaaaggaagatcaacatggcctttggattatctggctttgttcagggtaagaaggctcttcgaatatcgctttcaggcatcaaagaagcaactttgaagtcttcaaccactccaaaacatctcagttgaactgataactgtaatttgtagtgttgacatagttagattcacagaaaacaattttgtagaacacatacttttacactttttcttagaaaaaggttgcgaaactagtacatagaaatgactcattttattaaaacttgttcatatttaaattaaattccatttttcttgctgccatatctttttctaatcaatgtcactctttgccaacttcaaagctcagctcactggcctttatttgagaagaattaagtaaaaaataatattactcaatcactcacaagcattgcttgtactgagatctgttgaaatgaagaaactgattttgatgggtgctacaactttcttttctttcttttttggacatgtgcttctattttgtttgttactacataacttagctttcatcttctattatattttgagttgtattttcattgcagggactctttaggaacaaactcacaatatgtatttcatttcccttgggagtagcttctaccaattagaaccgaaattaattagtttaacgagacatggggtcaaaaatgagcttgcaataaattttattaccagagactaatcc

SEQ ID NO: 201108 - DNA, 766 bp, Cannabis indica
atccctaggaagtggaagtccacccagacactaggatccacagaatttcagggaagaaaagaagcaccataatctgcataacagtaaaaaaattatataaatgtaatgtgtaatgttaaatagattatagttgtggaccttatcattacgggtttagtggaaattgaaactgctggtagccacagatgagagtgtacccaaatggtctttagacacattcgtagcacactggtctcgatgaccactttgacatcacagttcactttgatcttatctgtaggaggtggagtccacccaggcataggatccacataatctcgagaaaaaaaataagcaccataatctgcataacagtaagaaatcatattaatataatatgtaatgttaaataaattattattgtagaccttattattacgggcttgctaaatcgtgtcagccacaataaaagtataaaaattagatgagattgtatatctactttactttacttgttttaatttatacctttatttttatattcataaattatgcactagatagatggtaaaatatattagacaactcattcataaaactagatacattttaatgaaatttaatatgaaaatatttttaattaatgaatagaaaaagaaatattcctcatttcacccgatcccacataccagccctagattccacctggaaaaataactcatgggaaagatcactgtaaccaaactggctcaaataaaaattatttcgcccaccgtggggctcgaac

SEQ ID NO: 201109 - DNA, 768 bp, Cannabis indica
aataattcaataaaatattatttttactgttttagttgaatgattactctattttaaaataaaattcaaaatcattccaatataatataagaaaaaatttaataattattttatttatttaaattttatttctattcattcttatttttatatttttatttctttcaaccaaatactaccttagtgtttaagtaggaaattagaacaccctacctttcattaaaaaaatacaacatcttattattatttaagagtactagtacaaggttaatacactttggacaatactaacttttacaaacttacacactttgaacaattttgcttaaactttccctttagacacacaccatacttttattttatttatagactacacaggaaatctctaaatctttctagaattttcttactttccaaagttgtaaacaagtttctactactatctatagctaatgtaagtaattctatatttaaaatttaatagaatgttctaaattttctcctaatactttcatagaatattttaaagtattctagatttggtaataatttttttttgaacaaaaattgcaatttttattaaagcaaatcagctaacaaaatagcttcgaccgtataagattaatacaatctgaaacaataagaccaagaggagaaagaatttggctcttgctattgatagcattaaccaacaagagacaatccgactccataatcaccgctgtaggacgaaaatccacagcagcactgccttcttcccagcat

SEQ ID NO: 201110 - DNA, 1071 bp, Cannabis indica
gaagttgctgaaataacaaagatgtataatgtttgatgtttttggttgttagttataatgaggtttcatcttaaatttgatattaagtaacgaatattcttataaatgaattgaatattctcacattattcatatgggacattatactctaaaattagtgaacttggttgagacatctattgttgtaaatccaagaaggattgtgcttgttgttaattcttgctcctggatctctgacgaaacacactttatatttccgaaaaagtattgataattgagttattcatacgagaaaaaaaatcaagctcctacgtataattatttagccaactactttttcattaaaaaaccttgaaatgaaactaagatcattctgcttttttatctttttcatattctaatcatgtgcaaattgaatttaaagcgagataacgcctacttgtgataataaggcaattctgagatgaattgtacagtaagttgagaagaaagatgattgaagaatatatacgaacgagtatttgattttgtatgttaaaactgatatgtgcaagtgtatatgaaagctggttcccagacttttcgattgctatttgaattttcgtaggcctaagtttctacataagtaagtactattgtctttatactgctagctagttgttgagaatgtttagcagagaaactctagttttgatcaaacgtctgtaaagtctctcaactccttgttcaagatcttggatacaagactccactgattgaagctcattttgtacattgatctcttcaactttgttatcggttttcttaatcttattgctgatgaggctggccaaggcaccatctgcactagcgaattcgttacattcgatgactccctcgcaagctactcttctggacttcatcaccttggaaactaatgaccagctgtttgccttggatgactttgattcagaaacaaagagaccattgattcaaaaacgctgaaggtgatcaactcaacttctctcaatatgctaacgatttcagcagtttgctcttccttcttagggatgaagtactgaatttggattt

SEQ ID NO: 201111 - DNA, 521 bp, Cannabis indica
atttcagatggggagaagaaagtagctaaacaaataatagaagcaatagatgatgagaataattcgatcactttcaaagtgattgaaggtgatctaatggaacatttcaagagcttcaaagcaacactaaaagtgactcctaaaggtgatggaagcgttgtccattggtttttagaatatgagaagctccatgatgaaattatagacccacatacattgcttcagcttgcaattgatttgtccaaagatcttgaatctcaccttcttcaggcataaaaaatattaaataataatctttaattaatatgtgtgtaataatataaatatatatacccatatatatatatatatattatatgagcttggtttgtaataattaatactcaatattcatgatgagagtaaagattgtaataataagtacgtagcctagccagtttcgtacgtgtatacagtgagatttttagtttttatgattgtactgaacgtgtgtatttttgaattttataattaattaatga

SEQ ID NO: 201112 - DNA, 853 bp, Cannabis indica
aatttagcaaaatagctctccttccaagaaaagttataaaaccccaccttcttttagaacgactttataaataaataaaaatactttttttttttacccaaatgctttcaaaaaaaaaattaattgtacaagttaaaaaagaacttcaaaaagcttactctaatgcacgaagggcacgacattagcaagttctcattcctgttaaagattttaatctccatccctattcaatctttatatcttctcatcgaaatcgacataaaatcccctaacgagacagggatagagtaaaaaataccttaatataaaaaaaaaatttaatattaaaaataactcttttactttatatgcgtgtgaaacatattaaatattatttttatattataaattattttttaatatttttcaaaaatttaccaaaaattttaaataataaatataatatacatgactaaaaaaatttcttaaatggctaagccatgcattattacactatttttttctttttcatgggggtgcataaccaccatatattatatattataataaaaggaacatgtatgatttgaaaaaaaaaatgtatgaattaaatctgtagtaattttattaaattattatatattttttttaacattctcgtctctgtaatttacctgaatagggagatttgaacaagagtgttcggccaccacatatgcgacggctccaccacatatttcctcaacagccccgcccaaccgtatcctaaaacctgttaatattaatatttccaatataagaaaacaacctaataacaattattaattaaattcactaactttataccattgatatataattaaaaaataaaata

SEQ ID NO: 201113 - DNA, 853 bp, Cannabis indica
atatatatatatatatgatgatcgatctcgtaaaagtagagagatggatggagaatattggcaatattaattaatggacttattattataatatgtatgttaaattgttaatgttagtaataataagttattagcttaattaattagtctctccagtccacgtgcagctgggttttgtaagctaaaatggtcagttaggtctgaaagaaggcgatcgatcaaaacctaaaacgttaacatccataagtacgtactacacatccatcacacacacttcatttttaaaaaataaataaataaataaatcaagttatataaaataaaaaaagtctaacaagatataccaacctccctctcctttaccactataaatatatatatatatatatatatatttttttttaaaaaaaaattaagtaacaatgataattagttaaaagaattattacatacatctatctatatagtatttatagtatttattaatattggataaaaaaaaatatattcatgtagagagggagagagaggtgggttataaagtagacgttgtaggttagaaacttagaagatgttgaaagcagaacaatatttcacctcaccaagcaacgtcccttaatttttttctttcttttcgtttttttttggtttctttttgtcacatatatatatatattaggtattataatttataattataagaaactagctagggcgttttgattgattttttaattatgttattattgttagccaaaacgttgcatcagtcgcaggtgtaaggtctgtccaaaccctttccactcaatctctaacggaaaacactttcccatcttctctttctttctctctc

SEQ ID NO: 201114 - DNA, 2099 bp, Cannabis indica
tttgtcgtgtgtcttgtgtgcctcttttactaccctattttggttcttttgttttaacctgtggatcttcattgtctctcctttttgtttcctgagtagttgggtttgttacttttttacttgtccattcttttggtttggctattccttttagtcgtatctttgttgtgtctgtctttattgttggtatgtggggttggtgggtgttatgtttcttttcacgtgttttgggtatggtcttcgtttggtggttgttttttcatgatgaaggtagttaatgtgcaaccaattgttaataggggcagatgcatttctttgagtgaggcttctatctcactagtccttagagcttcaactacccaagtcttatctaaattctactttattggtaaggtgttgttttccaaacttattgaggaaagagaggtggaaagcttttgtgcgaatctacggaagactcaagtgaaggttgacaccctattttttggatgagccttttctaacatctttcattttggcttcataaaggtggtagacaggaaatgggttcttgataatggaccttgccgtatcgatcaaaggagaaatcttagtgcttctagcttggccttcttcctttggtactaaggagctttcttttaatactatttgtttttggattcaaatacattacctgctgcttggtttttttccccagagttaattctaatttgttaggagctcaagtgggtaaggtgatttttattgagttggatgagtctaaactggttacttggaataattggatcagagtcgaactagatattaatgtgaataatcttttgtgttgtggatgcttttgttgaacagtgaagacagataggttcaaatcaaatacgaaaaactaggaaacttttgctacctttacagatgtttgggtcagagaggtgattgctctttagtgttgacggtcaccatttaggacgctcggggtatcggtaccctctctttggtccttggctcaactctacttctacttacctaagttgtttctcagggaaattagatgtctccagtaattgggccaaggataaaaagggtaacaagggtgtgcgtaaggagttaaagatggatgggctttcttctttggaaccattgggagggattttgagttttaataatgtggcttcaggcattcatgctcacggattgagaaagggacccatgttaaaagctaccaattgttcatgctatagagcaagcaaggtgtgggttcccaagcccttatttactgtgctgagtagggtctctaatggtgttcatggtttgggtaactactctagaaagccttcactgcattgtggaaagggttctgaagccttgccatttttggttgagaattcaaattttaaatagggtgatgccaactgtgtggaagtgaatgacaaggataaggttgaaaagtctcagccgaaccctaattgtatggttactaggcctaatttaaatttaggtcacgtgggggattttaatcttaacttggctcacatcccaggatagcctcttatctcgggtaaggataatgggccatctacaggtgttttttcaaatgggccgacacttaaaaatcaattaaggatgggcctgagtgctacagtggacgttgctccatataagtttgacccaagtagctcatttatgggccaagacatttatgtacaccttaatgaaaagagatccctgtctaagttctttcaagcccaatagggttatatttaggagctttaagcttatgggtcctctggtcaaataaaagaaaaactttcgatgttgacattggcgcccaaccttcctcagaaataaatgagcaaactacacctgttaagaaagagaatctgttcgaagggttaacaaagtggtcaataattttccccatggaactagaccaatgggtgcggttaatgatgctaagtttaatcaggtatttgatgggtctttggaagaactactggctagcaacgagattgagaaaattgtttgtgctaagaatactaatgtattatctcaacaagttgacaaacaatttctatggggcaatcaactagatttacggcgtggaa

SEQ ID NO: 201115 - DNA, 878 bp, Cannabis indica
acgtgagttgcagtactgttgttactacttgtattagtgactgtggtggttcttgggtcgttgttatatggaggagatgactccattaatggaggtagtaaagaaccataagagcttagtctcaccaaccctgaaatatgagtttttttaccaccacaactcttttgaaagattctgcaaatcacccactcattctgacaaaaaagaaatcatttttattagtacaacaaattaaataatcccataactcaagaaaataaatgaattgaattgtgtgttattattgataatattaccttagtttctcttgagagattataaacagagtattttccttctaatctatattcgtgcataacccaattggatttttctccttttggggctcttcctttgtagaaaacaagagttttcttcatcccaacaagtgtttttcctttgaaaatttctttatcttttcctgtggctttccaataccctgcttctgtagctctattggttcttaaaccagttgggtattttctatccctttgacagaaaaagtaccattctttttcacccattttagctctcccttcattaaacaaaaaaaaggttagattataaagaaaaaagttgttttttttcttgagaaccaaacagcaacagacatggaaaataaaaatacaaaaacaacttacaaggcaaatcccatggctcacacttgttcaaatcaacctcaccaatagctctagctgagaatcgattgttgagaactttgggagataagtagtgagatatgagttcttcatcagtgggatgaaatcgaaatccaggtggtaattccatcaactcatgatcttctttacaaacccctgatttgttttccatttttcttt

SEQ ID NO: 201116 - DNA, 2076 bp, Cannabis indica
tttgttttgttttgttttgtgtacgtattgtttcttatattttcatgtttgaaatttttgggaacgtctgattacagttgttatactgttaaaattttgatagaattaggataaatttcactaaaaatgcataaatattaaaggaaaagtgttagattggggtaagaaaatataagtattttttattgcattttaattttaatattaatgtgtaatttgttactagaaaaattaatatatgtaatgttgtttagttaaagaaaatttttagtataagtttaatagttagaaaaaaaaataagtatttactaatagttcaagtaatgtttaattttaaattttaattttacaaaatttatatgatattggattaattaaatactttgtatttttttttttttttgtgttgatgtatttgcaatatggtacgttattatttataagtttaacgttgcttattcatcaatagattttttagaatgtgcaggtatatcgttaagtctttctttagagcaatactagacgatatttgaagttgagatcttagaatttaaaaagtgtatttcattttgtaaatatttttttacttcatagttgatgatgatagaattagaactgagtataaaattttataagcctaaactagtacactattaattatatttgtgttattaataaatttttatttatgcttgatttatttgacgattataattatgatataaaaaaataaaaaaaaaaatttaaaatttttaaaattttaaaataataaactgtcgggaatgagaaaatggcgacactttcgaaccttcgccaatttttcccattttgcgacggttttagaaaccgacaggaatactttacccaacaagttaaaaccgttgggaaagatcattttttagtagtgtatgctgactaaaaaggttatttctcgctgaatgtgagttatccttcttatccttctttagaggaaaaacgctaagtatagatattcttcttctcgcagtgttctttatattgtagttatttgcgaggtggcataaagggcgagatgggtgaatgtaatcttctccatgtacaattatttgggtcaatgagttacaaactttttgatgtctcatcttgtacgttcttcttatatattctgtttatcttgaggtggacatattgtctcgtcaattatatttgttaatagttattattcttatcttgcatatgcttacgtagtcagcgagtttgaacatttctatcaaattcaattaattggaatgagttaattaaaccgcatttaataatgcaatttagttattgtattctttgagttgattcatattctttttgtaggacatgtgtcaacttctggtgaatagctaaattttaggtataacaattgtctcctaaaaagtattttttaattaaaaagaacttttaaatatctctaggggtataaccgtatttctcctatttaaaaattacatgcttagaatttgggcaattcaaaacttagagacacatcattgttcatttaatgttctgactgttccattcttgcaaagttcccacctgttagatcaaatttcctttgatcgaacggtgacaacctattaggtgtaaatttgaaactacacatcactttcgccatttttagctatcatacctcaagttttttgccaaaatctcaaccaccttctccccaaaacttgcatgacctcgttatcttttacattttttctgtgcatttcatctaagcatacttcgtgttctagaaattatcaagaccctgttttaaaaccttcagagtttcaatcgcgaagtttttctctgcccagaaatttttagtcaaaacagtaagtgatacaccctcttttcttattgatttttccttctgttctcataatttcttttccttagttagtgtctccttatctgcgttgctctgttatttgggtaattttgattttattagtctgaataactctagggctaggaaattttaggttatacacgattcgtagattttttgggttgtacttgtattctgtttttccaaaaattgggatattattagtcataatt

SEQ ID NO: 201117 - DNA, 679 bp, Cannabis indica
aaagtgacacctaatgactaagatacactatacaacattgatgacaagctttactacatgaaacattaatcaagtataatcgagattcgagagcatgcatacaaaaacagactagcccagaacaaacatctcaacacactcaactctgttactagttatacaaagtgttctctcactctcaatagaaagaagaaatttttctaatcctctagtaacaacatctattaatatagccacaagttgtaactagtaacataacaaatgctcaaaagtaaaaaattcaaaaaaaaaaaattataattaatttctctctatttatagaaacataaaatgtgctcccactaagtcaaaagtgatgccttcccttagtatcaggttatattataaataatttattaattattttaattttattttaaattaattacaattgcttaataatattcttcatatatatatatatattgcaaatattaaatcgattaatttttaaacgatttaagaataatgtgacactaatttaatatagttctaaagtaaaaatatagacaaattctgaaaatatatatcttttaagaactattgtatttttagaactaataaaatggatttcaacaaatttaaatagttaaatagacgtttgtaatcatatctgctatactttttcttaaaaaaaaaa

SEQ ID NO: 201118 - DNA, 886 bp, Cannabis indica
tatttaaacttaaaaaaaaaaaagtatctatgagctgagccacaagaacattttccccatctttttcatgtgttccaccaaaatatgtaagttctagaagatgatgacgaagaagctagctagggctttataatagaaaatgacaatgacaatgacatgtgaacaaaacatttcatgcaaagatggttggtttggttactttatttaattcaatttatgaatttcactgctaatttatttatttatgactgatgatcataaattttgtcttcaaccaatgtcatagtaattaagtaaccattttactttaccacaactacaatttgccatcctcataaatttctctagcacagcagtccaccactgccattctcttcatatttactttataccaataaatatttagtgacatattatattaaataataaattatattacatttagattaaggaatatattattttattcattaagatctaaatttttaatataatataagttatattatttaatccgtacttaaccctaaattcaatattaaattgaaccaaatattacaacataaaaaccctctttaacatttctcataagtataactaaattgtttataacatattgcaccttcaagtaaattattgtcattcccgaaatttttgttaccaattcatttatgtaatttgtaaatattttttggtgtcataaacgatgcaaaatgaaaatatttattatttagttttccaaaaacatttttgcatgaaatcactcttcctttatgcattagtatctgaaataaacccatgttattgttaaatgtattaaatttttacaacttttgaatctacaagagatctaatatcattttagttatgtatgaaatttagcata

SEQ ID NO: 201119 - DNA, 646 bp, Cannabis indica
atgctgattaagagcacattgcatttatatcagcaacaattaagaataaaattgttgttgatgatcaagagttcagtagaattctttttaaaacaataatttaacaaataagctttgaacattctaaataaaattatcattttaaataaatcaaatataagtaagaaaaatgtcagtcctggatgtttttttttgaattcctatccaactcattatgtcttccttactgactttcccatcactgtgttctatgaaagaagtgatttactgtacaaataacattttcttgcatcgtgcgtttgtgggaactttgataggataaggtttctagcttaatttagatacagcgcattgttccaaggaacagctatcatatgatgacccaatagtttgtacaacatttggcagaagaggaatgacaagaactttcaagatacgcaaaacaagttggagtatatttgggaaaggctcatgttttgggttgctatttgtcttaagaatgtcaaagaggttgagtgggtcaatatatttctaactggtccaaggttcaagtcaatatcgtataattatatacaaaaattaaaattaatataattctggttttaagaaaaaaaaaacatatcaccccttcgtttaatttcttaag

SEQ ID NO: 201120 - DNA, 831 bp, Cannabis indica
gatgttgtagaatcaatattgagataattgtttctcaccaatttcaatcaaggtattaatgagtataaattgctgtcatttatgcaggggattggattctatattttggatcattggattctttagaagaagcttcaaatacaaggaatgactacacaaacttaaacaattaattagaagtacacattacaagttaaaatagggtaagtatgtatttcagtgccttttatgaatgaatgatttatcttataataaaatttcctactatgattcttgtatttattttattcatctaatagtttagtagtaaagaaaagaaaagtcactattagaaatgactaaataacttaaaaggcacccatagttctgaaacaaaactagtgttttcttttgctcaaatggagacaacaccattattgttgttgtttatcacaaaagccatcttttctctctccatgcgagattcttatagatgactataattttagcaaagtagcaattaaatcaaatatgtccaaagttatggtgttatagtactcatgtatatgtacaaacatgtgtatataggacatgctacatatgctcatattttgctgagcaaaatagagtaggaatgtgcagaacaaatagggatcatacaattatcattccaatttaatgaccattattactacttgttggaaaactctataggttatatatataaacgtatagtatatatacttgtcattattataaccattgacatgcttattatgtattaaattagtgttgtgcaactctttttaattttctttttcctctctaatctagttttgtgtagagtgagag

SEQ ID NO: 201121 - DNA, 851 bp, Cannabis indica
gatagtaatgaaatgaggctgttatcggaggaatttacacaataccaaaactatgcgaatattcaaagatcatttgaacacttgaaaataaatatgtgaatactcacttagaatagcgaatactcaaagaatattctacaaatagtacgtaagaatctatatatatataaagttaaggtataagacagtgacatagtagtttaatattgatttaaatatttttttttcataattttctcattttttactttttgaataggtttataaatattgattgagtaattaattaataagaatagtaatttaattaaaattcaaacttctataaaataatatgtatatatatttgttggtgtgatatttcatcacattgcttaaaaagaatttagataactttataaatatagtaaaatatcataaggttaatttctttatttttttactttttagcctctttgtttgttaatttaataattttattattattattattattatcattttaatatacataaatacatatatattcatctaaagtagttatgggtctcgattgccttttagaaaatttttaatgaactcttttatttaaggggtcacattttactatgggtatgtatactatataatttttttttttctcaaacattttttctttcttaaatttttaatttccaaaattagtccatagtttttatataaccaagatatttttttttaaaaaaaaaaatgtttcacattagtttacttttaaaacccttaaacttggtctacagtaccgtaaagacttagttttgaccaagttaaaagaaacaaaatatatataatataataataagtaagaaacagat

SEQ ID NO: 201122 - DNA, 974 bp, Cannabis indica
ttataacaaccttccgaagtacgagacactgagatgacttgaaagtgtttcaggactattttggaacacgttgtctgtcttgggagagaaaccgagccaatgtgctgaaggaggttttggtttttggagcttaggttatgtggagatgggttcccatcttcctttgagatgctactttgcggagttctgcgcagtagctggagtagctccctaccagtttgttctccaagtgtatcgtttgcttgctgtatggtacatcttgtgtttctagaagaaaaaggcagctccaactccaagagattttgtatttttacaagatcaaagcacaaaatatgagaaaccacaaatggaaagttggtttttataggttggaaaggcattccaaggacttggtatgcctcatcagttccgtgaagtatacgtacaacatccaaaactattggttctatactttcgacttctcactaaaaagagttctgaatctcattcttgactttaataatgcaagtaagagtgtaactgatcacttggcctttttatttccttctaatcatcttctccttgctttatgaattgatcttattcttcccttttatttcttttagattctatccctctgtcgcctttaactctagagttggaggcgaggaaaatcatatgaatcattgtcagccaaagagttacaagttggggagcttgtgactactaaaaatcttcaggaggctggcttgttagctcattactagagcaatcactactataaaaatggtttttctcgatgtttttaaacaatcgttcaagtattcacgtcagtttctataaccgttgcctatatgaccgtcgtaaaatgggaaaaataggcaacagttaaaaactgttgctaatgtggacttcccgacaatttaaaaccgtcacccacaacagggtataggcaacagttttaaaccttgtcatatactataggcgacggtttc

SEQ ID NO: 201123 - DNA, 871 bp, Cannabis indica
ttacttattaatattacttttaaaaatagtattccttgccctctaatatggggatttgaattgcaaaactgagggagttactctatttatagcatataaaggtagtgttcaaagaaaaaaaaagttgggagggtagagaggaatgtgcaagcattgatactggacctaaatgaagtaagaagtttgagtccaaagaaagccaaaactattactaatgtataacttaaattcaaacaaaatttatcattaagtattaatggagaaatatagagagattaaaggagaattaatgggagttttaaagcctaattgtctctctcacaatttgatcttggaaaagtaaaataattaactctcataaaattatgtagaaattagaaaatgaaaaaaaaagagaacattttttatgctatccaaaaagtttcacatttaattttcagttacaagtttaattttttacaggtataatatttaagttatacttttaaaatttttgaaggtacttattattaaatgtcaagtcaattgccacatgataatttgtaattggtctaagttattaaattttttatttttatttaaaaatttatttaaatatattaataaaaaaatgacacgtaaatattaatttgacaattaataacttaatacttagagaagttttaaaactataacttaaactccaaaaatatatattttttttgttgtatttatcatgagaatcacccttctccattctattggaggctagatcaaatggtttgatttgtgagtttgtgaaatgaagatagagatttaatttctttattatatatacaataaaaaaaatcaccagttaaaatttctccagttatttattattattttttta

SEQ ID NO: 201124 - DNA, 1567 bp, Cannabis indica
aaccgaacgtttttttttttaaaaaaaatatgatccaatttattttataaatacattattctatattttacaactataaacatacaaattaattgttcaaaaactaattatcttattattttaactttaatattaataaaataataataatatattattagtaactacaatgcataaaaacaaaaaaaaaaaacttaaatgaattaatatatatgtataacggtgggtttcagttttttcggtcattttattaacaaaaaaaaaaaaaccaaaccgtttaatggcggttttaactgttagcggttttttcagtttttggttccatcaatttcgattctaatggttttcggtaggtcagtttgaacaatttttttcgattttttgaattttcatgctcaatcttagtttcaacccataatcttatttataaggataagataacctgccactttgccacataataatttaattatagtttacttttcataatttatatcaaaaagaaaaaaaaacaatagtgaatctttctttacaattagtttagagatttgataaaatttacactcttttgtaaaatgatattaaaaatatagaattggggtgagagaggctcgaactctcgacctcaggataactcagatagctatgagacctacgcgctagccaactgcgccaccaccccaattttgattatgtttcttaaactttcctattcttctaaaaaagcttttacatatatagttttttctcaaagaaaaaaaggcttttacatgtatatttttcttcttcttaaagttaatttacaatttattaatttgacttttaaagaaaccttttttattctacttattttataagagaacaatattgtgtgttaaatgtggacacatgattagaaaaattattagtcttaacatgccaattttgcataatgtttacacaagagacaaatgttgcatattatgcaatgtgtgattagtaaaaactgcattagaaattaatatttaatcaattgtatgatttaattggtagtcaaaagaggtatgccattattgatggttgtttttgttttatcataataatagtagtaaaatatggtataattaatctagaataaggatctacttttaatattactgataaaggataatgaatttgagttgattgacacataaaaccatatttaataagtaatatctatctttttttttaattaattataaaaaaattaacatcaaaagaaaaaaaagtcaaatgtattaaattcttaattgtaattttactttatgaaaataattaactttctatacatatgttttttgaaatttgtttaatagaccctataaaggattattctagtagattttctatttgttttgacattcaattttttttttagtttaattttttttctataattacgtatgttgtagttatttaagattatttgtcaattttttagattaattctgaatagtttataatgccgaaaataagttttaaataattacttaccacgcgtataagaaaaacagtacgcacgtacaataaaataatgtaaatctta

SEQ ID NO: 201125 - DNA, 678 bp, Cannabis indica
aacttattcttaaaataggtacgaatgaaaaaatatgacagtcaatctagtccttctgattgtacacaagatgttgagatttagatacttcgtgagactcttggagagaaggagcgggtcgcaaattgaatggtcgatcatcaagacggcgctcacaacctactccagctactgaccaacccgatttaaggaaaattgtaactcaaatgcaaagataacttcaggtgatgattcaaataatgacacatgaacaacgtgcacaaatggaggcaacaatgactaaggctggccaaacgcaaccaacgcgcccacaactgtcttactcttatatgcctagagatggatctggttcatcttttcagccaatggattttcagaatcaacagtcgtagcaggctccacttttattccagcaattgttatagtaatcgttagagcagcctcaacaactccctaaacaaatggttcatcaattttaataatttcagatgtttcagacattcatgcaagtgatgtcacagtcgtcatcgccaaaaagcccacaagtaatgatgcagtcgcctcagaactctcaaggctcacagtctcggatgtcacaatgatgccgacacaacaaatgtcacagatcgatgccgcagacttttcagatgacgctgacaccacaagggaaacaatatg

SEQ ID NO: 201126 - DNA, 991 bp, Cannabis indica
attcgcctaattattcattttttgatatagttcaaaataaatataaaaatacatataacttggacaaaagtgatcatctccttatgaaaccttatttaagtatgtaagtcataaccatttttaatgttgccttgacttatgttggtaccagtagtattattcaagcatttgagggagaaaggagagacagatatgtgtttattgagattaaaccaaattcactataacaagtcaaaccgcaatgtttttgtttgatagatagttgattcggtttgttaattgaaaaatatatttttctgattggtttagttaacaattttgaagtgtgaaaccaccaaatcaactatcaaaaatacatttttttttaaagtaactatcaaaaatacaatttgattaaggaagagaaaaaagttcaacaataccacaaaaaaaaaataggtttatatgagatttcttattcgactatacaatagggttggacatttaatccaattatttttttacttaatttggttcaattcaatatttttctctaatctgatctaattagtaattgaatttaaaaaatttaattggatattcaattacacacataatttaatattaacttaaaaacataaaaaaaacctataaattatatataaaccttcatttaagtttaatactacataactataggaataattacataaggcactattttttgtaaaatatttacatttttacgttcaaagaatgttttttttttttttacatttttacggttttctaaaaaataacacgaaaacaacataaaatcaacaagaaaacaacataaaagtaacatcaaaataacatcaaaataacaacaaaaaaacaacaaaaaataacatacatataacaaaaaattaacaacaaatgaacaaaatttcaacataaaaagaccgtattttatgtaaataaaatcaaaaaaatcgtaaaaatgtttaaaattccgtgaaaccgtattttt

SEQ ID NO: 201127 - DNA, 2081 bp, Cannabis indica
gtgatcggtttgatcacatcactaaatgtgtataatatatttaaaacgacataatctaaattaatgaaattattatagtataataataaaagcatctacatattgttaatgaaaagatcatgcatcaaataaaatatataataattcaattgcaaatattttgaactttttttttataatactaaaagggattgagtattattagtgcctagaatttttctcaatgtcatactgttattagtgtaattaaatatcgaatatcatataatttaaaaaaataacttttaaaaaatattgtcaacaaatcattctctaacatcaatgatcggctcacatatatgattataaatataattaactagtttcatgcacattttaaatttctaggtctgaaaattctctcaacacccaagtcacattaactatttcatgcatatcctataaatatatatatatatatatatagatattactagtgtcgaacactttaggtagcgtttcataattataaaaaaattattttttaaaattatatgaaatttaattacacaaataataatattaatactaggctattagctttgtcttttaacaattctatgttatgactacaacgtccgtctctaaaagtattaagcataaaaatcacaatgactacatatgttcttatagtcagaatatttgttgtgactaaaactaaattatatattgacgatttgtatccaaatactatatttttagttacaaataactttagcaaaacatcaatttgcatctccaatacaatgctcttataccatatttttttgctaagtgatcgagttatattttaattttctatcaattatttacattttcattgagatacttgaaaatttgtatctatgttttaattacataaattctagaatttaattcaagatatatacactttgtgattgctaatataaaagtttcctttttgttagttggtattaacacctatgtatgtaagaaaatatagatgacttataaaacttctataatataatttatttcaaaatgttagagcattattattgggcaccagtaatgtctaacacttgttatagatgatatcctataattagttagtgatcctctaaagctatttttttttaagttatatgagatccaatacttatttacactaatagtaatatgaaagtgaggaaggtgttagaccctattaatgtcttttagtatttctcaaaatgttactatagtatactaaatagaagtattcataaatatggtaatttatcatactatacaaccactaattaatttaaactactataattaaacatttatctttagcttcttcatgagaaaaaaataaaacacccagtatagaggtttaaagaggatggtttcattgattttactttggcattcaataaaatttcagctttatctttgtttaatttaaaaaatcgaagataaaagtgaggagctagagtaattttcgaacgcctatgtctttggctatgtttaaatacacgaagacgtacgttggcctcgacgtggaagattaccaaaattatcttaaataattatactaagaaatttaaatagtacctaattgtagtacgttttgctaataactaattgaaaatatgcacaaattttggtagtaaaattattttgataccaaaacttataagcaaaagggacacccaaaatgggttcataaaaaaagagcacacccaccaaaacatatagaataatgtatatatatacaaaagacctaataattattaagtaaatatagattaatgtaaatacaaaagatttaatttaaaataaacaatgttcgtaattgctaaagtaaaagtgaaataagctttattaataagaaatggaggcatacataattagttattgctctctataatattatatagaaaaaatctatagtgtataatcttcttaattataggatgtttaaatagacactctctgacagttttttcgttttttttttcttcataatcatgtacgttgtagtcactcagaacaatctataaattttcagaatatttagaataatttacaatatc

SEQ ID NO: 201128 - DNA, 1725 bp, Cannabis indica
attatttttcgacaaaccaatttagttagtagttttagagtttgattgaagtaattaatagacgtttagaagagtaagattttttttacgagattgagacatttaataaaccttaattcacgagtcaatgtattaatgagagtatttaatatagagagtttttccgaccgatcccctttctttacatcatttggatatttataggctaataatagtgataaaaggtcactattatcgtgtttgtatgcaccatgctttgcacaattttctaaatctgattttagggctgatggcctatttttatgatagattttggctgtctataggcgtttggtgggagttgattttgactcatctcttatttatgacttgatgactcatttatgcagcatcgatcgattgacgtatgaggtcttatgaaatcgtggaatgatgggtttaaaccctcaaacatgtctgtcagcataagttgtcatatactttttctcatatcgcattaaatgtgtatacattattttaatcctcaaacaatgtgttatactttgccaatctttcattaccctcctccgggtcaattccatccgcggagaggaaaaggacaaggatatcatcatccagccaaattatcctggagatgaataatctatcattagttctttggaacaacaaactccgggagtgatatagcaatggattccagtggcgtgggctccatgaccacgtatttttagagaaatcctaggaaacaagcagcataagtactacatgttcttaaaactataattttcattcaatttggtcaacacggactccattttgaatttattaaaagaagagttggaaagcaactcatactacatgtttttgtctagatcaaatgatttagagtctgtggcttactaagacactagtaataacagtctttagactctacttactaactaaattggacagaaattacacttttataaatattaagtacgtatttaagctgctaaaagtgtgtttttgccccttacaaactaaaaaaattaagtatttataatatatttatctaccctatttgttgtctatattggtttaattaaatagattataaatatattaattaattaacctataaatgtgtcaatgattataaataatattatcttaggttgatggataggtgcggccttgggcgtagacgagttaggcttgtatttagagttcttctagctagcttaagaatattaatttttttttatttttaaaaatacatatttttttattaattttaaaaaataccttaattttatctaaataagaatctaaaaatatttctttttcttatgacttactaaattttaaagtacgctgtcttgatggattaataatattaaatataataagtcaaccacttgagtttaacttttgaattttgatacaattatttaattggttagatttaagtttttcaataatattgtaatagtgaaatattgctattacacgctttattaaatattatggtaaattataagtgtttaataatagtttttacattatttattaatttaaaatgtgcaagactcaatatttaacaacttaatagttctccttgttgtaatacgtaactctaaattacaataaaaagatacatatgtataagtacgtaaatttagctcacaaagatacatatgtataattttgtgaagctgacatgataaattacaataaaataat

SEQ ID NO: 201129 - DNA, 970 bp, Cannabis indica
cctcttcagttaatatctttgagtgaataaaatcaatgacctgtcaatctgcttaaaattcttttatgtctatggaaatattatctaacaatgagctgaaatctacttgatgtaatttgacgtatgaactgccattttgtgcagcccagaaggaattgaagcactttgttctgacttggaagtggagcatactgatgtgaggatattgatgcttgcctggtaacaatattttggagtcatttgataaatctcaattctatatgtttactctttggcttatgtgttaaatcttatttggcttgcatttaccaggaaattgaaggctgaaaaacagggatactttatcctggtaacattatctcttcattgttatatattttattattagaggtttccatgctttgtattaattcatttcaccttttatgaccaaagaaaaacaaaaatgcaagtgtacatcaattgtagttgtttacattacagttttaaaaagcttaacaatcttttttgtttccttgaaaagtaagtggtatagaaagatctcttcaaaagattatatagtaactggtgtatatcattgtacctgcacactggcactgtatttgtactttgtagcttttagtttcttgtattcgtgggtttttctttacttaatatgctgaatgaattgctcatcttatacctattaggaagagtggcgtagaggcctcaaatcattaagggctgacactgtaaataaattgaaaaaggcacttccagagctagagaaagaggtatattcttagaattttttcctttgagaatactcttgtgatttggtaactcattacactatgtcatggaaagttcactagaattctgattcatctactgtcttattaaataaaaaggtcaagaggccattgagctttgtggatttctattcttatgcattccgttattgtttaacaggtaatgattttactatggc

SEQ ID NO: 201130 - DNA, 3113 bp, Cannabis indica
tgcctgttagataacatattagtgatggaagtattaatgtacatagagttacactaaatatcgacgaatatgtttgacaaagtactgattggggctattacattggtacaactagagtaccaagtataagataatattatggtcaatagtactatcgtatgaacgttctagactcagtacgcgtgggacgcgagatagggttataattgggtgtatgggtgcctagttataatcttgtttatgttatgttatgattatgcttttcttactcagtctgtcgactcataaatattatttgcatgtgtatgtaaggacatggctaaagctaaatagcagtgagctcgagctaatgaagattctacatatcgaggcgattagacctagagtgtttgatcttcaaagcaacaagctttattttggtagtcgctaggcgacaacttttgtaactaaatattttgtaaaatagttgtatattttaaagatgggatcccatgttatgtaaaatgtttaattaattaggtttaaagtttaattaagaaaattttgaaaattatccacgattttcaataaaccgttgattagcaacggattgcacagttagtatttaaatcacgataacacgcctaatctagtagggtgttataatttggtatcagagccaccaggttatattgtcactatatgtataatcgtcattagagataagctcgactcatgttttagtaagcttcttatgctttaataatttgttttattattaagtgataagaaaagcctgagaagaagcatattagtagcatgataactgaatagccgcatgttttattttctcaagtaagcggtaatttaaatttaatcttgatcgcgatttgaccaggctagctcactgtttcgcaggattttctaatagaatggacgcgaggcggaacacgagaagccagggtaatttgatcgaatcaagtggcagtcagggaattaaattttcccctaatgttagcgatcaaggcagaggcccaagaggtaaagcacccggtcagagtgatgtcaatccaccgcaggctgcccaggattgagagaataggtttttaaaatgcaagccaggattgatgagcaagatgaagagattcagcgtctgagatagcaaggtgctcctgcaatgccttcttgaaatgcctactcctaaggtgaaatggctcttgcccctgtcatgtaagtggggctagttgccattgtcaatcgaatggaaccactctatgaaaggttatgtaagtaagcacctcctatctttctaggaggtctgaacattatgaaagccaagcaatggctaattattattaccaagattttgaattttatgggagtcactagaaatgacagagtggcttatgcaacgttccaattctaggaagatgccctggtttcgtgggacatggtatccctcatccgagatgtcaccggaattacttaggaagaatttcaagagttgtttaatgcaaaatattacaatgaggcagttcgtagtgtcaagagaaaagaatttactcaattgacacaaaaagaaaatatgtcaattacagagaaaatgacacagtttgatagactggctaagttgacctcgagaatagtgtctaactttagtaagaaagaaaagtatctggatgggttgaattccaagattacacatgacctgatgattacaacggatgatgctaccacttatgttaatatggtgggaaaaacactgagggcacaattgagtgtattcaggagtcccaagggactcattgcaatgatccttcaatattacaaattgttgagctattgacccctttaaatctgcatagaatttttcatagccctgtaaaattgccactcagtcaccattaagtacttaatgtcttgtttcattttccttgaatgtcatgaactctgtaacgaccgcttagttttaatattagaattagcatataattaagatttaattttagaattattttatttattatttatgcaattatggagatatattacaattctaggtgttatgatgtatttaaaattttatgattttcatattatatgcccggtaatagtagaacatgacgtatgacctatatagtcacgtagatatttacttaagttattgggataaaacctaagttatttacttactagttaatgctaaatattaagttggtttttttagcaaacactttgaggataaatatcatacttaagaaaaatcaaacccaacctactttctctcactctttgggtcggctgcaacaagaggcaagaaatttaggggttttcttgattaattctgagcaagttgtctcagctagttgaggtaaggctcttgcttcttttatctttgtgtttttaagagaaaaagttagagttcatgactgaatttatagggttttgcttatgtactagctggattattttctttttctgctgatgttttatgatgatttaagttgtttttaagctggtttgggtgttaatttggtgaaagatcaagtttttagctttaaagttcaaacttaagtctttaatggtagatttggattcagagatttatatctatttttattgcttgaaatatgtttattatagcctaattaggtggtttggagagtttggcactatttggggtaaaattgagttgatggtaaagcttttacggaactagttaatcggttcagtcagtcctatagaaccagttaactatttccccagacgaaaccctaaaaaccgattttccattttgggaatctggtttactggttctagcaattttggaatcctagttttttgtggtgtagaaatatttagggtattgccatgctatctattgatagggaaacttctagttttaattttaagtctccgaaaagtgatttagggtctcacttatcagtttttcaaatgttgtgacttaggggcctgtaaatcgtcgagcagcaattttcacttaggtggaccaacacacttggattcagaatcaaggtaagattagaataataatatgcatatataattacatgtttttgaatgcctgttagataacatattagtattggtagtattaatgtacatagagttac

SEQ ID NO: 201131 - DNA, 1352 bp, Cannabis indica
ttttttgattgtgttgcgtatttattagtgtgatatactgaatcgtaaattattgattgtttttgtttcacacaacagttttcttacagcttgattcatttaatatgtagtttattttttaaagtcctattaatttaattttttaataacaaaatatttttaattattttaatatttttaaaagataaatcatatttaacttctaggttgtcaataacttagaatttggaaggggttgttgtcaactattttcgtagtttgagtgtgcttttgcaaacagaaaaattcagaaaacaagagtttaatgtattatagttccgatggaaaacaaacttttgttcaattaacattaattttgttatggttggcttcaatgtttcgatcctttatagttcagcctaaataatagacctagcactactacaaaaacactcataggtgcacggtttattgacacgtgctcctctatggcgttggttatttctataataatcgacgtcgtatgtattatatatacagttggaggattttcgacacccaaccgacggtattagttttattaatttttatacttacggtttttaaaaaaactgcctctaaatgtcaatttcgaattaagcggatattttcatattctttaactttcctttttataaaatgggttgaaaaaatagaagctaaagacccatattgtagtagtgtagcaatatgaacatattttcttaaaaaacgatattatacacaattattattataaatgatacatacacagatattatacataaagatataaactaattgcataccaaattctccactaactttttatttatttattttggcgctgagaacatttcttgtgtattgttctcagtgttatattaatgtttaattatttgaacatgaaaatcacaacaaataatacataaataaaaaagggatcaatctttgtttgccattatagtaatatcataacattaattagagaagcaacttatggagaaacgaaaaaaaagtggtttacaatgctttataagggaaaataaaatataaatgtactacaatgcttactttttaacttttaagataatgaaaaataagttgaattgatcagtatcatattttcgcaaagagatatatgaatatttgagtatataatcacaaacaaatacagatacaataaaattaaagaattgcgaaagcagaaacaataaagtcgaagttggaaaggaaaaaaaaaacaaatggtgcaattgaattaatagaacacgtgcttcaatttcaatattattccatgaactataaaattgagggaaaatattattttgcactttgtgttttgcaaaaattat

SEQ ID NO: 201132 - DNA, 1608 bp, Cannabis indica
tatatatatacctatcatgagcttggagtgaacatacaccatgaacctcctatggttctgggcattccaataatgagagcctcggtgaggagaatagggtggaacatattccccagctattttggattcccgattagcaaggcaaaagaaattcaagtaatctctagggtgactcgaacaaccactttcttcaatagcttctccaatcagtttatacatcatagtcatagtttctctagtccaatacaaaatatcctgaacagactcactctccggcactccttctggccacataggaatcaaaatataaaccgcaaatctctcctttgctctaatcttattcaccactttaagcgcaatctcaactggaattagattagtacatccactgtctctgtttttctcccacaaatgacaccctccaatgaaatattgattctcaatgtatataaacttgtcagctctcctaatagcttccacgtaagcctcgtgaatgctttgctcaacggtcaactttctgaacaattgggttgctgacacgtggtcaattgatcgaaacacttgaactttccagttccttggtcgatgaatatgatcatgatctggggtagtactagtactatttggcgatgagatataattattgtggttgttatcataagtattgttaatgagcttagataatgtacttgtagggaccaataatgaagggtccaactgttttgtccatctttgctcaaaattggttaagatatcccaagcggcttcccctgttaggcaagcgtgagagtcatgccaaggctctcttgggccacctttgtgaaggttggcaccagcaatgtttgtttggtaaaaatcaaagcaatgtgactcggaattgagcgtgcgaaacagtgagtgttgctcggtgtcatagcggccgtcgcagaggtctaatccccctatgaagctcataatttctctatctgtacttgtggaattggacctgttgtctactgtgatggttttttggtggtgggaaaagaatgtggggaacttgttgtgtagtcttggacataatctgcatacaactttggagtttctgaagtaagccaatgcatcttcgtcgtgtgttctcattacccctttgttcttgattagtggtaaggaggtttcatcgtcccaaagcattactcttactgctacgccttcttctgcttttttctttagtaaatctcctagttgtacccctttcgcgtgtggaatatcaacttgataatctctaacctgctcattattatattatgtcaactttagatatgatattgacataaatctcaacacatcaaataatatagggatattttcatttcttgtggttttaaagtacaaatttatatataaaaaaaatatagctctttttcaaaaaaattaaaaaaaaaaaatgagaaaaaccaacactaaaatattaaattgcaaatgaaaatacatcgaatctactaaccaatattaaattgcatcgtaacatgtcatgtaatgttggcatagtgggatactagtatagttaattagcaatattcaataatataggcacacgacaatacatatacatataattttttatagaac

SEQ ID NO: 201133 - DNA, 1219 bp, Cannabis indica
gggtatgactaagttgacattgaacttaaaagtgtgatcttgtacctgaaattacaaagttaattcctatgtattaaagttaaatttcttacaaatattttaaattaattaaagaaccaaaaccataagactttggaaaaagcttatgaacttgtttggaattcttagttgacaacgttttgcaccattctatcaattttttttttaccaaaaccaaaatcggtttgctacaacatttttttttgcaccattgtattaaatttctatttgaagacaatttaataattttagcttgttttgcttttgctctcttagtttttgttttataaattttatatattctcatcactttattttagttgtaacttatttttattgaaatcactttattagtaattatttttataaattaatttctaattttcaatccttgtagagacgatacttgtttgacaatcacctttaaaatatgacaataagatacttaatttttcaatttattccttgtttaacgattgtgtatacttatacattacaattcacaagtgtcttatggatgtgaccactccaaactccacaaaaactaacctttaaaatatgacattgtaggtcatcagacaatccactactatgaaagtagtatttaaaggttgtcgaagaatctcccaacattaccaaaaacttaatctttcccaatgggatatagatatctccagagaagccaaatagtgtgaaagtgcaggaaagaaatttgctaaccaccgaccttgtcaaaggcttttattgaacaagatgtttgcaaaactatcattgtttaccaaaatccttgcaaccttgatagctatttgagtttctattaccaaaagatcatggtgtgagaaatgtatcatctcagcattctcatccgtgaaggcttgtgaggtggggcatttgtgccagattcaaccaaatgttctcatctcatctttgtggtttagggcttgcacgtatttgttctggtcatcctctaaaaatggtgttgaccctttcgtgaactagaagggaacctcctctagcctgatcttgtgctttgggcattactcctagcagaagagtgagcttggcctggcaagtgaccagaaaccataggaggtaccccaataggtagagccctcacatattacttgatgagattatcaatctctggaattggtgacaaataatatgttgggttttatgc

SEQ ID NO: 201134 - DNA, 1476 bp, Cannabis indica
cttaattcaagattcggaccccaaacttggatactttgggacctagacccggatccagacctggagccgggaccgagacccagacccgagacatgaacccaaacccgggacccagatccggacccgaacccatacctggaccgggacccaagacccgaacctagtccggacactgaccccggacccggaccgagaccgggacccggactcggacccggaccgggacacggcactcgggacctagacctgaaccagggcccgggacttgggatcttactcggacccggacccaagactttgactcgaacccggacccaaacttggactcggacccgacccgttgttggtgttggggtagagtttattaaaaatatattatctttacacaatttattaatacatatcaatactaaacataatattgtatttaataatactaatacaaaattaaaatagatataaaattataagttaatattaaaattctttaaaaaaaaagaatcgggtcagatttgatccgatccgagtatcgatctaatctagcggggcggacgggacaaatccttacataatttggatcagttcgaatcatagacgaatcagatccgacccgactcatttacattcttagtaacaaagtaatgttacaataagataatgtactttattgttccaaaagtgaagagaatatatttagaaatggaaaccatagtaaccaacaaaaaagagacctataaggatacctaaatatggacttcaaccactattctattgcatttgttgactgagtttgaggtaaataggatttatgtctcccgaattattactaccacattattgtgtccccaaatttttcattaatgaactggcaacgattaatttgtgtattgaactagaattgaaacccaagacccttgtgacaaaaactcttatttatgtattaagaaaagaaaaactaccaatcatgtgaacatgtttttattattgcaagaaaaattataatcataaacaccaaaaataattaaaaggtaataatataataagttgaagaagtgttctaaattctaataagttgaagaagtgttgtaaattctaatggcctcctccagaagaacttggaccagtagatttgatcccccaaagatcaataacgttctgcacaaagtagtgagcagttgtagttgagtccaccatagctagaggagggccaccaccacacaaacgccgcccttgtacgacaggaaacatcatcaaaacgacgcttaaaacaagagctgttgcaaccaaaacgacatccctcaccactagtcttgccatggcttataataaatatatataaggaaataatagatattatatatattataagctttttcttttcacttatatttattatattgtgtataaatttagagtggcttgtggtatttatagctaaagatagatgtaaaattaatgaaggaagcatgaaagaaa

SEQ ID NO: 201135 - DNA, 1463 bp, Cannabis indica
ggtaataagggcatgtgattatgctacattgcacgcatctaagcttgaaatttgattgactttctttgtatgtgtctttcgttcctttgtgagaggtggctgcaagaatgaaagcaccatatgaattagaaatattagtgtaagacatgaatttttgaatgttgtgaggtgtagaagagtggtcttgtatagtagagtaatattcaaagtctttgagatagcttagacgatgagaagactctgctggatttccttgttgcagtagcagtagtgtgagtgtaaaagggagtgaagttggatgcatgggagggacatcatcagtatctgtgctagctttaggagcatctgatgtgtcatctatacctattaagttatacccatagaaacatgtttgtctaaaggataatcatcaacgtgagtgttagaaacattggtatgaggtaaaaccaattgagaaaaaggatctagatttgtaatgtcaatatttaacttttgaaaagaaaatatgtttccttgaaagatgacatttcgagagataaacaattattttttatatttattgatgtcatatagcttatacacttttatccattggtgatatcctataaagatacaagtgtgtgttctagtagagaacttttgtcgtatgagcagtgagttaaggcaaaagctagacatccaaaggttcttaagtgctcatacttaagacctttgtgacagagaagctcataaggtgttttatttttctaattaggtgcaagaactctgttaatcaaataggcagcaattaatacacactcatccaaaatttaattgttaacttagcttgaaaatagagggccctcgaaacattcagcaaatgttgatgttttctttctacaatggtattttatttgaagttttgacacaaatgaactcagggagaatgtcatatttagaaaagagatttttgaaactaagttttggtgcattgtctaatctgaacttcttaacacacattcaaaatgagtttgaacataggataaaaattgtagattaatattgacaacatctgatttttgttgtaataaataaacttaagtaaaaatgaacaatcatcaaccaaggtgaaaaagtatttgtggttggtgtcagagatgatgtggtaaggtccccaaaaatcacaatttttaacaaattaaaattgtgattagaaaatttatttttctttggaaaaactagtttcttttgtttagaacataacatggtacattcaaggattgttggtatttgaggttcgagaagtcaggtctatacactgtcaaaagtgcttgcaggtacctagaagagctaaaaaatgacttttcaaatgataattcagctagtttttggagaaagatatgggctctaacacacccccaaaggtgagaaattttctatggcgtgttgcatctaatgtgttgcttacttatgttcaattggtc

SEQ ID NO: 201136 - DNA, 305 bp, Cannabis indica
agagagagagagaatgatatagattaagattaaattataaaaatctacaataacaaggaatctgaccacattaaaaaagagtgttcaaagctctattactgcctgaaactacactgtgcaaccataaaacatctattacaatcgttttgcgaatggtcgcagagtgtaaattcaatgtggttattttgcaaattttacaatttcatgttgttagtttggcaaatttccattatagaatggtcccatagtgtaaattcagtggttgttataagagggttccaaatttccaatgtctatcacttcac

SEQ ID NO: 201137 - DNA, 1024 bp, Cannabis indica
gaagaaaattaaaagagactcttctcattacacttgctttggccattgtaagattagtacaacaatttatgagtcaatttcctttcaacttccattggtagacattttcctatccaaatctctaacagcaaaatatatctctatctcaacttgtaaagctacccttataagaaaaaaccttgaaaagctgcatttagaagaaatgccatagatcaaagtgagtcaagaaattctagcaataattgtaatcatctattatatttaacaaaagattataaaacaccctgatgctaaaattgagcatgtgtggtcatcaaatcattagaatttttacaaatacagaaacaaaaactatgatgatggcgcaacaaacaacgaaatgaataaactgagacttgagagagagagagaatgatatagattaagactaaattattaaaattacaaataacaatgaatctaattaacaaataaagaaatgtgttcaaaagctctattactgcctaaaactacacactctgcaaattaacagtctaaatccccatttcagttcacaagcaagaaattccacaaaaattcacattcatcttcagtaagaatctatttagggtcgattagaactaagaagaaatggcagaatactcacatattcgaattaagtaagaaccctaaaaagaaaggggatagtaaaaagagggttttctttaaaacagtttcaaagaacaaaattattaataaaacaacaaaaatgaaagaaacaattacttacctgctttgagtttagggaagaggaactgggaagaaccctaaaaataaagtaattaactttaaaaatcaaaacaaataagaaaaaaaataaagcaattaaccttaaaaattaaaacaaaaaggcagaattgcagcttgacacgtcaactgaaaagtttttttttttaaggaaaaggtagggtcttatctaattagtcgtcatatgaaaataatatatcttatctttttctttgctaaactgaatatatattatctt

SEQ ID NO: 201138 - DNA, 1704 bp, Cannabis indica
atgaaagaaaagaataggttaattttgttatgttcgtaatgcatttatgggacaatattcatgagaatttaatgagaataatgggtgtgcagtgtatatgatgatagtagctaaagtatgtgtgatgaatgggacaatattcattatgttttaaaaaaatttatttctagtgacagcaaaattttttattataaatatgtaacaacttttaatatatatgtttactacataaaggtttattcttagtgacaacgaaatttataatgactgaaaaaaaatataaaaaaaaaaaattatgttattattagtatgtattatcactagctaaaggtattacaagaagttattgtgtctagaacaaaaatagtaacaatttatattttgaagggataattatgtactatttagtcaaagaaaattatttattgctactaaaaagttatcaatataaaattgaaggtgttataaaacagggaattctaattaaaatttaaaatccaagcgtatgtctatgtataaaacaataattaaatatttagttactactttacaaattatgatgagtagttttgatgtaaatttatataaatttagaaaattttacatccatcaataacatgtgagaacataatattaatcatacctgtggggtgagtcgttgagtttctgaagtcttaagatttgttttatagactgatgtccatgggaaacgacgtttgtgaggattatccttagttgtgacataaacaagataatcaccagcaatacaaccactatcctccattcgaataccatcaaaggtcccaaattcatgagcaaaatcaatggtttcgacttcaggataatcactattattatagtgaagagctatgtatagtgtttcgaggttgccttttctttcagatacgtaaaccaagcccgaggagatatcaacatcgttttcgctatctccagaaaggcgtttatgaattgtttgaagagcattagatggaataggtcggccattgtagttataggacacaccatcagtcatgtgaacctcatgaggatttttgttcgatatatattgtgagtatatgtccaatggtaccggggtctataagttgtgaagaaagcgatgctactcttctcattttccatacctattatagtagttcatagtaagaattttgatttattttaactgtttcaataaagatattttattattataaacattctttctgaaagtgtttggatatcattaataaaataaaattgtaaatacattaagaagtagacaaattatttcaatttaaaaaataattttttaaaagtcaatttagagaagctataaatcatagcttcacttctagcttaaaaatgatagtaaagataagaaacaaaacaaaaggtttacttaattgaaaatcaattagtcttctatatcataaatatatttatgtacatgttgtcaatgtagagtaattagttcataaacaaataaattttgtttaggttagagtttttttacttttagagcgttcacatctcatgagctaaacttagttcaaaaggtaaaaatatatatataaaaaaaatgctgttaaaaatgagttccatcaaatgattagaatctcaaaaatgacttaaataagctaattagccaaagacagctaataattatatatatggcaattataagtctaataggtaatgaataat

SEQ ID NO: 201139 - DNA, 1806 bp, Cannabis indica
aaacccataaaagacagggaaagtagttccctatccctattatttttcttactttttccaaattcttttttttttttttttgaatgtggggtctacatactttaattagtctcaactctttgatcgttgttattactaaaaactccagcccacacattatatatacccccatttatactctatcacctttgttttctatatgttacgtctacgagagagaagtagaagggtcagagaaagcttggattactttttttgatctgcaaagttgtttagttcttggtttcgaagagaacccataggagtatatgaaccattgagaaaaaggggtcgagttcgttttaaaagaaggatttggatttgtggcttttattatcgtttaaaaatggctattcaagcgcatttgtatcaggagaatcttgggtttcctctgtttggttcacaggatttgatgatgatgccggttgcggatgttgttcataatggctgtggtgttaatagtaactttggttttaatcagttttgtttcgatattcctcaaaaaaatcatcaacaacaaattatgatgcctgagttgcagaatcttcaaccgagaaacgacaccgtttggttcgatcataacactaaaaacaacactagtaatatgactctgccactcccactcccactccttcaacaatggctttctcccatagtgtaatggatcaagttgagaagcaaagacaagaaatcgatcattatatgaaatttcaggtactaaaactctttcaaattttgtttttttttttctggtgacataatcggtttgtgaccaagttttcaggattgttctctttgtaataagattgtaatgtgttgttgtttatgaattgtttggttacagaatgagaaactgagattattgcttgaagagcaaagaaaacaacaatttttaacgttaataaagaaagttgagcctaaactattgggactactgagatataaggacgaagaactacttcaagcaacgaagagatcaatggagcttgaagatttactgagaaaattagaagctgaaaatcaaatatggcagagactggctcaagagaacgaagccatggttgtatcattgaacaactcactagaggaagcgagagaaagagctatgtgttgtttcaacaatggcgccgaggacgccgagtcttgttgtgacgtgggcatggatgaggaagaagaagaaaacagacaagtagcagacgggagcaaaacgcgacgtaatagtagtaacagaggagaacagagaacacaaaacgatttgtgaaccctttctcgattcttgcccagtgtgtaggacaaccaagaaggctagcatagaggctttaattttctaggctactttcccgggaaaacaagaaagaaaaatgttaaaaaaaaaaagacatagttgattaccattaaggatatggattgcacataatctgatagcactctcttttcgatgcaaggattggtctttttatgtttaaattaaaatattttatttatttattttgctgtttctttttagggactctgaacatggatttgttttgtaccttaaacaaccaaaattaatagccagagttaaatagtacataaaaacagtcatctttacctttcatagagcgtctgtttacagtttcccattactctatttcttttcaaccttttaatttattggtcattaatatcacttatcaaattctatcaactattgttatatttttggcggtattaattatttgattgacagagtcgaggcattgaaagcaatgtcagatgaatttt

SEQ ID NO: 201140 - DNA, 554 bp, Cannabis indica
aattaaaatataaaataattcccaattttgaaaacagatccccccaccctcttttccctcctttcaaatatttttctacacagaaggaaaagaaaaaataaaaacagaaaaatgaacctctcatcacaagcttgaaaccaacactttcgtccgtacaaatcttcgtcttccactgacactgagccctagcgggtttttccggaggtgccgatgcaagacatcatcggatcggttcgccgatccctggtgtttcgaacccaaggcggcggaggagcagccggcgctgaagatggcgtagggttcggtggtttagtcgagaaaattggttccagtattcgtaaatcgagaatcggattgttctctaagccaccgcttcgggcgcttaccccaccgacagcgagggacgacgcgccgccgatccggtggaggaagggtgagttgattggctgcggtgcgtttggtcgagtttatatgggaatgaatctcgactccggtgaacttcttgcagtgaaacaggtctatttttgtctctgattttagtattcataactcta

SEQ ID NO: 201141 - DNA, 1706 bp, Cannabis indica
aataagtccgccgctattgggtttaattgttgtagtgtcaatagtttggagtaatcgaaagttgtgatttattgctctatgtggatgatatgttcatcatgaacaaagataaatcaatgatcaaaagtattaaagccaagcctaagagagaatttgagataaaaaagattggaccagttcaaaagatatttggtattgaagtttcaaggaacaaacataaagggacaattcacttgaagcagtctccatacatcaagaaagctattcaaaagtacgacatggaagatgcaaagagtacatccataccgttgggtggatagttttttttgtcgaatgaacaatgcctgaaaagtgtgaaagagaaagagaaaatgaaggatgtacctatgtagtagtttaggatgtttaatgtatgtaatgaagagcaatagactggacataattaatgttctaagcatcctaacccgattcatgtccaatcttggcatcgaatattggatgactcttaaatggttattaaattacttgaagggcgcttaggattatggtctgacctataatagaaagcaaaaggagaactatagttgaaagggttcgttgatgtttactatgccttgaatatagatactagaaaattaaccacttcctacgtgttcatgacaaactggaactgtatatgttgaaaggctcaattacagtctgtggttgctctttccaccacaaaagtagaatttatggccactatggaagcattcaaggaagctttatggctttgaggaattttgttagaattgaaacaactaagaggaggagtgactgtgtactcgtatagacagtcatccatctatcttttcaagaatctttatcatgaaatatagatataagactctactagattagagagaagatagaataatgattgattgaattagagaatgtcatatcagaagataattctaatgatgttgggactaaggtcttaacagtaaataaattcaagcattgcttagacttgatcaacctcaaaagttagtatactgagatatctgaagcaccaaccatgatggctgcattattttttcatcaattgttaattttaatttgaagaaactagtttgaacttgtggtatagttcctccaaatttaaaagatctccaaaagttactcgttctcatggaaagttagatatcatttggaagggcattcccaaaagtctaacttatctgtccgaaagatgtctcgtggagagatagatgtcattcgaaagggatttcctggaagtctatcttgtccactctagaagttgtctttaagaaagctagtctttctctggaaaggagttctcaatgtctagttgttccctcttggaagggagttctggatagttgactccagctgtctcttttcctatacagtaagtcctttcagtgtatgctttggtctttctttcaggaagcgtacgtctcatctgagagtgctttaactaaagacgatgtgggaatattgttatagagagcttgttaagttttttaactcgtaactaacttaactacttagcatttgcaaccatcaaatttgggatccatatatcctttatatataaataccaccaacacttatgatttttggagtgagatcaacagatgagttttgagaggtaatttcaaaaagagagattaaaaagtagatagagagagagagagaga

SEQ ID NO: 201142 - DNA, 538 bp, Cannabis indica
tcaaacatgccccacttttagataacttctatgatctttttttcttctttttagtttacttttaatttatatatttatttattgtgaatttattataaagttatgtctaaatgctaaccattaagtaaaaggactagaaaatatagttaattatattgttacttcaacacgaggttgtaattaaattctttttatttaaatttttgttttctatattaattttatattattcttatcaccactatttcttttcttcgtgaatgaattcatttataagaactttaaataaaaaaaacaaaccaacaatcataaaatgatcacaattatatattgattaaaaaaaattgaattttttaagagctatgcttttttgtcgcccttaatatcagtactattaggaatgggaagcggatcctctgtctaggatttctgtccattttgctgtccacccaataatactccatgtcattaatgaattaacagcaaaactctaacttaatttttagatattcatcctgttaacttctttgctaatata

SEQ ID NO: 201143 - DNA, 1086 bp, Cannabis indica
aattattttttgtcaaaataaaagctagtaataattggatttagagttgttatgataaaactgtatatattttttatatttgttagtgttaaaattgttttcaagttagctatactaaaaataattatcgaaaattgaactcgagagtactattgtattttaaaaaatacatgatttaatgtgttattttataaaacaaaaagtccaatgaataacttttgtattaccgaattcaaaataatactagtcctttactaaatgctataattctgaccaagccataggagagtgcgtgtatgttggaggtcttgagttcgagtcacaaattatgtatagttgtaatatataaacgcataaatcaaaaaaaaaaaaaaaataccatacttcctgtcaacattaaaatattcaaagataaagagttattcaagttagttatttcaaagataaggttgaaaaattcataagactggacctctctcccaaagaaataagtttggagtagaatgtcaattgaatagtcttaagccaactcaattgaacagtgggtgtcattttcccatgattgtacttgaagactttatagagaaggtggtagtagcaccatgtagtgaactatttatttattttatgaatgtatatgcatatgtatatcgtatgcaaactacccacctaagacagctaatcacaagcagtactagagaccttataaatatcgtgtacgtggatttgcaatatttattcattttgctcaataattgtacacgtttctagagcaataatgtggcatgtactatttatttattttttttggttatcaaagtctttaatatcaaaagtaatgattatcttttgagccacgtagcttttgaggaatattaggatctaatctaaactctaacactatgtttggtagtggagaaaaaaagttaaaaggaaaaagtgaagggaagaagaaaatgttatacgtttgatatgaaagaaaaagggatggagccgtggaggagaaaaatgggtgggagagatttttggataaaacttattgagtttaatttgtacccgactaagtaataagtattatatatatat

SEQ ID NO: 201144 - DNA, 602 bp, Cannabis indica
gatgggagtttttccttgaaggctgcttactgggattataataaatctcggtttgatgaaaaagatgaggcctgtaggcagatttggcaatctaatattcacgaacggttcaaagttttcctttggaaactttgtcaagacgctctgccttttggctctaagctgcagagcttgtttgggaagccccggggcgattgttctctttgtggatgtgagagtggagatgatgtaggacactttgtgtctggatgcccggttactattcgcctttggttttcttcccgatggggtcttcgtcctgatgctctttcgtttcagaatggcagggacttgatttcttggctctcacaacctccttttcaatctctcctccaaccaatggattcggccagatttttcctttatggtgctgtattgtatcataaattttggcttgctcggaatgacgctttccataatggggtgcctgtggatctttcttctttgaaaaagaacattgatcagtgcttcatcgagcatgaacgaactttgcttgtagagggtgacaggcctgaagtctgccgtggtgtgatggagcttagatggggacttcctaggcctgg

SEQ ID NO: 201145 - DNA, 875 bp, Cannabis indica
aaaaaaaattaaattggttaaaaaaagaaggtgaaaacaaaaatttgcaggttgtgattcagagaagcacagcatcttatcttactgcatttggggacaaattcatgcaattgccactttcacatgcaatttcatttcaagtacaaacaaacaaaattccatattcatatctatacaaacaaacaaacaaacctcactacctaaaaattcaacccaaaccaaaaaataaaaacttaatttaataaaaacccatttctcaataaagataaatattcaaccatagatcaagtcaaaacttgataatagctccaagacttttatgtgggtcaaggtgacaaaaacaagacaccataaattttgaaacaacaataagaaaagaaaaaggaaatttcccttctttggttatttaatttcagtaaattcaataaaagtttcaatatttttgacctttttttttaatagcattgatatgaaatattacagtatttagtatttatgagatgacactatataattaattggttatttatttatttaataaaattaaaatatttatatttttgagcaaaaaatatttataatttcttatgtgaataatttaattaaattagcacttaaagagagattatttttattgataggagagaaatttgtaaaaaaaatcaataaatttttattttgtttgtaatatgtaagtgagtagtttgttgtattggtttatgaatgctcgtttgtgtagtatttcaatttgattaataaaatcttctcctttaatcaaaagaaaaaaaaaagtgtaatacgatattaaattacaccaatattaatattatattttataaaattattagacaccataaatgcccgttagcatttct

SEQ ID NO: 201146 - DNA, 1228 bp, Cannabis indica
aatttgttagggctacggtaaatcgaaaggaaatattattttggaccttatgttttgtaaaagttattaattggattttttgttttgttaaattataaaatagatcttgtattttttaaaatagtataaatagaaccttgaactgatcattttttgtcaaaataaaatttaaaaataattcaatttaaaagtgtatgacaaaactgtctacattttctatatttattcatgttaagaatttatcttcaagttggttatattacaaaaaaaaaaagttattaaaaatttagttcaggatcttattttactattttagaaaatataggatccattttatcatttaacaaaatagaagatttctaaaatggtatttaccttaaattaaatgataatttcagtaaaacacacaccgatcatcagatgctctcacatcgatcaattcatattttagtgatcatatataattcacaacaataatatcacatgactaattatattccaaaggcaagattagtcaatatgcgcgtactttggatcatcacacttaaatatgcccatatataaatacaaattttaacaatgaaccaagtgagacctcattattttagtgtatattgagggaatggctagtgatcaccatggccaaaagataaaaaatcaagtacaatgaaccaagtgatgttatgactaagcctaaccgtggcttgattatatattatatataattttgtgtaccactgtaccccaaaaatctcaatctagtaatcaaatatgatcagtagattcttggcgaacatggtgatctaggtcaagttgggtatctgggttttggtctcctaataattttaactctaaatttttttactgtaatatatttatatttatataaagaaaagaggccggtaggaatgtacgtacgtagttgtattttcaatatacatgtatatatatatactaggcagaagttacgtgcaatgcacgtatatttagttatatgtttaatttaaaaaaattaattaaaaatacaaagaaaaaaggtcttggagatatttccttcttggtcataagatgtccctttggtcaaaacaaagaaaaaagttcatatggagaaatgactatcagaaccaaaatgtttttggagacacgtaaaagaattttaccatgacacaatataaaaagttttaaaaattcaatcttttattgtatttgctaaataataaattttatt

SEQ ID NO: 201147 - DNA, 1676 bp, Cannabis indica
tgacacccccttacatatgcctcttgtctcagttgattgtctcgtacccagtatgacactaggagttgtggctatgataggcagctgcaaaattcgtattagaacatttgagataaaattatgagtcgccccactatcaatgagattcaccaccgactgagaactaacgtgttcccataattttaaagtttttgaggatgtcaaaccaataacaaaattaagggaaacctctacgaattaattttccatcttggtatctacttcttcaacaacctcatccaagtcatctatgtttccttctctttgttttactgaattcttaagcaataatgacctggagttcagtttttttgcaccgatgaccaggggaaaaattttcatcacatttgaaacataatccccgagtcttcttatgctgaatttaagtctccgtgagtcgtcgaaatccattcccaactggccgaccttcatctctgaaatttgttgaatgtggaacaaagctgcttgcaccacttccagttagccctccttggaatcgtgaaacaaagcatcgtattacagatttttacttttgttgagccaacaacttcaattttacattttaggctgattccataacttgttccagcccacttgggcccattacggttacttcataccctatgaattcagcccattaataaaagaagattctaatatatattctgaaatccattctaaagaagaagcaagcaactcaaatctcttacgatattcatgtacagtaccttcttgtttgagggaaaggaattctcgatacattgattcactgggcagaggtcgaaacctccaaatcatctgcatcttcaagtcctcccaattcaaaaatggtcatcgacgatgttcccattgaaaccaaatcaaagcctctccctccaagctaattacagcagtttccaaacactcttgatttgtcatacgatgaatggaaaaataccgttcagctttcaataaccatccgtctgggttgtcgccatcgaacatagaaagttcaatccaatgaggcctaatatcccatcgtggggttgcctggttgttgcgaatcccactattgtctccacggcttcccccaacatccatggacactctcctattcatgaacggacgaccaagtgccataagtcgggcgccaccatcagctaccattttttttccagttactgatgcctggtctcactccttctctatgggcaccttgtgccgctcctcctagcttcgtagaaaatcatctaacagatataccaaggtagtgatttgtgattaatttgataatactttactagatatatttagtaatataacaattattcaaaattaataatgtatatttatttttcaatatgttttatttgtgtttgcaagtatactactaccatggagtgaatttgaattttatttttcttctttatttaattaattttggaataagattcatgtactaagttacactaaggtagaatttggttagagataatgaaatagaatagaatagaaaggaaataatttttattccattcctttatttagttaaagtattggactgtcattctaatagaatgacttttctattattttgatggattgactattctattttaaaattgaaagaaagatcattccattgcaagatgaataaa

SEQ ID NO: 201148 - DNA, 1285 bp, Cannabis indica
tagacatcttatttggtatgactttttgaatgcataatacccaatagtaaacctaattagaatttatgcggctctaattagtttgctatataaagaacataagggtttggtccccaagactaaccactattctcctctattcccatcaattgagtgagaacccatagagagaagattagtttgtagaaaaccatataccagtcatcttatctcatatacaatatcataaaatcatgtatgttttccatcctattaattcatagaatataatatgtattttagatctattttctaacaaagttttaattataatttattttctaaaaattactttattaggtatgtaatttttcatgtctttcttaaaattttgttactaatttattttaatttgtaaatatttttttggtgcgatgacaaaaagaaaatgaatgtttttataattataaactttaaagttttattatctaatttaactagagcacatttttgagcccatatcataaacaaaaaagttttattgtttgaaagagagctatccttcttccttcctgttttggtaccctttaattttttcaatccactatggtgaaactgacaaaaaacaataatattaggatgatcactacttaaattacataggataatttatttatatataaataatacttcaattaaataattaaaattttatagtccatagagttttattataccttaacaaaatcattccttgctaattaagttataggggtgtttttcgagcaaagtttacaaaattgtggttgttttttaaaataattattttatagaaaaaataattaaaaaattaaaaaatataggaaaaataatttaggataattagttattgttatagtaactaaataaggataaccagttacttaaagtaactagttaccttatattcttttcatcataatttttaacattttactccgtaaacgtcatatttttacacaaattatataaaaattcgtaatgtggctaactaaattcttgctcataatatagatattagatatagtattgtgaagatttccatattataatattcctagtatgatcttgaggtctaagcgctttctatttacaaatattttttgttcaaatatatataaatttataaaatatgtaattttactattttttgtagtatagcataataatattatatataacttaagaatattggattcgaatccatgtcgtcttcttttttctcaccgctaagcttggcataattttcactaagatatatatatat

SEQ ID NO: 201149 - DNA, 570 bp, Cannabis indica
taagccaaaaggcatccttaccatttatgggtaatttaatcaaaactaatacctcaattattctcgacattctcaatgtctaactaaattccccgctaatacatatatactaaaccatatgaaaatttgactctatcagccaaacgccgcgttctaattttgccgtgcacaaaatatgaaaaatatgaaattttatatataacataaataacacacctagaattcaaatatatctgcataaactcctaaataatatttaaaagtctaattccaaattaaacccgaattatctgctaattctcatattaaaatttagcggtctttacaattatccgtccattaaaaggatttcatcctcgaaatctaaaatgaacaactttggataatgatccctaatgtcagactccaattcccagacagcttcttcaaccttatcgtttctccagagcactttgactaaagctatggtcttgttccgaaggactttatcttttctttctaaaatctgaattggttgctcttcgtatggcaagttcgactgaagctgtaagttttcataactcagcacat

SEQ ID NO: 201150 - DNA, 2327 bp, Cannabis indica
taatttttgagagatggtttaaggttgagttttattctgtaattaattagtgagtgaaatcattattgttatatatacagagatgagatagagaagctttgttgctaaggtcttataactcatttgtgttccccaaagaactttctctgcaatttctttgtaaaccagttggtgatcaataaagatgattttggctatttctctccaaacataagaaaacaagttaagataagacataacaatatattacatgtgtttttccacaatgacgaccaagacttttccacaaacaagtcagaaaactaatcctacataacatcatgaactaataatcaccatataatgtaccattattgatggcataatcagtgttctgaattattaaattaacaatgtatgcatttggttcagttgaattaggttctgcttattgcaaggctgacccaatacagaagcaatcagttctctttcttctcccttcaatattttatctttttgggctttttcctgaatggaagaggaaaaacaaaactactcttggttacttattatgatgctaatcaacttcatatactattattagaaaataccacttcatgtatctaaacatttctaaaagaaagagactcttttagaaatgtcaaagtagtggctgacccaatgcagaagcaatcaatcatctttgaattgatccaatgtggggacaagagcattcactaccacatgaatattcctactaaggttttttccacaaacaagccacaaaaacctattgatagataaaacaaaacaataaagtttattctgctacatgaccaagtgtatatgctgtttttccacaaacaaagccaaatactaatatgcagtgcactgtatacagagcaaactgctacaccaaatattaacatgcattgtggtgcagtggttaactagaaaattattaatataaatggagttgctttcttttctggttaccttattagttgttttggcactttcttctgtttctacgacaacttttgctgtagttgataccattagaccttcagaagttctgagagataataagtcatcagaagcagctttattggtatccaaagaaggaaggtttgcactgggattctttactacatcatactatcgtaattatatgggaatttggtacaacgatcatggacctagagtttgggtggcaaaccgatgtagaccgatcgaagattcatctagctccttgactatagacgacagaggaaatcttgtggttttttcagaacaaaataataagagagaaattgtttggtccacaaacacgtctaaacaagccgtgaaaccattggttcagctgttggataatggtaacttggttttgagagatgaggaagatgcaaacccaacaaactacttgtgggaaagctttgattatcctactcatacattgttgccaggaatgaaattgggatgggacttgaggaggggtctcaataggcgtttattagacctgtcatggtatttcagttatgggattgagtttgatgaagaacgccatacatatcctcaactaattctccgcaatgggtctgtaatattgtatcggcaagggatgtggcatgacataattagtcccagcgacgattctattagttacgaatttgtgtacaacgatgatgaagtttactacactcacgccctcaaaaataagtccatgatctcatacatttccctggatgaatattacggaagtattgccctgagatggaggggagaagaaatgaacaaaatcatcccaagaaacacttgtgactcttatgaaagaggaaggacagttgatgcaatatgccaatgcttaaaaggctttaagccaaagaatcaagaaaattggaactcacggtcctggttagaagggtgtgagagaaacagaaacagtcctcaaagttgccatgatgaactattgtgtcctctggtttggagatttgtttgatattcaacaacttccttctggcggtggtgaaagacaatatacttatattcgaacaccaaattcaaaaataggttcacatcacatgtgttgttagtacattttatatggatctccttttccttgttcaatatttgactaatgtttgcttcttttgtttctcagttccaaaaattcataatgaaacaagagctgatggtagtcctcgtaaggtgaaagtggagagagcagtcataattatatctatcatactcggattattagttggtgggtttattttgatagccttttacattcgcaggaggacacacatttttggtaaacactcttttcttctctaccttttacttca

SEQ ID NO: 201151 - DNA, 1507 bp, Cannabis indica
agggcataaaatcccaacaattctcggtgaaagatgcttatgttcttgatcaaggtataaatttgcttcaaggaaacaaaatggatttgggaccctgggttatatccaaggctttcattgattctgtggaaagttttgaatgatgcctttcctattgcagcgagagtttctgcctttacaaagtttggatgctacttctgtgagtgtgagttagaagatagcctccatttgtttaaggagtgtgcctttgctaaagcaatctggtttgctgtcctgttccttgtggcagtggttttgatgcactataatagcatgcttgattttgtggaagctctcctttcttctctttcaggggatttaagaaaggaggttattatctacattgggtgtgttatccaggcaatatggaagtggaggaatatggttcggataaaggggtgcaatgttgatgtcaagtctgttatcactgaggctgctactgcattcttggaattctcagattgcagggtagaagatctaagtcaagccattcctgaggattcagatgatcaggcagtgcaaagcgagtctgctaaccatattatgttcacagatgcttcttggaaggagggtgttggtggttacgctgtagttgcaattaactgtgtagaaaactcctagtgtttcaagctagatgttggtgctgcttcgtgccctttggaggcagagactcaagccctcctcttagctctagaattttcagttcagaattcttggactagaattcattttctgtcagattatagggtcctagtgaaggctttggagcagcattctcctcctcctgattggagatttttaaatgtttcattatcaattttcgatttgatgaatgtaatttcggattttaggttctgttttgttcacagagattctaactctgttgcggacggcttggccaaaagagctagattgtctagccaggagtcgggtgtttttcaaagggaggaaatcccccctgtgattcccagctacttttctttggtttaatgaacttgtttctttcctaaacaaatatatatatatagctacttatattataaattataatatatttgcatgcagttgactgcaacaacaccatatatagagacatacatattatatatatatatagccatgatattaaggttcaccatttatagtttcttttttctctttaaaaaaaaaaagttatcttttgtttttcatttactaactttaatataatatataaatctatctatatatacatattaaaaataggtaatcaaataattaagctactgatctaaatattcagtgatgagtttaatgggtaaaactttggtctaattcataagatatatatgaataaaattagaatatattttgtaactttatttagttgattatatttccatcatcataaaaaaaattagaatcgaaatgcatatttttttttattttatatatatatagtgtacttatattattttgaattttaacc

SEQ ID NO: 201152 - DNA, 1195 bp, Cannabis indica
aaagagccaaaagctaggattatcataaaataatgacatcgatcctgatacaatgtgaattccagtagcttttaaagtatatttagcaaaaatattacattaactcaaaactgtcaatctagtagaaatttctttccacttggtgtatggatgcatacaagtaaagtaattatgtgataaaacttacttaatgtcttttaattctaaataaatactacaaataacaattgttcaaaaaataattataaattaaagggacaaaaaagtttcacattttttaatatatagaaagtagttttatctcggtggtagtaatagtgatttgatcttgggctataataaaataagattataacctttctttttagggaatccttaatctaaacatgtgattgtgatttgtgccaccaccaatacaatactcccactctcaactttaaagccataattgctgcttcccatgatccaatcaggattcctttaaacagtacataactactcaattacactcatgcacaaaggaaaatttacaaaaacatatatgtcgtatatataatggagccacaacatagcatataatataattaatcatacccatacccaaatgaaaaaacattcagtaacagcattggtcttttttttgggataaaaagtaatagcattgtttaattggagaaatatggagaaaaaaggaaaaactttgattattttttttggtgccaaaaaaagaaaaaagcttcattgaaagaggcttgtagtgactcttgtctaaaggacatagaagatatttcaaaatggaattgcgaaatgtgcctcctatgaaaatgtgccaacaaacaccactggcaacatttcctgaataaagttgttttcccaaataacatgcataaagtattaaagtaaccttttgatatgttggaaaaaaaaaaaaaaaaaaaaactaaaatttggaaagggaaatttgattttctatacttagaaaatcaaatttttttccctaaaccaaaatttaaacctaaaaaactatccttttttcaaaccccaaaaatacccccctcacaatattctctctctgcatcatctctctctccctctatctcacacccgaaccccaacccctccgaccccaacgccgatcaccacccgaaccccaacccctccgaccccaaccccaacccgaaagagcaaccccagt

SEQ ID NO: 201153 - DNA, 1956 bp, Cannabis indica
gctacaagaagcaaggttgttaacttagttaggcgataaccaacttaaccaactctcgtttgagtgagatctccacatcaacaaaagtaggggtgcttccaagaacgtgcatgagagcttccagaaacacgaaccaaagttactcagtgaaggtgctttcggagaggatagattcatcaggagtcgactatccaaaactcattctaggagcaacaactagccattcgaaattcctttccagaagaaggctagctttcttaaggtctctttccgaaaaaataagaaagccttccaggacctacttccatgagtcgacaactttccaagaatgataaagtcttttagagatctttttatttgaagaaactattccacgtgttcctttgaacaaatttagttccttgagcccattaacactcttttatagctccaattgcagttataaactcagcttcagctgtggataatgcaaccatagattgaagttgagactttcaactaataaaattcctacaaatcataaattgaaaagttgatattgatttctaggtgttcttgtcagagtcattgaacccttcaattgtgacaccttctgtgttcgccttgtacacaagacatacaagaccttcttaataagtgcaaataagtgccaataagtatctaagcaaatattttatagcaagccaatgatccattactagatttgctacatatttattcacactccttttactatgaccatattgggtcttataaaaaccaccaagtacatagtgaatccaaaagtagtagcataagggatattatctatttctttttttttattcgtacttagacattgcttacttgaaactaggtattgagtagtcattggctgcttggtataattttagaacctaacatagaaaacttctatgcgactcattgataaacgagacttataatcgtttattaaggtagtttagaacatgttatagagttttttatgtcaatttgtttggttttatgcttgttttcttttgttttaagaaaataatataaaaaaatggagaaagagctaagtttacaaaatatcagtcttaaatggagttaattttttcttggtgagtttggtgatgttcaggagcaaaagggaaaaaatcgaagaaacaagttagtcagaaccatggctctagaagagacaagtgtacaggaaaggctcgggggttgcagctccaccataagtggttggggctctgagaaattgaaagaaaaaaaaagttaaaagatcgcaagcaaaaaaatattgattagcagtggagttgcggctcttaagcatgtattttatctttccaagtttaaattctaaatctttttagtatcttttagagaactttgttagcctatttaaacacattatgtttagtgttgttagtatgttttcgagatatctaaacttaaaacctcatttatagcaactacttagtatttttcatcatcttcttcttcttctctttccttaactttctttatgttcttatttttaattatgaatgcaaaggttatgaacataattttcatacactaattttcttatctaggagataatagagtcactttgatttttattttatttttctatgatgttctatttatttctttctctttattttaatctatatgatttatgattaatgcttgttaatacttgatcactatttgcatgtttttatgatttcaatttgagattcgagagatgagagtggaatatgctatagatatagacataggttacatattggatgagaatacctatatgacttgtgtagcaaataggatttccaatcttaataccttttatatgttaaaatttataacggatatgtagaaaacttgcacatagattgaggtactatatcgtcaaaaagaataaacttcatcttagttatcccactattaaaataggaagaagaaatt

SEQ ID NO: 201154 - DNA, 709 bp, Cannabis indica
ttttaactttttttccctatattttctctatcttttttttcctcaccaaaattcaacttcctaataaatttataatttactcatcatacgatttcaaaaccgttatcatcgcagttaaagacgttatcatcattgtatctcacttgtactcgtcactatattcaaagtaatttttattatgtatctcacttgtagtcgttgtatatatttaatataataaaataaattattaatacaataatgtaataactaaaaactaaattttaataatatatttaaaaaagaaaatgacatactaacaaaatttatgtggtatatatgctattaaagtagcattttcttcttttttttttttccaaagtaaatataacaaatattaaatcttgaacaaaacaataaaataatatgttacacaaatctattgggagaaaaatataaggtgaactatgtcggatgtgactgaacaatatatcttagagacaataatagtgggaattcaatgtagactacatatatacataaatatttcagtttacattttgaacttggaagacaacaggctatgagatatatatacaaaaatattttatttatttttaattttttttaattagaatatataataaaaatctaaaatggttaaacatatattttaaaccgtacaaatttagggtgggttagaaccagatatttttttctcattaaaaaa

SEQ ID NO: 201155 - DNA, 2154 bp, Cannabis indica
caagttgagtaggaatggtcctcgaatttcccatctattattcgcggatgatcttattcttgcgggcaaggccacattgtaggaggctaagggtattttggaggtgtctggaaaaattctgagactggtcagctcaatgtataaataaattgaaaactttcattttctttaggaagaataccagcgaggggatgaaacgtaatatcaagaaagaacttagccttaacattgccactggaaatattaattatctagggcttccactgtttcgcagtcaaaataaagatgcaaactttaatttcactcttgataaccttgtctccaagcttcatgggtggaagttgaaattgctctataaagcaggtcgagctactctgatcaaatcagtatgcctctccttactagtttatgcaatgcaaacaacaaagctatctaataggcttgcttctaaaattgacggtatggttaaggatttttagtggggttgtgagcagggaaacaggggtatctacttgaaggcttgagatcagatctgtctgccaaagtctatagttagtcttggcttcaggaaaactcaagaaatgaattatgctcttctggcaaaatagggttgggctcttcttactagggatcaatcactatgttgtaaggtcctaagtgctaagtacctaaaaggaagaccgttcttgaattgtgcctacaagagctcggactcttggttctggaagaatgtggtaaaaactaaggaaatcattaaacagggggcctgtaaaatcattttagacgagaaagatactaatatttgggaggatccctgattatgcatggtcaggatttttaccctcaaccgaattgcaatcgggtggaaggtttagagaaagtagcagacttactaacagaaaatggggactggaatttaactaagctctaagctatgttcaatcttgaaactacaaagaacattattaagggaggtaaacatggaggtcagggtacggacaagtggatttagactaaagaatcgaatggtttattctctactaagtcggcctacctggtccaggccctgaatcaggctcctcattgcagtgttgctccgagtatgtggaataaaatttagaattcaaaaattttggagcgtcacaaggtgctttggtttagcattatctctaaagctctgcctatttgctccattttggctaaaaggttgcatattgagggtgtttcctgtcctttttgtggagagagtgatgaaacgatggaacatatttttctctattgcaacttttcctttcacctttggaatcttccccatggggtattttcccaattctggaatctggaccccgaatgtgggattaggttaaatttctatagagtctaaagactagaggtgtgaatgttcaggaactttttctgtatgcttcaattgtagtcgacacaatctggaaagcccgtaatgagaaagtgcataataattctatatgtaatattaaacagtatattgactctatttataggtgttagcagattatggttcatgtttgttaacttctttgatgacatctaagtctcttgcttggtcccctcccccgaatgactggatcaaaatcaattgtgatgtgaaagttggcttcgattcgatgtgtgtggtggctttagctagggatcataaggagattgttttataggcggcttccaaagtgctcaacttctctgaccctctaatttgagaagcgatggcttgtctgttagctgtggaatcaacggtctcaaagaagtactattttgtgatgattgagagtgacttcgagaaggttatcaatgcgttgaagggaatttactcctattggaacatcggtaactatgtgattcaatgtaaataactctcaaatctcttcattaactgtaattttatttctatttctaaacaatataattttgtggcccataatatggctaagtggacttttgctaggaatgtaactgggatggccgatcttgttgagattctggataacgtttcatgtcatgaccatgaggtctaatttttgttttaatttaaattcacttttattcaaaaaaaaaggaagttttaattggaaattatttcatttggataataaacaaagtaaaatagttttctactattct

SEQ ID NO: 201156 - DNA, 685 bp, Cannabis indica
aggccttcttcatcccctcaactatcttgacagaagaggaggtcttcttcatcccattagctattaacatagtggaggatgtcttcttcatctcctcggttactagcacaatagaggaagtcttcttggtaaatatcaacgatgtgttgtaacattcgtttcggctgctagactatcgataacaactactgtcgagaacttgacaaacagcgggtagatatatgagatgtcttggaggtcttagagtgttgaccttctgatcattacattgtaaggagacttcgtgtcaattactatgaaggtagtcatagtagtgttctgcctcggacagttctgactgtcaatggtaatctaactttatcacatggagcgatgttggctatgctaaaatcctacgtaagctgcttgcatggtttcatatcttttagggaaaaacttattctttttagggtttgtttgaacaggatatttgatgatgattcatcattaattatcacctttgccactatcatgttggtaatttaaacctctctaacgagcgatctttctttgattgattgagaatgcgaccaataccgactggtgtggggaactcaacaggtaggtggaatactaaaaaattggataagaggttgcctcagctttgttgttgtttccttccagcgtcagtttcttagtaactagg

SEQ ID NO: 201157 - DNA, 1391 bp, Cannabis indica
tttactcaactgatgaatatgtagtattttttaattagttttaaaaagtttgcacagtttttccatttttgaagattaaatatatgtgtgcatatgaaactacacatctttatgtatatacatctgtgagaatttaaaaatttcagggttttatatatttattttcattgtttctgtaacccttatcatcattgggctgtttgtgcttctgaaatattctaagcttactctgatctatgatatgatttaggattctatgggtgacaaagactcgtggagagaactttttgatgtcgtgatagcccaagcaaacaagccagatttctacacatctgagcatcctttccggtttgcatctttagcttgtttatttatctatctgcttcatttttccttatcattcatttgtgtattaaatcaatattgaacttcttctttgattgattaccttgaaaaagaggatgattgtgctgtaattttttctttttctcttttgatttgtgattttttttttcacacaaaaaaaaaaaaaatggatttacacctttgaataaggcatatgaatagtgtgatcttacgagttctatgctatcacttgcgaagagatagtgatagttaatgtgttacccatatcaattggtgtgttgggaggccgtaacaagatatacaaattagttacaatgatatctgcctttgtttgcttgctttttctgctgaagagttcaaatttgtcgagtacaaactgggctcaagtctttgctctaaaatcatgagttgaaagtattctctacttttctgtgttcaaagacatgcttcttccctaaaatatccacacacatacacacccaacaaaaaaaattaatcaatcctgttttttttttttttgttaatttataatttcctagtcgtttttatagttttctccctagtggcattttggagcttagatttctttttgcccttagtttcaccatgaaatattaagagctatatcaataaaattgcatgctgatctgttctctgttttgctttctggaacatgaagttgttatgacccagagaaggacacattagcttttacaaaggtggatagatttcttcctaataaaatatattaccaaggatgccttaagtcctttcttgaaatcaccaagtggaatggcccagaggtaagtttttgtttgctgtaaaatagttgccagattttggactctataatatgtttgaagtcaactttctttgccgttgcaagaagatagtgtaactccttgtcttataggtgatttactttggagatcacctatttagcgaccttagaggaccttcaaaagctggttggcgcactgctgcaatcatccatgaactagaggtatgttatcttgaccttttga

SEQ ID NO: 201158 - DNA, 1071 bp, Cannabis indica
attttcctttttttttccaatttttttgattacaataagacgtgttcgtttcactaatttaaaacctcaacacgatacgtcaacacttattgccaccctatgtactttcattatacatacggacttaattggttctctttaccttagtaggtacctcaaatttgattaattatcacaaaacaacaacttacagagtcttacacacatgaaatttccaaaacggctatcacaatgccaataatctccactacagtctacagactacatacgcaggaccttaacataaaatttaaaaaagttttgaaaatgccaataatctttttccttttttgaataatagaaaattgcatgtttcttttaaaaacagataactttgaaaaattgctagatatcttgactacataaaagtaaaataattgttgtatccacctttcagagccgaaggtctttcattgactactttcatctttttgaaccataacctggttgatgagagtcaaatcaatcggacatagattatcaaagtttgatctttttttttttggtgtattcagctccttttttgtttggaaaataattgttatattggaactttatatagtgatcaagttattactttattactatctatctaataaaactaaagaacagaattctttgtactagagaacactaattaacttcaaataattatcagcaaattttatccaaaagtactacaagatagataataagctcagggcaataaaatcaaccttttcccatataaatatgatctaatctcattataattattagcacatacatcttctgcttaattaacacatactatatattacacggaaactacagtaataagaaagacacaaaacagacatttcaagtagagaatttgaaatcataagcaatgggatgcaaacgttgggctcctttatagcctaattattgtaattaagtacgtatttcataacaaatatatatatattgtatatatattcatagaagattgtgacgtgcatgggactatatatgtacgtatacgtacgcgtccttggtgttatatatatatat

SEQ ID NO: 201159 - DNA, 1105 bp, Cannabis indica
ggtaaaattaattccaacacccttaggcagtattacatcaaataggattcttaattttgaggtccagaacattatttgtcacttcaaactcccacaaaagatagtgttagacagggaaaaatagtttgacatggatctctttactgacgtttttaatagacatggaatcattaggtgtttttcaatggttgcttatgcacaaacaaatggacaagttgaagagttcaactaaactcttaaggatacgttaaaggaaggcctactgcaagccaaagggaattagtcggaagaattaccaaaagtattgtggtcttatcgcactataaaaaaaataaaagctgaccatactccttttgctctaacctacgggtaccaagccatgatatcaatagagttcacacaaccatcacattagagactaacatacgaccaacaaaccaaccatcaattgttgactgagtctttagatggaactgaagaaataggagaaactgagcttcgaaaggcgacttatcagcaaagagtcacaaaacactacaactctaaggctaaagatagggaatttaaccttgagatatggtgttacagcaagtattcctagacacgaaagacgcatcagcaagagtacttaggaccatatgtcgtcactgaagcactagaacccaaaacatataattttgcatgctatgacttcaacttgaatccagtgctagtaccaaggtactggaacgaggtgcatctgtgatagtactaccaataaagttgctatcttcaaaatagttctcttcacagtgagatttactttacaatgagcaaatgaattgatcacatcttaaatttgtgagatgcgacaaagttgtctctaggttaagaggtccatcgctaaggtatggtacctataatattagtcaaacatgacattagtgtagtcgagatcagttgagctaagcttggatgaaaaaaaatttgcatccgctactttttctttcaactaagctcacagtaatgtaattgtatttaatttaatgcataaaaatattgaacaaagctttttttggtacttcattaacgttaatcacttacagctcacagacttgacgacgct

SEQ ID NO: 201160 - DNA, 913 bp, Cannabis indica
ccacaaattttagatttgagaaaataggtttgtgaaaaaattttgagccctaaaatcaataactttggctcttgaaaccaattgttggagagcaattatccatgagagcatcaaagataataaaacacataccatccatgagagcaattatatttcaatgtcttcatataaatcaccaccaattccctaaccttgcgcaaaagcctagagagcacttatggagctaacccatttgccttttaccacacaaaccctaatgacccctttaccacacataacacacacatatatatacatgttattacccttataaccctaaggggttattaactaatagagcttttggggtcttttatggtatactataatttaatgggccaactatagtattaaaggtgctctcatgtgcctctaacacataattaagttgttaactatctcattatggttattagcaacattaggcacatagttaataattgtgtattatggaattaaaccaatgattgtattagtccattataataattctaacacatgttactccacactaattttggctaaaattaatatattttatttatgtttgcgggaaaattacgactaaatgtgcaaaatcaaataaattaaactctaaacaatcaaataattagtaatgacaaagattaacaaattaagaacaataactatttctaactttccaaaactatttctattttaaagcatctcaagtgagtgctcttacacaattaacatcaaacaacaccacaaaatactccccaaaactatttctaacttccccaaaccctaatagaactgaattctcaaaaacatacgtcaaaaccaatctcaacttgaaatttcaaagagagaaatgaactagggtttaccttggtgtttctaaacaaatttc

SEQ ID NO: 201161 - DNA, 426 bp, Cannabis indica
tttaatttttgtataccttttgactaaataattgacttgttggctaaatatccttctgcctatacacacttattttgttgtgattcagaacactcactaaaaaatactaatgaacttagaaacaaattttccttaataaacaccaatacgatggcagaacgatgatgaattccattcgaacacaccatgattgaaggattataattatgtataattataattttattttcactatagcaatgctctagcaccttggtgccccgtgaaaagtactcgattttgtggtgtgcatatcttgtattatttattacaattaattttaaaaagactgagataagtcataagatctactaggtagccatatcgtatcaataaatgtaaataaataaataaataaaaataaaaataaataaaaataaaaataaa

SEQ ID NO: 201162 - DNA, 623 bp, Cannabis indica
tttggtagctcatcaagaaataattccacgttaagcgtgtttgatctggggtaattttaagataggtgacctcttgagaaatttttctaagaaacgtgcgagtgagaacaaaacacgctggaaatactcgtgttggtctataagaccagtcgttagtctataaagtaactaaacgtgatgtacccgtatatatgaatcattaattcacgggagaagcccaaaattacatgtattacaatagctagatagataaataaatttatggtaaatttgtggacaggtatattgaaatataaacaactatacatgaaagaatgcaggctgaaatggacagcttgcttattaattaattaattaataatttcataataaattcccatttgattagttcttcttcccaatatattatggctcctctctgtcaatgactagagactacttgtacactcagctacttgtaatgaaagactatatatatatttatttatgtgtatttatatatttatatatacgtgtcctagtcttatccactatcattttggaccatcacaatcattcttcttaattgcttaaaatgtttacaaaggtaaatgtattaatactctattacccttattaaaata

SEQ ID NO: 201163 - DNA, 843 bp, Cannabis indica
ccctaattatgaggggggcgaggtataccctaattgagcaaaatatgcttcttatatttttattaaaacagagggtccttacatcaaattcttactaaagtctcaataatatcagatcaggtaattgtaaacattacataagagtattacacttctagagcaacatacaagctccaatacttctaaaaataataatagaacaaaaatagtctcaagatagatttatattaaaaaaatgactacttataattatatgaaaaagttgtaattatttttaaccaataataagacatagggttgttaaaaaaaaaataataggatatagaagagacaataaaaatgaagactaaacaaatttaaatctttttaattatgagaggcttgacccttattttgacaaagtagatgtatgtggtgaggttattaacttattattattatgtattaatgtaaaatgaggttggattatatactgtggatggtggtccaaacgtgataacatagtcatagtgtccttcatttaatttaataaaacaaactttttgttctttttttagttaaaggatacttttaattactgattctctgggcaccttggattttgagaataaataaacctttattttccattgagactccactctccacccttttgtgtttctgacttgttaaacatttaggttatcttaaacactatttttatcattgtatttactatgtaggttccaataagcatgaagaataaagtgtgcttttttttattttttatttttttatggggcaggaggaggttcttctgcccatatgtatttctttaagtggaaaatttgaatgaaataattg

SEQ ID NO: 201164 - DNA, 829 bp, Cannabis indica
atttaatttatttattttattatatatgaataaaaagtgatccatgaatttcttataaaccattttatttttaataataaactattttatttttaatataaataaaaagtcacccatgaatttctcataaactattttatttttaatataaataaaaagtcacccatgaatttctcataaaccaagaattctgttatataggcacactttatatagaatagatagatagatatttgaagatatctctttaatttttttcttttttaactaaaaattctaaaaaaaatttagagttataggtagatttattatttttttaatattttattttctatgtaactttgaaaaatattttatctattaaaataatatataatgtatcgatccttatagaaatttaaaaaataagtaaataaattaaataaagcatacgaattaaatttaataaagtaataaattatagtgaaacatcataatttcatatttttaattagtacttttttttaaaaaaaattaatttcataatttagttattactaaagagaatataaccgtactaaagagaatataaccgcacttaaagcgcatttgtttcttagtttatcaagattatccgagttgatgatctaaacactcacattggaaagtttatttgctctttccacagggaaaaaaaaaaattacataaatatatattatatatcttagaccaaacaaacacaaattgaaaaagagtttttacattaatgttttatttaatccttgtccaatatcatgaaacatgttctaattaatgcatgtcatgttttttcttatttatttttttttt

SEQ ID NO: 201165 - DNA, 806 bp, Cannabis indica
ccagaagaccctgttaaccctatttgtattttgtatcgagaagacataaaagcttaccacaagaaagctagggaatggactaaaaagtatgccatgtcttattaattagacttttcgctgaattttctatggatctatgagattgggtatcaaattctgtgatgttattatctagggttttgcaagacttattgttatgatgtttttaacatccttattatgtaactttttttccttttcaacttttaaagagattttgttgggaactaatatttgtatagctatgttaacataaataatgctatatgagtaaattttcctagcttatattagtacttacatatattatactacatgcattctttttttttttttttttttttttttttgaataaactacatgcatcttttaattactatcaaataacttttgtttaatcgtatttttttttctcttattccactaaaatcacaacaaaatctcatttttttagtcacacgtatgaaataacctcctcaaggaatatagcaaccaatttgaatgttattaaatatttaatatatggtgtcaaaagaaatatattaatattttttttggaaactttttcattttaaagaaaattaattaatttgagtacgcaacaaacttttcttacggccaaaaataataataaaaaataatgtataaatatatataaataaaaaaaaatagcaacataatcccctaaaaaagagcaccatattcttttttttccaaagcattcttatccaaataaaatagatatatattcagataattaaaaatg

SEQ ID NO: 201166 - DNA, 1028 bp, Cannabis indica
ttgactcaacacgtcacacaacatatataattaagacgcagcaaaaccaaaaaacacatatacaatagagcctaatgtacaaactaaatcccaatagtaagtgataaaataccactattttaaagcccaagataacatctaaaagcgaaaacaaacaataaacagcaaaaattaaaagcacccaaaaggaaaaaaaaataaaagtaaacaaccaaagcgattggtcgtaattaatttgttcttcgtgtcattgttagtctagtgagcctccaaataaactaagaatgatatgaagaacagaataactacgaccaacaaaagagccaccattgcaaaatcagtggatagcacgagtgaagggaagggaacactgaaagtgcctctttatcaaatctaaggaaactaagagcaatttgtataaactttgttcacccacaagttattaatcattgaaagctaaagtatatcaaaacaagtctaaattacattaaatcaaagtcagtagtttacattttcaaacaaaaaaacttcctcaaatttttattattattattaagaaaataaaagtaggtttcaactgcaatgcatcactcattttcaggtcactgtattaatcaggaaaataaaagtattactgccaaaggaaaactatactgggttgatcaaaaaatacttattactattcgacttcaaataggtcaaaaagtccatgttgactcttcccaccattactgtctcaaccgttcaatgtgccagtttatacagttcaaaggataactttgtaagagaatatagtacttttattttttttgtatattaagagttgtatctttcattggttgcagaaaaaagaaaaaacaagtttgtgataacatatttttatacaatacaaccaaacaatgtcttcatctatcctaagattttcccaagccatacatcacatgaccacaccaccgattggagagtgttataaaaacaaaggaaaaaccagtagagtacactacacctcccaaaaccgcttttgcagt

SEQ ID NO: 201167 - DNA, 730 bp, Cannabis indica
gccacagcttcagccggtgcaagctcttaccctctcagcctttacatatcttatcacaaagctcgtaataagcttctccactttgatggtggctcctgatccgctgtgaatcccatctttattggcttctgatccaaatactaatttagtgtactcttcatcatcatgatgatggtaatcaccaaaaccaaccttgcatttctccattatcatatatataactattgtgtatacacttgctcttttattatgtaaaatatataattattaattacggaataaaacaatttcatgcatgcacgtatatatatatataatttaattggaaggaattaatagatatctttctttgattttgatttttgggatatttatagaggtggaatttccaaataagctatagcagcagcaacctatattttgtgaaattgaagaacaggcttagatcgattgattccacagaagggaaatgcatgagaattttgttgtatttaaaaagaaaggggtatagtacacattaatttggttaatgatcgacagaccctacataccatttttttttatgttctaattgacaatttgacaatcgaccatactcttaccatctaattattaatggattattatcataataaataataataaatgcatttaaattgcatatatattggtcgcttgttattgttagtcatgtatcataggagggtgtcatacattcaagttattatgt

SEQ ID NO: 201168 - DNA, 1628 bp, Cannabis indica
ttactatactttttaggttttatattttaattagacaatttagaggaaatgatgataagaatgaaataatacattaattgaaaagtaaatagacaaacaacaatgtcaatataataataaaaatctagagcactgatttcctattctaaactatgaatctcagtttaccaattatctcaatttattataccctttgtagtttcaagaatcctaatgtaactaattaatctactctcgagcaatgatagaattaactcaattaactaacaagacatctctagtcactattaattaatcaagaaataataatgcaatacgattgtctttaaatgaaactcatagaataagaaaaatctcttattttcacacttttcttgtttatagagatttttaaaaacttaatatttagagcttagaaaagaaataacagattaaataacaaatacgagatttttacgtggttcaggcgttaactattcttagtccacaagtctattttattaggctcttcgaccagtgaggatgagtacaaatatgtatacaatggactagaactccttattccttttgttcctcttgaagaagaagaagtttcttaggaatttttgtagagttttttatggaagtagtatcgtattatttcttttcttccaagagtccctttttttaaggaatgcaggggtatttatagaccagcttccctccacgcgctggcttgaattgatcacctttagatgagatccaactgttggtttggtaggtggccattttaccatatggcatttaagggtgtcagattgtacagattgggcatcatacatgtgccgtcccagggtcttcctttttgaatttctcttattaatggttgtcggatcattcaggcaggtacgactgggcgcgcatgctttgtactatggcatatcgtgggggacaaaccttgatgccgtaactgaaaaggcctggccactaagcccgtagtctgacatgtacgagcaaatcctccacaaaacggggttatagcttagctaaacacattccaagacacctttaggcattttgtgagaaatacacaccctttgcgggagcactcgactttggtcctacgagagtaggtggcttcagttctcggggttgtgaaagactttcgattgcagtagtcccctacattatcgccacttaggggagttccttctatggaggttcttttcgcgagctaggtctcccatctccctggggccgaggtcaaaggtcgaactgactaactaatactgagcctttctagattaggtccacgtgtcaatcttacaaaaatctagacaacattttctcccaagctttctggacgtaatgcgacctgagaacttatagtgcctcctcatgattgactcttacgagtgggatagatccgagtttctcattacgtcatgcaagtaactgctagtcaaagtgtcacctacagaaggtattatttcttttatttactgacaaaactttaaatgccaacttttgtaattcgcgtgcatgtttagggaggcgccaaataaggtctatcctttgattatacaaaatttattttatttttgatttagattcttccactcatactattaaggctaattagtaatttt

SEQ ID NO: 201169 - DNA, 1905 bp, Cannabis indica
atataaaaaataataaaaataacaatatctaagagtaagatcaatttattgctaataaaataaacgttttgtgactaatttaccaaaaaataaagtttaggaataaacttgtcaaaacgtatatagttagaaaactaatttactaaaaaataaacttgtcaaaacttgtcctatgtgtggtgtatttgctgaaacggaagtgcatctcttagtttcatgtcagtttgcttggtcatgttgggagttttctggtcttgcaactgctagcagggagccgttgactttgctgtcatggctggaagagtctgctaaccgagtggacaatgaggctttgtgcaaaattgtgatgttgtgttgggctctttggtcagcaagaaacgatctaatatggcagcagcatgttcgaacagttcgggatgtggttgtgtttgcaaattcgagacttgatcaatatctcaaagctcaaggaaggggaatatccctttgctgttaccacttaaagaaggtgatggttcagagtgatggatcaaaccgtattcaggcatcaagctcaatgttgatgcaaccactttcgatcgggattttaaacatggctacgggtgtgtggtgagaaataacgatggggagctaatattagtttttgtcgacttcaaaaatggtaaggtctcacctgaattagcagaatttatgggcattagagaggctttaagttggctcaagtgcaacaattacacatgggcatgccattgagtcagacagtcttgtctgcgtcgaagcaattagaagtgcagaaagatttgcttctggtttcagattggttgtggaggagtgcaagaagttgctcaaaagtttgttaaatgttttgttattttttgttaagtgttctacgaatcgtgtcgcgtactttattgcccgacattctatttctttagctgaacgtatgttcccaattaacagtgttcctatggacttgatgtctattctaatgagtgattgctcaagttaataaagaacactacttttattcaaaaaaaataaataaagtgtggagaccaacttgtcaaaacttacataatttagggacctacgatataaataaacctatataaatgtgttttcgcatcaaaataaggtcaaatttttttgaaaggtaataagctcaaatgttagtccttaaaaaaattttaaaaaaaagctcaaaatcaaatgttagtaatgatattaagtataaggtattagtaaattaagtttagtataattggtagttgtgacacctaaaattttgagcacgtaagttgctgtttattggccatatataaacagatagttagtgcttcttaaggcttattaattattaagttagagagcgttattattaagattaatattatcactacaaaaaattaataaatttcttaactattttttttttttgtttattaaattagtgacgcgcttttacattgaaaaaaatgaataaataaattgcgtggatgacttcatactacatatactcatgcaacccatattaatttgagagaccaattaattaataatcaaaaatatctttggaacaaacttattattattattattattattattattattattattattattattattattattattattattacccatgaaaatgacagtactaaataataatggagtattatttcagaaaaataataataattgagtatgattgatgattatatagtgtattaattttgtccaaataaaaagataatactttaattccttttgatgatagtttttagacattaaagaattttttctttgacagaaaaagaaaaaattatgaaagacaatgcttttattattattattttgagagggaattgtctctaaaactctttactggcaaaaaataat

SEQ ID NO: 201170 - DNA, 564 bp, Cannabis indica
aatcattaaaagtatatttaagtaagcgtataattatcgcttctcgggtgcaaggaagcaatccaagttcatcacttggccataccctactatagaaagcaaatcaagggttagcatgattgaatgaagaaattgctaatttttgctgcaactaatgttagaattctattctttttatgtgtttatttatcgttttatgaattttatattatagggtggtagattataatgtatataatcaaatatacttgttagtaaattaagattctagtaaaaaaatgttctaacaattggcctcagagccatggtaataatttaatttcaagagaaatatgttcaaaatgattttaaatgtttctgattggatttagatgttttcatgttgagtgtttgtgttttgatgaattttatgtgaaattacatgtatttatataaaaaatattttagtttacatattcagtgattaaaattttttagaaataaagatgattgaattttaagcatgttaggattttacggaatcgaatttgggtcaaaatttgaaccaaaactcaagtttgagta

SEQ ID NO: 201171 - DNA, 1008 bp, Cannabis indica
gtctgaatcaaaaaactcaaaatctcttaaagatgaactgaggagattcaataaaatagaatttggggatgtacatactacagagattcaacttaaacaaagaatggtggcttgtcaagaaaagttaacaagtgatcttctcgacaaggacctgattaaagaagaacaatcaattcaggcattacataaagaggctcttcacaattacatttccttactacaatagaaagctaaacttgtttggcttaaggaagggcatgataatacattaataccaccttgtttcatgatagttttttttttcacagaaggatacaaaatagaatttattctcttgaggatcacagaggcaataggatacatcaacctgaactatagtgactgaggcttttgtcaattgttacaagaatctgttgggaagttctcttattgggaggaaaatagttagcaaacaaatagtggctctagggccgactataagtaatgatcattccaaaattttaatggttgaattctcatatgaggatgtgaagagaacagtattttaaataccaggaaataaatcccccggttcatatagctttggtagcttcttctttcaagataattagaaaacattcgggttggatgcgtgtgactcgatcctatccttgttgcattcaggaatgttgctcaaagaaataaattcaacaacaatgaccttaattccaaaaggtaaatgcccgaactcagtcttggactttagactcatagcttgttgtaatgtaatttacaaaattgccactaagcttatatgctctagattgagaatgatacttccagatatcattgctcaaaatcaaagtgggttcatccaaggaaaattattcattgcatacaacgctatgatttgtcaagatcttgtaaaacactataggaggaaagggaagaaacccaaatgcgattaaattagatcttcggaaagcatatgatacattgataccactgaatgagattttattgaagaga

SEQ ID NO: 201172 - DNA, 925 bp, Cannabis indica
cttattattgtgttctatgttatatacaaatagatacttgggtttattattaatttttctaacatttaaatacttttaacatttttttaattttataattaatttacatttatttattttttgttttaaataatctatcattataaattttttcttttttataagtttaaaaaatctaaagttgatacttttataagttgcagattctagttttcattattgcataatgtttttaataaactattctttatattattgcagattttttttctttgaaaaaatatagttcttaccttattttaaaactttaccaaataatgcttatatctaaaataaatttcttttgaaataattattgtaagtatcttatatctccacaatccacatatcattatcacatgcaatttcaagaaaattataaaataaaaatattataattgaaagggaaaaaaaaaataagactataaaccttcatgatcatgatcatgatcatcataatattattattattaaataataaatataatcctctcaagtaaataagatcactacaattttcagttatataatatgtttaattaaatagttgaaaatttgaactatatagaacaatcttaagtataaaatatacaataataatcagtgcttaactacaagaactaatgactaaatcaaacaaatttatacttattatagttgaccaacaaactccattcatcccatttcatcacccatgatgtaaatgaaatccttcatatctaattcttgtctaacaagttctttaatttatttaaaataaaataaatattttatccaacaaacttcaccaacaagttaattaatttcctcaactgaacttcatccaaaaattacgacattataaacaaaagtcaaaacttttcactttattataaaccaaaaaaaa

SEQ ID NO: 201173 - DNA, 588 bp, Cannabis indica
ttttttttttgtttatatatataactgtgtacatttagttataatttatattaaatttttatcctttttcataaaaatttagaataatttatcttgctaaggtttaaatatttaattgtatgtgtatttattatttatacatgtgtaataaattactttaaattttattttcgatatcacaaattatttataattttttgaaaataaataagatgtctactataataaaaagattaccatattaaaaacaaaaaagattatactttcttcaaatattaaagtatgaatatcattattataaaactaaaagtgatatctctgttataattgtctcctatatattttttattgtgatgaagataaatcatttgaaagaattattgaaaaatatcagttgggattctttaactttattcttgctgttgtaatcatgatctaaaaatttcactttccaagttgcaaaagtctttaacatattaatatccagagaaagactatataatagtaataataagtggcatacattggaaagataaccaaaaccatgttttggcagcttgaaatggggacatagatagggagatccat

SEQ ID NO: 201174 - DNA, 838 bp, Cannabis indica
ccaaattttaggcaaagcctaattctaataccactttcattggattacctgactcatctgctctcttcggacctcactaactccatcaacataaatattctaactgatatacatgtattatttggttcaatatataattttaagaatgttattagacacctctccaaatatcattggtagtgtaatttgatatctaaatataatcattaatatgaattgttaattttcttaagagtattgttattgaatattattggtgtttagtattatttagacatgtcattttacgattgactaatactccataaacatttattatattaaattagatacgactcgatacttagacaaataataatactaatatataggaatgtactaagtatcactagtatcttttaatatttctcttatcttaatgacctaataatcagagctggcctatataggaccctcctcactctcttacaaaatgcctcaatttttcaaaaatatcatttgatataaatgttttataaaaatatcacattttgagcctcaaaattcaggaccagcactataataacaattaacaatgctcaatgattatatattatatatatagaaccataatatggcctagctagctagcaagccaataatgatattcttttaatatatttttttgttctcttataaaaggtttactaatgcccttattattattcccatttgtgggtcaatagttttagaagtagtacaaaaactacaaagagttgttgcatataacaactccacacatcataataataatggcatccaataatgcttcaaataatatcaaagtctcaatttcatc

SEQ ID NO: 201175 - DNA, 605 bp, Cannabis indica
aacccttataaaaccctaacaaaaatcaagccgcctcagctgcaaaccctaaagaaacgccctttcttgctctctctcgctctctagctttatctctctctctctctccgtttattggctcaccaaccaccgcgtcagccgccatagaaaagtttattattttctcttctttcaatgtcaatccccttttttgtgtcccttagctgatgccaccataaacccttgacctagaggcgcctcaaccatcgaaccacccaccaccgtcggaaaaaaactcttactgtttagcattggcggtgactcaaccacgaagaacccaatgccaatgacccaaccaataccaaaggtcccatctcttcttattttttttttttctgctagatctttttgtgttttctcttaccattttatttttgttatttgctggtggttctcgtggccaactaagatttatggtgcatttttttaaagaaaaaatgtgtaatctcggactgttacgtttagatctatgatttcttagttaaagtctgactttctcttgctctattcaccgttctctgtcgaactgacaaataaaaaaaatataactgcctcagtagagtccc

SEQ ID NO: 201176 - DNA, 2716 bp, Cannabis indica
attcaagtggtttagccgccaatatctcaagtttaaatattttgtaaacttatgtagttttcataataaacttttatttcaataaattagatattgttataaatattattgacaaatatataaatataaatatgtgtgaaataatatctttcaaatttttattattataaaagtaatcgtaagtacaagtttgatttattatgaaatttattttagtcataatgtttaatttatcagtctaattgtaatatttagatacagttgaaaagctatttttaaaatatttaactttatgttaagtaatatttattaatttttaatatttaatcataaattgcatgtgttaggtaattaagaaattcacaattatttaaaagtttgaaattatttaactttagaaatataccactaaaatacttaaataatgacaattgaagcacttaaatgctaaattctgtttttactaccataaaagtaaatatataagttttttgtgattcaaactcttaatacttaagtctttttcttcatagtaattttgtttgattgaaaggttaataaaaatatctgttaatagacaaataagaattaattcattacatgaaaataaggctcatagagaaaaaatatctcatataagttaactaagctatttacaataaagtgaaaaaaactctctaatagctacctcaaccaaagatccaataagttactaactttgaagcatcaaaagagtgtgaaggaagtcaagtctctaatccaaatgaatatatggctgacaaaatttatcaataatatcaaccaaaaatattattcaagacaacttggaaatcaataattccatgggaatcaaaaatcccattaatcaaaattaaaagagtaatttacgacataaatacttaagtttaactctcagttgcaaataaatatttaagtttaattttttgtgataataatacttaaattatatttctagagctttgtaggtacatgtccgttaaatgtcaagtcattatccatgtgtcattttcttattagtattttaaattaatttttttttaaaaataaaaattcatgatgtggaccaatcaaggattgacacgtgccaatttacttaatatttaacaaccaggtacttatagagttccagaaatataacttaagtattattgccgccaaaaattaaacttaggtatatatttgcaaccagaagttaaacttaggtatttatgccgcaaattactcagattaaaataagtaggttgtttactaaagactgtcaaaatatgtacaatcattatcagagacaggctcgactcacagttcaataagcctttacttgtttagtaatttatttgattagaaaagcatgataggaagcatgttagtaatatgttagttggataatgcatttcctaaaattccacgcatgcagtagtaagagtacaacttggatcgttgcctgaccaggttgacttatgaattggtagctttgtcctatagaatggatacctgcacaatgtaggaagtcaagataatgtggtcaaggctagtaacggttggagatattagaatttcagtgtccctctaaccaaattagaagccattagagggcttatggtgggagttatgttaatccaccacagaatctgcaaggttgggagtagaagtttatagaaatgcaagatcaaattcagagacaaggtgaggaaattcagaggttgtggcaataagattcatttgttgcacctctttcactggcacccattgttcttacctcagagcttccagcaggatggtttattgttactaattggacggagtcaccacacaaaaagtttcgaggaaagcaggtacaaagagaaaaacgatgtagctttgaatacccttataccttcccaaaatgtctcagttataagaattatcatcagggtgagtgtaaaggaaaaatgtgttttcatgtggtataatgggacattacaagaggaattgtccacgaccagagttacaagaatcatgttttcagtgtagaattattgatcatttaaagaagacttatcctcagttgaaaaaggaaaattaggagaaagaagaaaaacctactctagtctttgaggttggcctactcaggttgatgcagtagttagttcatctgaggtggcaggtcaatatcttaatactgatttctcttattcaaccttagttgaatctagagctacacatttgcatgtggtacctaaagtgagtaataaactgggtaggcctcatgattatcataatttggggtttgagaccctattacctagcggagaattagtcacctccaataagtgtattagatctattatagtttagagttgataattgaaaagagaagccctaatcttattaaaatattttaacaaacttcggtgttattttgagaatggaattctcgtttaagcatgcaattagtatgaatcaaaagagaaggagttgacttctcgatcaaaagattaggaacctatggcatattagtgcatagggtttccagcaattgtgattgaatccagtagacccaaaatatctgggcctgtgaacgtttggatagtagaagaattactagatgtatttgccgaagagttatcgggattgccattacaacgagagttagattttatctttgacttgacacctggagctgagcctgttcaaaatacatcatattggaaggctt

SEQ ID NO: 201177 - DNA, 1282 bp, Cannabis indica
agaaaagaaaaataaataataatttttgcacgagtatattgattgctcgggttgagttctaagaaaatgtaaaatttcatgatcaaacttaaattttttaatgatttttcatttaagaaaaaagacaatttatatatatttttctcaacattctaaatcatgttgaatccactcatttggtattcgaatgaaaaatgttatgttattttttagaagtatgttgagtcaaaaaaatgtgcgaaattcaccttgttcacaaaaaatctagctcatgatctttctctctcttctttagtgtctcttgatcttttactcatcagttttaagctttggctttttttattacaggtatcatctatttattataacttctcgtttgttttactacctatttactttaagaaaaattattttttattagagttagtcccacattgttaatgtgtggaattaaattgtcatatataagatgaatgggctactccttcgattaccaattggttttgagatcgatggaatctcatttatcttatcaaaaattttaaaatggtatcaaagccgcttgtgatctattgtgagtctaaagtgctaccagtctaaaaaggcaagccctaaaagagccgttcttttgatttgttgtgagctcaaagtgctggcgatccaaaaagatgagccaaacttaaaaatttccctcgtctcccttttaacttctatttcagaccttccagccaatgtttgccagtttctagttttggagtctttgacctatttcaaaatccataaatttctcaacatgtacacccacaaatttctcgatatttggccttgtaggattctttcaaatgtcatattcggtcctgtggtatcttaaaggtcgttcgttatactcacactttctaggccaaagcttgaggagggtgtattagagtacgttagtcatacattgctaatgtgtggaaataaattgtcatatataagatgaatagactactcctcccattaccaattgatttgaagatagaattaacctcattcatcttatctaaaattctaatttttttatttagaaatattcttttcttacttgaggaaataatatatttttatttatatatttcttgggcagaagtgcactaagctcctgtccacctcaacctaaatgaatccccgtattcgtgttaatttattcgcagaacatattttactacgaatgaatatttattaagagattcaaactcttttaagcattgataattaattagcataccgagcagccctgaca

SEQ ID NO: 201178 - DNA, 1390 bp, Cannabis indica
tgcgctaacgaaacttgtgtgacatttataacaaatttttgtctacttgtgtagtaaattcaacacatatttgtgaattggctacctacaattataaatatataacattgaactatacactacggataagtccctcatgtctttctctccaaacactcaagaggctgcaaagctttcgttccaacagattttagggatgcccatttgtgattgccatgaacaatacttgggactaccggcttactcggaacgtgaaaaaaagcaacatttcagcaatataaaagatcgtatttggaagttgcttcactcttggactgaaaagctcttttctagtggtggtaaagaggtccttttgaaagcggtaatccaatctatacccacctatgctatgaattgctttaaattaccatctaagttctgcaagaaaattgaatccatgatgactaatttttggtagggaaccttgacagacaagaaaaaaattcattagaaacaatcgaagtacctttgtcgttcaaaattaggaggttagggttttagagattttgttcactttaaccaagctttactagctaagcaagcttggttaaattttcaaaatcctaattcacttctcagtcgtgttttgaaaggccgatacttcccaaataataattttcttgatgcgaagaaaggaggtttgtcatctcttacatggcagggtatttgttggggaagagatttattgaaggaaggtctcagaatgaaagttggtgatggctcatcaatagattgtggtttagatccttggatccctggcaggtccaagtttgtccctattttctactcaggtccttctacaaataaagttgttgattacataactagtgaaagagaatggaatctacctaaatttcaagcaaacttctctctagtagatgtagatcgaattttttcaatcccactttcactaaatgcttctcaagatgattggttttggcatcacactgctggtgaaatctcagtcaagtcaggataccattttgcttgttcaattgcttcggagttcaatgaatctttatcactttctcaagaacaattgtggagatcatattggggcttaaaccttccctccaaagtcaaaatatttggttggagagtgattcaaaactccattcctgttgttgtagcattattcaaacggaaaaccatcacatttgctgcctgtagcttatgtcaaaatgcttgggaatcagtgggacatgctttatttagctgcaaacatgctaaatccatttggtttcactcaaattttcatattgatttttgatttgttgctgcttctaagccaactgattttttgttccatctatcccaagtctataccaaaattgaatttgaattgctcatt

SEQ ID NO: 201179 - DNA, 885 bp, Cannabis indica
cccagttaatacaatctgaacaaagtgccaccaaatctacttatgatgtaaaaacaagccaacattatttaagaggaggttgaaaaggaaggtctaatgagtaccaagcatggattccaaactttagagggtctattttcacacacagacagaaccaaaaaaaaaatattatatatgtatactaaaataaataaacatttttattatgtctcaataaatgtttgaaaactaataaaaaagaagcagattaaccccaagtccaagcaaagaaaagggtctataccagaagaagtggtagcttatgagaaaaagagatgccttgcttctttattattttctcttttgaagagagaaaaaccattaaagagagataaaggttaaaatggggcaatgttgatgagaggtggtgttatatatatacacatatatgttactatgtctatgtcccttctctcagaccagattgttggttttctctcacttcaccagtcactacacacacacaccagtcagagtctctatttttttcatgcacataaaaaaatggtactatacatgcatgcctttgtcacctttttccttggatagcaatccttttatttattttattattttaaatttaaagtctttttgatattataaaatcacaaaaatagaggaaagaaaaggaaaaaaggaaaggggtccccatggaacaattgtaatttggattttatgttggtaatgcttggagaagaagatgctgttggagtgcaagaatagtttttgggtgccgtgaattgcttctgttgtgccaattaaagaataaaggttttttttttttttttactattatgatattcaaattactactctgcctgccacgtatatattattatagtatat

SEQ ID NO: 201180 - DNA, 1367 bp, Cannabis indica
agagaaagtcattttttgtatcacagagactatatgccttacaacttcttgaggacttgggacaccttggatgtatacctatgaacacacctatggaagccaattttaagcttggataagataaaaaggaaaagttggcagatccaactttatacagaagaatcgtgggaaaacttcagtgtttcaccataacaaggctaggcatttcatactcagtaaatacactgagtcaattccttgctgtccctcgtgctactcacatgaatgcagcagttagagtccttcaatatgtgaaagcaaatcctggacgaggaatttattttgctcctgattctgaagtaaaactaagagcctacacagacttggattgggctgcttgcccagacacgaaaagatcaacaacaggtttttctattttcataggggattcaatcatatcacggagaagtaagaaataacacacgatttcaagttcttctgcagaggcagagtatagggcaatggcaaatacaacttgtgaaattgtgtggctcttgtctattctaaaagaactcaaggttgatcacaatggaccaacattgttgtattgtgataacaaatcagcacagcatattgcaacaaacccggttttccatgaaaggacaaagcacgtagagatagaccgacatttggtgagagaaaggtccaagaagggattattaagattgttcatgtggcttccaaggagcaactagcagatatactaactaaatctctattccctacgcagttcaagtatattaaagacaaaatgggattgaagaatacatattgcccatcttgaggaggagtatatcaagttagttaagctttgtattagctagttattagtgagttggtatcatagagttggttagttgtgattgactaactaaagctactataattaagtaactcatttgtatgctgtaacaaatttgaacattaataaaaattctgttccatttttttcttcctctgttttcttgtttctctctctcgatggattgctaatactaagatgtattctctctatttttctctcaagagcctcacactttatttttggaataacttgtggtaattgtgatgggatgaacaaatgcaaatgagtgagtagttctattttataagcttccttgaatgtataaacaatacacaaaacatcattgaatgcatcgtatatttatactttttaagtcaaaaaatgacttgtaatttttcacatgattgaaaaacaacctcctttcatagaaaaagaaaaacaattgcacataatttttgttttaaaatagggtagggtaggatgtgatgtatggacaatatatacatatattgttttttttaaa

SEQ ID NO: 201181 - DNA, 577 bp, Cannabis indica
atttatggtaataattaatttgacgatttgacatcattataaatatgttacgggtaattaggggttaaactcctttatatttttatacacttaactcatttatcttttatattttggtggcaatacctccttatgttaagttctatttgtaaatttaaattgttgtccaaataatttctgctaaatgccaagtaggactcccacatgaacacgtggcatgtcttcatttgataaaattattttaactatttaaatattatattaattcattttttaaaattttaaaataacaaaaagttaatattcttctttaaaaaaaatctttattttgcttcttttttctttcttcgtgtacgacttcatcacagttccaacaaagaaaaaaattcttcatcacagatccaatctctattcttaccaccgctacttatgtttgggtaccgccaccaatctccattatttaccttactctcaagatcctattcaaacaaaaatgtaaattcaaatttggagcttaggatatattttaatctcactcaataatttgaaggctataattaggattttttccccccga

SEQ ID NO: 201182 - DNA, 1312 bp, Cannabis indica
tacatatacaaaacatattacatcgtaataaggtctcttattataatttctttttaaaaatttcttctttttctttccacatgatattatagtattttaatgatgtgacaaaataaaaaatatttaaattatcatggtccttttgaaataattatcacttgcacagtagataattagtctcattatacagattagatagatttggactttttatttgttttgatcacttgcacagtaatcactttttatttgtttgtttaaatttataatgaagaaaaaaaattagttttgttatatatgttgtctcatgttaattaatagtatactatagtaccataaaaagttgttttattcaacctaattaacataagactaaaagttaaagagtctttatttattattattattatttttttattttgatatttacacaatatattatttcctacaaactattttattttaccgtgatatgaaactttttttatttatattgttttgaacattttttttaaatgtcctattgtatggtgagaaattatatactatattattgttgaaaaagtgggaacaagcaaaagagaactttagtggactggttttgggattgagagtcaagccattcaacgaagatgtaatagcttgggtgatctatatccaattaccaccagtctctccgatagctctgataccatgaaagaaattgttacagtgtgttttattcattttcaatcaatatatatataaaagatacatgatatctctatgacatatacaacccaatattatggcactaatatagctaaagaaaggaagttaaagattttttttttttgagagatcaaacagccattgacaaacgacatgaaagctcaaatttaaacgccaaaagctttggagcaagaagagagaaagtgtatgttttttaactgagagagagaaataatccaactaaaaataaaattaaatataaccacctataattatacattaacttttgaaaattaattagttttaaaataataattataaaataactaatattatatatataataaatataattataagcttacaataatttttgaaacaaaaaataatcatttaactatattttaaaaataaaattaactaacctacttttttttaaaaaaaaaaacttaaaaaataattactttatagtaatataatatataaaacacaatatatattgtaaaaaaaaaatactatatatttataattttaaagtataatatatataatattataaataatagtcatttttttaaactatacattatttaactaattt

SEQ ID NO: 201183 - DNA, 1409 bp, Cannabis indica
tattaattcttacgacgaatttttttaatacaatgtaagttgtattatttaatacataacagatagtccctatttagtttgtattataatatttacaaaggattcggagtcaaccacaatcttcaatctggactcgaaaccaagacccaggccaggatctagacccagacctggacccggacccggacctgaaactgggacccagacttaaactcggacccggacccagacccaacacggacccaggacctaaacttgaactcaaaacctggaactcaaacccggacctttgtgacccgcaaccgagacccaaattgggacttggaaccgaaattggattcggacccggacctgagacccaaacccgaatccaaactcgaaaccggacctggacacccatacccaggactgagaccttggactaggacccaaaaccgaattcagacccaaacccaggacctgggacccaaaccagacctgtagtcggtgtttaggtcaagtttattgaaaatatattataactttacacaaactattaatacaagtcaatatcaacacatagtattgtattaaataatattaacacaatataatataatatggcgtaccaaacaagcccttaaagtgccaaatatgtcaaggatttttcctcagcaaaaatagtttattttcagaaacactactatagtacatattttcatttttttttttgccctattttattttaggttgaaggtgctcaaaatttagggcattttacaccttatttttttatcttattatcaaaaataattcgataactatcaataatatttatatttttatttgcttggatatgtttcaataccctcatttatatcctttctctttttcttatttccctttcttccctcaaactttaaaaataatttctgatcacatcgttactcggatgagcctaaaaaaaaatcattgtgatctagttttcaatgtgaacttttcaaggtgtatgagcatatatttttttcgttatttccataaacaaaattatttagttgattagttactcttttatactttttttttaaaaatcttagttaacattcattttaaaatttcataactaattggattatattatactatacaataattaattagctttcaaaataacaaaaaaatatatagaatttgataataaccaacgccataagaaccctatagcaacgatatatattataatcaacatcatatggaccctatatggctacggttatctcacacccctttagtgaccactggaacggcgaagatcgcaaatttcttcgaaatcgacattgtagggccaaaaaattatctctaaagtccaattttatagtagtgcctagcggcctaagccgtccttttgtgcatattgaacaagctttttt

SEQ ID NO: 201184 - DNA, 1088 bp, Cannabis indica
atatatatatgtatgattaaaaggaaaggctaaattgcaaaacaatgaattgaacaaagtaattttctattatcatatatttttatatttatatgttagtagcatcttttgttgttcatagtacattaattaattatgtattttttatacaattttagggtatgtatataatatatttataagaacataaataattatggtcaaccgaattattctacattatatttatgtatagtccaacttggggaatcattacctaactttgtttggtaagccttataaatgttgtattatattaaataataataaataaaactatatttggataaaacaatgtattaaattaattattacgaccaaaatttctaatacaatgtaagttgtattatttaatacataacaaatagttcgtattagcttgtattataatatttacaaagcggagttaaccccaatctccgacccgaacccgagacccagtcctaacaatattcctaagttatattggtcatcaataccttgaacccagtaggagtgtcatccatattcctaagttatattggtattagcaccacctaaaagtgataccttgttattagttagcgatattttagaaaaaaaaaatattattaaattataagggactacatacttaattgtacgaatatcgatattccttatttagttaataaacacctttttttttcttattggaagagaagaagatcacatgtccatgagtgatctcttcccgagtttattgaaaatcctcacttatggcggaggaataccgtggtaacaacaaacaatacaaaaggaaaataacgaaatacaaatctcacacaacataattgaaataaagataaaccacacacaaacaaaaaaaaaaaacaacacccacacaacacaaccaaaagcaaaggaaaaacacacacaaaccaaagacacaaaatacaaatagtacacaactattacacttcatgaacaagattattattctaagcacactatatataggcttcacacaaactcaagacgaaacaaatcactcagaacattagcctatcaatgtttgtaaagactcttta

SEQ ID NO: 201185 - DNA, 905 bp, Cannabis indica
tataaaaaatatcggacaccactggtatgcccaataagaatgctcaataaaaaaataatcattattatttggaaccaatagtgttcaacaccatataattttaaaaaataaatttaaaaaatatttctaatcaatcgtaagaagtcacctataaaaaatatcggacaccactagtatgcctaataagaatgccataaaaaataagcattattatttggaaccagtagtattaaacaccttctatatgtaatgctctacgattgattaacaatattttttaaaaattattttttaaaattatataaaacacgatacttaattacattaataacagtatgacactgatgaaaatactaagcacggagcaattctcataaaaaaaaaaaaaatatataatgttgggtttgagagaaagggcatcttaaagtggggcccacatccgattcagtgccacggtggaatctaaatctaatcttcactttctcccaccgtccctactacccactcttccctccaatccaccgtactctttgtaaaattacaccttcgccctttattttcattttgtttttacttttcaccccttcaaataaaaattacccttttttgaaattacataattgccccttcactttctttttgtttatacgtttgtcccccactaaatttatcatctatgagtagggacatgtgagtgagtgatctaatttttttttattccattgaattttattttttaatattttaaattgtgaaaacatgagtcaaagattctaaatttcctccttaaaatttaaaaatgttgaaataaattagtggagttttaaatagtttattatctatgagtatatgagtatgtagggacatcaaggtctcatacttttataattagggtttttgattag

SEQ ID NO: 201186 - DNA, 1765 bp, Cannabis indica
aaaagtcaacaatggagattagagagtgaacctttaggcttcctagaagaaaagaggaaaacagcaccaatcccaatagcaacaaaagctacagcagcacccacaaggagatgagaatccactgactgtaaaaactccattgattcaaagaccaaatcttgaaatgggtaatgaagaaaatagtccaattgggttgtggaaatagtgggttttcctcggtttctccacactaagtagctgaggagagtggtagtggtaatgggttaggtgaaagaccttacctttaatgtgaaaaagccatgaaagaatcgaacaaagaaaaggggatctggtctagctacctaactacaacgaaggcgtgttcttcaactaatggtatcattttctgaaaattacatttatatcctttgtttcttcttttttgctcatattttctagacttacaagacttctatttatttggatttgaaaaatttgtatgaagaaatttttattagattttcttaaaatatatttatacttagtaaatttttacaataatttgtgatatttgtcttaataatatatatatatatattttctaaccaaaaagacatcacgtggtacagatctcatcctcatttcttctattgttttaataatttcgaggactacgaatcacttatagggatcttatatctcattttgtaccttaattgagtcattctgacccaaacaaaaaaagatactagtaaagatttccctatcactatagcacacaacatgtagtgtcataataatatttttattcatgtgtatttaattataataaaaaaaatttctccaaaattataatttagagttttcttccattaaactatgatatttgtagagttttaccttaaattattttttgctataaaaattaatttctcttagctataaaaattgtagcatgtatccctattcagttatattattatgcccaatttttaaaaatattaattaatgttttatgtgacaaatatggagaaaaaatatttttctaatatttttgaacatttttttgaacaactatagctcttttaaattttgtaaattatataattttttatttaaattcaaataatagaaataaaatcctttaatttgagaaaacatatacttttagtctgaaaaaattaattgaaaataaaatatttaagataatgttaaaatcttttggtattgatttgtttgttgtagatgtaatttctcttcttatgaattacaatgatagatctttgcttttctttcaataagttgaagcaaatgatttaacttaataaataattattgtcctttccatacaaaaaattaaataaattattttggctgataaaataagaaattttaaaattttaaaataatgaagatgaagaaacgaataataaaaatatatttattttctttaaaaaaaaatctaagaagacaacatggtgacaacatatatttctttgaaaaaaaaaacatggtaacaacctatatttcttgaaaaatgaaaacatggtgacaacctctctttaataaaataaaattaacaaaaaaaatagttttaattcttaaaaacaagtattactaaataaaaaaataataataacacaccaatttaccctttaatttatttgaaattagcacaaatagttttttttaattctgagttcataaattgtaacattaattccttatagataaatttgcaaattcgtcaattgaatttcaatcacataaatatatatatgaactt

SEQ ID NO: 201187 - DNA, 894 bp, Cannabis indica
ctaaaattacaaaaatttacaaagatgatgttgtaagcataacgaacaccgccatagaaaaaaaaattaaaaaaaataattctagcataataggagattaagagtaacacgtctcatttatataaaaatagtattaaatatttctacattttatttcaattttttttcttttatggatttcttattatttaccaaagaatagctaacgaacactaacaaaaaaatattacttttaccatcttgcaaattgtactggtaaaaaaagtcaaaaatttaccaacgcatatttgcactggttaaaagatcaaagttttaattaacaaaaatctgccaatatttttaatcaataaaaaattaatgtgtatcctatgaaataattgtgtcttttaacctatataatgtgttgtgtcatacgcggttatatttaataattattattttaatattatttggtgactttgtgattatttttattataaattatttgtactctcactcaaaaatcctaagaaggttatttaaaaataaataatacttttggttataaaacaaaactaattataatttttttgattagtaattataagtataaattagtggtcatataattttatttttttccaatttatatcacattctaattaattaaatataataattctttttttttttttttttttagaaatcattaattctctttaaaatataaatataaattcattgtgatgtatatttattttaaattatattttttatatttatcaaaaataaaatatatacataaatttaataagatatttttaagacataaaaaaaagaatgaaagagataattttgtaaattgacggtgaaagtgtgtgtgaaacactgaaagggaaaatgagttttggtctt

SEQ ID NO: 201188 - DNA, 1838 bp, Cannabis indica
taaaaataaaaaaaacccctaaattaaatatatcaacagaattaatgtttcaaacaactctctcttatgtgccacatgtaataactccactttaaatgaactctctaaacaagttgttatggcactctctagcgggcaatatcccgattatctagtttctatcctgtttcttttgatcttctggatcttatcctgtgttttcgcctttgtggtgtcgtattgaatctttgtctttctttctttctttgttgtgcctattgtgtttcccatctgtttgcattttcttacccttgtttctctgcattaattgttttccatttgttttgacttttcttaagcattgcttactcatttattactccttctcttcactctgtctcatttattactttagattttattgagtattgtagattttgtctcagtttttctttgcctttctcttccctctcttgctcgtgtcctgttctaccaattatggctaccatcgttttgaatcgatcttagagggaggcgatgattatttctaccagctatggggtctgaatagggttatcaaaaggacggataaagcatcttaactccaacttctacaacatgtctttcatctccaggtgcacgtcccttttcttctatttaaggatttggatcctttggagatccttacttcttcaccttttgtatttagtttcctctgttagttctatatgctttcgtttttccttattaaccatcatggattccttagcccttaatatttctgaaattctcaatcttactgataaagaagagattgttcatgaccttgttgaggatataagggggatagtcaatccaaaaggtctttttgtttagtctttagtgttttaaccctaagaaccataaagactaaatggttcgaggatgctatgtggaatgtcaggatcactcgtgcacccattaccttttctgtttatgggtctagaatgtttatggtggagtttgaatgtgagggagatatgagaagggttctagaaggccaaccattacctgtgttaatcctgagggccttgatattcttttacccaaccaacttcgatactcccccttctggattcaggttcattcgatcccatttggcatgaaatcttacaaaactggccaaaatgataggggatgaggttggagatttcttggaggtggacaaagttactatcttccaagtctcttccttagagtcagggtccttgttgacgtttctaagcccatcactacgcgtattcttgttgatttcaaaagcattcatcgtgaaaaatggcttaactttaagtataattttttctcaacatttgctttcattgtgtaatgtttgacaacacactcactaagtgtattacttaccttaagaagtgtaatgatcatgcatttcctccctctcttccttataaaattcctctcaaggcccttgccaagtccaactttaaaagaaatccttttgatctcttcaattccatcccttttgatgaactccctctccctcatgctaatgttgatcaatctcttgctgctgctgttagtcagtttcttactactaaggacaatggtgatgggtcctctatttctgctcccattggtagttttactgatactagttcttttgggaaggaacatggttttatcccatcagtcggaagctgatactactcatttccaaaattttgtatataagttttctctctttcccttgcatcctattggtaataaatttacttgaaagcatggctccttgtgtgaacggctggattggagaattgtaaataatagttggcaaagtctctatcctaaagctgctctttatc

SEQ ID NO: 201189 - DNA, 910 bp, Cannabis indica
aatgctcacaatttaaatatatagacacttaaattacacacatctctctgtcattaattttaaccatattgtataaaatgaaggatcatacataaaaatatttaaatatataaataataaaaatttatgacacatcataatatatatgttatttaagtatgtatttcgaatataaatgtacatataactcattattctatttaaactttaagagaatttcagcatgtgcagctatttatttatcttttgaaggggaatatttggcttcgttcataccttaaaccgctaaactcgatcaatgaagaaaagctaaagagaaaaagaatactaaggggatgccttttaatatggtcatcatcaacgcaaataagttaaagattttgttacgtctaacaatttaatttattaggtaattaaaataattttcttgtgttaatttgtgatttttcttatttttttccttttaagaaaattttattttcaactgttatttttaattttagaaacttgtcttacaagagaatgaattttctttatgaaaagttacttatttttttttttttttgaaaaattgactctctctttattctaattgttcaatttgattttgacatgtttattgcatatcaaataatcaccactacaaaatatggtgtttttgtcggtttgcaactgacatatattcttttagcatcgattgttaaaaccaacgtatataccgtagacgcaaaaactacattattttgcatcagtttttaacagtcggtaccaaaaattagcgacggttgaaaacagtcgctaatagagtacagaaatttgtttacaacattctcgtcggttttgtaccgacacaacaaaaaaccaaataaaaaaaaaaagaaatcctgatatcacacccaaatctaaaaca

SEQ ID NO: 201190 - DNA, 728 bp, Cannabis indica
ttttttttttttttttgaagatgggacgtatgcatgcattgtcaattttcatgaacagttaaattggaaatatattgtaattatttacgaaattgtggcatcattaatggtatctccttttgcaagcatctttaaataaagtttttttctttctttcttacaaagtactgactagttagacaaataagtacaaaggggatatactataaacaacgaaacaattttcaatgttgactacttccactaactttcatcgccacccatatatttgcacctatgcataaattttccaggttataatatatagggtattacgggtattatttttgctcctatatatgatggcaaattcttagccattgaattttcatttggtggttgtaatttgcttagttatgatagagttggatgtatttgattcttttcactattattattattattattattattattattattattattattattattatatgtagtaatcgtataatattttggaacagaaattgatatgtcctctcccatgactcaagatttgattaggagaattaaattttcataatattcaaaaattagaataggaagagaataagtaaaaacgtaatttatagagcaaagacatagtaatattaaacatcagaaattaaacaaaaaatagccaccaatttgtgtcttttttcttgtatctttcaaaacttcattttcagattatatatttatat

SEQ ID NO: 201191 - DNA, 647 bp, Cannabis indica
ttagatcggatactttgtgaacaagcctagtttagggttgttctattagctgaaaaaaaaaataagaaaaaacaaatctagcaaaaaatgaaattaaaaaaagtcgagtttgacttaagtattttgtatataaacatatttttgatatggtgtaaaaaaaaaatattttttgacattttttttaattaagtagttaaaataaacataaaaattcaaatttctcttttattatttgttattagatcaaaatttaatggtttaatatttttaaaattaatatttatagttaaatttatttaataatcatcaataaataatactaattgagaagtattttatatatatttcatcgaatttagatttagaattaatttgatttattttacaaaacaaatactatataatcattattacacataaaattaatacacacttatagacaagtaatttcaacaaattatcttatttaagaagagcctcatttatttaaaggctaatttaatttttgtcattctgaattttgatatatacaaaatcatgctcttaaatttttaaagttgttaaaaatttctcaaaactattgacacttttggattttaaaacttatttctaatttctgtaagtaaagtctaacatgaatgaaagtt

SEQ ID NO: 201192 - DNA, 1745 bp, Cannabis indica
tctggcgccatataaccactgcaaggaacacatcatgtgaaatgtaatttatggaatagaagtaaatacaatttgatcttttatataatagtaatactcacaaagttcctactactctgtttgtgtttccctcaatttgatctcctccaaaagttctagccataccaaagtccgagattttaggaaccattccatcatcaagtaacacattacttgctttgagatctctatgaacaattctcagtctcgaatcgtgatggagataaagaagtcctctagcgattccacatataatttggtatcgctttggccattctaatagtttaccttgtgtttgatctagaaaatatgtaataacttcaaaatattgcagaatggtgtgtgtctaataaaattttattcagttaaaaagttgttctaaccaaaaattaaacgatcaaggcttttgttcgacatgtactcgtagactaacaatttctcttctctttcaatgcagcaacctataagctttacaagatttcgagttgaagcttagcaataaggtttacttcattcttgaactcattaaccccttgtttagagcgtatggaaagccttttcacagcaatttggtgcccatcttctagctcaccctgaaaattctcattacaaaactgttgcaatgcaaagcctttatattatacattgtttatatgtaacatgcttactttgtatacagatccaaaaccaccttgccccagcttatttctctctgaaaaattatcagtagcagtggttatttgtgaaaaggtgaacaaaggaagatccagttcctcatggcttccattattcttaactgtctcatttttgtctgtttttgacatgaaaatatgagcacaaattgggttaggacttgggattcatttcaagcacaacataattcaggtgtaaaatacaagtgtataaccttaataaaattatgctagctagaagaagacaagagtagctactacttattacattatggatatgtgtattttatttggcgactacatattgaacatatactttcctaatcaatcaaatttgaactgatgggtttatatattacaatgcataacttcgactcgaattcaagactttcaacatatgcacctttctatagacacttgagctagtctcatgtggttaatttgaattgagactttttttgatttaaggtggcgtttgattgagagaaatgaaaatatgagaataggaatgggaatgagaataggaataggaatggaataaaatttaaaatccataaaaaatttgataaaaaatcattaaattttttctctagttatattagaatggtcttactttcctttttaaaatggaatagtcattcccccaaaatgtggaaagaacattctattggaatgtcattccaatactttaaaatgcaaccaaacaaaagaatagaatgaaaattttcctttccattccattccattttattacctccaaccaaacgccacttaggtgtttatatattacaactcgaacccagaaccttcaacacacacaagtttcatgtagttaatttaaactcagacttaatgtattgaagtttgaacatatatcatttgactgattttctatcatcttatcatttgaaactacattatcaattaaaaatcaaataatgtatatttgttggttgtggttaaagccaaccaataaattattgagtaggtaattagggaaacactaccttttaa

SEQ ID NO: 201193 - DNA, 1023 bp, Cannabis indica
aatttaaaaaaaattaaaaaagagttatatgacacatattttgtcgttatcctactatgtacgtcgtttttgttgtgtaagtttcccattagatcatttgtacatattgcaatgtcgttattataaatggtattgattctctctctctactcaacactcaacactcaagagtggtccttacaaaatttggtttctttcaaacttttcacatacattaataagtaaaatatcttaaacctatagttagaagccaactaataattaaactaccaaactaaatatataatataaataaacttaatcctcctcacctgtactgttgataattgttcatatagtactaatgttctcacccaatatttggtctctcacctaaaattttacaaaccaatcaaacacaataatatagtagtttcattactttattttcaaacaaatacaatatattaataatacttggacaaaggagattatttggtgaatttgtgctaacattgccaaaatacatgtgatttacattaatgtggctcaattttaacctatctttgattggaaatctataatgaccaattcccaacattaaaatataaaaaatctcttgactataagatccattactattatatatattatttaataaatattgaatcacaattcacaatatccatggttcttttcatgtgggtttggaacctaataagtcaataaaattgattattttattcttttccttatttcttggtttaggccacgactaattaggttagagtgacaaactttgtggttgaccacttattttgaatgccctgttttttcacaggcttttgtttgttgagtattttaaggtaattattattataattatgaatatatatatagattggatgtggctaaaatatacacagcaatatgtataggcctcaccaactagctaaggcaactagttaattatatgtatggttgctgagccaaagtccaacataataatttaacaccttatattaaaaaaaatttaaccaaata

SEQ ID NO: 201194 - DNA, 1448 bp, Cannabis indica
taacaataattaatatattctttatccattcaaaaaaatatatatattcttttataaataattgtataataatagagaataatcaagttccactacaaaaaatcttacttttagtcactaatattacaatttattgtgactaaagtgtttttagtcacaataattgttgtgactacaattaagttagtgacaaacttttatctaaatattatcttttagtcacaagtaattttttattgtgattaaaaatcacatttagtcacaaaaaatttatgttatgactaaaatgttgtcactaaagataactttttttttgtagtgttcgtttacgctaattggggcattgggcaaaaaaaatctaattggacattttttagtcatcgaagagtttccaacattcattctcgagcggggagtaagttcaagaccaagcaaacctaatctgtcaacgtcgatgcagtcgagaagagatttgaatttcactttcccccacaactcatctctctgccttttttgtatgtgtagtagtaaaaattgaatcataacatatagtattttgaaaatataattagatttatttgaacaaaatatcaaatgtagtatcttaaaaaataaataagatattttttttaagaaaataattatagttttcaataaataatagtaaaaatataaaatataatattttaaaaaactgaatttggaacttttttttaaaggaacataaaagaaacaaaataaaaaataaccgtatgtatttttgtaaaatatctatgcgtattcgaatacccaaaatactcattctttctttctattctctcgctcgaacacgatctatttattaaaggaataattacagcacatattgaaatttttaatttttatacttttatactttgggacagaattttttttaattgttctgttttgttgttttacagttgttttataaaaaaaatagtatttttctaaaaaaaattcgtgtaccagtaaaattataaactttgacctaaaacccactatttttataaaaatcccttattaaatgtattaaatgggtcaacccaaaaataactcgaatccatttaagaggaacccaaatctattaacttttatgtaggtttgaagctgggttagtcttaaaatttagtgaactataaaaaaaaaaaaaaaaataagacccttatttagacaaagaaatataatatttttaagtattaataaaatatatatattttttaaaaagaaaaattatttttggacctcgaactgtagatacaggcctaatccacctatttccatagctggatctgatttcgagtcgtgttattatcctattttgctgccccttccatatggataaaattgaaaaaattacattatataccctaagaatgttcgagtttcgagtaaatttacaaaaaaaactggaatttgggttaactttt

SEQ ID NO: 201195 - DNA, 1341 bp, Cannabis indica
aaaaataaatagataaataaaatccatagagagatagattataatggtatttattgggctagattaagttattttggattataaaaatgtccttgtttttagaataaatagcaccaacgttatatcaatttttaattttaccttatgtttttttttaccttcataatattttatttgcttaaatacttataaccacctttggtaggaggtaaatattaataaaatacatttttttatttgttacaaaatattaaatttatacacaaaaaaattcaatatttttataaataaatggtaacaaatctgtaactaatcaaaggggacaaatcactaaggagtaagtccaatcttcaacgagtccctaatttattttaaaaaacataataaggttgatttttcaaccttagaaaattttctgaatgatgcccgacatcttccaaatccaaaaaaagtattagcgtcgtagtactcactatgagtgttattggtcaaaatggtcaaatcactaaagatagagttcgatcatcatatgtgttatttatttgtgatcgcataaagaataaggttgatttttcaactttgaagacgtttcaaggttgatttttcaattatgaagacgtttcggatgatgcccgacatcttccaaacctagaagtggtgttagcttatgagtgttattgatcaaagtagtcaaatcactaaggatagagtctgatcatcaaacgtgatgcttatttgtgatcgcataaagaataaggttgaattttcaacctcaaagacgttccaaatgatgtcgaacatctcccaaacctagaagtagtgttagcttcgtagtactcactacaagtgatattagtcaaattggtcaaatcactaagaatagagtcttatcatcaaacgtgttgtttatttgtgatcgcataaagcaataagattgatttttcaacctcgaaaaaagctttgaatgatgtctcacatagaaatgctaatttttggcaaagaacaattctgaatcagtagaatattcttcaaatagattataggagacatagttacttaactctaaaaattatctctactcactatccatagaaataaataagacaatttttttatacaattaatatcgcaataaattttgagcacgatttttttttttttaaaaaaaaaaattggtattacatttgacctcaaaaattatctctactcactatccatagaaataatattgactattaggccagttaagtgagacccaattctgattggagggtcatttgtacgaaatagtattgtttgatagtgatcgttgggcatgatgttagcccaatatatgtttcc

SEQ ID NO: 201196 - DNA, 1730 bp, Cannabis indica
gaaaaaactttgttcttccaattatgaagatggccccaaacttcatcatgaaggtaatggaagacttgctttttcgatcttccaatatgttgggggagacccaagtatttttcaaaagaaaatctgatagggatttgtataaaatcataaatcagagtttgatccctcatgccaacattaggggagaagtacaaagaggatttttggaagttcacttttttcccagtagccctctcatacacatcaaggacctctttaatggtgttgcaggaatggatagaggccctacagaaaaggaaggtgtcgtcaatgaagagaaggtgggatatagcaggggcacgcctggcgactttgaattcagtaagggctctgcttctttcctgctgctgaagaagagaagagaaaccctcggcacaaagcaggaagaggtaggggagagagggtctccttgacaaataccccaagtagggataacatttccagagatttgtcgtttacattaaattgaaaagtggtcgtggagatacaagcagagacaagatgggtgaaccgagaagagaaatcaaatttacggaggatggctaaaatgaaagaccactccactctatcaaaagctttggccatgtcaagcttaaccgccatccaacccatcctcccacgagacttaagctttatggagtgcgcaacttcctgggcaataataatattgtccgaaataagtctacctggaaggaaagcggtttggttgggagagatcaaattgttaaggacaagtttgagcctattagcgatagttttcgagatgattttataaatgatgttgcataggctaataggtctaaactttgatatcgaggtgggctatttgactttggggatgagggtgatgagggtggtgttaagaggggcgatatccccatcaccgttaaggaagctaagagcagcaatgagaacatcattttaaggaggggccagtttgctttatagatttttgagttgaaaccatcaaggccaggggctttgtccaaaggaagttggaagaaagctttctcagtttcctcaatggaaaacgcttcatccaaaaaagatttatcggtatccgatagggaacggtcaataccctccagagcaatctgcatgtcagtacaggaagggttcgtagatgtgaaaagcgaacgaaagtgagactcaatttcacgaattatgtcttcctccttagaggcaatgctcccattcgataaatgaagtttgtgaattttattgaccttcttcctgtgggaagcatagcgatggaaaaattttgtatttttgtcaccctgagttaaccattgagttctagctctctgtttccagtaggtctctcctttgtacagaagggcgtcaagcctggattggagatctttgattttttcaattgtatgattatcccaaatagagctagatctgtcaagcttaagatattttttgagtctacttatgcgctttttaaattggacaccctttttgtggttccaagcattgagatggttaacacaaactgcttgggttgcaataaggttggggatggctgcatggtgagtagtggaacttgtccaggactgttccaaagttcgagcccaattcgagtccgtgagccatacattctcaaagagaaaccatttatcaatgcctcccggcgtagaaacatgggaattggaggtgaccaactccaaagcacggtggtcagagcc

SEQ ID NO: 201197 - DNA, 1376 bp, Cannabis indica
agaataaacataaggtttatgttcacttaagtacgttgtcacataaagtacattgttatataataaatatattgtaatacatggaagataatactcgacttataatgaggacatgtcgctatgattcgtatgtttattatataatgaggaacgtttggtttgaatgttttagtctaaatgctgaccaagtgggagaatattagaatattttatatttatggaataaaataaaaaaaattaatatcgagataaataaatattttatattcattgaatttggacagtattaattgagtgatattctatatatgattagatttcgatatttattatccgatttggttttccgaattaattgttaaaatattctgacaattaatgtggtgcagatactaatagagtatttcaagtctcggtccctgagctcttcacttattctgtgcaaacaactaaatttcatctagagaaagttgagagagtgaggaagctcgattttctatatcgaagctatcgttgggattgaagttcaaacatcaatagctggaggtatttcgatcatttcatcacatatacaatttcgatatatctgtagttattccgctttacatatcgttcatatatactttattttcatattatattatagtttaacacctaaaaatttgaataaacaataacattattagaatctctaaaaataattctcataacttgaaagtctgttaccaactaatgtacacattctagctagttgattattttttggacggaaaaaaaaggattacatcatttaatattcttattcaatgtgttgataaataataataataataaataaataaataaataatccaatgtgtaccgagctttcacacatatggagaggaaattagacgtttgaaagttgaaataacaattatttaattttattatatgattgcaaataaataaaaatgaagaagcaatgcatcaattgcgatgtcgaaccataacaaccaagatttccattagatttttgtgatttgtgaattgactttcatgaaaataatgggactcgaataatatgactcattctttgggaagcaacatattttgcatctcttgcaaataacacagctactgtatttctatactataatagaagaatgatttgaccgattaaacttctttctcttttactcttatttaatcaattttagttattttatggaggggtgcacaaattatagagtgatcaaatcaacctcgataatccaaaccgaattcgaccttattgattactacgcgagtggaccattagattgcacaatcaataattgttcaaaccgaatttatatgggttagccaagggtttaaaattgttagcacaaacaaat

SEQ ID NO: 201198 - DNA, 655 bp, Cannabis indica
tataactaactaactaactagctatatatatattataatataaaaatattatatgtatgtgaatgtgatgaacataatataaatcatatatatgtaaccaaagaaactgatttcccaagctgaagaatcttgatatcattttccaaaggtgtgaggttcaaatccaaacacaaaaaccctattgttcttcttattcaccatcgcggccggccgccgtacttgcaaagaaccggcgatatcaataggcggtggccgggtggcggccgaggccgctgacaagcatgatgatgagtctggtcggtcaaggcggctctatggcgcctcatgtggccccccaaggcttggccgatggcgaattcaagcccacatatggtgcactcgtgggtcttgggcttggatggtgagcctgactgtgaatcagagctgttaccgccttctccggtcattagcctcggctttttgtgactggctcggtggccgcctagggcttggaacgaagggaactgccggttacaggtcttgcactcgaaaactcggttaggtgatgaagattgagataggagatggcgataatgatagggttagaagatgaattattagagtactgatcgaactgatgaagatgaagattgtgattatgattatgatgatgatg

SEQ ID NO: 201199 - DNA, 1908 bp, Cannabis indica
gtggttgcagcgctagttgcaataggagtttctatacgattttttgttgcaatttagattgcagcgctagttgcaataggagttactatgtagaatccgtaaaaataaaaaaaaaaaaaaaaaaaaaaaactattttttaagtgtaaaaataaaaatgttcttttttatgaattagaatcactcgtaaatttacgacgtagatatttgtaagtagtataagaacctccttgaatctggatagctcctcgtctaaccgaaagatatgctttgtcaaactataaactgttaaaatcagtgaacaacatgagataaaactgccctaaaaatttagacaataaagctacgtcttcaaccatcacacccaaagagttataactttaacttgtatcactaaatactacacaccaactcattaacatatcaagaatggtcctgaaacatttacaaaacattgtaaaataaaaaaaaatgaattaatcacttaacaatgatattaaaaattaataaaagaaaatctcaatagcttgaaaataacaactctcaaacaagttaaatttaaaataaatttattggcaaaatctctgttacagttgacgctacaacttaacaataaataaaattctattaccatacaatttaatggagaaaaaatagttaatgtgaataaagatggtaaaacaattcatattatagtgttaaaacttcaaacacttatctgtcgaaaagtcatttgtagaaggtatgaatacaaaatgaaacaattctcatatccattgtccatatcatgacaaatctaccttaaataattaggggtaagccatacaaatgacacaaaaactataaaaggcatgaaaacaatcaaaaaatagtgcaaaaaccagcataatcatcgaacctaaattttattttaaaatgtctttttgtacctattttcagtttcatacacttatgaacatcattgtgtaatgtgtcatacattcctacaaactaagttatggatatttattgtacacttaattttacttaaataaaagcctagtgaagcttttcatttttttattttgggtccccaaaaaatgtgggccctaagtacgggcctaacccgcctatatttagggtcaatcctgctaacttcgactaacctaacacgtgttaattggttagtggtccacattcaataaaacttttattaaataatttcaatattgaaaaataaattaaataataataataatatatttctattattcttcttattaatatttcaatttttatagttattttttctaagattatttaatgataatttaaaaataaaaaatgagttaaatcactaatatattgacatgtgatatatacttaatcaaatcaacatttaataaaattggtagtaaaggctacaacaaaaatataaaatatagtatttaatccatcaaagaaaaaaaaatattctgtacataagtgtataaaactaaaaacataaggtatttatattgagattattttaccagaatctatatttactaacaaggatgttgaattaatatcctaaatatgaatatctctaatacgatgaaattaaacgcataagagtttagaaaaccttacattgattgcagcggaataatatgactcattccgcttagatctataacttgtgttctatcgtagagtaataacaagatctgagcttgggtctccttctcttcttcgggtcagtttctaccgtcttccgcactatgattgagtacttgacttgctatgtgtgggcatggaactctatcactatgggacgattatgaagaacaatgaaggagactcgaaatcactataaaaggtctctctcatctgctaattgtctgacagatttagaaactagatttagcaggttgaaagtgttggatgag

SEQ ID NO: 201200 - DNA, 1567 bp, Cannabis indica
aaaagaaaaaaaaaatagaaaacctatgtatttgcaaaattagatcaaaattaaggtgaccttttcatccaactttttattaaaaaaaaaaaaaagttggataaatctcaattttttcatgaaaagtggcatggaaagtacacttttatctcacttttttcaaataaccgggataaaaggggtactttttatcccgcttttatgaaaaaattgggataaacaggtagtttttatccttttttttttgtcataaaaatcgggttaaaaagtgtacttttatctcgatttttaaatacttttatcccactaccaaatatcccagattttattttagtaaaaatagggataaaaaaacttaaaaactgagataaaaagctttttcctgtagtagtgtcagttttgccattatatttcaataatgattaaatgacacttaatctattttggatactaagaaaagggcggtgctatggggtaccaagatatctaacaccatgatgagatgacgtcctataattagttaacagttttcgataatccttattgaaattaaataagtgaaacctaatatttaattatagtaatattacaatttacaagaatattaggtactatatttggtctttagcatttcacttaaaaaaacaaatccgaaaatttacatattatcacgtatattttatatatctagaattgatttgtaaaaggcagattcatcagcatcatatgacattatattacacccaaaatctaattctattaattttatgtcaggaaaaactgtgtttccccttaatcatatggtatacgaaaggattaaatgcatttaatttctttatagaagaatcaaatttgctaatatctatctacagagaaatgctaagcgctaattatggtgcctatgaggtgtaatctctctatttgtataatttaacataggtcacatttactttaatttaaaaaacattataaaagaaccacttaacaattataataacctataaacatagaaatctcaggcaccctggtgcccatagcaaatggggatccgaattacataaacattatgatattgtaataaaaaaagtaatacataatacccttttgtatggctgtatgtaggcttcactttgcagtgtctttctccacatcattcacttgaaactacaaaattttgcctagaatattggaggtagtgacggttatgcactaagattttttcatttgaaagaaaggctcatagatattccaacgctttgcttcctcttatacttagaacttttattgacgatggcattttgtttcggatttcttagaacacaaacatctccgtcgcatatgtatcgtttgggctgggaagagaagcacccaaagatgtttgagagcaaagccatattggacctttaaacgagagagaatatcagaagacgactcttctgttcttgtgttgtatttgattttgtgtttttcagccaaatgcatgttagaaaaaccagacatatatattggttatgacaatgagaatagagtcaatgttggtgggtttaattcgtacgaagattgatgt

SEQ ID NO: 201201 - DNA, 681 bp, Cannabis indica
gatttccccttaagaaaataattttggcgcaataaatacataattaatcaaattttcttttagggtcgtcaatcaggtaaggcggctgaggccattgctcaaggcccctacccaagaagcctcacaatttctttttctttaaataatttattttaacattagcccataagacttaatttaatttttttttttctaaaagagagtttaaaactttttgaattttaatttatttctcaaataaaaaggtctatttttaaaattttgccccaccctatatattgtcaaaattatataattatatgtgtatttataggtgatgtatgacatgtttgaaatttaattaacagcgtgttcatctaattagtatacaaagaggaatagtgctactaagttcggatactttatattttaaaaataatattacaaattatataatataatttatttacattattcttaacacaaataattttcagtaaaaagggctcaatctaaaaaggtagaatataatgaaatttggtttgtcttatgctaatgaaaaataattattttttttgaactatttatttgaatttataattgagaacaatattttgaaataaattaacaaatttaatttagaatttaaaaaatttataaaaatcttacattaggttgtagttcattatcaaatttcaactt

SEQ ID NO: 201202 - DNA, 990 bp, Cannabis indica
aaaagcaacatttgattcaccagtggcggatttattcacggccgcggccgaaatgtggcagaatgggggggtttttacttggcacagtcgccgcggcaaggccaaagctggtcgcggccaaagcagcagcctagctgcgacgaatttatttaccatcgcgacgaggacttggcagagagactagaaatcaaagcaacactctcgcggcggcaaggttttgtacaagtcgaggctaattttgtcttttctcgattctttgaagtctgaaactgagattataaaaagaaaactgtgagaaacagaaaagaggagtgaattttagacctaaaaagcagtcaagtgcggcagaaggagcagagtggcggcccatatttattccaccatcagtttctttcttcttcttttatgttaaattctgctttagtgttatcatagatatgaatatgaactaaattcccaatcaagggatatgataattgtttgatgacgttactttgattcaattaatgtgattattagttttcctctctgattgtgtgatttgttcttattttctttaattacatactttagactgaccatcttaaatgtgacttatgatcctaatgtgaaatctgagaagtgaatattaggaatgctctaataagacaaacataaattgatgtaaaacgagagtatttacatagcttatgtgatttgtagattctgttcttaacacaggttgtatgttattttactgcagagatgcgagtagatgatacatgatttaggattttaatgatctgagaagagttatggttaaattgataatttgtcatcgccaatagggagagaattattacactcgttactattattttcctgtttcttgaatttctagtcatttaattattcaatctttctaatcgatttgccaaatagaaacacaaatctaattttgtggtacttgataacaattccctctggatcatactcacttgtgtgagttta

SEQ ID NO: 201203 - DNA, 669 bp, Cannabis indica
actattcgatttgatgaagttgggttttaaaaaaaattcttattccataatccatatagttcaatatgcctctactaaactatcaaatatgtaatccaatgaatttggtagtttttcaacttttacattttaattttagttttaaataaataattaaataataattacaaggacatcaacccaatacagacccatactctatttgtatcaaattggaatgaatataccatatataactagtaaaaataaaaaaaatcaatttatcagattaatttatataaaaatatcagtgataaattgataataaaaatctttttaaaaaaattgataataaaaataataagaatttcattagatgatcttattatattatcatttagctttttcttattagaatattttgatagggttttcacgctatatattttttatcatttaaaaagataataaaaaatattcattaaattacggaattataaatgtatttaaaattcaaaataaaatatatacattaaaaaaagataaacacacgtgtcattcaattaaaaaagcagaaataaataattttttttaaaaaaaagatagagccttaattattggtgtttattaattatttaaatccaagctgcgaatttattaggaaataattatttaattttgttttaattg

SEQ ID NO: 201204 - DNA, 521 bp, Cannabis indica
attattattaattaataattaaatgatgacggtgtatgtatgtgtatatgtgaaaataaaatttcaaaaattgataaaataataattgttggtatttaaggtgatatttagttaacattttaaatttataaaaaaaattaaacataatcaggttttgacccaaaaaaaaaaataaataaatgtaatcaaaacgtttcaatacaaataaatcttaaattttaccataaaaatattggataacatttggagtagtcaacttatttcataattttaaaccaagtgtacaaagaactagaaggactctaaatattataaataaatagcaatattctgagtcataataagtgtaggatgtatttcattaaaaaaaaaataagtgtaggaagtaacaatataataaataaatattgaaggagcacatgcattaacacgtaaatattgcaattttagcgggttgtaattttctgtactttatgagcaagctaacagtcagtcttatgggagatggatattcaaattta

SEQ ID NO: 201205 - DNA, 1026 bp, Cannabis indica
ttagcaaatttctttttttttttttatttatttatttttctacttttcagtatacaactatcatttattatttcaaataaaaataaatcacctaaatcacacaaaactttaacacacatttatgtggcaagtcactttaatactttaaaaagtaggactcatcttaactaaaaattatttaaaattatgtgttacataaatgtatcaagtttgtgtgtgcaaatataatcatatcctaatataagaaaatagaaaaattttatggtgtacccttctccctatctgttcttgtatttatgagaattttgtagtctatttttttcatggttgtatgtatttaagacatcatataaaattttaaaagatttagaaaaaaattatttatgtgctgaaaataacactactacaaaaataatttttttgctttgatttcttgagattctctcccaattgttgttttatattggtcaataaactgacttccatgtcataatcattcacaactatgaattgttattttaacatggtttgtaaatcttttcaattacgaattgagccgggagacagtctcttccatcaatcttgaatagacattaataaagttaacggactatagaggcactttgcgtcatcacttgccttcactacttgcataaattggatgtgtttagataggtggattctggggtccgttctgccttcgtgtatctccatctaaggcattcaaagtgtttcgacaagggtccatctattattcttcttacacatggttccagatctttttcttccgaatcaaatacgacccactatgctttcaagtaagacgctccgtaaacttggtcaattcagctatttgatcttctagacgctttgtattgtcatcatggaacttaagctcacgaactcaatcattgatatgatttttgatgtcgtttccatcaagccttgccttctcacctctagctagatctttctttatgtttaaatgttcccgaaggtccgttgttgaaaaactaccttctaaaa

SEQ ID NO: 201206 - DNA, 844 bp, Cannabis indica
ctagcagaaggataactcttgtcaagagcagctcgccacaagcattctccccggaaaaggtttgcccactgcttttttacacaacatatttgtgcccactcagtgactggaattcgaatgaaaatttctaccaaaaggtgatcagggagctttgcaaatgaagtatcgattggtgttaaagtgtcctttccagttttgttcatcattagagtactacaaaagaaaaaatgatttcttgtagttacttcaagaggagcaatgaaacagacagttcatagaaaaacagaaattcaggtacactactagaccatgattttcatagaagtgcagaaaatatgaattacatatcttatatatcttcccagaaagaatacaaaaagaaagttgttagcttcaatataaacagctgcacataatcaaaattaatgagaaaaagtaaacattactttaatactaaatcacttaactttcaaaacttgctacaattaactataagattctaataattgccatttttttttttttgtaaggtaataattgccaatttttttcaaaggaaaaatcatatctgggtaaccaatctatttctaattgcttaatatgcaaattaaacaattagattgaccaatatacccatttgccaaccacttaaaatgaaagtagatcagtaatagtaaattagttgcattactaacaatcaatggttttatcaaatgctaaggaagttttttaatggagatataagtctacattttaaaagctttctcaagctgaggatttctatcaagtttatccagtaaatgaatggaaattttggattgttcttattttttgtaaattaaaa

SEQ ID NO: 201207 - DNA, 1087 bp, Cannabis indica
gaacccttcattactaacattgaccctttgacaatcttcattatgccattctcaatcttcacagaatgtccttcttgatccaacatagccacagatatcagatttctctttatttctggaacatgcctgacatgctttagctctgcaactcctccaccttttaattgtagtttgatagtgcctataccagttatgggacatgatctattatcaccaagcctaaccatgccaccattaatcttttcataattgctgaattgggactgatctgggcaaatgtgaaaagaacacccagaatcgagtacccagtcagttcttgaactttctttggacactaccaatactcctgcacttccatagccatcactatcacagtcagaaaccagatcaacatcaccagatgactgtttctggttgtaactcttaagaacaggacaatcctttctcaaatgagtggttttgttgcagacaaagcattttctcttgaattttgaatctgactttccttgactcttcccttttcctgtgtattctttgtttcccttcttgaagttcttgcctcgaacaaacaatccatcaccattgctgtcatccttctggtctgatttcttctttaattccttggacattaaagcattttgaacctcttctagagtcaatgattctttaccatacatcatggtatccacaaagtgttcataattttcagtaggaagagagttcaagatgatgatagcttggtcttcatcttctatcttgattccaatattttctaaatcaagaataatcttattgaaatcatcgaggtgatcttcaacacttttccctgtcaacatcttgaatgagtacaatttctgtttcaagaacagtctatttgctaaagactttgtcatgtagagactttccaattttgaccatatcccagaagctgtcttctccttcgacacctcacgcagaactttatctcccaaactcaggattatggcactgtgagctttgtcgagcatctccaccttctctttctctgtcaaactccctggtaagttctcttctcctagcaaagctccctggatcccttgctgaacca

SEQ ID NO: 201208 - DNA, 1510 bp, Cannabis indica
agtccatgattaatggtacccttcaagtacttgagaattctcttggttgcagaccaatgttgatcagttggagctttcaaaaactgactcaatttattcacaacaaaactaagtttgggtctggtgtgagtcaaatattgaagatcaccaattagactcatgtactctgttggattcttgagtggagttccatctgtgattgacaaagtttttcctactgtcgttggagtatgacagggcttcagatgtgtcatattgttctttttcaacaactctgttatgtacttggtttgggataagtacattcctgtgtcatccctatacacttcaatgccaagaaaatagtttaaggagccgagaacttttaaggcaaactccagattcagcttttcgataaattgtctcagcttttcagaattatttccagtgacgattatgtcatctacatagataagaactagcaataattcacttgctgttttgtagaagaatagtgaggaatcagctctagaacttacaaatttctagcttaacagagtttgttttagcttgtcaaaccaagctcttggtggttgtctcaacccatataagcttttagtcaatttgaacacataatcaggatgtattttgtcctcaaaactaggtggttggttcatgtaaacatcctcattcatagtcccattaaggaatgcattattgatgtcaagttgtctaacttcccaggactttgcaacaacaatagttagaacaactctgattgtacaggctttcaccacagggctgaaagtttctccataatcgactctaggtctttgtctgaacccttttgcaataagcctagctttaaatccttgaaagcttccatctgcattcaacttaattctataaacccatttactgtcgactatgtacattccgggaagtctaggaactaagacccaggttttgtttttcaccagtgccttattttcatcagtcatggcaccattccaaccttcatgttcaagagcttctttgagagaagtaggttcagcatagtaatcaatgaatttggctttcctcatgtaggttttgggtttgaaaaatcctacttttgccctggttatcatcgggtgagtaggaactaattttgttgctgaatgattgttagctgttgcatcagactgctctttagtaatttgatcatcagtgtgatgtacttctgaatgttcaacactaacatgtacatcatcttgaatgagatcatgttcatatccctgatctgtcaatttagttgtggattgagaagtaggtgatgttccaggtgcacttaattcaggttcttcatcagtttgaggattggcattgttttgtggttgagtatgagagacaccagaggagacatttgtgaatgtcgaccaggagggaaattgaacattaacactctgttcagctttgtgtgtatttagaaaaccaaatttaaagggaaactcaacttcattgaaaactacattccttgaaatgtaaattc

SEQ ID NO: 201209 - DNA, 1244 bp, Cannabis indica
taatttaagagtgtggtatattaattttatttgttatggtatacaatgaacaaaagaaaaaaaaaaaacttgttaatattagcatgtttgtggtataattatatttcactatggtatattatttttctgtactatgatatataatgaacgaaataaagaaaaaagacttttgaattgttagtttaagtttatcatatagctatatttcacttgggtatattgttcttatgtgttatggtatatcatgaagggaataaaaaaaacttgtggaatattaactttaactttttgttttttttttcactatgctatatctgtttaggcttgtgatatatgacttttgtatgctattgtatatcatagaaagaaaaaaaaattaatagtaaattagtttaaatttatggtgtattcatattctgctatggtatattatttgtatgtgatatggtatatcgtatattatgaaggaaataaagaaaacaaaaactaaaaaatgaatattagtttgtgtttttggtatatttattttgctttagggtttttctaagtgctatggtatattaagggaaaaaaaattaaaagagtggtatattagtttaaatttatggtatattattgttatgtgttatagtatattcgtttaagtttgtggtatattatttcaaaatgtatacttaaaacccgatatccagtaaaacttgacactaaaaatatggcatagtatattaatttaaaattgtggtacatcagttgtatatgctaatattatgaaggaaataaaatgtaatttattgcacatattattttatgtttgtggtatattcaatttttactagtgtattatatgtttttgccaaccttaaaatgaatctctatatgtagtagatgagtgattgaaaatttactctatattagtacattattgtcattgggtttttttaactagtttcactatatgagctcctcaaaaattacaatgagtgagtattttattattttgtctaattttgcattatgtaaatatcaactcacatcaatctatgttattcgttttgaggttcatatttataatttacaaacttcttaaatcttaatgtacatgatgaaaatataatttttgaaacaactctttataccaaatctctaaagcatcaatattgtatcaataaaacatcaatgttgtattatcattgaaatagttgttaatctatagttccacagctgaaagaaaaaaaaaacaaaaa

SEQ ID NO: 201210 - DNA, 1479 bp, Cannabis indica
cttttacatgttttatcgttgtcttttttgcattatagccgttgttttagtttttccttagaaacagtatcactttaataattctttttaaatgttttaacttttagtaatttagttaagctctccaattggcttttttcttaatgcagattcttcgacgagctgatgattcattttgttttagcaatggcaggtaacacttttcatttttaattgtagttaaatctttggtttcgctctatatatgtatgtattgttgctttacaagtttctgtgattccctttaataagttcatcaatcagactgaagctcaacatttctgaattgaactgacgtcatcatgttcgcagcattggcaatttctttttcgcaggagcgcgtatatttttttcagtctttagatgctgcaatatttttgttctcacgtgtttcagatatcccttctgaaagtttggtcctcccagtgatttcaagcaacgacaggctgacattaggatgtgaattaatggtgggattttgatctgtacttttatccatctgcaaaatgtatacggaaaccacacaatgaaacttgtatggaactgatagcatgtaaaaatgatagtttagataagaaatcttatgttgcaagttcttaattgtgtttatgtcagtccttacatgtcaaagtcttagtttcctctttctggttctgacacctttttggcttaattacttgtattattttaattgattaaataccaagttactcattaatggagaagctttattgttttgattccttttaggcttttttaacctatattcgctttatttgtcatggctaagtcatcaatatgggtactattgcttaactcttttctacatttttgtcatcaaggatgggactgtcatacggggtcagaatgcaatttctcatccaaccaacggatctatggaacctatcaacaaggtagaatagttttcatcaactgttctgtttggtggtgttgtaattgcttttgttcagtatattgtcatctgaaacatctaaacttattcttaattacgtttgatcctgactgataatattttgtgaatgatggtggctgtgctgtggtgcttcagaagtggaaaagatttgtggtggctttgaaattaggccaaaatatttattagtcacccaattttttggttttccatttgtgtgctaggcaaacattaggtggtgttgatttcaaatccgatggacgaagttattgaagtttcccatattagatgtttagatagatagagagaccttttgagtttgagtgtgtgccttttttttttcttgttgattgtgctagagtcaagtttacttgatttttcattgactcaaatgctagctacttttgaccaggtcagatctttagttccagaactttcttcaagaataaagagggtgttctacatgtcaagtgagggtcaaaatttactgcatgaggtacatgtttctc

SEQ ID NO: 201211 - DNA, 877 bp, Cannabis indica
catttgctcctgtgttgttgggcattaaagaaaagttactaatctcatgtgttctctctaataaaggttttctctgtgatgatgtcactgtgggcctggcccaattgaggacaaaattagcaggagggaaagagtaggacacttccatagggttccacgtggcataactttcttcactaatgatattattattgttgttgctactgctctttaatatgaggcccaactctttctcttcaagttgagccgatgacgtattatttgtacactcgacttcaatagctactctaggaactgaagcaaactcctgataaatattacaaagtgtgaaatatttaaagacaacgtacatatataaatggcttaaaagtgattattattattattattacacagatcaacaaaccaaaataaaaataaaagtatgtcccctacataaagcatactctataaaaacaggttttgaacctacttttcccaacatttttaaagcatatgtctttttcctttatcattatttctagatccttttttttcttttttttctgttagtctctatatggataaaattggtctctacactagaatgataaagataagataattttgagaaattaaatttaactagtctattaaaccatatacttttcaattttcaaattcatgtttttagaaaaagcaaagataagatagatataaggctatatatatatatatacctcagaaattctggtgatgtatgggatggattcctgttgttttgtctgctcaactccaagaccagtcactctcgatactgaagacaattctgtaaaatttaagcatacgtaaatcccaagtattattacaacacaatgtctcaataagaacagtcgac

SEQ ID NO: 201212 - DNA, 822 bp, Cannabis indica
gatattctaatatcgatcgattgtgtttataatattattaacagaaatgtggaagagttgaggaacaaatagagctactaaaacagaagcttaggatgatttaccaaggagaggctttcaatggtaagccaacaaagacagcacgctctcatggaaggaagtttcaagtcaccattaagcaagagacttcaagaatattggtatttaaaatttcactcacactaataatgcttttactttttgatcccttctcgtagactggttagctgcgcttttaaaagttattttcgggttttcaaaactcactaaacactactacaactagttgggttcacaaaaagaactggcttgcttctcgaaaagctaaacgctgaagtttaagcccggccaaataggcccacatagtttcaggatcggccttaggctaagacgggctaagcacacgctaagtacatataatttctttttaataaaggtccaaaaaatttgttttcctaagacctattaaagttcaggaccggccctgcatagtttacattggtttaaattcattattcaaccgttttaatgacactcacgagtgtttgttatgggagtttaaatttttgggaatggaaatgtaaaaataaacttgtctaatgtgtttgatatgattttagtggaggatttatatatgtgtaggtcttattattaaatttaattttggggtaatctcaaagagaccatcaacaatgattctccctcttgatcaatttgaaatattgcttgatgtagttgaattagctattataagttatcttttttaacttaaattaatcttac

SEQ ID NO: 201213 - DNA, 1139 bp, Cannabis indica
ctttacaattacttggcacacagggtaacttaggttgggcctatatgcaacaaggaaactatcaagcagccgaagtagtttaccataaagctcaaacaatcgatcccgacgcaaacaaagcttgcaacatgtgcatgtgcctcatcaagcaagcacgctacactgaggcacaagccgttgttgatctagtcctgcagcgcaagctgttaggatcagatgaaccgaaatcaataaaacgagccaaggaacttgtcaaggaacttgaaaaatgcaagtcatcaagtacaatactcatatcctcatcaaattctttagggttgaaaattgaggatgcttttcttgaagggcttgatcaatggatgaatcatcaatggacaccctctagatctagaagactacctatctttgaagagatctcaccatttagagatcaattggcttgttgattgagtttatttatagatataatttgagatttaaaatgtaattaggccttaattatatatgccttgtagtgttcatggtgttgtttgatatttagcctaggctaggaaaatgtgtacctagtttttgatgtattccttatgagcttgtaaaaatggttgaataaactacaaatatatagttatggtaatttttatttgttaaaaaaaaaaaatatatgaagtaatttacaacataatgttgtattttattttctacttaagataacaaaataatagtataatatatattttaggtacttttgctagataaactttgtatagaaaatatgtgtttagtttttataagaaaaagcataccaggtgttaagttgaacactaaacaagtataatttaacacaatttttttttctataccaaagttaattctttattttttatatatttaaataatacatatatacaaagaaaaatttattataaaaaaaaatagtgtggtcccgagttcaaaaatatttattttttttgtatttattaataaaaatacatttatattatatttaattaaaatatattcattttttttaagttggttccctaatataccctaaatctagcctataatttacattaacttaagtggtctaatagagatatcatatataaaagtgggtatatcttaaagaaaataaaaat

SEQ ID NO: 201214 - DNA, 687 bp, Cannabis indica
ctatcaaagtggtatcagagcggacaattcatgggacctaagaaagacaatatggctgaaatcatagaagagaaagttgaagaagaagtgttgaaactacaaggacagatccaaaccaccatcgaacaagtggtagccaaacaaatggagacagtggttagtcaaatttctcaactcctagctccggcagggaggagcgttccagacgcagcggccattagtgcagatcggcatcgaagggcattggatggtgatggaatttcgatcggagaagtcagtggcgtgggaaaccgctcggaacagcaaccaccaaagtttccatcgaaaatggcgatacccccacttcatattcctactggttcaccaattcaactggggacattccaatcgggacaatcatacggtcaagacttccgaccaccacggatggaaattcccttgttcaacggcgacaaccccgacggttggatttatcgtgccgagcgttactttctcctatcccgaatgactgaagcgatgatgttggatacggctatcgtcggacttgaaggtgatgctctatcttggtttcaatgggagaaccaacgctgacccatcacctcttgggcgatgctcaagcagctcctccttctacgattccgagcagtaccagtggggtcactttccgaagagttcctatcggtggga

SEQ ID NO: 201215 - DNA, 603 bp, Cannabis indica
acaaaatttgccattaaagctcaagctttgagttctaaactcaaacttgagcaaatccctctaacaagcattcaaactagttagaatctacttaaaccaacataattaagcctctgcaaacaactaaaaacatccagcaaccatacagcaacaaatcacaccatttctttcaaaaatcataactttttgcatagaaaattcaaagtttcacacaacctagctaacatgcttcaaaacagctcaattaacatcaattaaacatgctttaaacctcagaaatcaacaaccaaacacagcaataacaacagcctgacataaaaaaaaagaaagagaggcaacttttttcctaaagagatacaagagaaatctgcattcagcgatatataaccgttgatagaggatgagaaaaagtcttacatctacaatgtatggccacaatttacttagttacttgttcagggaaagatatccatttagaaaattattcccacaaattttcttcaaataatctctgctgagggacccaagggagttgaatatcaactgccttagcaagaagcttgaccagcacatatatatatctgtctgtgtcaaattgaataa

SEQ ID NO: 201216 - DNA, 1150 bp, Cannabis indica
taacaaactatcctccttgataagcaagattattggtatagtaataaagattctatcaaaatttaaggaggtcacaagttatactctccaatctccattacttttattttattttattttttcaaaaaataattaaatattattattagaatttgaaccacctaggtaaaaggcaaatcaatatatatgttgttaaaaaaaagttattttaacataattatgtattaatttaaattttgtcaaatctaattagataaacttttatgaataaagtctccacataatataaaatcacgtaatgcctatctcaatgtttgttttagctttgcctttgtattagtggtatgatatctaataccacctataagtgacacttgtgattgattagcggtattttataaaagttattatattaatgaaaaatgctaaaaagtatgtgattaagtgtcatatcgttattggtacaattaagtatcatatctcatatgatttaatgtaataatttaatgtaataaattttataaaatatcactaattaatcataaagtataatcaccttattattggtgttcaataataatgctctatattaaactatatgcgacttcataattaattgtactaataataataatataatacgaagttgttaggtactttttgatatttatcttgttgctatggttatattttattatttagaattttatttaacaaaaataatgctccaatcactaatttttcattaaaataaaacgacacaattaaatccaagtaacttcaaatattggcagcttcttctttagttgacaagtgcctttagcttaatgaggattgggacatactcccaatctcatttatatattgatcacacatgattatgtacgtgtcactatgagtttaaggttacccaccagtacacactagcttgttggtctctattaattttgcgtgaattaagcaaaaatatatagaataaaaacaaaacaagaataatatgaccattttatcattaataaattcatgactgagaatagtttacaaaagttttcatatggaattatttaatttctccttttacttttcttccttttccatcctttccttttcttaattctcaattttattttatcaaaaattaaaaaaaaaa

SEQ ID NO: 201217 - DNA, 1270 bp, Cannabis indica
gtacaaagtcaataacaataaggtcaaatataacagtaaaaagaaaatgcatagaaagttaatactcatcattgtacccaaaatgattacactaccagtaccactagtccactatacgtccgaacacactagcttggagtatttttctatatataaatacttattattattagattagaatagcgatcattaattttacgtaactatgctcactcctaattatgaaagctactcataaaatttatacatatataaagtatacttctttaatcttaatttattttttggaaagacttaaaattaagtatgacctaaaaaaatattaagagaatacacaaaaatacttaaaattaattttttttttttttttttaatattttttgcaatttttttttataaaaatacagaatattgtttctctgcttatttcaccactaaaaaacatgagcacaactttttccaataaataatttatttcctattatatatatatattttttctgtgaatatactaatttattttaactttaaaaaaaaaaaagtgggatgtgatatctagggcattgcttgagagcttgattaaatttctcaatagttaattttatattagtttaactaatttccatgtcataaattttatctgtatccttttcttattctttttatagaaaaaagtaattttataacctttattaaaacaaagatcttaccaaaaaaaccctaaccgacctattctattagaaaaatgacagagataaaattgtgttagtgaaaaaaaaaaaaaaagaagaaaaagaaacgaatttgattaagtttcggtagtaactttttaattgattaatagtctaataatttacttagatactaaattgataactaacatatgaataatatacaaataacttattgtctctccatttgtacgtcccttctgatctgtttaatgaaattgttcactaacaaaaaaaagaacttattataatcgctagccctagtttatagttgattataatataattaacaacaccacataaataattaatgatacttgtcaaaattaagctagacaaacgaagataaaactatactatatatagtaatattttggatccattaattatattatttttacttgagagtaggatgagtagagagtagtatatatccatgtatatattttatgatcacatgggtattggggtataatatttaagcggaagagccgcaatgaaagccgaattatttagcaatgtgtccattagcaaatagc

SEQ ID NO: 201218 - DNA, 1410 bp, Cannabis indica
aaaaaattgagtacaagctagtgagattcacttttaaatgacaaaaatgccttcaaaatcaaatgtatagtgaaacatatattttagaatttccaagaagattaggttaaaactaatatttaaataaacttaagaggtgtgaaataaaacaaaatgagaagagaagatattttagggtgggagggagagaggggtaatttggtaaattggaagaatgggtggtggaccaagctggccatgtgcagcaggccaagtgtactttcatgagaaaattagctgtcctcttcaatcctacacatgataataaatgcctttttttattttttattttttctttttgtttaatttgtttattctctttccccatcaattattaatcataattttattcatttaattgttattattttatatttttgttatgattattttcctatttccttcctttaatttgtggctaaattcatttaaatgattttattaaaattcttaatgttatgcattaccaacataaatttatatatatatatattttaaaaaaaagaatcataatctaagtccctttcaaaaaaataaaataatattataatatggttaaactatttctcaaatataaaaaaaaaaaaaatcattgtaattaattgattaattcataaagttaattatttggtcaaatttaaaattattttaactaaacttaattaaaaaaaattaatttccaataaacaaaatataattaagattcaaaacatcattttttaaaaaaaaagaaaaaaaaacagaaggttcaacaaagtttaatttaaataacatgaaatcaaaaaatgatataaatctcatatgctctttatttatttattaaatttatatattattataataaaaaaaataaattgaatctcaaatctatagttacacttgagtgagtccaaccttgaatatttatagtatgtcgtgtaaatgaagcaacaatggtataactctctctttgtcataaatgtcattgagttattattctacattttttgttttttgttttttattttattattatatattatttatatctatatgtttgactaaaatgtaatctaacctttttgacataaaaaaaaaataaataataaaaaaacaaataataaaaaggaatccctttccaaatgcctaacatggacatacccctttcaaaatcttaataaaaactccctccatgtttatatttacaacatttttattataaaattgactatctttttttatttataatttttgacaaatataaaagtaaatttaaaaagaaaaaaaaaaacttttagtaagatttgaaagattttatcttaaatgatatctagtttaaccattacatcaaaattaatattatacctataaatattatcttttattataaat

SEQ ID NO: 201219 - DNA, 2315 bp, Cannabis indica
aaacggagaccggtgaccggcgacggtgaagggaatgaaggagagagaggtctggcagagttgcagtgagcaaatacaattgattgaaaatgatgacactgttcaagtttatagatagagagagttctgttttgtcttgtcgtaagagggaacgacgagtcgtttatcgatataattgttttttttttttggaagcaattaacaagtcgtttatcgatataattgttattaaataatagaattttttcccatgaactttgatagctactaaattattttctttcaatttttaaggtcgttaaaaatttctttaaattattgagattgctggatttaaagactgtttatttaattttagtaatgaatgtctaacatagataaattcatgaacatgatttagtatatatcaaaattcaaatgacgtaatttggtagatatcaaagtttgggagcatgatttagtacataaacaaattactgaattagtaaaattaaatgaaattagataaaaatccttaaattcaacaatctcaatagttcacggagaatttttaacggctaaaaagatttaggggatataatttgatacatgttaaagttcaaggaataaaaatcctaattagcctaataaaatatatgtactcttggcaagaaacatataaaatatgtacaagttgtcattacaaccattctatgtggaggtatcaagacgctcgcttaaagtactggtttttcgagcattggtaagccacctacgttgtttgtggccaagatttaattctgacacaatgggaagttgactttggcatgttgtggaggcgttggtattgtttcatggttttttcttttgtcttcggttgggtttcaaaaatggtttaactttttttaattgcctttgtttggtcttagcgatcaatggtcaggagaatcatcataatcagtttgatattgtgcttaatgacatatgttaggaaatctttttttagtttatccttttctcaatgtaataggtctacaaatattattgttcattctctagtaaagagtgtgcctgtaatgggtctcgtgtttagtggtcgaggctccttttagattaaattattttttattttgaactcctctttgtattgtgatctttgtggctttgtgctgtttagtggaatattttttattctctctcatatttctttgcggacgacctcatcttggttggtagggcaaatttggaggaagttagaggtttgtggaactgcttggaagagttctactcttggtcaggccagcaggtcaacaagcttaaaacgactattttctttagtaagaataaacctattcaggttaaaaacgaaatcaaagctaatttgggtattatagatcttgttgcaaacacaaagtacctggggctctctctaattaggtccaaacagaaggatgcggactacaacttcattttggaaaacctgaccgccaagcttcaaggctggaaagctaaatccctctcgaaagctagttcggcgactcttattaagtcggtaggtttatccttgcctagttatgccatgcaaagtactaaactctcgaatcgtctcatgcataagattgatggcatggttcgagacttctggtggggttttgagaaaggaaatcatagaatgcatctttaggcttgggatgaaatgtgccttcccaaatcctgtggaggtctgggctttcgaaaaactaaggaaataaacctggctttcctggccaaatgggggtggaacctgttaactggaagtcagtctctctgtagcagaatcttggaagcaaagtacctaaaaggaaaagattttctctcctgcaattacaatgattcagattcgtggttttggaagaatgtggttaaggccaaggcaattttgagaaaaggggcttgcaacttagtcgaagatggaaaggatacgagaatttgggaggatccctagatatcccatggacgggatctctaccctagagcaaaaggtgttggagtgacggatcatagcaaagtttgtgacctcctttcggttgatggagattgggatattcagaaattaaattatttgtttgagaaagattctgttttggccatcctaaaagggggaaaaccctcaggtcaaggtacggatagatggatctggacgaaggagagtaatggccgattctcgtgtaaatctgcttatctaatacaagcttttgatagggcgacgtagtacgatgtagctccttctctttggaacaaactgtggaacagtaacattttagaatgacataagatgatgtggtggagcattctct

SEQ ID NO: 201220 - DNA, 1329 bp, Cannabis indica
ttcttcttcttcttcttctattaaattaattcagttgagatctgactcatccatatatataaaagccaaacagagaccatattatataaatatatatatatatatatatatataataagtcggcagagttactatatgacatcttcacttgtctttttgtctctcataattaatcatgcatcaaaaccttcttatatatatatatatttatatttttgtataattaaagatcacagtgacgaggttgtgaatcggaagaaaaagatggaagctatatgtgtatatatatatattatatatatatatacttaatttgtaagtttatatatgtgtgtgtaacatgtcaaaaagagataatatatatgaatgtaactcgtcaactaccttttttccttgatcttttcttttttaaaaaagaaaccatacatattatgccaaattctttgatttaatatatccaaatcaaatagatactttttttttgtatgaaaaaatagagatattatctatatatgtatagtttagtttgactagattgaaatctacatatatatacaagtatcatatttgtggatcaagttttaattagctccctcaaaaactaattttaattagttcatgaaaacattcatattgtaatagaattaacctatctatacacaatatggtataacatatattcacactatttttaattagttcatgaaaacattcatattaattgtaatagaattagtattagtattagtcatatagtataacatatattcacactttttataagtgacaccttataatttggtaacgatattttttaaacacacatcaatagtgatataacacaaaaagaaaaaaatgttagtactaatattacttttagcaagctcctatcaataacaattttaaaaaatatatatttattttagcattaatctaaccacaatattaattactccaattacgatgacacataattatctttattctctctcttccacctcgtctcatttggacccatttatgataagcatctctttgtggtaaatgctcttatatagtaatgaaatttatgatagtaattaattaaccaaactatacatgatgatattaatataactttgtagtttgtatagtattaataatacaaatttaattggtctctatgttgaaagttattatgcatgcatgtgcatgttgggttcaccaatggtagcctatatatgtaataaatgatattatgctttgagtaccaatgagtataatattaaacaaaaattttgaaatatttatgtacatcactatgggaaacatcatcatcatcatcactac

SEQ ID NO: 201221 - DNA, 787 bp, Cannabis indica
taattaatttttcttaattccctttttaattttcacttctagggagacttttgttgaatatgcaaaagagattaataagctgatggggacactttttggcctaatatctcaaagtcttggcctagagaagaattgtttgcaaagaaagttaggtgagaagccaagattgaaagcacaagccaacttttacccaccatgtccagaccctgaactcacattaggactgtctgttcatactgatcttccagcccttacagtgttgatgcaatctgatgaagtgagtggtctacaagtgattaaagatgggaaatggattgatgttaaaccagtcccacactcatttgttattaatctaggtgatcaacttcaggtacatatatcaatgaatattattgttaatgtttgttatatattggtcaattttattaataagcgttttgtaggtactaagtaatggaagatataaaagtgtgcaccatagggctgtgaccaacaaaatgttaggtcgaatatcagtagctatgttttatggaccaaatataaacacttggataggtcccattgaagagttggttgatgaagaacaccctgctgtgtatcgaagatataaattctccgagtttttggatgaatttgctagacaagaaggaacaagacggagggtcaaggaagcttttcaaatttcttatgatcatggaatttgttcttcttctaccccttaaatgatgatgctcagtaataagttttatgattatttgtaatctgtctacaatgatcctattcctat

SEQ ID NO: 201222 - DNA, 1471 bp, Cannabis indica
aaaaaccttaacagaaccaaaacaaagataacgagacaaaactcaccaggtcatacaaccagactactgtttagatttttttttatctccctactactattacttcccctgttaatccaattgttttttattttattttattttttagaattatctaatatattatttttttaattttttttttcaaatttattgtttaaatttttaaagtggttgcagagctagttgcaataggagtttctatatagaatttcgtaaaaatgcaagaaaaattgttttgaagtgtaaaaatgaaaaaacctttttttttggttccaaatttaatttttattgaaaaactaatagaactattagttataaaaaatttgaatcattccaaagtaatttacttgagtcgtttactttgtctacattcatttgaaaagaacaacattagtaagcaaagatgatgatcgttttctttttgaaggtattatgtttatctctaacgattgttaattatttggaagtcgaagtatatttaattgaagataaagtacattcaacctttcaaaaaaaaaagataaagtacattcaactttaattaaaaaaaaaaaaagccgtaaaattaagattagaatttagaatgtaataaagagaaaaaactaaatgaagaattgaagttagaaaaattgtgtatcatttcattggagattagagatgaaatttatttatacaaagaaattacttaggaaatcaagttgttgtacgcattttcttccgagtaacatttagcctttttagaaaagtccaaaggatgctagacccaattttcgatccaaaagaagtgtaaagataatagtatttatcaagtatcaaaacacccagatcttgtatctgggaaagtcccccgatccaaacatgccatggtcctctggtctatcatagatattcggaagctggctagagaccccttaggggatcccaacttgcatagataccttctacaaggctatccaggaatggaacccgaaggggcatttgacaatgtctaccatttcggacaatatctacatgccacactactgacacaattccgagaaatttagggacatgtcccctctaccaacacgccaaaaggccacgacaaatgggtacaatcccctttgggattgtcacatccactactctaacataacctttccccatgctccaaacgacgactcatgcacgtctgtcactatcaacagtacaatgaattacaacaattataacttacaaggattgggcttcacctactaggtccaatacgcctacacttaacttaagcatttaccttgtatcttccccattagtgggccattttctattcacaaaccctagttgagcccagatctgttcgacccacagtgcatgactttctataaataggatcttgctcatcatgaaaggggttcgaatattcataattttttatgagtattcttaagat

SEQ ID NO: 201223 - DNA, 3192 bp, Cannabis indica
gatgttcagcttgagacagattgtttagtggttgttcaagccttatatagtgtcattcacatgccttcttaatttaatttttgttaaatattttgtaaacaaggcggctcactgtgttgttctcggatcttgtttctattctgattgtattgtcaatgagagctctaattctgctgatgttttatatattgttatggttggaattattgattaataaagttgccattttttttttaaagtgacacttttcgaccgctgaattatatcacatctcttatcgggaattgatagatagaactaattgacatgatgaatggagaattgactatatgagatctttgaattttaaaggtaactataattaatactgtagttaaaagtgtagtattgtcttgctttgatgtcattacatagaattaattcaaagaaaaagcattgtccttttttttttgtaagtttttttattcaagcgtctatatataaattacattgcaccacataagatctctcaatacttttacaaaaaaagttactttaagtgacaatatttaatcacaatataaattttttgtgactaaatgtgacttttaatcacaacaaaaagttacttgcgatagatagaaattgttattaatttagttttagtcacaataaatatattgtgattaaaaattatacatttagttacaatttttttagttacaacataagaataataatttataattattaattacaatttttttataataatacacaacctccttttgatggtcacttaatctaacaacaactaattagaaaaggcattaagttgatatgtaataatgataagtctattagttctgagtcacctcatgaatatataccacacaaattaatacaccaagttttaccgttgaaaattctaagtcaatcaaagaaaaacaaactaataaaatcttggcttaatcattcaaaaaaattaatatatattaataaataaataaaagtcttggcttagaaaattccaactttcatacttcatatatgatgaaacgaaagcttatttggaaaaaaaaaaaacattgctattatttacttgaaagttgtctaataattgaccttaacaatttcaatttcaaccacatgtatacatgtagttggactatggcagtagtccagtcctatatatttatttacttatttatttggggtttgtttccatataataataagcaaatgagatgaactcatgtttttgtttattcatctaaatctgagactctcgatgtcaggaggggcatcattatcatcatcaccagcctttaataataatacttattatactatactctgtttattattgattaatgttcttattccttctcttaccaaagctcagaatagaaactaaactcacttctacacctccctctgaaggtcaatctccttattataatctcatctattatatatatatatatatatgtaaattgatatcatgtaataaaaatcaatgttgtaatgtatatgcagtgagagcattgaacttgatctttgagcaatggaatataagggctgagtctaatgaatggaacataagtggagaaccatgcagtggcttcgccttggatgaatccccacccatcaccgacacatcctataatcccttcatcaaatgcgacttaattttttttaaaaaaataacttttagggaaaaaaaagtggtttctgtatatttcttatttattttggtattttggagtcttttaatctaacataaatttatttcctaataaaggccacctaaaattttattttttttcattttacctcacgtatttacattatattgtgtaacaattctttatatttttctctatattatttaaatattatatctttacatatattttattacttaaaacaaatacaagacaaaacaaagtgaagaaatattaattaaaataatatacaatgacaaaaataaagttcaaatattttgttgcacctgtaattatttattctcagtgcatggtaactgtttaaaccttattgtcgatactataaactattcaaaattatttaaaagtatatatgttatcctaaatattgtcaatatgttcatgatcacgaagaaaaaaaaaatcaaaataaaaaacttttctaaaagtcaaaacagataccataatatctttatagaggagtgtgttggggtatcaattcaagtcgcacatcgaaagaatagacaagaattgtcttgaacataagtgttccatgtccaaaaataaaacagtgagggcctaagcttaaagtagacaataccatactaatgtgggagttaacgtgattaggtgtggtagcccaagatgatagcagcgatacaagatgatttcgttagaggggaggtcatgagtacatagtagggagtcccacattagaaaaatagacaagagttgtctagaatataagtgttctaccgactccattagtataagacattttaggcccaaaacggacaatgtcataccaagccgccaactgatgagtgtaaaaatccaagacacataaaattgggagtaattccaaaaatctaaagtaaaatgaattgtttggcaagatttctctcagctgagagtgttggttatccaacttgacggaatgtcaacttttaacttttcctacaaattttagtggtgcctttgagtttgattccactttttatacactctctgagtcaacttgacttttcaagattactgtttcattagttggtggcaattatgggggacaatggggaggattctcgtgagcaaaggaatgtggcaaatgaatctcgatcagagattcctgaagtaattatgaacagtaactacactcaacaaccgcattctcttgacagcagtggggctacaggtaatgcagttaatggggctacagaaaatgcagctaatggaggaagtgaagcggctgatgtttcacaatatactcctattgaggaccttgaagtactacgaaataacttccttgaatccatgactcttgacttagaacctgattttgagcttactgctgagatcgttagcacaggggttctagtcaattttttggatggtaagggtgtctcaaaatctaggctaaaaaccatccttggccagatttggagacttaagggactgtggaaattcaagactttaaatgtaacgtccc

SEQ ID NO: 201224 - DNA, 520 bp, Cannabis indica
gtgcgctctattaacacttgaaaccatctttgtttatttttgaggtctttctttggttttttaaaaaataaaaaatctacaattcttttaagattttctggttttctaaacagtttctaacttaataatgagggctatgcctgtgcacataataagagtgaggctatacgtacattatgatatatggcattatctatatactactatttaagattgggatgcatgtgatccctatggcaaggtagttaataatgtataaaagagtgtgtcttaattattattcatatgcatatttaatgcatacataaatatatattaacaactttacgtaattaaatttaaaaactctgttattataatttaatcataaatgttgtttaatataatctaaacatcaatcatacgtaaagtaccgccagcttaatacatatagttttatatatagatgatatgtattaaataatatatgtacaaatatattactcagtaacgacgtaatactatcttttttccaaacaat

SEQ ID NO: 201225 - DNA, 1267 bp, Cannabis indica
aagaaaaaatacattactttcattattttaggaaaagaaatagaaattgttaaaagacaagaaagaaacggccacagattgaatcaccacaaccgcataacgccctatattaaaacaaattccatataatggagacgatgagataaaatggacgaatataaagttgattaggatcacccaacacaaaaagcgtgaccatagaaaatttagttcagaccaaattgtaagataaagtttgatctcgggaaggtctatgattctaattctatagaatgggactttggggagaaatgatggttactttgaattttctctcaaaattcattcaactaactagtaatggtatgcatccgaactcctaaatttagcttattacttttaacggagatatgtatggtttatttgaagctaagagaggtcttatgtccctcttaatttttgccctatgcatgaaatatctgtctcgaattctagctgaagtggagagaaaaatagattttaaatttcatgacaggtgctcagaaatgaaactcaatcatctatgctttgttgacgatgtaatgatgttttgtcatggagattttaaatctatttactatcttttacaaggacttaaattgttttcaaaatcgtgtggattatttccaaataaattgaaatcgaccttgtattgctgtatatgaaagaaagggagattcaaagaattattgaggctttggagtttgttagaagtgaactttcctttatataccggggaataccgatttgtgcaagaagattatctgctctagaatgtgaaataatagtggaaaagatggttcagagataaaatttggggaacccgaaatatttttttgctggtcgcacaactttgattaattcaatcctcattgttgagaatcatggggttccatctcaaaaccaattggcaatgagtggagtagcccatgttcttatatatggctcaattctctaccatttattccatgtgggacaatgtccacaatattccccctcaagatgatggctattttttgctcatcaatcttgaaccgtatcagagtggacatggtcactatctgtataggtgcggatcggatatgatcacttgcccgcaagggatatggctctgataccatgttgagaatcatggggttccatctcaaaaccaattggcaatgagtggagtagcccatgttcttatatatggctcaattctctaccatttattccatgtgggacaatgtccacaatactcattaatgct

SEQ ID NO: 201226 - DNA, 606 bp, Cannabis indica
tcatatattacaaaataatgacaatttttcatacactcacttattagtatgttacaaatatttaatctatataatattaacattgtaatgacctcagacctatgcataccagctaactttctctcccattgaatttaatccaccataaccaaatcggatagtgtatcgacattgtagctggctagcagctgatgttatatcataaatctcttcatcacctcttttactctaacaatttgtcgccaatacaaacttccttgacttgtggattcatacatccacggatccaccaattgttgatttttatatagacattgtgtactcatttcactcaaagattattttatttctaagccacaatccgcacatacttttctgaagtcgttcgattccattgaaccagtttcctgaagcctaagcctccctcactcttgggtttgcaaagattaatccaagagacatagctcgggcctccatgttcagcctcactttgccaaaaaaaacacaacaaatggcatttactttcttcaaaacttgtttggacaacaacatatttgaacccagtatacatatatgaaaccaagacacaattgaaagattacgtct

SEQ ID NO: 201227 - DNA, 1714 bp, Cannabis indica
gacacaattgaaagattacgtctctatttttagttcttaaagaaattataactaatattttcttatatgattgtgtattatgtagttatagtaaacattcaacctgcttctaaaaaacttagaataatttataaagtgttcgtatataatgtttaaacattcggtttgcacgcatgtaactgaatatatgaattatgtttattatttaaaaaaattcaaaaacaaataaaatacctattataaatataatataaactgtcatataaaaaataaattatattttcttaaaataataaaaacatgaataactaagaacaaaattattatctctattataatctttatatatacacaacaataaaagcaataatatacaataatagcagtaatatactagatatacatgaatatgctttcatataagatatacaacaatatatataaaaagaacaaaatcaacaaaaataaaatggaaaagcaatactacctcatcttatcgcaatccattgtcaaccaccatatccatctcgaccggtctcacagccctttagaccacctcactgcatgtgaagcctcactacagtatatatcttataaatttataatataacaaacataagcttacattacaatatacaacatatagaaatcagttagaaccaaactataggaataaaatataattaaggcgaagagagtaacaataccgatgtggaaatggggagaaacgagcgagtatatggatcactgtaaagagatagttcacgacgatttagggtttacattgatgaaaatgaaatgtcatgaacgaactcattatttatagtgatctaaaagcgttattggatcaccgtcgtgataaagctcaaaatccacgctaatttctccttagtgacagtgcttaatcaaggcaaaagagcaatgtgtatgtaattgcacaaatttaagttattcagcgtcgatttctctatcagcagtggttatagcaccaacaactttcttcagagttattgtcaattatatatcgttgttatagctcggtccaactcaatagtgtcggttttaacatacagctagtgttgtgacgctaaaacccatttttctagtactaaacctaatttgagccttatcgaggcaaattggaaaccaactatattacaacaatattgaaccatatgaagtgatgtcaagccgattaagctgcttatcgagcttttacccaaacaaaatcaaaattttcatacagagcaaacctaaacaaaaagttccaaaaaaacacaattcaaaaagtaaaatacgcatacaacacaatgaacaaaaatcaaaatcaaagaataaaaattacaaaaaaaaaaaaaaaaaaaaaagaaaagcaaaacaatggaagataagttaaaagacgaaaaccctaacctttttgcgaatcatcattgttagtctaggtgcaacaccaggttgatcgggactaagtgggttggggtcttagtagagagctgcatgggtcaagatctcaatgattcaacgattttaagtgcaatgccgagggtttggggtgcttcgaggcatgggttcaatgtcgagagagctcgggtgaagtgagaaagggtcaaagtcaatagacttcaagcatacgacgaatcaagtgagagataaagattgggaaagtaagagagaaatgagagtaatttatctcaaagatatttggaaaatattt

SEQ ID NO: 201228 - DNA, 2431 bp, Cannabis indica
gaaattgtggacctaacttgcagaatctcaatgatagtctatctagttgaaatggtggaatccaagaggaattgatcctcaatgttaaggagttataggataaataaagatgtttcaatttagaaagtttttcaaagtgaacttcactcacaagcccggtgaaagaattcgaagagacagacaagtactcgagatcatgaagcttaccaatatcttcgggtaaagtaccattaaacttattgtaaggtacatccaacgttctaagatttgaaaacatcgaaagattgggcaatgttccttctaattggttgaaaccaatccataaatctttcaaaaagattgggaaaggtttcaaactaggaaatgatcctcttaattggttctgatcaaaatctaaagtttctaaggaatatttagcacaaccacttagactatctagcacatcagaaagtgttccattgaatttatttctgctcaatactaatatttgaagattacaaagattccccaatgattttggtatttcaccttcacatccattcgaagataaatcgatgtgtgcaagagatctcatgttttcaaaagaattgggaataggaccatttatttcattatctataaaggtgagattaactagattggtactcatatttagcaaccaaggaactgttttaggaggtatggtactgccccaaatatcaagattggtgagagaatttgaagaatttttgttggtgaagatatgatctattggttgaagtatacatccatctaactctaaacttgataaagattttgctcttttgatcaagtgaaaccaatctgtggatttcgaattctttatattgatgtcactcaacgataagattctaagagaagagagatgagaaagccattcaagattagtactaacatcataagaattatttgcatctagtttgagaacttgcaacatggtaaggttcccaagttgggaattaggaatggatataataggattccattcaaagttgagatatgtgagtctagttaaagaaccaataaactcaggaattttaataaacttattgtgactaaaatctaggtacctcaaatgttgcaactcaactaaagaatgaccaatttcaccatacaatggtgtatcattccagctagaataaagatcaagcatgataatatgatgacgagttatgttatcgcacctgatacctctccatgcacaacaatctcgtctggtacttgtccacgaggatagacgattgccatcatcgacaaagcctttcttcaagttgagaagagcttgtctctccttctctatgcaataatggacatgatcatcagaatcacttgtgctactccatacaaagctagtggttagcaccaatgtaagtactaaaactttgatcatattgagaatactttttaagttatgagattgttatcttattatgggtcaatgcagatctagttaattagattatatatagaggaaaccaaaaaaatactattcaaaataactcaccttaatctttaattaacaagaattcaaaagtcaataacacaacccaatgataatttttaattagttacaagtttgggggtatgtgtgtgttgcacatggggctcattttagtatgttacaaattaattatattccaaagctcatcatgcattgcacatattcaaacccaagacatttttatattttgaaatttaaatatggtgccatcaaaattcattttgacagttgaacaaagacaccaaaatttgttaattaattactgaagtaattaaacaggacaaagatggaaatgtaagtatttaaagatttgaaagaagaaaataaaaaagcataatagagaaaaaagaaaaacagaattatacaaattttataagggataacactctagttgagaaacaaaaatatacataattattattgaaaatcaaatcatatgcacatattttagtctgtgaaagaaaaacattactgacattaatttggaagcttcttgaatgagagctttcttcttctaccactgccaacctcgacgaaacggaaatagttttggtcatatgggtcagttgtgtttgtggagaaaaataggatgaaagatgagtttgccaaggtttggcgttcggttatcagtagctaggaatgccattaatggaggatatgaatgaagcttggaattgaagaagttggcttgttccactttccctagtttgcataaagaatgatttgatactcaatcttcttctttttttcacaatgttgaaacaaacttcatgctaaagaacttaaaagaatgatttgatactcatgttaaagaacttagatggttttggttattgcatttaaggttagttttgatcacctctcacttagaccaataaaacattatagtggagatttagtgcaggattactt

SEQ ID NO: 201229 - DNA, 553 bp, Cannabis indica
ttttttttttttttgatattagcgaatttttgtattttttagatgttagtaaatttttctttaagttatgtttctttttgcttagctttataatcaattcctttgaaaatgaggggaaaaataaagagaaattatttgtttattgaaagataattctctttttttttttaacaaataatgagaatgtgttttgatacacaacatacttcatgccaatttacagcaacaccaataataataataatttttaatgcacatgtttgcatttttacataatatacatatatatataaatttacaagttgaattatataatatagtcacgcatgtagtcctacgtgtatatatgtgtagattattgtatttattttagaaatagagcaagtgcctttttttactcctcatttccacttagttagatggtgtttgtgattgtgatgtgaaagtagagaaagttaaagtaaatttgggatttgatcatctttaatggctgcatcacccataaaagacaacacgctcttattattttattttagaaaatttacatggtata

SEQ ID NO: 201230 - DNA, 1892 bp, Cannabis indica
gttcatcgaaattcatttccttggcctaatttagagttggaatactgagcagatgggtcaattctgactagtaacaaacttcagagtcaactaaaatcttctggttatgcaatgtatcaaagtatttaccagtaaggcagtacaagaaataacatgcggcaaatttaaatgcttctgtaaaaggcattgcaagatacaaaaatgtaaaattacaagcaattgatatgatcaaagctgaattatattttgtatagaatataggaaaacaccatctttaaaccaaaaataaaatgtgtgttccactatgttatgctttgttcaccttaaccatgttctgaactctacccatgaaataactatgtctaccttgcattgttaccaaaaaaagagaaaaaaaggtacattcaaagtgcaggaaacagaaaatgtcacctgtaaacagcttataagcagtcggcacactcctcttctccggcacccaaaatacatctgacttgtgcaagctatacaagcctggatcaattataacaggtctagctctatgagacctgaaagtagctccaattaatataacacattcatttgcagccttgtagtttgaacacatatagtgcaacgtaaaataatacatgattataacttactctttccagccaatatcactcgtatgctcaagaaaattaaggtttctaggaattgttgacaatgtatgaagcagatctgcgttacaggaaataaacgcacaaaattatggaattagaagttaaccatttgttcttaatcattgaatttacctacctactcatctattcaaccaaaatctatggaccattacaatgagaaatctactgggcaaaacaagaatgacatcactaaaataaatagaaagaaatgaaaaaagaaaaggaaaaatagaaagagaggcacacccacttctctcacttttcctttaggaaataaaaatactataaacgacaagagcaagaatgtcaaattaagccaaatgctccaatagaaagagatgagttgtttaaactagctagacacttgtcaaaccagtgaggagactaataaacaattcattcaaacacaggtagtaactagtaaccaaaattggtaacagagttaactaagtttaaactcaaaaaaccaatcaatgcaagcctcaattgcaataaaaaagtaaaacccagttctttcttacattagattaagcacataagcaaaatgccatcatttcccagatcaagtggaccaagcaatctatatttagaaactgaaattaaaaagaaaaaaaataaagaaagaaaactaaagtttgtaccatcttgggtcaccaaagggtagtcagaagcacttagattgataaaccaatcccagtctccaccttctcttaacaaaatagaagcagcatgtagcgtattggtcaccattgttggccctcgataggtcaccaaattagccctcacaatcatcctaacgttacccagcttagcaaaaagcggttcttttctcacaaactcagccaagtccaacctctcctcggccgaggcctcgaggtctaagtgcacaacatactggtttctagggtggtacagtgctttcagggtccttttcaagctcctcccatcccccatagagcctgagatcaagtaagccaaccttggtattgggtctttggaagtatcagaaatcctaagcttggattcaacaaaacgagggacctccttcttgacaggggtcttgtacaattttgaggaagacgagctgaaagaagtgaaaactgtaataaacacaagtagagtagataacaaaagagagagtactaatggtagaaaccacttcttcttcttttgctgcttgttgatctccattagaaagcaaaaaaaaaa

SEQ ID NO: 201231 - DNA, 2034 bp, Cannabis indica
tttttactacgaaatttgaaaatattactaaatttatttttctaatgatggaagttcacaaaaatttgtaagaaagaatgtatggaatgatgttcctttttttcatgttgtgttagctttgatttgagtttgaggaggaagttaattattttgtgctaattttatgtaatgagtaactcgtgttgtgtggtgtagtgataatttttttttattggcattcttatttgtatgagttaaggatttgaattctaccgcaactcattgtgagagattatgtttgattttttggaagactagcttgctgtgaaagtgttatcctcaatatgattgaaactctcataaagtatatactaatgacccaattactacaaaataagatataaaatccctatagctagcaggtgatttcaaaattgtcaaaactacaaggtagggaaaaaatctacgtcacatgatttttttgttaataaaaaaaaggaacagaaaaataactactttgagtcatgaatattatgcttgtgaattttatttattttgagtcattgtatggagtgtttgtattatgtttatgtattatgcaaattattgtgttgagagtatgcacattaatgtacacatcaattgcacattaattacaaatttgcaattgaaatttattatattttataattttgtaaacaatattttcaaactaaataaaaatagtcacatacttttggagtgtcatccttaactaatattgggctactaatgagaatgtttaaagattgagttgactggaaaaaaagtatgagggtagatgaagttgggcttgtaagacaacaagtcatttttattaattgggcttccaccaattaagcttcttactcatcattcatattgaaaaatacctcttttatttatcaattaatcaaatctacctctaatttatatttaattgaaacatacatctttttatatgtactgtatccaaaatgccctaacatgagagagttacacgtagagtattttgaagtgataagggtaaaattagtacaatatttaaaaaaagaaataaaaatgatattttgaagtgataaaggcaaaattagtacaatatttaaaaaaagaaataaaaataatagactttaaaataagaggataaaaataaaataagacaatataaaaaaggtgtagagtctaatttttattcacttaaaattttatcatttctactccaaatctgaaagcataaaattaaaataaattaaatatttttaattaaaataattttacaattaaaatcatcaaattaattttatgcatacaattacttaaaatataccgttaatcttatttctagtcaacgaagtgaagtcaataaaacgataatatgaataattgaataataataaagattatgaatatctggaaacgacacgcgaaaataatagaggttcgatccctttcaacggtaacaacctacttctttttttgttatattgcttgtaaaagaatattaagatcacaaagtccgaccatatgaattttttaatatctcattaaaatgttacaaatatttacaaaatattttctcttttcaaagtacatccccaaaaagtccctttaatagtcaattaacctcactatttataaggaagaaagaatacatttagtctgaaataatatagtatgaatttaaatgtgaatctaatttaaatgtgaatctaacaattttctcattcttttaaatcaaatcccataaaaataaggatctaatattagaaaaagtgatgattattataaattttgtaatagcatattaatgacaccacttttgaaaaaagcaaaagctatcatgaagaaaatgactttgcaatttggtttatggaactctttattacttaattactttttggcaatataagaacccttaattatttaattaattagtgagaatataaagaatttaataaaaggctttaaatctaacactttcaataatttttatgaatttgggagaaaattttcgaattaatttttattataaaatat

SEQ ID NO: 201232 - DNA, 1432 bp, Cannabis indica
gattgaagcgtatgttgaaggggcttcctagacaggaatagcaacaactagagttaaccatccaagactcccttctaggaagaacaactagccatccgaaacttctttccggaggaggactaactttcctgaagacttcttctgagtaggcaagatagacatccgagaacgctcttccgaatgatttttatcattccacgagactttgtcttcctaatggataagttagcatatccgaaaacacacttccagagaacaactaactttctattattagaacaatcttatggaaatcttttcatttaacagaactataccacaaatgcataattagacaaaaaaacgatcatagtagtagcatgcaccactaataccctttagggtttttctttaattttttggaaccattttggccatatcataatgagttaaatatggtagccattttgaagttcttcctctctagaaaagttactttcacctcttaaatttgtattggaagtactaaattatgagagagatttctatactcccatcttatttaaaacatcttagaagtccttatattgaccttcttgaccttatgccctataattactttgaaagaggtggtggactattgggtgttttttgttcttagggaattagtaactttctcaatatctcacactttttgaggttgattgactaacacttttgccaacctttttaacttgttcattttttcaactctctcaattccaatctctcaatttaatacgagaaataatgtagatgagaccgaatattaaaagtttatagtatccaatatcatggatacttaaaacttgaatgtgtttcatatttctacaatgatcatattggtcttaacaacataatttttcatgggcattcattattacatgtgaaattaatatatatgctgttgaggtctattattattattattattattattagctagattcttttcctatataatctgaaaataagaaagtaggactttattcttgaatttagttaattagagtgattcaacattactaatttctcctatatatatgtcattcttcattcaatccaatccatagcaaagacacactatataaataatcaaattatttgattacaatgtatgcatatactttttgcatgattggtttggtactttcaaattatttatgtatagttttgaaattataatctaagattagaattattgtatctagaagattattattacaataatatatcatgaaaatgaaaatgaaaatgaaattggtgcaagtgataattatagtgaagactatatatgaggatggtgacactgataataccatttatattgtgggcggtggagaagattctttgcatatatacatatttgtcatgttatgatatgatcatatacatttaataataacattaatta

SEQ ID NO: 201233 - DNA, 610 bp, Cannabis indica
gatcataatcttacccattatacatttattaatctatttttttttatataaaatattacagactataaactgctatagccaactttctaacactttaagacacaaaattaatacaaagaaaattgttgttttttttttttccgaaaaacttcttctattatgagtccacaatagaaaaatggtatttttaaacacacacattcaaagttgccccaataataccttagaccaacccaacaacaagaagacacactcacaaaaccctaaccctagcactcacaagaacggtaatagactcaaaaatttctcttcatatcttctccttcttctattatcagctagggttatctaaggatctagggtttctcacacaaacacaattgcacaaacttagctagggttcttaggttttcatctctttcaggttccaaatctcctcacacccgattcttacaaccccaagccaacaaataataactcaaaaaactagatctgtcactacagatctaaccctcatggcttaaacacactattgtacacacaaattcacttgcagatattcaatcccagaaatcacacacactcaagaatgaacacacaaatatgaaat

SEQ ID NO: 201234 - DNA, 653 bp, Cannabis indica
  modified_base (594)..(594): a, c, t, g, unknown or other
  modified_base (605)..(605): a, c, t, g, unknown or other
gcttctgcagaggcctatctacttagtattcacacaaaaccctatgaaaatggacaaataattggcaaagcaaaaattgctgcctaattaggatttttatctcctaaactttaacatgcaccaaatcatacttctgaacttttctggccgttaaaaattctcttttgtctaatttcattcaattttactatttcagtacataaataattcatgaaatagtaaaattgaatgaaattagacaaaaatcgttaaattcattaatctttatagttcaagagatatttttaaccactttaaaagttcaaagaacatgatttggtacatgtcaaagtttgaaggataaaaatcctaattacctaattaatgggcatcccaagtcactatataattaatcgagattattgctcagtagctttttgtaggcactatgccaacgacttacagttaattaatcgagattattattcagtagccttttttgcaggcaccatgccaacgacttaccagatgactcgtgtgtaaattttatttgaaaaaaattcaatggctctatccaaaccctgcctaactcaactatattcctcttagtgtagnttcattcaccntaacatacctgaaaagcaaactatttttcggcttggctttagagaaaa

SEQ ID NO: 201235 - DNA, 1015 bp, Cannabis indica
agcgtcaacctaattaaaactcttattagccagtttgaatacaataatttaattattaaaattatataaatatgcccatatgcccaccacttggtaattcaaaaaaaaaaaaaactaataaataatgtattgtcccacaattgattatataagcaataatattattagtgaaataaaaaccttaggcattaatttgagcctcgatgaggatctctctaacgtcattatgttcaatatgaaaagaagagtgaataataattatatgaatatgatacttgtagctccatgggcacactcttttaagtgtattaattaatataaaagatgtaatttttattttccctaaattaattatatttaatacctattattattattattatttcattacaattatcccgaggaacaaaggtagggtgcttggataataattgcctttatgtctggatatttttttttacttaacgttcacaaagaaacaagaaagaaatagtgagaatgagatagagatgagataccctttcacttcacttttatttatctattgctttattataattatttttactatattatacattattgcttataaattataagaatatccactcttgattgtttatttttattttcatatctcatcatcaatggataatatcattacatattgaataagccagatttccccaagagagggttttgctcaattggacaatactcaaacctcaatagtcgttttcagtatttataaaaggaaattaaaactaaaagaaaaaaactgaattaatactgttgcaggtatttaatgaagaaagccatcctttattattaatgatctttacctaaaatgttggaacaataaaaatataactgtgctctttttaagggttaaatgccatatttaagtagcagtataaaaataagagaagtacattgatagtaacttaacacaacgactaattaaatttcaataaagtagtaacttagttttgttactttttgttactgtcttgat

SEQ ID NO: 201236 - DNA, 1044 bp, Cannabis indica
ttgtgtgtgtgatgagcatggttatgatctgtcacagggccagagtttgaggattctccaacaagtaaaggagacggctggggatggggtaatgtttgtagtttaggaacagccgatgtcaaagatgttctggccaaacgagtaagcagaggccatgtattgcctttggggaagtctgacctataacgatcataagaagaagatggcagtttcgatcctttaatttgagggccatatggcagttcaggctcaatattcagatcaagtttctctaaaaatagtggacatttttgatagagatgaccaatcattccgcattccatacaatagtcaggcaaccgctcatatcgaaactccacccaaaattcatccttaatttttggaagagaaatcattctaccacgcagcaatggtttgttgagattaaggttgacacgaaaacgcagaaaaggaccccaaccctcattaagcgagtcatcatggacagcaagaaactcaccaagaatagacgccaaggccttggccaaagatctcgacttactaagaaaaggcaatcgataggcttgaacccaaaaaggactgtaaatcatgatatctggagtaacattcaaatgcaaagaaggatcaataagtacaatgtggtgattttgaaagtgccacggctccttatccaacactcgaaatctgtctccttcacatccaaaacagaccataaacaaatccgaatggtgttctttgatgttcactttgaaacgcccatcccaatggtcagccatctgtctttgaaacgtggataaccagactttcttactagttagaacacgagcaataagaataaattcctgggaaacatctgcatcaggaccatcatcagtaatggccagaatttcactctcattttcagtgagagtcatagtcgacttcattttatcaagaagtggattcatggagaaagtataagatgtcacagtagggtagaaccaaaataaataagcaaaaaggaagatcagtttggatcgacaatggtgatggtggaagaacagg

SEQ ID NO: 201237 - DNA, 787 bp, Cannabis indica
gttacaaagttgcttttacaagaaatatggtttatgtaagacatgattaattttgtctctttttccaataaaaaaatggtaattaattttgttactattattaacttgtaatttttgttattgagggttacaaacttagtaaatttttttttttttttttttgaactttagtaaatttaatagtttacagacattcaacataaaaatatttacacaatatttggtagagagcatagaaggatggaggagagattgattaaagaataaggaggagagatggagaggaagaaaatctccctttttaaattagggtgtgcagattgtcatcaaatttaattaacatcaaccgatctaatagaatctattatctaatcataattagatcggatcagatgtaaattctaaaaatttaattagatcggattggttattagatgggacattcgatccaataaataactgaaccgaactaattaaattatcatccaattatatttatatattcttaaaatatatttattaattttatatattttatttatttaattttaaaaaataatattaattaattatattcttaatatacacctgcacacataagattacataaaagaaatacatttaaaatatcacgtattattttcttaaaaaaattaaatttaagagtaatttattttataatttatataatatttgcatttagtatatttaacttatctattaagagttaaaatttatgcttattagtttggactggatttgtattgttatattttgattatggcat

SEQ ID NO: 201238 - DNA, 682 bp, Cannabis indica
ttattattattgctacgtagatcgatctcttacttacatattctcaactgcatgcattaatgtgtgtgttttcactctataatgtttgtactataaaagtaggttaagcccactaatggtgaagcaatatattaactattattattacttcctcttctccttctctttctctttctttttgagagtaagagagtaagccaagaaaacatggggagagtttctaataaacatgtgagtgtgttgggtgtggctggtcttatgtttgttttggtgattggagttgttcaatgccgtaagcttgagaaagaaacattctcggatggtgttggtcttggtggtggtggtggaggtggaggtgggtttggtggtggccatggtggtggtataggaattggaggaggatctggtggtggacttggtggtggttttggaggtggaaaaggaggtggctttggaggtggaggtggagttggtggtggtggtggtggtgttggcggtggtgccggtgcaggaggtggatttggaggtggcaaaggaggaggaggaggaattggtggtggtgctggaggtggaggtggtaaaggtggtggctttggaggaggagctggtggtggtgctggtggaggcgttggtggtggtgctggtggaggcgttggtggtggtgctggtggaggagttggtg

SEQ ID NO: 201239 - DNA, 887 bp, Cannabis indica
cgaggtagcgagtcccacagaaaaaggcgagtcggtagctggaaataacagaaacaactaattagaatgaacagcatatgtttctttacttaacacaagatgtcaaaacatcaagttgggctatttggtatactgacataaacataagatataggatcatacaataccttgtatggtgcaagtttgtgttgagcccaactgaagagttcttctaagcttatagcaggtcttgattcttcctctcttttcttctttgcttcagctgctggcacaattattgcagagacagcttcaccgtaatctttgtcgggtaggcccaacacacagcactcttctacagtcgggtgctgcacaaagaggaatttttttattggaaagtcttcaatagtattcaaatattttgttaactttttttggttaaacaagttgcagcattgttctttcttttgacactgtttagaaaatgagtctaaagaaaataagctgtagattcacctctaaaagtacagattcgatttctaaggcagataacttgtatccaccaaccttcatgatatcagcacttgtacctaataaatagcattaaaaaaatacaaacccgaatcagaattagcataaaaaatttaataattctaagtcaaagaaatcatagaaggaaaaagctctgtatgagaaacaaacaagagggaataatatctacacacataggttgccaggtagttttaaccatcaccatatttttttcttaaaggtcaccttatgcagtggcacaatgtatgaaaaataaacaaacgcaatacaccaatgataatgacagtgtagagtgggtagtggtttctagaaagtttcttaacgtcccaataatgacatagtatccatctacatcc

SEQ ID NO: 201240 - DNA, 596 bp, Cannabis indica
agatggatgtcacgccacctcgtagaaattgagataatatatatggatagataaatatataggtgtagatagatatatattaatttttattaatttgcgaagtgttttttctcttttttctttttttttttttttttgtttttgtgatctttgatttggaccaatattttggactttccaatttcaatttcatacggaccaagtactctttgacaataaagcatattgaaatcctaaatataattaagagaatttaattgagtgactttctttgctggttcgatgaattataattattaaccactttttgatgatataaaaaatgaaacattaaataccctcgagtcaatccaaaagcaaaggtagcttataattagctttcaattttttcttttaccttatacatataaacacatattaatgtttgcccaaaataaccaaaactttgccattactatccccacgactcccaccaccgcttttccaatcaaaaccaaaaccctacgtgcctcttcttgactttcaaacacaccccttcactcctatttattcctgcaacaactttttccaattacaatattttatatatatatata

SEQ ID NO: 201241 - DNA, 1514 bp, Cannabis indica
aaaatttaggaataatcaattttaaggtattatgctatcaaattttaaggagcataacatcttaaatttgattattatttttcaaaaatatatattattcattaagtttttataagaaataataaaagttagaatatcacactaacaatagttgtaaaatttcacaaatatttattggtagaaataatatagaaaataataagttaaataaaaaatgtataattaaaattaaaaattaattaaaattagtttaagaaatagctaaatttgatataattaaaaatgtaaaatattaaaataatttattttagtattaattgatttaagaaaaatttgttacataagtaataatttatagatattgctatccatgtctccatatgtaggacatgtggtatgaacagagagggacaactttagacagtcactagccaagtcctcctcattaagctaaaacatggagaagctttgcagatccgagaatagatcaagaccaaaggatacacggagatttttatcttactgtgccatccgggatatggaaggcttactatctctccggatccagagatgaccaggttcaaggtgtacctaagtgatacctggaagattaattgaaaagcttatcatgaacactaactgcctaaaaaaagtcagatgtttaccatgaagagacccccagatcgttcagcgacgactatacctattctgacacaagagcaaatcttgtgccctgtgtcagaccatggtagggcacacatcccacacgtcctttttcctgaaggttagtccaagcatttactttgtaaggtgaaaccttttagcgacatgtatctagtgcacacaatggtccctacagtacagctacctttttacatgagcaaaaaccttctttggggcccaataatcaactcttttcatgtatttttatcccaatagttgggtgattgcagaaaatctagacgtctcatccgcatattcatacctgccctttagtctataaatactattctatttcctgacgaagaggggatcaaaaaaccaaatagctgaaactctaccaaatttactcccagctttctttttcttcaagaaaaactaagagggcagagttagggtttcttgcaaaacactattgtaataacattatacaagcctctcaaggccaatagacttactcgtggactaagactcattcacggctaaaccacgtaaaaacctttttcttctttactattgcattttattatttcttaagctctttattattagtttctaaaagtctcggtaaacaaataataatataaactaacacaaaatgattaatcagtaattagcaattaataagaaatataatttaatttattatataattaacttagtttagagattaattaaaaaaatttgaatttgaattgaaaataattgtaaaattttaacaaattagtaaatttaaaattaaaaattatattttcatttcaacaaatcggaaactttaaaataataaaaaaaaa

SEQ ID NO: 201242 - DNA, 2697 bp, Cannabis indica
gaagtgaagaacaagatgaaaccaatgatctagaatacgacgaaaactaagatgagtacgaagcatatgataatggtagctacaccgaagtgatggtgttgaggcagaaagccgctgaccatgaagccgagttggcagataaaaatgagcagaacaggagaatgcaagaaataatgatcatcatgaaaaaagtgatggaaattgtaggcatccatgtgcatccaaatatcggacccattgagtaagacaaaacaagagaggaatcgccgctgctagataatcaaaggcacaaaaattgagatccaagccctatctagtacccttcaaaaggcttcccaaagacaaacccaacgaccattcctgaaaataacaagaaggctcaagatctctggaaagttcactctgatctctctaaaggaaaagatccgcagaggagtaggtttccaaagggaaatgctggccctcaggactaagaagaccagaaaagcgagtctgtgcattaggagccaggggaagagaagggggaaaaaccataaagaccttcctgtcaatttgagacaaatactcaacgccaaacatattgatcttaaaaattgcctgaagcaaaaaaaaaaaaaaagcaatattagtcttggaaagtgctctgaacgaggggatcctgacctaacatgccattctcaggaaagatatagccatagtctcttacagacaaaggggaaatgatttagaatcttattgtgaggatcgggaaccctgtgctagaaacattcttgaagcggagttctcaaagaatttcaagatgcttgaaatgacattgtacgtaggagactcataccctagtgaccactcatccatgtttaactgcatgatgacattcatgagagttagcaatgacgtgaagtgtttgtgtttctagctgccattaggagggtccactgaggagtggtttaaaaagctagaacctgtatccgtggactatttgaacaagttgcaagttagctttagaagacagttcgtggtagctagaaagataaaccttgaagtcaacgctttgacaaacatcaagcaactacctgttaaaactctaaaaaatttcataaaagatttaaggaagaggcttccaagaccaaaaaggtggattttaaatagtaactagcattactacaagcaggaattcaaacgggaaccccctttgtaatgacctccagctggaaagagctgctagcaatacatcaattttgaggaagcacaaataactacttttggaggatattatccgattggcagaccagggtatgctcccaaagtgaaatttcttgaaaaaacccttctagttgcatcacaggcaagcaaaacgcctggtgtgcaattctcagcaacactaggatacacccctaaccttgctcatacctcgacttaatccaattttggagcgctatcgggtaacgtggctcctggagtaagttcaaaatatccctcttaatatgcacctcccatagcaagtgcaacatatgctcctcgaatctctcgaagtaagagatcttcaaaaggaagtatgtggacatagaataagaggcaaaagaaaggttacacctttcaggatactcagtatactgatttagtggagaccaaagaacatgtgtacttggccacaaggaaaaacaccaactaccgaagatcgcctcctttgtacaagggtatcttgcatagagaccctaacaaaagatgtgaatatcacaatgatattggccacactaccaatgaatgcaagaattcgaaagatgaaattgagaacctgataaggctaggtcacttatacgaatggatcaaagataaggtaccacacatgaatggtgggcaagtcgaagcaccagtgtctcttggagcacaagctcaagtctcggatgggcaagtccttccaggagtccttcctcaccaccatatagtgcatgaacaaccttctagaccaaatgggatggtggccctaatctcaggagggccaaatattggagggaccacacagaatgagttaaagcattacactgaagctctggatcatgatgaagaggtatatgatgttaacaaactcccgtcgcaaaggccccaacttatggatctatccatcacctttacaaaagaggaaacaaggatggtgcattttcgtcatcacaaggccttggtaattgaaactcccatcgccaacaagattgtcgcccggatcttggtagacaatgggagttagtaaacctcctatttaaagatgattttattgccattggactcactaatccaaacctctccctgagtggttcacaactcataggattcaatgggactacactagtccccatgggaaaggtaacactcccagtaactttgtgcctggacaccccagagtacgttcgagtactgcacctttgctatagtagactgccccacaacctacaatgcaattttgggacgtccaactttagtggactttggagccattacctcaatcaggcacctgtgcctcaagttccctacttcagcatcgggagttggatatgatcctggaaaccatggaaaagcgagaaagtgctataatgtggctacgtagcaagccattttcatggtccgagggactcaaaaagtaatcttgcccaaaggacaagatgaattggatcatcacatttgctttgaaaccgtattggaacc

SEQ ID NO: 201243 - DNA, 1290 bp, Cannabis indica
aattagtaatttttcctcttgaactttgacatgtaccaaatcatgccccctgaacttttttggccgttaaaaattctccctgaactattgagattgttaaatttaaggacttttgtctaatttcattcaattttactgtttcagtgattgtttatgtactaaatcatgctcctcagactttgatatctaccaaatcatgcccctcaaactttgatatgtactaaatcatgccccttaaactttcatccatgttaaattttttttactaaaattagacaaaagtccttaaatctaacaatctcaatagttcagggggaatttttaacggccaaaaaagttcaaggggcataatttaatacatgtcaaaattcaagagaaaaaattactaatttacctaaaaaaaaatttataattatttacaaaatgtcatattaatatatatatagcgttgggtacttggtaacaatactcaattattgatgactatttattagttatacacaatatatattactttatagtttatatatatatgtgtgtttaattaattgtaaattatagaatttttttcgtaaaatatacctgcagttctcatgcatgcaagcatgaactaactagtaaacaaagctttatttctctgaataattaagcatttaacacagtcagataataaattaacacaataattagtttgacaattgaagtaaatgagtttcatatgcaaagtcatcatcatgaattggcaaaactttcatagatttctccagaagctacctttagcatgtaaatttgttggtatatatatcgacttgaatatatatatataaaatatatattagtgaaagtcattgtttgttattaggcttgatgagcgtaattaatatattgtatatatatatatatattaatattatcttagttttcatcgttgtattaattagcctattctatttgttagagtataataatctatgttcaaattacatacgacgtcgacttaggagttggagtttggttcctatacgcacctttaattaatttatatatatatacaccacgttatttactagaaggagaatattctacttttacatgataaattattataaggattcttatatacaaagaaaaaaaaaacacaaaaatatatatcttacagatttttttcaacacttttatgaatttgaaattttaaaccgtcgcgaagtctacattagcgcgatttttaatcgtcgcctactttacttgttttgcgacggttatatatgcgacagttatagaaaccgacaa

SEQ ID NO: 201244 - DNA, 1624 bp, Cannabis indica
tattttcaacacaggtttcctcagtgaccttggaatcacctagactaatgtgagaaattctcagcacataaatagatgactaaagaatagagaaagagaaactgtacattttggctatagaaggaaaaagtctatctaggttatcaatttttcgaaaaatcgcaactaaaacttcattcgacaaccctagatttaatgctccttatatatgcaactaaatagactttatttaaatgtccatttaattaaaataataggataattcattataagtgactcagattaaatctcactcgttagatttaaattgtattcctattattatcgtgtaattaaattaatattattaatctttaaatctttatcaattaaatttattatatatgtatataatataatatctctctcttatattcaatgtagctatgtaacaaaaaaaatcttattctttttaaacattgtgattcaaatttaaacttactgcacatatataaaattatctatttattgctgtctttttaaacttacaataaataaacatacaagtttggtgaattcagtacgcaagtatacgttatcaaatcaagaaatttaatgacaaatagagtattgttcccatgatgattgattattaattaccaatcaattaattttttaattctatttaattaataaaaattgttggaaaaaggtaaatacgcaaaacgatgattagaacgataacttttgcccctcttttcctctgcgagggttttgcatgactccaatctgagaattggggccatggctggtcgtggacgccctaggaagaacaacttacagggacaggtaagatgacgacaagctctgcgttttaggggaagaggaagttgttgggcatcaagaagaaattggggttgacttcttctgatgtggttctcaaaactaagagtatggctgaggtgttaggtgtggaagctctcgaatttttagaggaggattcggatgaggatggtgctgatgagaagctaccgcagaacattgaagaggtagcagagctcctttctctgagggcttctttgcgtcaccttcaacaagaaagcatcagatctgattttgtgagtttcttggaagctacaaaacgaaatgaaactttgattaaatcaggtagctctcccccaattctaggtcagaaaagctcttttattaagaatttaagtgggaaatttgatgaaatgcttgacactaattatgtctctggaaacaaagttaagattgatatggaagacatagaagatgaggtcaattttttgaattctgctttggtttgttatgtcctaggtgttaatctgctagggaatttttttgagggatttgctcgtcgtgtttagaaggaaaagggatggataaagtaggagtgttaaatctaggagttcttatagttcgatttatctctgttcaaatcatatttgaaattttaaatggtggtttcttgtttttggataggaaaccgatattgatgaaaccatgggatccctatactgaattttaaaaagaggatgtgagttgtgttcttacttggcttcagctacatgatttagattttaaatactagggagaatgatcactatttaagattgtaggt

SEQ ID NO: 201245 - DNA, 1137 bp, Cannabis indica
aaagttaagtgctaacgttgttgaatcttgcaccgttaacatagaaaaggttttatttttttcttcatttttattttcaattccatttccattcacttccatcttcagactaatcatatttttccaaagtcaaacatccaaaagcagttatatcaatattacatttacatacagaaaacatttttattggttcaaataattttaattaatttgttttttttaaaaaaaaaatattataaaataaattatgttttatttaaaattaaaaactatataaaatgattaacgacactagtagtcattgagactaacgtaggatattacagtgctcttcccaagtgaactctttctaatggcttttccctttagttattttttgacgatttgagcgaaccttaaatgtgtgcaaatccacacataagctagaagttgatattccaaatgagctaagttgggaccaagactagctttttttgttgcaccatgaccaatatgctggtcacaaagagccatttctgatacaacaagagtctcagctaagtagttcatctacataccatcttaactttagatgtcaagtcgcctgaaataacaagcttcaaacaataactgtacatgcataaattaagttctaattgacatttacctaatgatcaggcaactaagcccgactcatcactttcagggactacaatgtcaagcctcatcatgggtttgtacctctcaggaatctttgcaccaccctgcaagcacagttcaaccacagcaggggccttaccatagaatctcttaagtgcactcctcaagggagggcctttgggatctttaacatgccacacataatttggagggaaaacttcatccacagttgcatcctgccacccatgcttcccatccctccattgatgcttgaattccccacatagcttagcattgtgaccccaaggtcccacatgaacctctgagcaatatccacaacccttgacagtgtatttcttcatcaacttagtaactccaaatcgaacagcttcatatgcatccattgtttcctgtgcaattctaggtatttctgatgataacggaggtggaattcgcatagtagccccatatgtatcgagatcaacgagcgaagatgga

SEQ ID NO: 201246 - DNA, 2192 bp, Cannabis indica
ttttttattataatatttaatttattttaaatattttttttaagaataaatgatacatattgattcaatccaaacatgataaaataaaagaatggatttattattatttttacaaatccaaaaattaaatgcccaaacaaaatctaaagaaaattgaagacagaaaaaaggttaaagagtaagccatacatattaataagaaacttattttttttttaattttatttcctatacatatttaaaaaggttcgcttctatatttatatgaatttgatatttataatcgcgtaaaaagaaaagaaaagaggaaaaaaaaaaccctcttttagtgaattagatgaaacatttttgtctttaaaattttaaatgtgcctagctagcttttaattaaaactaaaaaatgcatttctaccaacaaggggtaaaaatattgaagtccatttttgttgaaagttgaggtaattaaaaagatagaattagttctataaaaaaaataggggttttttttatttttacactttttttttgtatttttatggatttctacatagaaacttttattacatctaacgttgtaatttaaattgcaacaaaaaatcgtataacaaccctcatagaaattaccgaaaaaaccaccttaaaaactaaaaccgtaaatttgaaaaaaaaaataaaattaaacaaaatagtatatgaaataattctcccaaaaaaataaaataaattatcatattttattaatttatacgtgtatcatattatatagaaataaataacttgaatgcatgtatgtgcacatgaggagctaattaattcttctaagcatatatactaaaacaaattaaatattaaataataataattaaaggggacatggctactaaggggccacgcctcccttaagtactatttattccttaaaaataaactatttttctctatattattgttggctgtatttataaattataaaaaattataaaaaattaaatgtaaatatatatgtaaaaccttatattgaaccaaaatatatataatatatatttattaatagctagttttaattttatatttatttacaatggcttcttccatgtattaattcagatacttcgtacttctctatctaaaattatttattttatattatactataatttaaaaattacaaaatcaaatcaaacaaaagccaaaacttaattaattaactaattaaacatataataaaataaatcttaatatgagtgtggaaatatagtgacggctctccgctcccccccatggccacttgcaaggactatttaatgcttaaataaataaagcaaattctttttaacaattctcaaataaatgcaactagctagtttattattattattatttatttatttaatttatataatatttatctatatagatcctataatatatacccccaccacactacatataatattagtaacacttcaaaatgttactattagttacttatactgaaattaataattaaatcttctgtgactaaaattaaagaaaattaatttataattatttatattataattaaaatgataatttttatttatgaatgaggacctaatatattagattaattacatatatttatatataatctcataaaatttattaatggcttgttaatttctccatgtatttaattaattgtaaaccaaaaccaaattattaaacactgattgtataataacattagacctatagttactcaatttaattttagttgtttaatttattttcattatgataaatgagaatataaatatcaagaaaattgggttggacaagctaaagttcggttttccttaaaaaggaaaatattaattaaaaataaataaataaaacactgaaattaatttaacaaacgatgtgtgttatatgctgtacttgtaatgagatcattaataaatgaatgaattaagtgcttctaattaatataattacctttcaacaaaggcaatggaataaagttaataaaattaattatttgcattgaaaacaattgtgggctatatacacacaccaataaaatggtccaaataatagtactagctatagctagatatggccatatatctataaaaacaccaacaaattaaactagctagcttttgaagatcatgcatggaagttaacacttcattctctctctctct

SEQ ID NO: 201247 - DNA, 1338 bp, Cannabis indica
ttttttttttttttttgtacgtgttttctttggccataagcataagataattatttactaagagtaatgccacatacatattaatatattacgtaataatgtggtaacatccataaataaagattttattttataaattttgataatgtagggtaataataataatgatttttaatatatagtggcatataaataagatacggatatatatataaaaagaaataataaaattaatagaaatacaaactaatatataggaaatgtaacctcaacttggtatttatataatatagacagatagatatataatatatttgtgttataattatttgtatttaatataaatacaaactaatagagaaggtcgaaataaaaataaataaatatgtctaataatttaaaaaattaataaatgaggaaatggataaaacagaaaagtagatgataaatctatatctatgcatatgttaacaaatgtttaagcttgtattattataatcattattattatatgtcatattcaaccggctctgccgttcaattttagctaaaatacaaattaatcacacaattattaaataatcgctaattaaaatttttattctcgaactttgacatatattaaattatgtttcttaaatttttaaaaccattaaaaatctccctaaacaattgagattattagatatatataaggaattttttttttttcaattttagtaagaaaaatctagtatgaatgaaagttcaggagcataatttggtacatgtcgaaattcgaggagataatttgatagatattaaaatttagagagcataatttagtacatgaacaatcacaaaattagtaaaatcgaataaaatttgataaaagtctttaaatcaaacaatttcgataatcctggaaaaaaatttaactgttaaaaaaattccaaaggacatgatttgatacatgaaaaagttcatagagtaaaaatcttaattagccttaaataatatacacatatgtatactaaagtcctattgctaaagatgacattttttaaaagtctaaaaatcttcatatcatctaaaaatataatattttattttatctctttttcacattatttttacactcttaatttttaaaaatgctttaatagtataacacattttaagaatgatataattataatctcacacattattatttaatataatatttattttaattataaatattgttatactatttatttatttttaattttttttttaaaaaaataacatcaatactatgtaatgacattaacacagttttttataacaacaatggtgattttacaatgcaccccc

SEQ ID NO: 201248 - DNA, 660 bp, Cannabis indica
tatatataaataaatataattataataagtgtagacctgtacatcattttttaaacaccttttcactctctcactaaattttttttattatttattttaaaaaaaataccaacactcattttatatcttattctctcttttacaatttcttactactcacactcaaattttttcatactatttttaattaattaatcacatttcgtacttacatactttttctcatatatatatatatacataaatatgtatatgggtgcactcttatatgtattacccattaatgaatatattaagaaaggatcatccatgccccagggctagaccatcaaatcgatgcgaagcggagtcgagtgggacaataggcgtagtgctcaggtatcagagcctaacgttcaaggaagaaaaaactgccacaatatttctattaaccagaccttcaaagtggaagagctaaatcccaaagacaacatgtcaacaacgaaccttagcgaccgtttaaatgcaaagagagaaaaagtcagatgtggaaaagccagacctcgtagaggaaacctcaagaataatataaataagtaaatatgaggatgtgatgtcctggagaacaacactagaaggctggaggatcaaatcgttatcttaaccaagatcacggtccgt

SEQ ID NO: 201249 - DNA, 2044 bp, Cannabis indica
acacacatttcattactgcctttttgcccaaaagaatggaaccaaatgaattgtatttgtcattgtaaggtggtggtggagaagggtgtaaagttaagcagagaaacagtaactttgaaggaaaaggaagtaattagtgcatagtgggctttccaatgaagtttcataagagagagagagagagaaaaatcaaaatatacatctaagtagctagctgggctccttggcttttaatttaagacatatataatgtattgtatgctgaagattataccaataattaatccaaataatcatcatcaacaacaatagaacaaagttaattctcttcaaaaaaagtatacctatatatagtcatatacttatagcagacaggttatcactttatagaggtaaataagagctatgaagacagattagtaaagttcaaaatagtaatttttttgctaaaatttactgttacttgacttttacattgataattagctggctcggcccatatataaatggtttattatttttttacaaggaaaactaacaataataaaatcccccacaaattttagttttttttttttcttaaaatatgaaaagtagaaagaaaccatcaattaaaatgataaaattgtaaagaagagagaaaaaggcaatgatgaaaaattgtgagtttggaatgaaacagtaatgggagtagtagtactagttgtagtagtaataagaggaatgaatgatgcatagtgtatggcgtcatgaataaatctgatgggtgtggctggcagcctccattatgaccataaaaaagaaaattaaataaataataaaaaaaaaacaccctctttgtgctgcacgcgcatgcaccccaccaaactcaacacactatctcatatctctctctctcttaattctcacacgcaagcgtagccccaaaatatataaatcctctttcttttttatctatctatctatatatctctttctaaaatggtcaaccactttgttgaatcaaatcttacttgaaaagtgtaaaccaagctctctctcacagatatatctttctcaaaaaaaaaaaaagtgtgaaaagttgccacacaaaatcttcttccttatcttattaggtagcattaatctaattagtttttgaatagaaagaaaagaaaaggggatgggacaaatgagtatataatttttattttattaaaggaggaggaggaggagggatgatgaaagtgaaatagagtgttttgaaaacttattaataactccctaagtcccaaaactgaatggaattggaccccacaattgggccgacaacaaacgtagaaaatgggcccactaagccaccacatcatctaggcgtgtgtcccaacagctcggcaaatgtggacccatcttacattgtttgggttagacatggtgaccctactaggcattgcctttgggcgacaatagatgggttctgttgggtatgcgaaacaaagtgggctttgggcctttatccgccgccatacaatgctcttgcacgcgcgcacattttgcacgcatgtgaactattgtttccattgccacgcttcttttttttcttttctttgtttgtataaaaacaaataaataaggagtggtgctacaaacaatgggtgcacggtgcaccttcggacgggtatcatcaagcatcaggttttgggcctcagaaaagtattaacgagccggcgcctatatggaccggttcaggtacaggtttgattgggcgggcgtgactcggttttagacgggtacgggtgggacattcggctttgggcaagattaaattttcaaaataccttttttttttttggaatttttcattaatatacgtcaactaaaaaataatcacacaaatcacgataaacatttaaattataccaatacgtctacttgtaccgatatgcaaaaattaatatatacttaacttactcttgttgacttttcttttacttaggtatacttttttgttccatctttctttgttgtctagcggtcaattgttttagtttttaattttttttta

SEQ ID NO: 201250 - DNA, 991 bp, Cannabis indica
agatgccaagcatgaccattagcatagtactgagaaaatcaacaagtgaatcctaatgataccaaaagatcaggtgaaagaaagtgctctaaaataaaagtaccaataagcaagacttaaaaagaatgataatgaacctcataaacttcttcaaaataatcaatatcagaacatccagtggcttgagaaacaacaagtttccaaaatggtctcccatctccctgtcagtagttgcacagttttgatgcataatcaaatacccaattctctccttaaagccacagtacagacaaaagaacaatcacagaaagaaagtatagaacaactcacctggtaacgaagcttttcaggccatggagctgaaaaaaccctcttaaacccttgctttatttcagcaggagtagtaatcagacctgaaaaaaaaaaactcaaactttaacattttggagaaaaatgaaaaaaccccaaaacgataaaacgattaaactcaccatatttggcaccaattgtagcataagtctcttcgacaggctttgccagctgcaaaagggtacccccagcatccaataacagtccatcatataccctcctaacagaagaacctaattcatcatcttcaccaaatttaattaaattgaaactaatttcagcggtctaacataattgaacataatgatgaaaaaaaagagagtaccagagtggagagagtgagaagagatggagcactgaggtgggtttgtaagtttgaattggagaggtttgagggctttgagtacaagaccattattactaatactattagagcagtatctcatcatagtagcttccattatgtgaatgatttctgaaacaacccaacccaggactgaagtctggactgccttctttcttccccctcttccggaaaaactccattatttacatataacgacttgtcgttttcttcaatgaaacggtattacgtacgaaaattaacttttttttttaaaaa

SEQ ID NO: 201251 - DNA, 1786 bp, Cannabis indica
caatgttcagaggtgggattttgcatgaattggctgagtctatttacagcaaatgagatgtcaggccgtgtcattgtaaggtattgtagagctccaatgatgcttctatattgtgttggatttgtcataggagtgccactgtgagctgttatttttgtagatgagtacataggggtggattgaggcttggagtccaacaattgagtttttgccaagagatctttgatgtatttgtgttgagagagcagtatggtgtcatcagttctgtggacttcaaaacccagaaaatagtgtactggtccgagggctttaagggcaaatgtgttgttaagagcataaatgacttgttgaacttgtgtagagttggctccagtaattaagatatcatccacgtaaactaaaatgagaagtaactgaccatttgaggttgtaaagaagagacttgtgtctaatatgctggtggtgtagccccagctgatcaaggtggatttagggtgtcaaaccaagcccttggggcttgttttagtccataaattgctttgttgagcttgcatacatgattggggtattgagggtcaataaaaccttgtggttgagccatgtagacatcttcttgaagatctccattaaagaatgcattattgatgtctatttgctgaatttcccaaccgtgtgtgatagccaaagtaaacacaatccatatagtgcatggtttgataactgggctatatgtttcaaaataatcaatttctgcagtttgttgaaatcccttggcaactagccgagctttgaggcgttctacatagccatcagcattaaattttatgcaataaacccatttattctgcactatgatcatttcagaggttcggggaacaagtttccaggtcttcttgttcttaagagctgttatttcatgttgcatagctgcattccatttggcacttgcaagtgcagctttgagtgttgtaggttctgtctcatcacttagattagcaacataaagtttgggtttaaaaataccatgcttagatcgggtaatcataggatgtatgttctgaactggaggggaagtagggactgtggaatcagcagaatgtggtgtggacatggttgctacaggtgctacaggtgaaagagattgtgttggtgagtctgaaacagaagcagtggctactggttcttgttgttgaatggacagagaagttgtatgtgataaaccagatggtgctgtttgtgttgcagcaaacacaatgggtcgattttgaggaacaagaaaagcatcagagtaaataataggtgtggtggtgactgagaagagggtgatgagggaaagagagagttataaggaaattcttgttcattaaaagtaacattgcgagagacataaattcgacccgaggggtgtaagcacctaaaacctttggatgaaatactatagcatatgaaaacacattgtgatgatctaaaagatactttgtgttgttcatatggtttgagtaaggggaaacacaagcacccaaaaactttaagcatgttataatctggtgattgattaaacaattttttcaaatggtgagagattatttagaataggtgttgggagcctatttatcaaataggctgctgaagcaaatgcttcccaccagaagtgtaatggcatattggcttgtgcaagcaaggttaagccagtgtcaaccacatgacgatgttttctctccactctaccttgttgttggtgagtgtgagggcaagaatttctctgtccagtccacaacaagaacca

SEQ ID NO: 201252 - DNA, 1038 bp, Cannabis indica
aatattgaattgaatgttttggacaatctggaggaaagaaagattccaataatgttccaaggtacattttggtgagaaaagggtcaaagatgagttcatttcaggctttagtgggaaaggaattacccctcccctaccaacctattattctattattggttattactgttacccaacttaaataaataaatgtattattcggtcagtaatgaatgattgtacaaacaacatttagaggaagaggaccacccatagattcccattatcaatatcaaaatggaaaaggaggccctgaattgtggtccttataagtgtcctattttgattgatacttttgtagcatcgtgcattaaatcactcagcctttctatttggtttaacttatatatatgatatgatatgagatgacatgacatgacatgagggcctcccaatcaaaacacacacaaaattgagctcattcaatcaataactttttcttttttcccccaacaagtaactttttctttgcctaaatcttaccccccaaaaaaagggtcctcttctttctccaaagaatccaactctttttatcttctactttttcttagtactttattatctacaaaacgacaacattgatggttagcatccttcttaatgcaacgtataccaaaaagaataaacatgattacattaatatcattatctctttctctctttctttctttctattggccaccatcttagataggattgacaataaaatactatttttaagcaataactaaagctatattgagcaatgggcaacatacacctaaaaaagtaataggatatattcctctattcattttgataagaatatctttctacccacctctcttcatttagagttatattcttcaaactataaatatgatcgtataaaaaaaaattaaaaaagaagaagaaagaatcaagctaaaacaatttcttccaacattaatatgattgtctctatatttagtgtggggagaaattataattctggtgttcattatacatataacgatattc

SEQ ID NO: 201253 - DNA, 565 bp, Cannabis indica
tgattgtttggccatttagaaaatacaatccatgccttttagtgcctttcaataccagcatagatcccatggtgattctcataactccattacttgtcttatactcatatccttcatcatcactattagattaagtttctttttaaatttgttatgtgcctgaccttggtgagagttttaacagttccatcaacacttctgattgtaatagattcaatgcctctcacttgacacttgtgatcatttcccatgaccatatttcctccattgatctcctcatagtcagtgaaccattcccttttgggactcatatgataagtgcaaccactatccaagatccactcatcataatctttctactgtaagctagtgtagatatctccatctgtctaacttgcacatcactcatttatcacaacaaaaagatcaccatctgagttatatgtgtcatctactactgcatttgagtcatttgatttttcttcttcatctttgtgcttcttcttcttattttttatctcctaacagctcttgatcaaatctcccactttaccacagtgatgac

SEQ ID NO: 201254 - DNA, 524 bp, Cannabis indica
aactttaagttatttggaagtatttcaaagtgttttttgtagtagaatttgaagtggggaagctcaatatcacaaatctgaaacttctcattcaatttagacattgtttcaaccatttttttagaaattgtagatattttttccagcttttcacaacatcttgattcattcaagatgagtaattaaagtaattgataatattttttgtgaatataactttactttcctactataaattccacaatacacctcactaacgccataagtaactaagagcctaattgcttaccatatcatcaaatagaagctttttattatgcataaaagtattacgacgatgccaaattctttaacaaatttttttgaaaaaatatccattaccccacccaaaagttcataaaaattatcaaactatccaacccagaaggcaccatttagatagaattgactcaagggaaggacaaagccacaaccacaagacatacaaagtagtttcattagtttgtaaacaaattggacatttg

SEQ ID NO: 201255 - DNA, 1170 bp, Cannabis indica
atttcattgaggggaagaatatttctgctaactttgatgttgaagagtatcgcctaattaaggctttctgtgttgatatataagtttggactaataaaataggttgagaatgttgaaagtgagccagaaagcccacctaaatctccaaagaagacgacggcaaaagcgagaggaaaagcggaagaaaaagtgaagtgatttgaatttaaggaaaatagtttatgtttaacttttgttgtttagtcaggatatgatagaatatgttgataacttactgttaggtttttttttaattttttttttatttttgtgtttatgttgtttagccacaacttaaagcaaatgttagtttcttgctcatggtcttttttttttttttgttagcctcaactacaaagcaatgttggtttattccttaattttactattctatataatgttgattttatatatagttgtgatcaaagttttattatgatttttttgtttgcattttaaattattattaatattttttatacaatgttaaaataaaaaatcaacatgtttatccgttttctaatgttttttttatatgattctaggtaaattaagcttgattttttttttaaagcatttagtatctagaaaccaatttttagctgttttaagggtttgttcttaaattttttgtaaacaacgttaacattaaattttaatgtttttgtaacattaatcaagccatttgatgaaattcaaaattaaatcattcattatcaaattaattcatttaaaatgcaattcagagttaatctattcaatagccaccaaattcaaagttaatcaattcaatagtaatcattgtttaaaattccttgttttttgttttttctctttgtatctgtaaaattattctatttatgttgttttttttttgttgttgtagtattttgtagctgatgttttttcagtctagacttgggttcttgcatgtcctcctattgtgtccttttcttccacatttggtgtatttgttttgtgtctttgtctcccaaattggtcttgttcttttcttttttggtctttctgctttcaccctttctagtggtggtaatatttcaatatctttgattttttatggaatgtcctaattgcgctaattttctactgggtatacagttgcttcatagg

SEQ ID NO: 201256 - DNA, 499 bp, Cannabis indica
aaacaaaacaaaaaaaaaacaaatctcaagctcaaagcaacaaacattcccacataaaaaaccttgacccaaattagcagaatgctcattgcataaatatgatatctttgtacattacaagctcttctctaacaaaccccggaaagagaaagagagagattaacataaaaagataagtagtgagtaagaaagaaaagaaaaacaccattaaaacaaaaaaaaccctaaaaatctctaactctagttcttcttatcttagtaagtgagtctaatctctcaagttaattagcttcctcgacacggcgtatgaatacagtttccaagtcaggtactgtaaagaagtctctcacaccattgaaattgcatctggaaggtcttctctttctaggagctggtggacacttcaatccctctggtattctcgattctctgctttttggagtcgttgaacacgattcgctgtcgtaatcatcatcaccgttgttgttgttgttgttgt

SEQ ID NO: 201257 - DNA, 1206 bp, Cannabis indica
taaaaatctctaactctagttcttcttatcttagtaagtgagtctaatctctcaagttaattagcttcctcgacacggcgtatgaatacagtttccaagtcaggtactgtaaagaagtctctcacaccattgaaattgcatctggaaggtcttctctttctaggagctggtggacacttcaatccctctggtattctcgattctctgctttttggagtcgttgaacacgattcgctgtcgtaatcatcatcaccgttgttgttgttgttgttgttgttgttgttgttgttgttgttgttgttgttgttgttgttgttgttgtcgtttcataatctttggctttgtgggttttagtctttattggcttcaaagagcttcgtactgaaattccggctataacccatttttttccttctgattcgaagcctccatcgatttgagattttttagagaaccccatattcttcgaaagagaaaagcagaaacaaaaaaaaaatcaaaacagagcaaagttgtggagaaaagtgtggtttgattttagaatcagaacaaaacccagaaaggaaaacacgataaggaatcggattgtagcaaagtcaagtgttacgaagaaagaaaaggaactgattttttgatcgaggaatcagaacaaaactaagaaaaactagctgagaagaagagaatattaagagaaaaagggtctttgcttcttattttctctgaggcggctaagactagctttgataatagaaaaaagagagggaaattagaagggtttaaggaaaagaaaaagggaaattaagctttgaatttaatgggcgaaagtaattttccttgcttttcttttttcttctttcaattttttttaggaaaaataaataaatgataaagactagagtttgggtggaaatgtgtatatatatattggtaggtgtaaagacaatttggtaaaagcataaaagagaagattagtgaaaaaagaggaggggcagtcgggcagaggtagtagcttcccagaaaatatacgggcagccgaaattttcgatttggcgccaaaataagaggttgagttaacaacggctctctttcccgcgctagatttgttttacgattttgcccttagttggcattattattttctggggactgacgctaatccagtacccagtcagggcacaatcaccgccacagaaaacgtcgtcgtat

SEQ ID NO: 201258 - DNA, 1441 bp, Cannabis indica
atttttcctttttaagttataaatgtaaattgcttccctttttaatttattatagaaaaatcccttcctttttttggttttttcttttttttgagaattaatagggcaacagtaatgttgaggatataatgttacaaggtcataaaggaaagggtaagggcctgacacctcattcacataagggtggagctagatacaagatctgttggatgggcgaagggaagatctttcctttatggacaaatatacacaacaacacaaaaatatctttcctgttctagtaatttacaaaatatcgttttcaccccgtatcactaaatataattatttatatacatataaatgaaaaacatttattatcggcaaaaagacaatttttgcatgcaaaatgacttgtgtgttggatctattgtaattcttttttcctaatgaagaaagtgcattactaaaccaacaaaaatttcacttatttaggaagcataaaaggtgtttttacatttggtgtctaaaattacatctaatttatgggaataacatcgtttttagggaatagactttatattacttagagagtgatgaagagaaccataaacttaaaaaaaatcaatactatagattacaaaatttagccctgcacagaaatattataataatgtcttggaatatgaagattattttatttgattgacaaatgaattgtaactcttttctttttaacaataatgattaatttttttttgtaagatatacattttttttaatatttttacaagaaaatataaattaatattttatttataaaaatacctttataaggtgtgggtaatattttttcctttattgaacttttatttatcaaaataccacttacacacactccatccatgtgacctcaaattgcattagtttttcttttttttttactttaatattttcttttagttttcagtttctctttcctttctattttcaatttttcgttcaaaaaattcattcttccccacaatcaaacttaattcgaacaataaccatctttaacttcttcatcaaacggtctccattctcgttgagtttttttttttttttcgttgtatacaatgactattacccgttcctctgcttatctatctccattgcacaaaaaaaaaaaaagcatttaaaatgggtctcaaatcagttgctaacaagttaaaaagataacatctagtgatccatgatgatgactggttttgctccaccccccccccccccccgcattgtgaaaggtaatcgttgactaatgaagaagaagtcaaaggtttctttgcctaaaaatttctaacttacgattagaagggaaagaaggaaccagatgtccttcttaaggttttttttgaagtttcatttcattttcgtgtatataatgactattacccgttcctctgcttatccatctccattg

SEQ ID NO: 201259 - DNA, 841 bp, Cannabis indica
tcagaaataatgtattagctgatgacaatgattacaatgcagaatggtgcaatgaaaatatggtttttggtcaaaatatatggtaaaaggatacattaagttattaacaatagttttgcatgaataagtgttttttaagaaagaaaaaatgatgtcgacaaaaaaagatgacgtggactaaaaaaagtaaacataaaatgacgaaaaagccaaatagatatatataaaaaagtgattagttttttttctttgaaacttgtaacttcatataacaataagtaagaagttacaaagttcaagtaatacaatagtttccattccaaacaacctcttgatttgatcttaatgcccctcctactagtaatgttgtgatcagctaatacattatttctgaagacataagaaagagtaacattagaaaataaagatataaaggtaatgagtttttacaccaaatctgacaatgaagatctttccatctatgtttatctttattaactgagattttccaattcaaccagaactatgggaagttccaccaaagaacatcaatttaaagctttagataaaactttagcctctgcgaaatttggagacaacccacttgaaatagaggagtagcaaccagctattacatctcccttgcaatttcttacaattgctccaatacctgttttcatattcttttcatcaacagagccactaacattcaatttttattttcccgatggaggtaacttatcatcctggctagatttttttttacaacatccagaaagattcaagagacataactaacaatgatgttcataccatcaaaacagtttcctcctactttaac

SEQ ID NO: 201260 - DNA, 574 bp, Cannabis indica
ttttttttttttgaaaagattgaaaaatttataagtaaaatatagaaatgtagaaaagagaagttaaacaacttttttttaaccgaacaacctcgtaattacatgctctaagattttcactttctgactgactagtcacactatgcttttggagaatcttatgacgtttcgccaaaccaacttttttttgctgaattttttgctaaaccattttgttttatgagatttgagaatatttttaatttttattatttatccaattgaagctttatcaagaaaataaataatatttccagcagaaaaaaaaaaaaaaaaaaaagaaaataaataatattaagattaatttctcataagaagaaaagaaaaaggtagaactagaaaataaaacaaaaaaaaaggtaaaaattgaaaagcacaaacgccgccacgacagtgccacgtaggttcgaataaaaaccgaagcaagctgttcagtttccgaagctggtggctcgtcagacacagctggagacagcctgtcaccaacaaagtcccactcacctattcccctaactacgttctctctctctctctc

SEQ ID NO: 201261 - DNA, 661 bp, Cannabis indica
aaaataaattaaatacataagagttgtagaaaacctaacattagttgcagtggaatattatgtttctttcagttcaaatctctaaccctcgatcatttctctcacagagtatgatcaagatctaaacttgaatctcctcctcctctgattgtgttcatcacaatcttccacaaaggcctgaatatctccttgaatagtgtgattaattatgagtgcaaaagatgataaactttgacatgcttggtgtcaaagttagtgtaaaattatttcaagaagaaaataaaacatgaaagttagagacaaagttatatctatattcatagatgtgtgaaagtgtggggaaggggggggggggggggggtaatatccaatatttatcaagctcatttgataaaagaatggatgatatgtgaaatttaggcatgcttagtgccttaaatttgagtataacttagacatgtttggtgtctaaagttagtgcataattttgatatgcttggtatcaaaatttgtgagaagttaagaaagtgtaaaaattaatcttcgatgatgcaattttcaaagcttaagtatacttaaggagaaaacttgtgtcactccaaaagttgacacaaattttggatagcaagattcacttagaatcgaaacatatgtagttata

SEQ ID NO: 201262 - DNA, 841 bp, Cannabis indica
atatatatatatatatcttggaaatatatgctcttattattgttcatatatcaataatataatacctcttcatattcttacgttggattggaagctagccaacttatctttttattggtcacattttgggtgatccacgatccagatatataatatatctttaaaattgaataatgattgacacacttaaattgtgagtagtcgctatgaggtcagattttgtaaattgttaaaggatatatttaataatttacatcaatgatatcacacctagttatacatattcttttctaaatacaatgtgtaattaatttgaactatacaattcaaataatgtggtcctcaattaaaaatactaatattaatacatatcattatataataagtgtgtgcaacttaagtttgtaaatgccattactcattaaatttgagaaaatcactcacttctcatgaactaacaggtaaaaataataataaaaaattgttataaaaaggcgtccattcagttaaaatagttcaaaattttaaattatgaataatatttttcttcatttttcaaatattattttaataatttctctttcttttataattatttttcatttaacatttttagtttataaaataaaatatatttaacaatataatatttaaatggtatgaaaaaaatagagaagtgtatgatataatataaaaacttaatgaaatttgaaaaatatagagtggagaagttgatatgagtgttctaacaagaaaaattaaaaagcactactgattactgtctagcacatttttaggtgtcatataaatattggtgtaattaaacatcgactttcatata

SEQ ID NO: 201263 - DNA, 844 bp, Cannabis indica
ctaattgtagggttcgtaaggtcaatagctttgataataattgtcggagccaaatttgagatatgtagtgaagctttaacccattttcattcttttattttattgtgtgaaatccaatcataaacacctttctttgatcactctaattttacaaaaagaaaaaagagaaatagaactgtaccattctctgcatttattagatcgcatttaataattttaggtctatccaaatttgatccaattgtatattggatgttaaattttaccatccgatccgatctaattaatttctgtcatccaatcgatccaacatccaatggatgttggattggattggttctatctattgaatgtatttcatatatatttattggtttagtttgggtttatccaaaattctagacctatagtactttttagattagatcggttccatcaaatattttaggtctagtatatattggattggattggatccatccaatccagaaaaaagtgtaaaattttaatataaattttcatatatacgtatatatcttacgtataatattataaaatctaattattcatccaaactaaataaaaataattagtagttcgattggatgcggatgtattggatttttagacacctcatctaacatccgatccaattggatatttaaaaataacatccaatccgatccgatcacaattggatatctaatatttggctgtcggttgtcattattagattggatcgatttgtgcacaccccatcctcccttgccttgtgacctaggatcccagtcttccattttttagcttttaaaaaacttctaatcgagctactcggctatctctg

SEQ ID NO: 201264 - DNA, 1861 bp, Cannabis indica
tttatttttattttcttttaatttattaatgtaatttagtttttttttatgagagagcaagaggagttacttcaccggcccaaatagctagccattggcccatgtggggcccagttcgtggtggggaccacagtgaagagagtgagttcaatgatgcggtccgccgcatgattggcaaacccggccgaccaccaccgtcctacgtggactccgcgtccacatcactaaccattacactattattattattattattattattattattacactataatctgcattactagttacgacgtcgtttttgggatagcccacgtggtttttgcttttggtcagcaaaactagtaattataagaaccaaataacctctatgagtactgtaactatactttaaaatgaaattttaggattttcttttattataattatttatatataatatttgaatcagattaattaggaaaaaatcaagcgtgctctacgtacagttccacacgttcatgactgaatccacttaaaaaaatggacaaaaaagatcagaaattatatattatatatatatataataattaaatatatattatgcttttacaaaaaaataaaataaaataacatataggccaaattaagttgctattttcatttcaaactactatagatttgatacaacatgtataccacgtttttgatagctttaaatttggttatgacatttgtccaaaaaaaaaaacatgcataccgctttcacattttttttctctcttttcttatatcacttgattaattagataacacatataaaattgtgtttgtgtatttatatattgtgataaagaaagttaattaataaagttattttgctaccaactcagtcttacattacatatattatatagatatattataggtaaatctataagtttatatactggttgtgataacttatttagagctaaacttaataataaaataatacttgaagtcatatcatgaagagaaaaaatttaagtcaaacgatcctctacacttttatagacttctagtatttctttatttgtgtatatataataccaatgtgtacacgagtctaatatataccaacatagtataaaaaccttttgtttaatttgagggttattatttcaggtgtctaacaccatattgaagtgaaattttaataattagttaacagttttttatattatttattacagaaaaataataaaagacactctctaatgtgtaatatcgctatattagtgcaattaagtattaaatttcatatattttaatataataaatttgatggagtattgttagccaattgcaacgcgtcactttaggcaccactagtatttgataataatactctttattaaattgaaatgtgcaatttagaacccaatattaaaatgcatttttagggctcgtttggtacgctgtataagtgtcgtatagtattaaataataaaacactatgtttggataaaataatgtattatattaattattacgaccaaattttttatacaatgtatgttgtattatttaatacataacaaattgtcattattagcttgtattataatatttacaaaagattcagagtcaacaccaatttttgacctggacccaggactcgggacccaaacccgcgaacccggacctagactcggacctcggaccctgaccctaacccggacgctgacccgaaccacggaccggacccgtcgacgtacgaccgtacgaccggacgtcctcgacccggacccggaaccgtaaacccgaaaccccgaaaccccgaaccgaacgtacctacgaaacggaacggacgtcggagtacctacgaaccgtacgg

SEQ ID NO: 201265 - DNA, 892 bp, Cannabis indica
ttattattttgacgaattaagtaagtttatactgaatatctatattttcatcaaaggaatgcattacaattttattcatttttttttaaaataaatctgtaattatacatatattttttgtgtgattatgtgagaagagaattaaactttgcaattgaaatctagttattttgtttagaagagtggaatttttttatggacaaacacaattttgtgtgattacaatcaatgacgcattttatcaatttttttttttttgttgaaattaaaaaaaatataacataattgctatatagatatcgaggagagactggagccacaaccaatctttttacacaataaaaaaacacaaccaaaaatgtgaaatgaaaccattctcacaaccacaacaacaaaagcaaacaaagtctttaaagaatagaccaatttaagcatcaataaatatggtgaaaaattcttgtgtcatttctaaaatataacaatgtagccataaagtaccaaccaaacaattctttcccacaaatcaataatactaagatatccagaagctaagattgtgtaataattgtaaatgttaaataaaatgataaggaacacaaaagaaaagtgttagaatctgcaacttccaacacttaaagatacacaattaaacactctacccaattagataaaatatgatataacaaaaatagttatgcatccaaaactaaatggtatttttgcgaatctaatatgttggcccaatacacaaaacttatattagaggccttcttctccaaagtcggcgtccatgtgtagatatgccttcgtccaacattgagaaccaattagtataatttacagtagccctacctacccacacaccaagcaccgtgtcgtttacaccattaga

SEQ ID NO: 201266 - DNA, 1717 bp, Cannabis indica
ttttttttttttttttcagatcaagagttgtgctaggtgatataagtacctcgtcaatagaagatgacttctgtttccaaacttttttatttttggctttccataaagcccaacacacaatagtcaccccacagatactttcagtatctacctatgaaaatagattctccaaccaggtaccaatcgtaagaaaagagcgggtgccaatattaccaaaattcaaccaacaagaggtagcaaaagggaaatcaaggagagcatgggaagtagttttagtatggccttgacaaataggacaaagatgggaaatactcacatgtttagtgacaagattaacgcaagtcggcaatcattcagtcacaacaccccaaaggaaatttttaacctttggaaggatcttaagttgccacaaatcttttcaaaaacttgagttatttactcttggtcgtgatgccttttgatcttccaacagctgatatgcgcttttaatagaaaagtggccaagtttttcaccagaccaggaccaacattcgtcatcaatgttcaaacttaagggtatactgagaaccaaatttacatcacgataattgaacatgtcttgtactatatcaaagtcccaactacgcaaatcaaaatcaaatagagaacaaatatgctggttatggagactaggattggaagaagtcacaaagggctttaccttgttcgggatccaaggatggtgcaagattgatgtggaagtatctgtactaacagtacgtcgagccccgagttttactagagcttgagcactccaaatattgtgtcaaacaaagctaggattgtgacctagctcaaccgtgaggaagtttgaatgggaaaaatactgtgctttatacactcaacctgcaagagaattaggattacataaaagacgccaacattacttggctagcattgcaagattaaactcatgttaatggcgaaaccccatgcctcctgaatatttgtgagtagctatacgatcccaagacatccaaattatgccattacctttaattgaatttgttttccaccaaaacactgccactaacttctctagttcttgacaagttctagttggtattaaaaatacactcatggaatatgttggaagtgattgaataacagttttgaggaggttctccttacctgcctgagagaaaaacttaccatgccaactattgatttgataaacaattttatttttgagaaagcctaatgttaggtaagcctaagtaaaggctcccttcagacgcttctaccatgccaagagttagacatatacgattacgaagagcaagctctatgtttagactaaaaaaaatatttgactttgtggcattaatcttttggtcagacgcaagctcaaaagaatgaagcaaattaagcacactagtagcaacccctatggtagcttgaccaaaaaaatagctatcgtctacaaaaaaacatatgagtaatagaaggagccccatgagcgacccgacaaccttgtaaaacacaatttgattcaaatttttggatcaaagaagataacccttcagcatagatgaataaaaaggtaagttgagagtgggttgctgtaacgccctaacttatcaggcacgctaaaccaaaacttaatcaaactctcaaattacaacatagagctactagcaaacattagagagttaaaatacataaatcatgcattaaa

SEQ ID NO: 201267 - DNA, 529 bp, Cannabis indica
tttctacataaaaaatcaagtcgtaagcaggtggtatttttatttgctaaaaaatattatttttgccttatcgatgtatttttggtagttttttgacatgttcgcaaaataaaatttcttagtaacggggtacacaaacttattaaattatcgatattatgttaatagtttatcgacaggttctcaatgccatattgcttagtaataaagtttttatccttatcaatttatcgataatatgttgatactttattgatagattctcgatataatattatttagtaacatggttttctgtccttgatcaatttatcgataatatgtcgatgctttatagagagattctcgatacaatactgtttagcaacaagatttttatcctaataaaattatcgataatatgtcgatactttgttgataagttctcgacgatacaatattgtttagcaacatgatttttatcctcataaaattatcaataatacgtcgatacttttgtagatagattcttgatacaatattgtttagc

SEQ ID NO: 201268 - DNA, 867 bp, Cannabis indica
atgtagccatgccatgctgtatgttcattgtgcctactagtgtgctatctagtcatgatgatctgcagatttatatttatttttaatcaaatcatctcgtctcctttagcgtcttaatgattttcattactttgttctatatttgactaaatagtttaaatttatataaaataaatatttatatgcaggtggtatatgatgcaaacaaacttgcaaaaatggtcaagaagaagaagaaaatgcagaattggctcgtctactacactaataagttttcaagaaatgaatctttaaagcccacgactaaggtacttaatttcgtaaaagaattaaaaagacatttgctatttaagtttattgtttaaatccaatatatccatgtgcgatttttctttcagactggttttcttgggctttggggaaaaaaagtggacgcaattgaattttacacatctgaaattgataaattgacaaaagaagtaagtattacttgttcacttatctatctttttcctatggtcaaggtgtttcctgataactttatttttcagtttcatatgtgtatttatgttttgtatacattttgtttggtactgtcaaaattgtaatgctagagacactttatacacacactgatgtgccatgtacccataaaaatagttgatatatgaccggcatggattgtatttatgtatatttatatatatatgattacaagtaaattagacttaaatgaatgtgaaatttttatcagatggctgaggaaagggaacgaatggcagctgatcctaaatccatcatgccggcagcatttgtttctttcaaaagtcgttggggagcagctgtttgtgcccaaactcagcaaac

SEQ ID NO: 201269 - DNA, 1672 bp, Cannabis indica
taagtgctattttgatcaccctctcgaaaccagaactgtttggatcattgcttccaataacattcacgctgatctatggctttaaaaagcttatcctttacttctttatactgttgtaccgaggcaccatcctatttatcatgcaactgctttaactgagttttgtagctcttaatgtggtggtttaaagtcccagttatctcctttccccagctattaagtttttcagcacacaaactcaatctctcaccaaagctactagcctcgccactttcccagcagtctttcacaatttccacacaaagaggttctttcaaccatgtattttcaaaatgaaaaacgacgggtaggaggaaagttgtttcggacaataggctcaagaaaaataggggaatggtcagatgtagtaaactctaaattagatagagaagcattaggaaaaacctggtgccaagaggaagacacaagcgctctgtccaaacgaacctcaacccaattgttcgaccctctccctttctcccaagtgaacggatgcccttgaagctctaaatccgttaaatcacattgctgcagagcacaatttaaacctgtgagcaagctttgcggataaagacgaccccctcgtttatcctcttgtctagcaatgttattaatatcaccaataacgcaccaaggtaaccccaattgtcccgacaaagttggagtaaactccatgtttcatgtcttttactccgatttggctctccgtacaacccagtaagtctccaattactaaactgtatggaattaataactaagtcaatgtggtgttttgagaagcccaaaacagtacaatcatcattattctcccacaaaagagcaattcctcctgtcatgcctaccgaaacaatagtaaaggccccctcaaaacccaacagagtactaagccatccacttttgacttttgatattttatttcacatagaaaaatgaaattgggtatcttttgagaaacaatatctcgaaagaattgaatgctccgttggttcctaagcccccgacaattccagcttaacacattcataatgcttggtgggcttggaaaccaagacccgccccacttaagttttctgggctgatcaaattgcccagcaaagctttcccaccatcttttacaatttccatatcaacatagagtatattatcatgggctctatattcttcttcattttcattctcctctgtaagcccaataccatcccccaagcccattcttcttcttttattctcaaggaaagtcagcccatgatttgaattctccccactaggcgccaccatcagctccttcccatttactccccttgtgtcaagggatttcccattaatcaagccatcatctcttccctggtcccttaactccctattcaagtcaaccccattgttcccttgattattaggcaataaatgagatccctgattattaggaaaagcaatctgttgacccacttccccagctatcaccagagaatctccaccgccaccattgttgctggacgaagccatggtctgcatagaagcagttcttgtagccaatcccgacttcaaccattttgagtcatccgcgtatcgatgtcgtctgaaatcgcacgcatctctgcatcataattcttaacaataagctctttaggggtgt

SEQ ID NO: 201270 - DNA, 2086 bp, Cannabis indica
tttttcagattatatattctctcttttccatattcctttcctacatattatgacagttttggaaataatatcgtcattacttttgaatatttagaacttaatgatttagccatcgaagctaaacaaacggatggtcgccttgctcgtcgtcctttaagaaatattgacaaagaaattgaagcacatcagattttattggcacaaatatctcatttaattgagggctacgaatcatctattaaggtgaagttgcattctacttttatcttgttaataattttggccttcagttttattcaccataaattattgaatgtgttatactcatttaactattataaactacaataagaaaggtttcgagagttttcacacgcacataaaattgctttgttaatgaaaaataataataaataaaaaaaaactgacttaagaacaataaaaaattacgcaagtataaagtagcaatgtagaaaaagaaaaacaatgaaattattaaaatattaaaatcaaaatagagtagaaaagtctttaaaactctagtgatataaattatcattaaaaaaagagtgaaaattgctatcttttgcgttcatttttgttacaatatgtatacttaactaattgttgcactcatattaaaagtttctttcaatttgtctttcttaatacatatgtagtcactggaagcctagtaactcctcttctcccgtagatagggaaacagttggtatcccgaaggcaaatggcacatgatcttctcaatggtgagctccgcgtcctcatgtctgcttcaacatggctaaaaaattattgcacaagtttgattaatacaaccaggtagcatagatgattagggatagaaatttaagtagtggaaataggcccccggggtactgcgcctaatagggcaaggattccatgcctaaatagggagtagagtgagaatagaaacaattttctatccccgaatgtcaactgggacgggaatgagataatactcttgctgcgacaagggctcgtttaatttttttatttattttataatattatttttaattattatacatatattattatgtgtttttgtagtttatcggtaaatttttaaatatttttattttagtttacaatttttttatattttaaattattaacataataaaatatgttaatttttatataatttatcttttttatttaattgtttaaaattattttctcaatgtatgttcaaatgaaataaaatatttatatttaaataaatataagttaataaaaaattaatcttattttattttctatttgattaaaataatatatttaaataagatatttatttaagtctcttttttaataatttaaataaagtaaataatattatttttaactaatacaatgttttaataaataaatataaataattaaaattaattaattaataattaattaaacaataataattatctcataattatcattttacccttaagaataaaatctttcacaaactaatcatttcttccactgatcttttcttagtcaatacagaggtgacttggcttataattctaagataaattagattattaattaaactatcaatgtaataatcttatttattaattctaatataacttcactatgaatataaaatttatttttataaattatagaattataattactaaattttaactaggagtagtctattgattataataaatataattttttttttcaatttattaatttataattagagcttgtcaaaaataatgttttacttatttaattatgtcttgattctttatatgtaccattaattcctaatgaattattaatttataatttaatgatagacttgagctcaatatatagctaaattcactcccccaattaattcttaagtgaactaatatatgatcagtcacagaaattttgaatttcactattgtatgacatgcttccagtcacattatattaagttcttaaaccaaaagtttttcgatatctttatattaaaatgcctaaacaagtgaatcaaaaaacttaataactacaaacaggatttcatgaataatca

SEQ ID NO: 201271 - DNA, 1295 bp, Cannabis indica
acggaggtcgttgtagtggtatcggggggggttctacaagttgctgtcttaaattcttaaaaagcatttcactatattcctctgtctattcaaatttcttgttatctcgaaagatattgaaagaagggaaaatttgtctcttaattttgaaatgaatatgcttggtgcaacaatcacacaaagtagttcctaaacaatataggattgttcttaaaacatttatcatcaaattttcttcactaaaataaaaaagtcctacaaattaatattttaaaatagattgaaaatcaaatcaatgtcacctaatttattatatattttcttttatataaatatttattcaaccatcatatatacaaataataataataatcatgataattttataacaaataaaagcaaagattaatatttatttatataaaatatcaccaaatttattttgtgctctccattatacaaacttataaatagatttaatcaaccattatacatggaaaaaaaaaataaataaataatcttgtgataaataaaagtaaaactttagacttatttatgcatcctaaacaatgtaatgtgagattgtttctaaaatatttattttcaaaataaacctcacagattagtgaaaatagtacgaaaaccatataaataccacctattttttttctttcctttatataaatctgcactttgaaaaaaaaaaaagaacaaacaattggaataaaacacatgaattgtgttatctttacttatctaaaatattatatatcatacagttgccagcagaaactgctaaattttatacaagcatgatcttcaatacattttaacggatgacgggaataaatatcaaaaactgactattacaacagaaaaaatgttgtttatttgtatgaagggcctggtatgtttccttttacaacggccaaaacatattaaattaattatttcttttttaggttattctgctttaagctctttccagctgatcttccccaacaatccacctggtcaaccaactaggatctccggcaaaggatcggcgtgataaagggctgatcccaagatcagcaccaatttgatcgtactccttgagagctgcccccatctcttcttctgtagcagcatcctcaacaatgtccattgtttccattcgaagaacatcagcatattgctgctcctgttcagtatcattttggaagggttccacggcaggtccctacatattcaatgtatataggaaactacaatatattaaaaacaaaactcacaacgcacttgcaacttcaaaa

SEQ ID NO: 201272 - DNA, 888 bp, Cannabis indica
aaataataataagaaaaaaagtacaccatttttttgttgacaaataattgcatatgtaattgtgatgatatttctaaatcatatgatttttgtgattaaaaattgtgtcacaataatgttgcaaaatatgtttttctaatgtatgacacgtacatgagaattgaaattttaaatgttttggttttttattatttaaaagcaatgaacatcttgttgattaattgaataatgtttaatatcctaacttcaatttcaaaaaaataagaatctaaatacaatatggctattcttttaataaatacaaattgtgtattcatctcaagagtatacacaattaatttatgtacagctaaatttaatttgccttatgatgaatatagattagaaatatataaattatttaaattgtaagtgttgtatttttcatagataaataaatgcccttggtaatctatgttaataataattattaacattttattttactctttttttaataaagtgttattttactctagtcaatgcaaaaaaaaaaaaattatttttactctagggacatacatgcgtttattgacttatttactataatataatggaaaatcaacaaataaaaaaaaaggaaaatccattttcttttaattttcctcaagtaataattgataatttatttatttcaatatatatgattaactaggtgtaaagagaaatgttttaaaaatatgggacaaaatcctttgtttttgaagtaaataaaattcaattttccttctttttttttcttttttcttcttttttttttttttttgaatctcatattttgaatttatataataaatatgagattaagaattttacccttaaactttgtcaataaaaaatcatgttcct

SEQ ID NO: 201273 - DNA, 698 bp, Cannabis indica
gtctgcggttaaaagtattaaagattaataatttactaagtattttaaatttgtaatattaatattttgttttttgtgcatgcagagcaaatggcagcaagagaatgaagatcttgttttccaattatgaatgagggtggatttaaatatatttaaataacagcaaagtacacataattaaaaactttaccaccttgatcacttttatctgtttttgtattgtattgtgtaataaattaaaggcctattcgttggtccttttcgtgcaagatcagtaccttatcttggtgtaagagtaacttcattttgcactacctaataagattgtcattgtttgtgtgctttttagttttatgtgtcatgaaataaatgaataaggattgtgtatcttttgaagtttttctttgcataatgttttgccccttgcactaaaatgaatgggattaggaaacatgttagcatcattaaagcaaaacagaagaaatagcataattaatatgacgaataatctctggaagctttattgaataagtaaaaggagaccaaggtctcttacatatattattgtatagctagcatcacaaataatatatattaagagatataaattatgttaaaccacaaaatgagttcaaacacaacattgatgactaaaatatcagatcatatggagagtaagataatcagcttcctatctt

SEQ ID NO: 201274 - DNA, 777 bp, Cannabis indica
tcgtagatttatttgtttattttcccatgtgatattgtagatattaaaatcttaaacaagttggcaatgtcgtggaataattttatgattggaaagttcatagcagccatgttattggaaataaagaaaaagtttacaaaagagttcagctttattttagttaattatttgtgtgctgtcgttatctatcgagagaattaaatgatctaatctcctgtagatattttttattttaaaatgtggtattctagttttgtttggtgcatagttttcttctctatcctttactaaattctacttagtttattttactataaacttttacatcacactatctatcaattatctattcattattttttattccatctttaaatatattttatttattttaaatatacaatattaatatatacacacatacccatacataaaaagtaatataaaactaaaaacattaataaaataaatttagaacaacgttactccacttgttcgaaaaattatgtaaaatagaatatttcttgtcttattaaacttgtagtcttttctcaattttaaagaaataccaagtttaggagtgctcactctctacctataataggagtgttcgcggtgcgggtggtgcgatttttgaccttttttcaaactaatttgcacatgcagtttttccaattttccaaacctcactccaggcccggccctgggcataggcgggctaggcctgtgcctagggcccacctatcacaggggcccaaaaaaaaatatttacctttt

SEQ ID NO: 201275 - DNA, 1399 bp, Cannabis indica
aattcgagaaacccttcaaaaaaaaatacaaagaccatcgttcgtttagacaacatatgtaatccatcacaccgtatgatgatgctcttgttcatataactcgtatttctttaaggaaaagcagttaatatgcataagttgatccttagactaaacttttttctattttaaaatcgcttgaatatcttgttctcaatttcttgtactatcaaattatttttattatctatttaaatacgctataaactgatacattaagatataatctaagattaactagtaaagaatacttgctaaagccaaatgattaaaccattggttatatgacattacttttcttcttaacaaaaattgaacaaaacctttgcttttttgacacaaggttaggtaaacttatgtaaaagaagtaaattttgtttgttatttatcttaattcttctataaagacctaaaagcttgaaaattttgcttttctgttcttttttagtccatatcaacaccaataaattcaatccaatccaagtaaaatctatttcgagtccctatccaatctagttaaaatcacattcaacacccaattcaattacaaattgagttgaattaattttttaaatttagttattaaaaaggtgataatctcaatttaaaagaagtaaaaaatacaattaaatcaaaattataaatgattattattattattattattattattattattattattattattattattttgaaagctacaaattattattacataatagtgaacattaattactatgcatattatatgttttaatcaagtatgctagattactttatatttataataaatttcaattaattaaaaaaacaaaagcactaaaaaactgatatccaatttccttttcctttctaattggaattttgagtaccctgctttaaaggaataataataataataataataataataataataataataataataataataataataataataataataaaaggcaagtcaaacctgatggctcactatcttaacatcactttcttatgacatttcagagaccaatgactttgtctaataataataactaaaaataaaaacaaatcagatcagattccatgtacctagttatattataaaccaacattaacacatatatatttataataaagaaatttgtatccaaaatgttaaaaattgttgcaccaatccaaatgcctaatatttctaaaacaaatgaacactaattagaatttgccatacgactgactcttcagttagtgtgcagcagcctttgcaagctgacgatcaccaacagagagtcaagtggctcgaacgaacagcctcggagtcattgtacaaaaactcaacagatacctaatctttctaacaaaattg

SEQ ID NO: 201276 - DNA, 799 bp, Cannabis indica
gttcgtaattcaaaagtatggtttgaaagttagttttacatttagagagttttgtgattcatattgagatgaactatgaaggccaagaaaaataataaacctctttttttgtattttttttatattgattatgttatactgtttattaaataatataatatggattataatattaaaatgtacaaataaatatagtatatagttttaaaaacattttatatgttatatagttattgtgaccaatgtaatataaagagaataaaaactagtaactgattaaaaataaaaactagtaataactaattttttcgtgagtaaaaatcttgtatattacaatttcatgagtgtaattaagagaattattgtacaattaatcaatttaggatctaaattatcaacatatagatattagaggagattattacactaatttaaattattaaaatgagaataaaaaaaaaacgttagaaagtaaaagaaggtcgaagaggagttacaaaactccaaaacttttgaaattaagccaagggacatgtcgcctagtcaggcccagcactgggcataggcgagctaggcctgtgcctagggtccacctaacccagggcccaaattttttttttttccttttaaaattatatatattttttactaactttgaaaaatactacatttttttctaacataagtgtccaaaaataaatttttttctgtagctcactttgtttgtagagccggccttgcgcctagcaccaggtaacatggagctagagtttcatgtaaaattcctttaagacacggg

SEQ ID NO: 201277 - DNA, 1399 bp, Cannabis indica
tgggaatctaataatgcggatggttagaaacatgatttacaattatagaatcttaactttccaaactgatcgaatgttggtttcctttatgtgttaattctagaattagaaagttgcgtgcaaattcagaagggatcttgaattatatttccactagtgaacctctgagaatgtgctttacagctatccaattatcccaatttttgcccacatgacgtgacatgtccatgtaggcaagaccgatgccacatggaatacaaagtgttagtaggtgaccaaagtcaccatgcacaatacatcaattgacaaggaatccaaacacttgggcaagatcaagttacgagaaaatggccaaccatgagggtttggttggaccacaccctggccgaccaagaaagtttatgtgtcggccagccccaagcaaaagataggccggccagcacagataaagagcaccaaaggaagcctaattgaatggtggggtccacatccatctttctggatgggtcacaacttgatttcattgatagggcaactccaacaatccacgaacataggaattcaaccctaaattatctacctatcttttagggattaattagttatttttataacttaagagtggttttttctatttttaagggatatttacttacttaaagattgatcttttgtaagccctaaaactatataaagggcattacgtaaagtgagatgggacctgaattccaagtccctcaagccctagggcactctcactcctctctcacacgccattccctagtcattaatctattttctcatctcacttgtttagaattgttatacatcagttctcatcattgtaacattcaaagagagccatagctagaaattacaaggtcaaaacttgtaatttgcgtggtgttatctcttaaattaatacaacaaaaataggagtaggttattacccataaaataaggggttgaacttctataaatcgttgtatcaattttattatttacttttacaatttacatgcggtgattgtcaatcataaataaaactttgctgtcagtttactaaatttgaaatcaacaagtagtttttgtattttcacaaaatatagatccataatattttagggacactttaaaatatgagatttgatttataaatattggtaaaaataaaattggctttgtttctaaattaataaggataatggttttcattatggagtataatcgttaagagtacttccacataataatttagcttcattagaataaatttatgtaaaaaagagatcaagtgtatgtctccaaactatcataaaattgtttgtgatgtaaaaaaaaaaaaagaaaaaaaaattaaggctaactattcaaaaagaaaaagtaaaactaaattatt

SEQ ID NO: 201278 - DNA, 1431 bp, Cannabis indica
tacacaacaacgatcgaatccatattagttcagcaactacattagctaatgcatgaaactccctttcagtgttagaccttgccacaatctgttgtttctttacagaccagctaacaagattgtcaccaaaaaataccaaataacctcccatagatcttctatcatcaacacaactagcccaatctgcatttgggtaagcagtaagagtcatggcagaggcaagtgggatgcaaataccatctttaataattcctttgagataccttagtcgtctcttacaagcttcccagtgaagagtggtgggagcttgtagaaacgactgagtttgttgactatgaaggcaattataagagatagatattaaacttctccaaaggtgcttctatatagcgtaatatccgtaaatagttctcccttaattaaaaaagttttgcagaggcacttgttggatttagacaagagtttgttccctccatattcaacttgactaataagtcagtaatatattttgtttgaaatagtacataccagtattgtctctgtatatttctactcctaggaataatgaactacactaagtcttttagagaaaaagacttgtttaggtccaagatgcattttcaagtaagagtaaaatttgatcatgtaataagtatatcatccacacatactaacagaattataagactagaaccaaaaccatatatgaagaaggaactgtatgttcttgaaccttgaaacccccatgggattgaagcttctcatttcaggccctcagtgcctgtttgaggctatatatggccttatttatcttgcaaacatgtataggattagaggcatctttggttgttgaaacataaaaatagtctcacataagtgactatacaggaatgcattgttagcatccaattgagtaacatcccaattgtgagagactaccacacacatcacaatgtgaacagttgggggctttacagcaaaactggatgtcttttcaaaagtcaatcccattcatttacaaataacatttatctactagccatgatttgtatctatttaaagtgtcatctgaatttagtttgactctatttattcattttcacatgatcacatgcatacaggaacaatagagtactaaggttcaagcctttgctttgataagaaagataagttcatgctacatagttgtattcgatccaatgaagattagcaagagttgtcttaagaaaccttggctcagtaggaagaatggactcaaaggcatactagcttgcacactcacttgcacaaaggcacaccagttggcacaccctattgtcacatttcaatggtcttagtatcttggccataactttctcgatatatgtcataatttgacaattcaaaatgcattaaaaggataaaaaagagatttatggattttatttttat

SEQ ID NO: 201279 - DNA, 1355 bp, Cannabis indica
tttagatctatctcaaagagatgttccttcatcttctactctagtagaggataatcccactccctttgttgaatcaatacaaattgagacaaccaaagaggacattaccacttaatttcttgttcacaaaggcatcgtacctcatcgtagtgggagagttttaagaaaactaccccattatggtttggatggtgaaatcaacatggttgttggtgaaacttgtcatgatgacccattgacctttaaataagaaatatctagtcttgactagaaactatggttagcagccataatccaagaaatgaattccatgaggaaaaatacagtatggaaagttgtagttgcatcaaatcactttagggccatcaggtgtaaatggatctatacaaaggaaagagaagctgatggacaagttgaaacatataaacatagacttatagcaaagggttatacccaaacagaaggtatggactatgaagatacttttagtctgattgccatgatcaaatccatctggatactattatccatagctacttttcttaatggaaagcttgatgaaatcatctatatggaacaactagaaaggttcaaggttctagggcaagaagggaaagtctacaaactcaatagatccatttatggacgtaaggagacttctcattcttggaatcataggtctgatgagatcatcaaaacctatgactttgaccaaagcattgataaccttgtgtttacagactcaaggagaatcaagtgatattcttctttttcctttacgttgatgacatcttgatcattgaaaataatgtcaagaagttaacagatgcgaaagaatagctaagcactcaattcgaaatgattgactcgggaaccaaataggcgcgctgagaagatagttgactataggcatcatccaagtaggcacgctatcaatcatctcaattcatcaagtttgttttggaaggccagttttgctaaagcgtcagcattagagttttgttctcttggaatttgttcgattttgaaataatcaaacttttccacgttcttccgaaccttatttaggtattttgccatttttatgcccttttcctggtatttgcctaaaacttgattcacaattaattgcgagtcactgtaccagattgacttttaacactttagttattctcaaacaagctattaaggcttcatactcacccttgttgtttgaagtgtcaaattgaaatcttaaggcatagtgaaacttaaggccttctggaacaattagtatcacccctgctcccgagccattttaattggatgctccatgcacatacaactttcaagtatctgcgtctcgcgagataagc

SEQ ID NO: 201280 - DNA, 909 bp, Cannabis indica
acatggactatcactaacagtacaaaacgaagattcacattagccattccagacacgactggacctaattttttataaaaaaaaaaaaaaaataccagttcttataatttttatgaggcacccatagtacttagtaccaccatgaattgtggttaattagttagtgattttttatttattaaagtaatatgggtgagatctgatattaaattacacaaacaatgatattacacctccaaaaagtgctagaattatagtggccgcatttttctaagagcaactccaacattaccgtataaattaaaaatactaagcattactgataccctttagtcagggccgatcttaggcataggcgagggcccacacttttcggggcccaaaataaaaaataaaattttttattaagctttaatttaagtgtattgcaagccataaatatttataatttagttaattagagtggatgacatattactcatgatcatcagttcaaatttcataaccggccctccctttagtatttccccttcttcttactattaagttttttttgaaggaattattatcattatttaacgacccaaccaccatcccaaatgccaaccaaaccattgccccaatcttcatggcacaaaagggaaatatcggtacaaataaataaatagtaaaaaatttgtttgaaaagaaaaaattgagaagaagagggagagtgagtgtagtcactttctctgggtttagaagtgtgtcttctcttccgaatcatatacagttacctgcctgcctcttcttaccaagcattaaatgcgggcgtctctttcttcatccccattcttcattatatatatatttatctccctttctctctcttccctttctactacttttcaggtttactctctctctctc

SEQ ID NO: 201281 - DNA, 515 bp, Cannabis indica
ttttttttttttattataattgatgatgtggccttgcttgtgtctctatagatatcaataggagagtttttatctcatcacaaagtaatgatttttaaagcctttaggcattgccaaacttgccttaactaacctcctaactttccttattatgcttacttatttacaaggaaaaggagaagagaagaaaagaggtagctaagtagagggaacaaagtgattttcaggccaaaatctaaaccccataagaagaaagggtgataatggagacctcacaactcttaacatgcaaaggtatgtaatgtaagaagtgaaagtcatatctatatttattcatatattcagggacgaatctatgtattcaatatgcctctcaaatatattttttcaaaattaagttataattttgtaatttttttttatattttattataaatttgttttttagctccctaaaaatattttttttgcactttgcccccctacaaacatttttttgtctctctccctatgta

SEQ ID NO: 201282 - DNA, 770 bp, Cannabis indica
ctaagtagctttgttcaaacattcatacagaaatttgagtcttgtttccatcacttattcatttttacttgctctattgataaatatttcagttgaaaatatatttttgtgatgttagtctgttgccatatattgtgaggagttttcaaagcctcgtctgttttggacaatggttcatagagctatggtgcttgcttgtgctacttgcgttcaactaattattacatacacaacagggagatccctcgagactgtaaagtctattcaaactcaaatatgcatgtgaaatatatttctttttccttttcatttacaaaatgtgctatttagttttgtttatatgtattacagacatgtgaggttcatactcacatttctttgcacctcaagcttttaggtacttgcacagaagccaacataaattagtttcagtcacgctcaacttaaaatatcattctctaatatttgtgcatgtttaacttgatgaatagtggtgataaaaaatattaatactcaaaagcttattgaactaaaagacaaccttgtgtccaaactccaaaggtaaaagtgaaaattctttctaaaacaagtcgggcaaccataatcaaattggttgggattgcccttccaatttacactatgctaacgacgaaacataagagacttggttctaaaattgatggtatggtaagaaattttttgtggagttgtgagaaagaaaatctttgcctctttttaaaagcatgggataatctatgccttccaaaatc

SEQ ID NO: 201283 - DNA, 1087 bp, Cannabis indica
ataaaagtaaaaattaaaacaaacaaaatataatgaatatacagtgtaattttttctatagtactatttaccaccatcatcaccatcaccatgtatatacatacgttaattaatgtaatttaatatatgggattaagtaaatatatatatatatatataaataattattaccttaaatagaaaggaaacatagccattttgttgtgtattaataatggtggaaccaaaaggcaaagccgaatgaagcaaacacaaaaaagattgccaatgattgagactaatagaatcacctatgaacataatcttcttccccttaaatctctccaagaaatctccaccattgattctgcaaacacaatcaataaccttatatattaattatgtacaatacaagtaatcaaaataactaattaatttatatattaattaataattaccttggcaagtgacaaccatggggtttccacctatacttgagatacaacttatcaagtcttccatacttttgacaatcaaactcttttcttataaatggacattttttagaatcataaagtggatatgaattgtctaaaaaccccaatttccctttgtatacattgcacctattaataatcttctttgtacttgtactcatcaataataccttagtaggatcttcaagtgacattgttgccaaacaatgatataataatgagaaaaacaaaactaagtaatatttcaacacaatcaaacttgaccatgatgatgattttcttgtatgcattatcatgtatagttataaatatatatacaaaaaatatatatgtgtgtgtataataagctaatcacattttatgtatagttatgtattgattttcctttctaagtttgtatatatacataaaaatggtatatattatagtaatataataatataatgaagtgtggcaactgatctatacatacatatatatatatatatatatataatatagacattattgatattaattaatttcacatgcacacacatggaaaattaagctccacacttgaaggagtgaaaaaccatattatataaatttatatatatatatatatatat

SEQ ID NO: 201284 - DNA, 2038 bp, Cannabis indica
gtgttaaagttagttaaaagaagatatttttcaagtgagctttatcatacactatttttcaactataattaatggtgtagaattatagttgtgtttagagaattaattttattaggaaaatataattacatgtacgaaacttgtgtctttcatatctattttctaatacttttcattttaattacatctttaatttttcaaaattattttcttaatattttcatcacattcaagcttcttgttttatttttctagaactcactaagtgtcctttcaagtgttattttatttcttgtagatatttactaacacaaccgcagtgtaacaaattagacgacatcaatcttacaaaaagtttcttcactcaagtttaaggttatacaaattctaaatgtgtatatctaaaacatagcaagaaaaaaataagtaaatcatcttaaagaaacattcatgtgaaaaagtatacctcgccaatttttttttatcaaatttaatcgcaaaccatcgtgaaactattgtcttgcattgcttttcctcacaaaacaattttccatagcaacgttgatagacaatcattaaacatcacttatcaacattttttggctaaaaatagtcatgcactatcattaagcttatttttatattggttttattcttttgcatcttttgcatctaaaatgttttcatgaaactattcttgaataatgttcacttcatttccaagaaaattaccgaattgtatagccttagtatcgtttttcaacgttggtttttgcctccgaaattatgttatgacgagagcctcgcacaaccttcattttagcatcgtttctttttcacgtcaaaattttattttccatgagatcttcattttagcatcttttttcctgtaatttttatattttcatgggacagtgttttattatcatttcagtgctgatattcatagaccgttttgccctctctagtctaattttattacaacacacaatatacaacatacatgctaacaatactgcatgaagatagaaagcctacaagtggtgaaaagaagttcaaaactatcgtcgcattatcgcaaacactcttttaacataattttgagccactaaaataaagtttagtttcgacatcatttttgcctgaattttcaatcattacagcatacatgcaaaacaatttaaaattagtaagagagagagagatcgtattagtattgttttcgtttctggcctcaaaaattaagaaccattgttttagcatcgcttctttaaaatcaaattttttgataaaaaagccatcgcaaacatattatatcatagtcttgcacatatgttttaacttgtatgatttcaatcatacacatatatttaataagttaggatccgtagatcctcaaatttcccttggtaatttcaaaagtcacaaactgaacgctaataaatagtaagttacaaaagcatgctactgctgtgttacagttcacagcacaaaactagagcataacagaccaccaagccattatgagcatagagctctcaatggccacatttctctgtaagcttcaaacaaaattgatcatgaaaaactacatctaaacgtttccctatagatattttctcaatttgttttctgagctttagctgagcgaccacccgatgcatcattgtctcttgagcggccatgtttccagcctctgttgtgtttacctcccctgtttaagcaaaaaacaatattaacaacaagaccacaatcagaattcgggaatccaaaaatgaaaaaccagacaacatcatatgataaatcgattgaatcataaattatgggtttttttctaaccttccacggttgcctttaaaatcccgtttgtcttgattaccgcggaggagtaagctccagtaatcctttcagcatcacctgagtacgtagcatagcaaatagcaattggcgaaaaaacgttatttcaggcattttcaaataggaaggtaaccaataattgtgaaatgaacttaatcacagttaaatgttgctgcctacc

SEQ ID NO: 201285 - DNA, 1490 bp, Cannabis indica
aagaaacccttgattattttcttctaatttgcgatagtcatatatttatggtgaataattattctttaagctaaaatgatatttttgtgtatttaaaaaaatgacatttttgtgcatgagatatatactggacaaagattctcaaaatagtaacgagataaattggacaaagctttgttgatggagaaaatttaagtcacgctattatgcttggttaaagtgtggaataattgggcccattataacatagataatatagaggaaattacattgtatatccactttactttatttattttaatttttacctttattttcatattctttaagatataccaacttttatagatgatgtccccattaaactccttatgtcaatgtaaattatatgctagatttaagtaaagagtgaaggtatataaggcaactcactcataaaagttggtatattttaataaaatataatataagagtatttttcaacttatcctgataatatatgtaagtttatcgaacggtggtaattgataaaggaagtccgtgagtaagtaaatgtatagtttcttgggaattatcttatttatttagtttttttattatttagttagtaagttttgagttgttctggtagtttcttcaatagtttttatgtgagttgttatataaattttaattacgacttaagttcctattagaatttttacatagattttcaaaaaaaaaaacttgtaaaaatatattttttttaagatataatcaaattacttagtgagtaaggaattattttttttttgtttggtaagatatataagtacatttttagatatgtacaaatgtcatctccatatatagattaataattaccagtatatttatttcttttttttttttgatggaatatctgttttttttttttttttttgtcaataatatctgttgatagttgtttctcttttttgatatgcacgaatagcatgaaaaagaaacactcaaccgcctggtattgttcatacctaatttagagagcttttatttcgcaggaacagaaaagaaacaaggaaaaaaaggtagagatacttatcaaaaaaaaaaaaaaaaaggtaagaaataaagttattttttgtactgaatgttcttatttatatttcttttttattattttattatttaaatctctgattataaataatgattatttaagtattttgagattgtatataaatgaataaataaaaaaaagtacctacaaaattgaatatacaatttttagtttgataattatacactaaaatagtaaaaaagttttccaaaaaattttaaaaacgaattataattttgtttaaagtaggcacaaatatttttattaataagtaaactctcacagagtaaaattttagatctgtcactagttaagaaaattactatttgacatcttaaagtgttcaacaatatatatatatatatatatatatactgtgtcattcaataat

SEQ ID NO: 201286 - DNA, 851 bp, Cannabis indica
agttaattaaaaacatatatgaaagataaatgcaacttacacaagatatgtataaaaaatataaaatatttttgtcaattaaatatactaaaaatacaaataacaagatggttccatgtgatggttccatgtgagtttcatgtccaaagagatgtcattgcatattttgcaatcaataattttataagaaaagagcataataataatgaatattcactcaatttatttaaccttagaggaaggatcataagaacaaatatagagaaaacaaatgaatttagttggagagcgaaagatgaataacataaataatttgaagaatgaatttgcacagctaatgcaaagaaaaggaaacaattaatgcataatttcttaactttaattatgtttttatagttgaatatttgaatatttttttaaaattaaatatattttaataaatttattaataagtacaattaaaaagatgaaaaatatgtttagatgtaaaaaaatgaactgtctaaatatttatatttaaatttaaaaatattttattattcaaatgttcataaaaattttgattgagaagttaaaattaaaaataaatgcaatgttaagaactctgaagtgccacattatattttatgttaattaaattttgtcttaatttgatcatttatgttcatattttcaatgcacaatcatttttacacatttcttgatgcataatcaaaacactattttcccatgggggcgtacaaaattttattttgcgttaaatattaattaagagaagtgctaattataatttcttagttatcaattttcatgctcgaaatcatatgctgaaatatatatatatatatttt

SEQ ID NO: 201287 - DNA, 622 bp, Cannabis indica
ttatttaattataagtattttagttagcaaccacaaaagtctcttaaagattagatcggacggctattcattgtcctaaacacgttcgtaaaatgtcatctccattcattgcaacatttaaaaaactattaaaaaacaaatataagaactattctgtttatattagtttctctttcgtaaataagattattttactccaagatagtcttcgatggcatttgacatataatgtgaagaggtggaattattttaaagatttttttagagatctaatatattaagaaaataataaacccatgttgtctgtattatttttattattatatgagagccgttgatgactagctcttggctcactgggggaattcaattaggctacatttggagactaaatatttggttaaagccagctaggatgaccccattaattgcattaatcaaaagtaaatgccaacaaagttgatcccttccaacagcttcccctcgacgactagctctcaggctctcactataaaaatatgtcctcatccttccattcatatcataaataaatcaagttctctctcccttccccaacttctctatctgatagtgtatccaagagaatagttttcacaaactt

SEQ ID NO: 201288 - DNA, 1672 bp, Cannabis indica
aggatatatatatatatatgtattaattattagatagaagatataaattattatcattattatctagagagaccaaaatcattattatcatatcaacgttgtttggttatttcaattaatcagaccgggtagtatcttaaatatgtatacatgtatttatatataagttgtacgtacagttctaataatgtgtatgtacataattatatccttcaactgatgctcatgatttattgtaatttgtttgtagttgtgatcgagtgacttaaattgttatatccaaagggagagaatgaatgaatttttatatttttataacaaaactatatacttgagtaatgagtggttttctctcacgtttatccttagtattagtttaccctttttaattcgatgttactttagtcaggcaaaatgagtattattttacctatttgcttttatcacaattaaagtaaatttttcaaactaataattttaataaatattgtaatcttttactataattattttctcaacttttatttttttaagaaaaagacgattatattaattttaaataaattacataacaatcattagattagtgaagatagaaatttttccaaccaaaaacaattagtatccaccatatgaataaatttagccaagtatgagcataagtattagcagatcttaaaacatgagtaatctgtgctcgtagaaaataagacactagaaagttaacatcattcaaaatagcatgaaaagtagaagtaaataaatggaaagattacaatcgttgaactatcatgaatgaatcagtttcaatgtgtgatctgctgacaaattgagtaataagagccattgtagacttaaaatcaagcctaattaatgcttccatttcttcagatttaaaacaacccctaaaaggcttagataaagctgcaataatagaaccagcaaagtctcttaaaattgcaccaacaccaataacacctttagatttgtcaataacaacgtctgtgttaagtttgaatctccccgaaggtggagccaaccatttaggctttgaagttgaactagaaggagtacttgcaggcactacgtactgtggctggttgatgtggttcggacctttgagttgttgcacgggcagcttagaattcatatagatatgattttacaaacagtaaaactacatcagcctttttttgtaacttttccatgaaattcagcattctttccgtactagatgcactagcaaagaataataaaatgctcaagtgtgaagttgaaagattggttgagagatgtagcaggaaatcatcatgtgtttgaatcaaccagtttaaaaccaattggtaagttcgagagacgccccacttcttttgctttttttttgcagaaaaataaggcatggtaattaattattttatcatgggaattgcagagagagcagagaggagcggaatctatatgtcttcgatgaagttttgcagcaactggtaactccatgtgaaaggctttccaaacaaaaatacgaatcttttgatggaagattcaacttccaaaaagttgtcgaccaataatctatcaaggagctgctacatctatcttcttgttcagcaaggcttacagcaaagtggtaacccattttactgtgtagtttcctttgaatgaattgtaccaa

SEQ ID NO: 201289 - DNA, 1435 bp, Cannabis indica
gtacctctctctctctctctctctctctctctctttctctctctaatagtacatatatgttaatattagttatggtataattaaatcgcatgtgtatgtagtccagtcgtgacattaattaattaaatcactttgctagcatcaatttatatatataaaattaattaataataaatttaattaatttgtattatatatatggagaggggttaattagcgttgcgtgttaattggatcatcactctctttacatgcattttatgattatgatattggtgatgagcatcgagcatgatcatgagacttttcccttcccccctttttcttttcttttttatttcccaaagaaagaccttttctgcgtgaccccttaatttagtcttccactttttatatacgtacctatataaatataataaatattatttataatattccatctcagatgatatcataatatataaactaataataaaacaaaaggaataattagatgtacatctacagtatacatatagtagtactactactgtagcacctacatagtggtagagatgaccaatatatatatatcagaagagagagagagatcgtacgtactactatatagtatttatatatatatatatgtagttgtgtacaacaaacaaagtgcatactaattaatttgaaacatcagaaaaggttgtagatatcgactgatcaaacagtagtgcaatttctggaagatcgaaaaaaaattactaattaatataataacttatttatttatatatattgtataaaagtaataaattaatatattaatagttataatgtaatacgtaatgtaataataaagcaaaagaaagtttgaccgatgaaatcgatgcaacccgcacggatagctagcttcaaaacaagatcacttatttgtatgtactgctaattatattattaattaatatatagaaattccttttttcttatttcatatagttttcatgcatatatattgtacacactctctctctatatatatacatgtgtatttatatttatgatcaacttccaaggcagggatatatgatatggagtatggatcgatccagaggatgaggatgagaatatataatttatccagaagaatagaatgaatattattgcagcactatatcaatatactacatcctccacagtaagagtcagacactactataccctatatctatctatattttaattatatcaattatataacaagatctagtgattttttcaaatatagtaatgtttttttattttttaaataaaagtaaaatcttaattatattgttattagtatatatatatatgattcaatagtgagagtagtatggttcatcccaatatggattaagagaatatgatgaaagtgtgggggttgtgaaaagtcacattatatacttatatatat

SEQ ID NO: 201290 - DNA, 1275 bp, Cannabis indica
tcgggtctgtgttcgggccgaggtccaagttcgagtcgggtttggggtagattgggttcatgtcatggtatggtgtagaatattgaataattttttagtaagaagaaatactaaaaatagttttaaagaattaatttgtgtacaaacactaatattaaaattttaaaatgacaaaaaactgtttttcacttttgaaaatacaattttgaaaactgaaagcaagttaaacagcctcaatatttgtaatatgttatttactaaaattgtttaaaaatggaataataattattttatcttgtttactttatcaaaacgcaatcgaaatgcttaaattgattaaattaccctttttagttattctattgtatatggtaatttttttattagacatattttaaaggacacaattatcattatatatttaatattaaaaaataaaataaaaatagataaaagtcatttcctttagtgccattcttttaaaagattggtggagaagtattccatttcttttatcccttatttaatcaagttcttccttttctaattttaataaagttttaaaataaatataagggaatgattacattactattgattcccattactaaaagtattaaaatatcattcctatccacgtaggccagactagagtcacgtggaatacaacgtgtcaataggtatgcatagtcaccatgcatatcacatcaattggaaaaggatccaacacttaggcaaggtcaagttacaagaaaatgaccacctagagggtctggccggaccataccctggccggccaaggatgagtgtgtgccagccaaccccaaacagaaggtaggtcgaccaacacctataaagagtatcaaaagaagcccaatcgaatggtggggtccgtagccatcctcctagatgggtcataccacggtttcagctacgagatggctccaacaacccacaaaagtaaggactaaatcccaaaatatctacctatcttttagggatattagttagttatttttgtaacttaaatatatgataaaagagtaatgtctcctatttttgagggatattagcctaattgaatatagatcttttgtaagctctaaactatataaagagcattaagctaagtgaaaaaggacttgagttctaagtctcaaaaatcctagagcactctcattctctctctcacatgaacatcagacacttagtctgtttctcatctcacttgtttagaatatgccatacatcattctcattattgtaacattcaaa

SEQ ID NO: 201291 - DNA, 1240 bp, Cannabis indica
gttaaatgaaaaaaaactaatagtagaaacagatcgtaacagcatggtcacgatttttgaccaacttatattatattatgtatataaaatatttttaatatttatataacctcgtggcatgccttatatatgatgatgaaatatatataatttatatgatatatatatattatattaaattcataatgcaatatgtttcgaaaattgtcgaaaatagataatatataatatccaattgagtcatcatgatatatggacgtacgttaattattctttatagattgtgtaatggaaatggttccacatgctaagcacattttgatgatctctcccaaaggatatcaaactcaaaataaataaataaattatataaaatgttgattatagatatatagaccatgatcagagttgacaattttgaaactttttgggaagaagatctgagtgtagggctcattttaagaagttctaattaaaataaaaaaaaaaatcaattcatttttatatgataaaattttattaatacttacataaaataaagtgtcaatggcaaaaacccaaaattaaacgggcctagcatatgtaaatatatattataaaaaaattatttattttgtattttttaatcactttttacatattataaatttaaaataaaaattaaaaaagttggggggcatgccctagtggcacctgcgttcattgaaagtttcttggctacttttagggtttgtaatatattgtaataattaatagaaaatggtaagtaagtagttaaactaattaattaaatgggtagtagaataatatctaaagaaaacattcctcttatgtttggccacgctaaagttgttatgaccatatcttaattaattttaaaacaatcatgtctctatacttacgggtgttatttatatatagagtctatagtctatatatatactatatatataggcatatatatctccatcatgatggaggtgttagtgtatgtttgatctgtatatattggggtcccgcttaattataagtgcctgaagaaacttccagtacgtagtgtttacgaggacaaacgaaactcacgccatgtgagggatgatcatcacattaattaattcatatatatttatataacacttgtatatatatatatatatgtacacgaacatatgcataataaatgcccataattattcaccacatgcagcagtatggtcttatatatatatatatatatata

SEQ ID NO: 201292 - DNA, 1494 bp, Cannabis indica
aaaaaaaaaaaaaactctccttcccttttcaatttacaatgttaaggatttacagttgtaaaatcctgcaagctggaatataagaaaatagtttaggaaataaggaaataaactgtcataacaattagtataagcttttcagtaaactaactgtatttacacttagtacaatacccaacaagttgacagtttcttcctctgtccttttaggtatccaagaaggtgaaccctgcttatgtgtagagataaaggtacttatttatatgggtttcatctcctgaggattcctcttttgtaatgtttagtgttattaccaaggttttgagtcacttccatcgttataggacttacatgacttttcttgtgttaatttttcaaaatacagcccaaatgtggattcctcccaatctcagaatttataggtgaagaaaaccgcattaaacaaagtgtatctcgttataaaatgcatcaggccctcaagttgcatggaaaagaggtactttttctactagcttcttgttttcaaattatgaaatttacaataatatgggttttattccattatgttgatgcatgaagtttgtacaataagtctcatatctcaattaaatgtttagatttcagcagtgttgtaagtttgatgcaaggacttacataatatgggagtaccaatgcaccatgtgtcgtgctctactcgcatgatctcacatgattggcaagttttgagtttttcaaccatagatgctgaagttttttgtatatttaacttacattgcagatttcatcatttagtgaatatgaccctcttgatttgttctcgggagtaatggacagaatacagaaatccatcaaagatctcttctcatctcctcagaacaattttcgtgtatttttagacggttctctaatattcgggaccttgggtgggattgctgacagtacaaattctggcattcaagaagcatttgaagatgcactcaaagatgtcattgtaggggatcaaggtcatcgtacagacagttttatacaacttattgccgagacaatttatacatccggagtaatggagaggcttataaaacttcaaaagcttgataatcttgacatagaaggggcaattcatgcatattataatattatatctgagccttgcaaagtatgtagagaattgggggaagagaaagttcgagacaagtatacgaccttgcattcgatttccttagatgaaagcttgaagatagtaaaaaactttttgataggcacaacagcaaaggactgcagtttgatgatgagttttaaactgaagaaagaaggtgacacagaatcaacatatgacagtgtgtacctgaaatcaacctctcaaacttttgattataaggtagaatctctttctttttatccattttgttcttattgcattctctaagtttattatagctttttagtcatgtataatgtgaataaaatagttagatagtactgtttggggtagtg

SEQ ID NO: 201293 - DNA, 1568 bp, Cannabis indica
gagagagagagagttgaaaattcaacggcccaccagtacgagagacaaagacagaaacacaggaaatcaagattcattttttatatattattatagatcaaagaacaaattgttagctgtataattattattattattattatatattaatataacaaaaattaacagaatccaaatattttattttaataattattggtaattacagctttgttgggtctttcactagtgggacccataacttttcagctgattgagacggtggtgccgccggtcgtcgcggtggccggcaatattggagctgttcttcataagggcattttcgtaaattcataatttcgttaattaattaattaattatttatttctctctgtgtcggtcggtcttttagttttttgtctgattgaattgtcaaatgagagagaaactgagttggggttagcgagttgagaccgagttgagttgggtgagttaattaaatgtcacgtgccagtcacgtggggagagaaccgacagttttggcgggcgctcttctcattattggtctttttttgttggattttactaaattaccctttcttaaacgtttttcattttttttttatatttttttagtgtaaattattttaaattttatattatttttgggttgttgaaagtgagttaataaatagtgacatttacaaataataataataattaaaagaaataaattaaaatttagaacggaaatagagaaattaatctcacatgtgagtacacatacactcatacccactatttttgtctcattgactttgtgaaaaccatgcctataagctataataatttagtatattaaataaaaaaaattaccacaataaaaaaaattaccaaaataattataatctaaccttttctctttggtagtatacatagaaaactacaatatatatacatgtatatttttttattggtttagtaacataattttatgttttatttaattaaatgcttgtaacatgtggtcataatcaaacttgtaataataaaaaagtggaaattagaactagaataaaaaaggtttaaattaggtcaattaaagtatacctatataattaacttttttaaaagtaaaaaaaaataataggtaaaaaaagactacatatatatatatatatatataacctaacctaaaagaaaagaatgtaaactttagacacgtgagcttctataatggagataaagttaattaatgcatgattaaaattaaattactggataatcatagctataataaggtaggtgaattaagctcaaatccacactattatttttaataaatttatttttgaataaaggattatttttattaaatagcactatatatattgcttgagtcatcaaccattttttttattttaaatgctacaattgttgttatatatgattttattatacatttctaaattaatttttgaagaattattttatatattattttttaattttttttgaaaaaaaaaaattacgatttggatttttccagtagtttctatgtgagttgttgaaccgattttgattacaa

SEQ ID NO: 201294 - DNA, 727 bp, Cannabis indica
taaaaaatatatatgaaaaaaatagttaagggtaatcaattactttattaaggtaactagttactttacactattctttccatgtttttaaacatttaaaaaaaaatctcatcaaataattttcttgaaaaaaaaaaccacatttttataaacttgaatatagtattgggtattgtttgtggcttttctcaataattcactttgaaatgaaagttacctaagtcttaattataaatattgaatttttatttattttaatttttcagatcaaagataaagatgggaatccactactattgggagggattaagaacatggttcaccaagaaaaagatagtcatgaagtcaagaaatctgcaaaggactctcttgtttgattatacataaatagctaggctttgggattaaaggctctttttcttcttaatttctttctttctttcttccaatttgtatcactctcttctattttcttcaatttgaagatatgataaattgagtgtaaatgaattttgattctttaaaataaaatataatcttatacctccatttttctctttgcaaatacaactatgggattcatctattttcaatatggacatatatattcaatatatgcatggataattaattaccaactttataaatgttacttaaaaatcaatttcttaacttggaacctttttcccctttcccttttggccatatatacatgctataatatgcc

SEQ ID NO: 201295 - DNA, 1526 bp, Cannabis indica
atggatgataagttttcacagtaattcttgaaattttgctggaaaagggacttgtgtggttgagatacaactgagggaatagtatggtggtactagtttggttcttctatttgctaggggaatctatgaatgtgttgatcatgatggtttcatttttaatgaaatttgttgcaaatatgaatggtaaggtagagccgtagaagcattcaagttaaggaagatgttcctttgcacctactaagttggtcaatttttcagatatgtttccaataataagaaaagtcgtcgcacaattttggaatggtggttttaacaaggattaaatttaccgatacacctccagttatagaattgtccaatttacatttttggatttcaaatagtttgtcttctttgttggcaattgttcagtagtatagtttgaaagtcattatagctaaaaccattttttctgtcaaaatccaaatggggacatggggcatcgtttgttagaatcagaactcgagaattgatttgttgatgtagtagcaaagatcatagttgctttattttgattttggagtcaaacatcgtgcactgctgcatatgaatgcttttgtcactataatatctggtttcatagttgatccttcagtaatgttgtttaggtgtagtttttcagaatatatttttgtttttttttatcatacccgaggtattttgtaagttgcaactttaattgttattgcaaatgttctacaaatttttaaatgaggatgtaattgattttcccaggcttttctgagagaatgagttaaaattgaacataaacacattgcataaggtgacttttaagaaataatctgtttttctttctatatttttacctttttatcactccatgtctgcatgagccggtttagatagcgcatatttgaatactataatctattgtttaggtcaaattttcccaggaaataatggtagaacgaatttttctttttagtgggaaagtgtgatagcattatgttttgatattgatctaaagttctaaactacaggtccaggatcctagagaggaagttcttcaagcatggttcatggatgacagtgatgaagaccagagacttcctcatcatcgggaaccaaaggaatttgtatctttggaccaacttgctggtgagcaccccttcacacactatgttttataatggggttattaatgtgtccaacatttgaacatttggagcaattttgctggtcttgtagagcttggagtgctcagctggagacttgatgctgataactatgaaacagatgaggagctgaagaagattcgtacagaacgtggatactcctacacggttcgtccaatcaaattttgtttttttctaaaagtaatttattcaagaagtgttcttactccttggcttggtagttatcgtttacatgtcagggtaccaagacgatgatgattataaggattgattatagtgttaactgtttttttttcttgtaataattggtctttctactgttgttatatc

SEQ ID NO: 201296 - DNA, 711 bp, Cannabis indica
gtaccgaatttgattgaatgccatggtacactcaggcttgctggaaaatcgcttttgaagatgataaagagatggcctactatgatttcaaaatgtgttctcactctcactgagaacttgcgaaactccagctcattagaatatgccgtgctaggttcttgtgcagtccttgcgacacaaacagttctcaagcatgtgacaacggtaaggatcgaaacaaactgcatgctatacataaaataatatctaagaaattaaaaaaattctaccttattttgtaatttcaggacccgaaggcattctcatcgtttattcttggaattctctcgaggtaatcgtttgttaatgacacttgaacggtagttttgggtgcatacgatatctgacttttctttctttttatctgcttgaagctctcatcacgagtcactgaaatcccagaaagcaataaatgaggtatgataattcaggttgattctgattctgaaattctgaatgaaatgaatctaatataacgagcttctgcagcttttcgtcaagtacaacatccacttttctggagtatcgaaaaacattttcagggcaccgaacgatcaattagaggggcaagactttggggatttggtttctcagattgtttcgatgagtttcgattctactggtttgcattggaggtagatatcttgattttcttggatactttttctcata

SEQ ID NO: 201297 - DNA, 1328 bp, Cannabis indica
tattcaaactcatcttcatccggttagcaaggcatttcaacaccactttgtacaccatagtacaaagactaatgggtcggaattcagacatcatggtaggctttttaactttagggatgaggcaaataaggttctcattaatcatgctacaatctgtattcaatttaagaacttcgaagcaagctgcagtcacctcgaggccaaccaaatcccaattttcatggaaaaagagacctgggaggccgtctttcctaggggattttaaaggatgtatttggaacatagtcatcttaacctcatcactagtgaatggttctaggattcgtctattttcttcaagacttacacagttgggtacacagtcgtggaggatgttcttgatatcagacccccgattagattttgaaaagagttgtcgaaaataatggatggcaatggctgatatgtcttcctcattagagtgccactgaagtttatcatcaaacaatcccaaaatagtattctttttccatctatgtgaagctttgaaatagaaatattttgtatttcggtctcatgtttaaaccaaagagcacgaatcctttgctataaatctcccttttttcttctaggcaattaagatcgtgttcaagtttttgcagagttagccaatcctcttggcaagtcgatttatctaaccacccgatcttttccttgagctctttggttctagtatgcagatcatgtttttgttgtacattccaagtatgaagctttttcccacagctttgtaaaagacgagtaagattgtgcaagggtctactcaaatccttactccgccaaacttcttcaataatcatatggaaatcttcattatctgcccaggcttgttcaaaatggaaccgagagccccacttttgattacaggtattgccattgttacctgctgagcgcttagcaataacggtctatgatcagaattccaccagtttaagagggtaactttgtttacctgaaatttctctagccatttcgaagtgcacataactctatctagtttctcaaaaatcaagttcgatgatctcccgttacaccatataaagttgccaccctcggtaggaatttcacgtaaaaagcaatctgaaatcgccatctaaaagttgcgcattaaatattatagtttagcattcttgctattttttcacaaagtcttgtaatttcattaaaattgtctccacgaacccaagcaccatgaaacatcggttgcaaccgtttcaacaatttccaactttctgtgcgtcctcccggatcagggttaccgtagaagctagtaaactgaaagaggaacc

SEQ ID NO: 201298 - DNA, 812 bp, Cannabis indica
gcattttaacaacattaacactttatggtgtctgagttgaaaatttcaatttaatctcttactaaatactcatcacttcaagaccaatcatgtggatttcttatatgcagaaaatgtaatcagaaaaacttacaagctaacattcattccccaatcaaataaaaaattctaacaacatcaaagaattatcaaaattcaaactttacacaactatctattaactacaacaacacaaggtcaagaataacaagttttaattcaataaacaaaaccatcacctcatcctcagcattacagtgatgtttataaattgagcgaagaaagtggtatctctccaacaaaggcttaacatcggcaccatttccatggttggtagcgagacccacagcagtacgatgaagaacatcaagctcagagcgtatagctttatgaaaaagtaagaagattaacacaggggattcgatagcagagtcattgaaacaagtcttcgatgaagatggatcgagaggattaactggaccagccattacagccacaccaccaccatcactgctcgaaaatggcgtagtcattaattaaagataggattttgagatgagaattggaatgaaatgtaaggattagtacaatttccaaaaaccctaaaatcattcccaaattggggaaaagtcttttctttcaatttctatttcagtctattttgtttctctctctctctgtttttattgcaaaatccttgcctcctttgatttgggttttattctctatcagagagtgtctccctccaaaagaaagaaagtaagaaaagaaaa

SEQ ID NO: 201299 - DNA, 656 bp, Cannabis indica
atctaaactaacaaaatttcaccaagtatcaaaaataaagataagtaataaaaaataagatgaaaattaagaaccaaaaatagttcaaatgtatgtattttaaattctttttataaaacttggtataatcgttgagatgcttataagaaaaataagattatactttttcatcaataagaaagctcttggacccatttccgcaacaagtgggagtgattaccaagcattaattcaataaagatattaaaaactatatctaagatataatggaatctcaaccagtggctatctacagagtgacaattgataataactcaaaaacaatcagtaagtagtcactccctaattcacagttaagaaatgatacaatttgtaagtgatgttatgtttagttcaaagtcaatacaaattaagaaacacataaaaacaaccatttgagtgaatcgtcaactaaattaagagaagttaagaaattagattaaggaaataagccttttcactaacaaactcaaatcgagcattaagttgagatttttagaacaaaaaagaaaaaaagcaatataatacctataaatactaaataacaaagtgaaagttaagatattaccagaaggcatcttacccattgaatgggccaacaccatcccttttcctct

SEQ ID NO: 201300 - DNA, 2400 bp, Cannabis indica
tcagtatggcagtggtggaggtggtggttgctacgggtgccatggtggtggaactaaaaagtaatccgacgcatcagagttcatggtccacatggcaaaagctgaatatagttcatttacttattgacaagcgaattcattttgttgctcaagataggtgttgtaaaaatcaacttgagcctgattcgactagattatgtattgattttggcaaatgatataatccaatcgatcgtatgtgccttgagtccttgaatccaatggtggctcgagttgtaacagaggagggatagtttcactagccccccttcattgtcctccttgacttcatcaccatctccctcgggttgattatcgtctttatggcatttttgttactcttttggaggtgtgaaagaggccgatggaaaagtataaaaatatcttcgagaaatcatcatcatgggtagcttaataatgtctccatccaaggtccgaatgccatgcttgctgcataaggccgtaatcccatgagtcgtgccagcattagtgcacatttgagagacaaactcaaaattccaatgaactagtcttccaatatcacaattgtactgagacatgatggcaaacacgaccatgcacctgccataattcactgtagaaacatgagatgtaggcagtaattgtgcattcacaaaataaacccatgctcgagccaccaagttaagttgccagtgatgtaaaaatttctagttggcatcaccttcagtatagaatcggttgccctcctagcctaaaaccctagccaatgtatcatcttttatacaaccttttcagtgaatagccaactttcttctttgtgctcagcaaacgtggtaaggttcaaaaaactattaataatgtaaatacttactggcacccaaactcctcgaacatagaccttgttattttcattattgtaaggataattggcaaagaactcgaacaataagttgtagttggcttctcccaaaaattgagaagcacacactcaatgccaattttgtcgcacaatctcacctcgaatgactttatacctacgatcccgctcaaatggcacatcttagaattcaaatccatgttctcttatgacaacctactttttgaattttcttgtatctttcaaccgcctcattgttgacgaatttaggagggggttggttaggtggttaattcccttgggggtttggatcacgcagggatgagccttgttcaattctttgggctcgggtagtggttcttttatgtctgaatgccatactaactagctaattcactcataagcacaaaatcttggacactaaatcaataaaaaatcgggcaatacctcccctatacttttcacttcccaccaatgctcaattcaatctcattcaatattactagtccaaattagccaccaacaaaattaacataaatcaaaaatcacaaaaatccttaatttgtttgtcttgatcatactttctacccaaataatccaaaaatttcaaaaaacaataatgacaaccacttacttgtaaattggaaccattgagaagcttgaattcatcctcatcgaccaagaaattgcaaaaaaattcaagattacagtaatttttggattaggatttttctaaaaaaattaggaaaagcttgagagatttagggaatgggtggaaaagttggagagtgggttatgattaggaatgtgtaaggatgattttgggtgaaggaatttaagatttttaggttgaagatgatgattatggaaggtttgaggtggcttgggctgataagaaaggaaggagaagaagaagaatgaagaattttcggaaaaaaaaaaattgggtttgggtcgtatgaaactctctttgcctaattttatcaattaatggttatttttttatcaccattcttgaatcacttcattaaaagatatgtcatttgcttttgtttatcgaaactcaagtgtctttacactatgtgctagctcgttaaggacatgactctaatatcattattgcggaagagaatataaaaccagaaagtgttttattgaatgaaaaaaatgaatgagtaaaatacaaaggggaaaggtatatatacaaggggacccgattcctataaaccaggaaataacaaacagacacctgaaaaatctattaaccacctaaaatatctactaacctataaactgactaaacaaccactaacggtccaatgttcagtacatacaacagagtagacagagtatagagtaattcttgttacccccccccccccccgccccttcaagatggatcatatatgtcatgtatggccatcttggacaaatgtgagtggagaatggtgtatggcaggggcttagtgaaggcatccgctagttgtaagttgctgctaaca

SEQ ID NO: 201301 - DNA, 1771 bp, Cannabis indica
ttttgatgagcaagattgagtctgggactgataccttggttctattagaaaccttgtccggctattagctagatcttatctaggaactctgtccagtacttagatcatgtctaggaactttgtccattacttagatcttgtctaggaactttgtccagtacttagatcttgtctaggaactttgtccaatcattggtcttattataagaccttgaccagtacatagtttttcaaaaagtttgtccgacacttgagcccattgtatacccctgtccagtacttagccccttttgggagctctgtccggtacatcttaggccaaattttccctggccggtcaatggcctttgattcataggctgtccggttcatgagtcttgattttatacttcgccaatcaacgactttgtattttaaggttgtctggttaatactcttaggttttggtcagttaacatatcttttgtctaagtctttttatgttctccggttgttaacctccctctgcctttttgcacatatgaacccgcacgacttttggagaggttacaactgaattgatgaagacttacttagtctggacaactagtccttctaaaataactttgaacctgcagactctagttattattctgatgacatttgaggactttgttgtttgtttttatgcttttattttgcatactttattttttgttcttgtatggcctttaggccctttactttccaacatatgatatttttgttcttgtatgaccttaggaccctttacttttaaacaatgatcgtgtatggccttaagacattttactttcgaacagacgaccgaccatacggtctttaatcctggatttaacttcttttttcagacatgtagctgaccgggcagcttttaattcctgagttatgctttttatgtctaatctgaagtatgtcatttaatattacaatcatgagaacaatgtgttacagatgaagaattggtgagatcttgtgaagaacttatgaagaaacttgacttagtgtctaagaacataaatggcgtgtgaggtttgagagagagaggttgtatgcgtgtggaagggaatctggggccctttcacatgtagctaatgtcttttatatatcgtagggcttactaaatatcttaattcaaatagattaagagatcctttcaaaataaggatattaacatctttttttatcttttatctttaaaaaaaaaagataactgaatccctagagtataagactaatatcttgaaggaatatctctatcttcataggttgttggacctgtcccgcaattgtaggtcagcttgagaatcttttagaaggcttgttgtggaccccacgacttgttcaacatgttaagagttgtctgcacgttctgatcggatagccttgcctttgggggctgtccggcatgtctgtatagtcctgtctttggggattatttgtacaactttgctgtttagcttggttgaccagccttccttggtcagtcaagcctcctggtcggacagacctccttggtcgactagctatggttcggccagggtctaaagacttgtcttattcttgacttggaagttgcacggagtgtacctgtccagttgttgacaggttgtattccacttgttttctgtttttgagtatgtggacatgccacgtcaggtggacaaaaaattaggataaatatctttcattgtaataaaaaatctctaacaatatattacatatattttgctcacatatgaagaaaaaaaaa

SEQ ID NO: 201302 - DNA, 559 bp, Cannabis indica
cattttgttaattagccatgtgtactttagcccttttaaacagttagttagtttgctacaatttagttctacataaaggaagaaaatgtgatgatgatatgccatgttgttttggtaactttatcatttgattttgttatgaaagattgtgttgttcgatttccttgataatctaatctgcttattacttgtttttctttatggttttacgccttgaattgttattgttataaatgactgtaatctgaatgataatgtcaactttatctatctgcatctattgaagaaattgacaaaggatttagctatgaggttgtctagttattcgatgaaatagagctattttttttcattggttttgtagaaagacaagttaccttcatttccaatattttcttgtgataatattttgtttcgaaatcaatgaatagaaaaaggaaacagataatagatttgggaaagcaaagggggggtttttgacaatcgacaagaaacaaacttaacatacgacgacatgtaagacataattacattctcaattggtttacataattttctt

SEQ ID NO: 201303 - DNA, 871 bp, Cannabis indica
cctaacagccattcaatgtgatcctcaagaaccctaagcagcttctgtttagcaagcaaggatctaatttttcttctccaaatcatataatcacttgtaccatcaaacctatctatgtcaatcttgacattgctcatcttatcattattaaaatcaaataaggactgagttatagagttagagttatctgaaggatcattcaaaggaatatccttaaattcttctatgttgtatcctagatctagtaggacaactttctccagatcttccttgtgtcttgatcactttgttcttaagtcaacgaacttccaatcttgaagtttccagctctaataccactgttagaattttgatttaaatccctacataactcaaacaaagcaattagacacacaaatggcatgtcgaactttgaccttaacttcgcatggactcaaaattgtcacgcacacacaatcatttattatttattatttatttttcttttttctttatttcttgaattatatttaatatgacaaattccttcacttttgttttgatcaggaacaaaattagggcaccattcttgcgaaaataaaacacaattcagagaaaaagaaaaccggacaatagcaactaacataatcagagtagagaggggaagaaatcagaaacacaaacaccaaagtttttttgaggttcaccccaaatttcttgggctacatccttgtgagctcgcctcaagaagctaattctttttgcactatgaaaaagatcaaggtacatcaatggaggtgattctaagtcacactttgactagtaatcacgataaacatcaagtacaatcttgtttttcttctatataactctctctctctcatcttggtgt

SEQ ID NO: 201304 - DNA, 668 bp, Cannabis indica
ctataaaaattctaaaattataaattagataatattatcgccaaaaattaaatttagatatttatttataaagttaaacttaatatttataccgcaaattactcttcttattaatacttaataagacacttcttaaactaattaaaatgaatcatgtattccttgggtttcaggaattaaaacaactttgtttaatttgttaattatttttaatttaaataatttaaagtataaataattaattttaattttaaattacaaataaatatttaaatttaatttttaacggtaataatacttaatttatatttttaaaaccgattattaaatgtgaaataaattgttacgtagtaatctctgattggtccaaataataaatttttatttttttttttaaaaaaaatcaatttaaatatacttataaaaaaaataacacgtgaataatgacatcacatgtatacttacagaatttaagaatataacttaaatattactacggcaaaaaattaaatttaaatatttatttacaactataaattcaacttaaacatatacaaataatattttactttccattcattttcatatcttaaaattttattataagaacgcgaaaaacgacaaaagacgtctatttgggggcgaaaaatctcattatctagtgaaat

SEQ ID NO: 201305 - DNA, 715 bp, Cannabis indica
atatgtactaaatgtatcaattttaaaacgagagagttacgatttaaaatattaatatcatagctcactcatattcattactcgtgtatgtatttgaccttcacaaatatatattatttaataattaagcccattattaatagtaccccttttattacaagtctctttcactagttttagctagcatctgcgctgtgaacagttcataattgtaccccccttcaaaagattcttttgaactttatattctctacacatttttcatgcctctttttttgcgttatcgagtattcaaaatatatatatccattcatttttttgcgttatcgagtattatcttaaactaatttatatgaattagtccttatgaattaatataatatataaattaactctaatggagtagcttcctttctagaaaccaaaattaaggatatccttatataggatttaagggcccttttatgagaggtaaccgaaagttgtatgaggtaattataggtctggtctaaaagttcttattattaattgaccagccaattaattaagctagctaggtagctatatccctactacttcctgatcttaaatgataagtattaatttgattgatgttgaatatgtactacttttggttagtggaaaatatcacatctcatatatggataattagtatctatttatagcaaaggaaaaaaaaagtaaaaaccaagtg

SEQ ID NO: 201306 - DNA, 1334 bp, Cannabis indica
cttttctacttaatttacaaattttacagaatgtcttaaataactacaacgtgcacaattgtgaaaaaaaaaatattagactaaattattttctgaaaataccaaaacaaagagagtatatggtgtacgagaatgcgctaaactttttaaatttttaggattcttgtttttgtaaagttatattttactaaaagaaataattatgcaggataaagttgtgaactaataaatttatagctgtaggaagttgtcttttttctccaaccaggcctgctggcctttcctgggcataaatgcgacttgatcaaaattgcattttgctattatgattcgatttttgttactgcgattagtctggtctctatgacataagttttaggattttagtcttgtctgtatgacattattttattttgttatgtttctttgttggtttttcaatgactcgctattgaatcgctgttagtgattgggaataacaagttcgaagggatcgttagcaattcatttacttactatcaattttgtaattcttttggctttttgggtatttatgaaaaaaaaaaactttaaatgtaatttgtgtaaaaacattaataataatttaaaaattagctggtacaaattggactttagcatattagagtagagaaaattgtattgtatactcactttactttatttattttaatttttgcttttatttctatattctttaaaatatacccacttttataaatgatgtcgctattataccccttaaattaatgtaaatcatgtgctacacttgagtaaagaatagagatatattacacaatctactcataaaagtggttagattttaatgaaataaaatatgaaggtatttttgattaatggatacaaaaaaagaggtattcctcgacttatcccgttagtactccaattcgaatccgtccgtccaataaacaaatccaatcgaattttgaatggccaaacttcatacaaattcattctgatggattgggcggcgaggcggattggcagatatttcgttctcctaccttaaacacaacccttgcccttctctgttttttttttttaaagtctttgctaaattttagtgatacatatttttggttggagacgtcgagtcaaaatttcaaatactctttctgtagttgggatgggacagactccccatggagctgtaagccaatactgttcaaaagcttgtttcctaagcaaaagaaatctaaaggcaccactcctctagctactctctatttttcttctcttccttcacatataatcaatgattaaacaaaaaagttatatacataccaaacacaatg

SEQ ID NO: 201307 - DNA, 621 bp, Cannabis indica
aaaaagagtaaagaaaatagtagtgccatgcagcgattctaagtcaccatgtcaccaattaagttttatatatcttagaatgtaatataaaattaattttaagtaaataagtagtaattaataaaaaagagcaaaaaaaagtgagaaaattgattaatgagtgattaatttacagtgattctagacctttactacttcatttcttaattatcatatataaattaatgataatattcttacaatatatacatattgtatatataaattattaaatttgccaacatatatatttgaagtgggggtggtgaattatatatatttgtcccaaccaatctagaatatagtttgacaaatagcttttattaattattatgacattacgtatagtgtaggggctatgaaaatgagatgtaacttccacctttcttcctccttcttacataaatatatattatatatacatatatatatttcttcatattaattcttttcaattaattctttattattcatggtcaatttatgtatgagagttttgttatcatatatcttattaacatataaataattttagggagaaatattattaagaggataatctaattaattaaaaaaaattaa

SEQ ID NO: 201308 - DNA, 800 bp, Cannabis indica
caattggcaacaaaatggctcacggtatctccctcactttccccacataacatacaaaggcctggatgagagccaaatatctctctaaatttgcaaccgaaggggagagaattctaatacaatttccagaggaaaagtttcactctttcatgcattttcaacttccaaattcgactaccaataacatctttctcaaagaatcgcgaccgattgaggtcccaataagccctcttaatactaaaggagccatcaggagaagacttccaatgcagtttgtcctcattcagtaaagtgccaaagtccaccccctccaaacgattaatcgcctcaggtctaagccaaatgacaagctgattataatcccatccctccccagagttcagcataagatccccaacagtggtatcaactttgcacatcggattaagatctccactatcacagaagactccatctttactcgaccataatccactccagatattaacctgtgaatttttcccaattgcccaaatagagttatccgcaatgaagtctttggttgcccaaatgcctctcgccaccagggaagccgatgtaggaatctccgtagtaaggaaatcagaatgtcgacaatatttttccaaaagaaccgacttccaaagggactgagtattagaagccatgacccatcccagtttagcaattaaactgaaattgatatccgcacttcttttaaacccgaggcctccacgagattttggcttgcacatcgaatcccacgcctttaaggcaaggaatctcccctcttgaacatttcc

SEQ ID NO: 201309 - DNA, 832 bp, Cannabis indica
aataataataataataatgtacttactaaagcagctttcccaggcttgattgcaggttcaacactgtctcttccatacctatttccaatcaccacaactcattttcttaaataatttgcatttaccaaccatgaaccacaaaactttcatagagacaatcacttaaaagatgtttttccacgctgtaaaatttggtattgaaagactgtgaaactcttacgttatcagtctcttgccattgatgacctccagttggtaaaagctgcagcctctactaaatggaaaaggctttcccttccactctgcaggtaatcatttccatatcaaagagtgttaccggtatatacatatatatatataattcagttcagtatacctaaatgccatgtgacaccaacagctgaagaatcctgagtagttattttatcgataacgaactggaggtccttgtcaatcaaattggtgaaattttcaaagaagtcaaggatatcctgaacattatgaacaaaattagttaaaatcaattcaagttcagtctagggatgatgaaataaagtacctttcgaccaacgaaggggcgggaaaagatgaggtcctcgtaaacgcagttatcggatatgaggtcggccacggagggtagatcacggccgttgattccgccgtagaatttcctgacaacttcgtccgctggttccacgatcggtgaggcaacctccactgtctgttttccggacgacgaataaagcttgagatatgaggaccgtagtgggcgtgggatcctccatttcagcactgggttggaacttgggaaagacaggaggaaattagaggt

SEQ ID NO: 201310 - DNA, 788 bp, Cannabis indica
aataattaaattaataataattacagttcattggtcaattgtaagattatttgtagatatgattttttgtttttacttaattaaaatccgaaattattgggttggaaatttatgtgaaatgcaacttcctacatatattgtctaaatacaaaaaaaaaaaaatatacatattatatattcattttttggttttatatatatgtaattatagatatagataacataaaaattaggctggcaaaattagtcagattgataatttatagtatttactgatcttatctgaaaatataaaaaacttccaacttacaaaaggataaattataataaatgctcttaaatttaaccttttaagggtaagtttttttttttttttaacttgctggccgtttcaactactaaatatttttttttttaaaaaaaaaaaactttatttatttattatattattgtaagaagcactaataaaaaaattattaaaaagtactatacattacatatttaatttaataataattataataaaaaaaccgctaatcattaataatcttatattagtattagacatgatgttaaatatatattcatacaagaatgtaagagcttaaattaccttttaatttatttgtttaatttgatagtctttatatttatatatataatattattccaaatctttggtgacaaactttctaaaattgtattctcttactttctttttgtatctaatcaaacaaaatttgggtcgatttgtttaatgctttttcttaatatattcactctagtat

SEQ ID NO: 201311 - DNA, 927 bp, Cannabis indica
catgtcctaaggaagtttaataaaaacattattggggatgtgaaagttaactactatagggaaaaagagaagtatcaagaggttaaaatgcatgagcaaatattggttattctgaataagccaacgagatttcatgaatgcacaccacaaacatcaagagcttgtttggttgtattttcagtttttagtttttaaaattgtgtttttgaaagtgagaataaaaacagtttttgtcattttaaaaatttaatgcgtgtttggcacaagttttttaaaactatttttaatttttttcttactaaaaaaatcaatattttaacaccataccataatataaacccattcggatccgggtctaggatccgagtatgtgagtaaaaatataaagtataatatattagataaaaaaaaatatatttttgaaaattgaaaataacattttgatgttttctgtttttaagttttaaaccaatttttaaaaaactgttttaaaaatattggccaaacaacttctattagttttaaaaaaattgtttttgtttttaaaaattaaaaacagttttgaagttatgaagtcaaacaacccctgtaacctcttgattttctgcgatgatgaccataatggaatgttgtgctcaattcatagcttggaaaatttcaatcatatttcatctaactccttctctattgacacgcctaacaagaaggatatgatagttttcttatttcctttgtgggtagccatatggtgtattttgtttcctacaacaattagataattatatttatttttggaaccccgcaactgacaaccaaacgaaactccctctaacattttttgtagtacgtggatgtgaaccattcaccactcacttatggcgtaaacaagttttggtgtataatttgaacaacaatttatggaaaatt

SEQ ID NO: 201312 - DNA, 930 bp, Cannabis indica
ttttttttttgagccaaatttaataaaaagttaataccattcataaaagatggtcttataattttatgattaaaattataaaaaatataaaattaaaactatatatgaatatataatttgaaatttgagtatttattaataaatatttaaattttaattttatataataatccgtaaaatattattaaaaaattatataaaaataatataaacaataaaaatatatatatagttatttcatattaattgtaaaaaaaaaaaatagaacacaaattcaaacttacatataagaaaaaagtttatattaattagtccagcacgattattttaaataacataaaaatatatgagcattgttattaggcaccagtaatgcctagtatcttctctacatgtcacgttgtgattggctaccgatactccctaaaagctattatgtaatcaataatgatattaacacataaaaaaatactagacatcactagtctctttagcatttctcaaaatatatggactgaacataaaacacgtatttaaaccacaagagaagagagtagtaaatggttatggtggtgatagtggaaaacaacagattgaactgagttgagattgagatgaacatttaactagattggaataatatttagtgtaatattatttaatatctctaataagagagagaaaatcaaagcaatagatgacgctgctactgctgctagtttcctgcatacactgctctagtgctgaacccctacacccccatagatgtacggatcaaggtcaaaatggctccaccgcaacacccattgccacctcatcatcttttctttttcttcttcattttctaattttctaaacaagttatcttttatatatatatatatcttaatctggattgaataccccaaaaaaactcatctttatttatac

SEQ ID NO: 201313 - DNA, 2216 bp, Cannabis indica
ccccatactttggcaaatagaagtacggacagaagcttgggtattaacactaaagaaaactgaggacttcgaaaagttaaccttctggccagactaatataataccatttcgaaaatatatatttttaataaagttagctaattattttccaaagaaataataataataaataaataaaaaagctgttggttacagttagattaaaagcgcgcgaaaggtctcaagagacttatttaaacaaacccaactctgttctttctttctttctttctttctctatctaatctctctatgaatgttcaattgtctcccaacaaaaatagcttcaacaacttctcatgatctctttcttattatttctttaattctatataatcattgttttcctggaaagaaagaaaagaaaagaaaactaaggcaagaagaacaacaacatggatttcccaaacaaggttaatctacatttatatatttaatttttgttcttgggattaagtactaataatgattgtattatgcatgcagatcaagtattttttggataaagaaactggtaaaataattgcgttgaagagaatcaacctgaggcaggaactacttcaagctatccctcttactggatcatcaatttcacttcaagaacaacccattgatgttgagattcctgctaacgcaattcgacaaatttccttctacaagattctccaccatccaaatgttgcacggtatatttctttctttctttctctattaatttttcacttaattattaatagtaataagaatatgtaatttggggggaaaattttcagtttggagtatataggaattgaccctcaagatcattttattcgtcttggatttgagtatgttggtgtggatctcagaaaatttcaaaaggataatcccataagagccagtcacccaaagttgataaaggttccatttttatgttcttgttgtgtttgttttaatgtttttagctttttggattgaaaaaatgagcctaagctgaattgggtaacttttttgtagaggctaatgtatcaacttcttagtggtattgcttattaccattctattaatgcttcccatggaaatatcaatcccacgaatgtgctcataagttacagagacgatgacagtgatgctgaacttgtcaatttacagatcacagatcttgatttggtaattgaaaatgttttaatgtttattatggtttttgattattacaaatgtattatacgatttatgacagaattgttgatttggtacatgaatgcagtgtatacagccatcttaccaagcacctgaaatttttttggagtctaatcaattatctagtgctgttgatatgttctctgctggttgcatatttggtcaaatgctgattgggaaaccaattttcgataaagaagatgaactaggcagcattttcaagtataatcacaacttatctttgcacatatttttgactaattaatcaatttgttagtataattgaatagttaatctgttaatttgtattgtaggcttttgggtacaccaactaaacaaactatgcctggggtgattgatctggatgagaaacttaaaaagtaccaaaaacattccccaaaggtaacattaatctcttaaagatctttctctctgtttcttctccttgtttcaattcaaacatattatcttattaattatacaatgtattgtaaacacttcttgcaggacctgtctgaacaattcattgatgttgaaccagctggaattgatcttctgtctgttagttttggttttatttgttactatatataagcttattaaaatcataagatttatttatttctggtcatttcataatctttggtatgcagaaactgctgtgtttgaatccaagagaaagaattatggctgctgaggcacttaagcatcgttactttgatgaaattaaggcaaagaaactcgtggctacaccagctgctgaagtgggaagctcgtctgccgggccttctgctgcagtggacagctcggctgcctgggcatctgctctcgttgaaagctgggctgctgtggtttctgctggcctggaaagctcggctactggtgcttcttctgtcgtggaaagctcagctactggggcttctgctgccatggacaacttggctgccagtgcatctgctgtcgttgaaggttcggctgctggggcttctgctggcct

SEQ ID NO: 201314 - DNA, 1314 bp, Cannabis indica
gtgtttgtgttaatgattttaagtttttttggattgaaaaagaataagaacctaataatctgaattgggtaacttttttttagatcctaatgtaccaactacttaatggaattgcattttaccaattatgtaacgtttcccgtgaaaatatcaatcccacgaatgtgctcataagctactacggagaggatgacaatgatgaacaagtcaatttgctgatcacaaatcttgatttggtaattgaaaatgttttgatgattattatggtttttgattattttaaaggtagattagatagatgacaaaagtgttgatttgttaaatgcatgcctgcagtgtatagagccatcttaccaagcacctgaaattttgttggagtctaatcgattatctactgctgttgatatgttctctgctggttgcatatttggtgaaatgttgattgggaaaccagttttcggtacagaaaatgcactaggcagcattttcaagtataatcccaacttaccattgaacatatttttgactaattaatcaatttgttagtataatagcatatttaatctgttaatttgtattgtaggcttttgggtacaccaactaaacaaactatgcctggggtgatcgatctggatgaaaaactaagaaagtaccaaaaacattccccaaaggtaacattaatatctgcaacagctttctctctgtttcttctccttgtttcaattcaaacatatatcttattaattatacatataaacattttttgcaggatctatctgaaacattcattggcgttgaaccagctggaattgatcttcttactgtgggttttgctattatttgatatgaagtataggcttattaaaatctgaagttttatgtatttttatcattctttaatttttgatatgcagaaactgttgtgtcttaatccaagagaaaggattatggctgctgaggcacttaagcatcgctacttcgatggaatgaaaagtgtggctacaccagctgctgcagcagcgggcagctcctctgctttttcggctgccagtgctcaaacctgggcggtggatagtgcgtttttgttttcaacgggtgaaagctcggctaatgatgcttcttctgtcgtggctgtggcgggcagcccgactgcaactgccactgatgatcaagttaaactggtaaattttggtttttataatttttattttttcattgtaagtttaaagtttttttttatctttaaatttaattaaaattattatagtttttttttaggaaatagttgtgattaattgtacacatgggcccaga

SEQ ID NO: 201315 - DNA, 954 bp, Cannabis indica
atcggtttgcaacccaaacaactgtttggttacctgtaatgttgttgtaccaaattcccaggtaacgattctttgatgaagtagctgttggagtaaagaatcccagcgcaaaagttccttgtttggataccaatatagctgtgttgttattatctctcagaatttctgatggtctaatggtatcaaccacagcaaaagttgttgtagacagagaaaatagactcaaaacaactaataaggtaaccagaaatgatgggaactccatttattattagcttatgatgatgatagaagaagaggaagggagtaacttcaatctgagtaagaacaagaacatgaatttcaaaatccaaaatagaaatataaaaagatttaataatagaagaacaaaaaaataaataatcattgtttgtgggaaacaaagtgtttataggatacaagtttgagtgaatttttatcatgaaatataaccttataatgaacctgttggaattttggatgaattttacaaattaagtaggtaagtaaaataaggtaaaggaaaaagtaaatactttatttacctacttactttactagttttaggttttaggtttagttcgttcctttttcgtttagttaacttaacgacgaaccaaaactaaaacgttaaccgtacccaaacctaaattagtaggacgactaattacgttccggtacgttaactttaacgtacgtcccttaccttagtagttacgttaacgtaaactaaccaactactaacttttaactttttcggtcggtcccgtcccgtcgtttagtttaccgtcccgtacctaacttacttaacttaagggtttttggggtttagggttagggttaagtaactactaattacactttttagttttagtactcgttttttcgtttttaactaagtcaacggaacgggacgtaaaagtaaaaaaaaaaaat

SEQ ID NO: 201316 - DNA, 1246 bp, Cannabis indica
atatcatagtcactggttgcgccgtccatcattggttgcgtcgtccaccatccaccactgccggtggtagtggttgtgccgacgaccacatccatcacttattttagaggtacgaatttatttttttctattttatttttcaaatttgttatacatcataatcatcatcttctccatttcatcttcctcttctttcataatcttattcaaaatctctctgcaggtaaaaatctcttctcttagcttctgatcaaaatggtagttgtggcctcttgatctctctcggcaaaagtaagtgtacatatatgtaatatatattatattttttacacagaaaaaactctcataattttcattatcatatatatatatactgtaaaagcaaaggtcatgagtggagatgggaactgtaaaagtgcattgagccaagtgaaaaagcttttcatttctagtatattgtttgtgatttgatgtgttgaaaatatatcataaagtcaatagtcacacacttttaaaaaacattatttaaacattaatttgtttttaggttttgttttgtactgttttagggttattgtaataatggtcacatattgacaaattaatttgtttttcaaaaattttgaaaacataaatgagaaaaatttgttaaagttgttgattggagccatcacaaaaagttagttgtttttttttttttttcttattcttatatgttaatttctttattaatgttaatttgtttattatatgttaattgtaaataaatgtaatttgtatattaatttttttagtttaattttttaaaaaatatatttataatagtcttaaaaaaatagattatatatattttttataagtgttactaattgtttaatttgttttagttatacgtaagttttgtgtatgtagaaatgatgtgaatttgtgatatatttgaagattgttggagtgtttaggaaaaatttaaaattttgttagataggttaaaatatagttgttatgccgcagaaatgttagtagaattttgagataataaaaatttataataattttataatttataacaagttattaaatttataagaaattattaaaaaataaaatttaaataaattcttattgaaataattaattatttaaaatattgtataaaattaaatttaagcaatttaatttttaaataattaaaaagtaattaataaaaaaaagtgtaattttatttcaaatcatgtttgagcctatg

SEQ ID NO: 201317 - DNA, 885 bp, Cannabis indica
gttcatcaatctctctctctctctctctctctctctctctcttacttatattttatatatatcataaaaaaatattctacttaatcacctgactaattttgtgaatggtttataccaattgctgactaatttaataattaacatacaataaaatttcactatttatttatttgacaatctaatgcataactaaatttgctcaagaagatggtttaattaaaagttatgttaataatttttttttaaaaaaatgtgttaatagtaccatatttgtccaaattttacaattatactctagtgtaatttggtcaaactaacttaaaattttaaaaagttaacaaatgtacttaactttattgaaattatatataaaaaaaaattaaaagttgtaaaattcattaattagtggtaaaataataaaatagtaaaaaaaaatatttattgaggttcaaatttaattcatgctatattttataccatttttttgacataatattaatttataccaaattaatgttacacatatttaacattatcatgagtagcattttgttaaagtggtaaaataataaatatatatcatttttataggactctattaaagatgctgattatccattttgacatggtagattagagagagaaaagttgattccatttaattagtgatgtctatatatattacaacactaattatttgaattatacagattctctcttagatattaaaataattataataggtcttataatgataaaacattgaacatggttatttcaagtaatgtcgtagccgttcaaagtgttcatgagtacacactacggaacaaattataatgatcaataaactctagctaattacaataattaaaatttattaattat

SEQ ID NO: 201318 - DNA, 620 bp, Cannabis indica
acaggggatagagcaagttattagaatgacaggtgggcttatgatagtaaatttctttgaaacttcaactcatgatcaggttcttgaaaatggagttgttcaatttgatagaaaaccagtgattgtgcgtccttggtccaaggatctaaacttaattcgcctaattcgatcctttccccttatggatacatctccatggtcttggtcttcagtattggggaaacaattgtcttagtgctcttgtcattacaattgggaagccattgatgatggataaatttaccaagaacttgaattcagtttgcaagagttcttatagagatggacatagttgataatcctcctcagtttattgggttttaaatgagtatgggcaactggtcgagtcaagcaattgactatgagtggctccccgtcaaatgtaaaacatgttcgggttatggccatctaatggtggattagtcagaaagtggagaagagtcaatagagtaagaagcttggaaatagagtaaggtagctacagtgattcttgaagaaaaggatgtctcattgatatagtgcagcaggcagtcaagtcagtggataaatcagtagccccgattgctgttcaaaaacaaaaa

SEQ ID NO: 201319 - DNA, 2000 bp, Cannabis indica
aatcagtagggttttaatatccttgaccaaattaaactttggctttttacaaagaagcaatacaatattgtaataccaacactgtcaaatatatgttacatatttattactattcccatattaccatactaattaggtcttataaaaggtatttaattaatttgacaataggtatataccaatactttatgcaaatatcaccctgatcatattcagataataaatgtgatgaataaaaatatgatatatatatatatagttatgggactttggttccatttttgcttgtttttgagctgttgtggtgggaaagaaacaaaaaaagttttgaagattaggaggaaacaacagcagggcttgggagagtcaagttttgggtggcaacttaggttggttgatcaagctaaaggttttcaggctcatctttttttgtttttttgactttaggagagagtgagtaaataactgaaaaatttatgtcttagtgtttggtcttttctattttgttttgttattatttttaaggtagaaatttctaagttattgctttttagttgttaccacggttttcccagcctttttaaaggcaaggtcttttttaaaggctcacatctttacatatttttgacatcatattttgttagagatattttattagatgtataatcaaactggggatcttgagtatataaagatggacactatctccaatagaatgaggtgtcattgggtggcattttgtttagtctattttggagagtattagcttcgagctttgtaaattctgtggacaaagttttggtgtgcggattggtttgtaaagccctttgtaattgagcaaatctcttaataagttcaagcaattgaaatgtttgtgctcattgtttttagttttattgtactgattcactttgaagtttgatctgttattagttcttttgctgatgttttcacaacaggaaaaaacaaacaaattcacttcttcctgttaaaacaatataagaagtcatatgactccattttttgtctggatttcattttgatataattttgcatcaacattcaaactcaggtactaaattatgcgcaactcattttcaggttgcttttggagatggaaggagtacttcttatgctcattctatttcacaagataaagagcaatttggtaaatgctcttggaatggatatggatgtatgtatacaaacaaaactcagattgttggcatactgcaagtaacattcgatcaaacaaaaaacaaataggtagttttcataaattataatttcgtatatataaacaatcgctacgttagatgtctgttagtaaaattaaataaaattggatggaagtttttgaatcaatagttccgagaaaattattaacaaactttaaatttttaggtacaagttaatacatgttaaagttattatggaaaataaatctaaattaatctttatattttagtaactagttcaagagcaaactctcaattagcttgtctatgattatttttctcttctcttttttcagctattctcgatatcctcttgacctaccgtttggatgacattgagtacattcgaaaagatgagcaaaacaaaccccaagttctcaaataatttaatcatcaaggtaggtagacccccaatgtagataacattgccaagtgaatttggagaaccaacttcactacaaaaacagcatagctctctctctctttgaaaccaagcatttacattatttttatacatagaagattaattcaacacatattgtctctgcattagttgaccttattaagtgtaagcatcaaattttgcaacatttggttatatacaaaagttgtacttgtactgccacaaatggttctcctataattttttagctgaaatgcaaacttttatttactcttctttctaagtctaattgaaatcttccaatattgagtggcaatataattcttatgaaagaccaaaaaagaaataaagaaaaaaaa

SEQ ID NO: 201320 - DNA, 1092 bp, Cannabis indica
gcgaattttaaatggcataaaccagattggtattcaacctgatcaacccatagtttaaatccttacaaaacgctcttgttaataatgtaaagaactgaaagaatagaaggggcataccctcttaactagttactaaaagcaaaatgatgagttgaacccattctcaaattgcaatgattacagtttagggatcaaaaattcaaagggagcttcactggatcaacaagttccttcgcgcccaattcagtggcggagcaattttgttaaaattaaacttagccgaaaacaataagtcatttctcttaacattttcccagcaatcaaatgaaaagctggaatatttaagaaaataattctcgtaaaaggataaaaacttcaaagacgacactgcacagttgatccagattccagatggtaaacaatcctcaagaaattgaaattaaaatgtttaagaagacgaagaaaaatatttataatatcataataatcagactaagcatttatttaaactggtaatgggaagggaaaagaaaaacagaagctgatttgggcgttccaaaaatttcctaaaaggccatctcaaagataactatcacctctagaagttcaaaactccaaatattgaaacagaaaaacgaataaaatgaccctaaaaatggcaacttccaaccaaaaaaacgcgccaaattcttcccatacacgattaggacacggtgccaaatcgaacttaaccgggaaacaaatttcgaaaaaaaaccgaaaacaaaacaaaccaaacattcttcccataaaaacaatactcagctcaaacacagtccagttgcatatacacatctgaacaaacagtcacacacgaagaagaagaagaagaaatgggagaacgagaactagggtttgaaacaaaaaacgtaccagaacaaacgaagaaatccaaggaggcttcataaaatcaacatttagaaaacagatccccaagaacacaatgaaaacctagcgcttctacaatgatctgtacattccaatttcattacagttaccaaacttcaaagctcaaactgaataagccaatttctcggaaaacgaagagagaga

SEQ ID NO: 201321 - DNA, 1653 bp, Cannabis indica
ataatagaaatcccatattttactaacaattataggggatatttaacattggtaataattctgggcttgaatctttttggtcaaactataagtttaggggcaaaatacatattaatttattgaaactatttaaaatataaaataaaaaaattgtagtttggtggcattattttaaattttttttataatttgcagtggattttgaatcattgttgtcctctgctacattagctgctcactaatcatcctagttggcaaatgacagttaatttagtttggagctaaaccagtcaagtcaagcttctacaaccaatataagaggcaaccaccctttatgatcaatcaaggcttttaattcaattgtacatagattcatacagttagagagtttcatttttttagagattagagggatgttaaagtctccctcatgtttttgattgaggggactcaagtgaggttcaattgtaacttgtccttgtactgttttttctatacaaatgtactcatcaattcgagatattctctttgtattacaaatgatcatcaaggataaagtggctgtgagttttgctattttttctctaagtgttcattgaaagttctatgttctttactcttattttatctccgattttctggtttatattttcttgtctttgttgtcattgtttgaattaaatcttgccactattagttgagtaacagtgagaattaagggtgagtttgattcaccacaagtggtatcagagatatgtgtcaagaggatgtttcaagatccacatttaagcctccaagattgatcttcaaacatcaagaaactattggagttaaatggttgctgcaagattcgaggtggataagtttaattgaacaaatgaatttagtttatggaggattgagatgaaaacttccttgtgcatcagggaattcatgaagctcttgatgaagaggctatgaagctggttgaagacaagaagaagaagctcgaaatcgaactgaaggcacacagtgccattcttcttagtcttagggatgaggtacttagggaagtgtctaatgaagagaaggcactaagtttgtggagcaaactttcttcaatttacatgaagaaatcactagccaacaaattgtacctaaagaagagattgtgtactctaaaaatagatgaaaccaaataattaaggaagcatcttgatgatttcaaaaagattatcttggatgataatcttggtgtcaaaatagatgatgaagatcaggccataatgcttcttagttctcttcccaaatgtatgaaaattttgttgataccatcttgtatggtaagaacactctcaccatgactgaagtgaaggcagtactcaattcaaaagaacttcaaaagaaaggtgatgagggtggagatagcaatggggagggactgttgattggcaaaggaaaatttcccaagaatcacaaggaaaatcagagccatcataagccaaaccagtctagaactggcgctaagggttcagctgaaggatcaaattcaaggggcaacaatggaaaacagtgcttctactgtaagaaagaagggcatttcagagatgaatgctttgccttgaaagctaattaaagagggacagtcaacaattaggaaccagaaatcatggg

SEQ ID NO: 201322 - DNA, 1425 bp, Cannabis indica
ctttaaaatgaagattgaggaatttatatgtttcgtttgtagattaggaatcacgctcttgattcctgttttttaggataagccgttgttttctggttgaaggttaccgtggggaagatgatgacgtgtcacgtcattatgttttcatgatatatataacgttatttttgtaaaaaatttcctaatatagtatattcctaaaaaaatccctactttttatgggtgggattggatctcattgataatggaagatcaatgaaacaagtcaaagaaaatggttaaaaacttagcaaaacttgtgatccaaagcccacaacttccctttggtcaaaccttaattagatgaagcacccataattaatcaacttgcatcacaactctatacatcacagaaaaagaactgatataaatatagaagacatgaaccagtgcttcccaatcagtttcagctcgtatcgaatagcattttaccctccatctcccaaattttggctacttgatcatagttttcgaatgcatcaaaatgtgatggtatacattggttggaaatgccatcaattcactttggctctattcatgatcatgaaccttcttctactactgccatcaacttgctcgcctagtttctccaagtgggacatccttcttttccatgactcagcgggacctaactgaatcggctttggtcccatgtcagttttgttactgtgagaggactcaagaattgaaggatttccaccatcctctgaaactagcataatctgcttcaatgtctccaccacttggctcatcttcggccgttcttttgcgctcttcaatagacaactatcagctaacttggcaattcttctagccgcacttgaagaatattggctttcaagtctaggatccattatctgtccaaattttttgctttctggaggaaactgcttcacccattccaaaagtctctgttctattctgggacggtttctctccactgaccgcctgccagaaagaatctcgtacagcaccacaccgaaactccacacatcactctttgctgtgagatggcctgtttcaatgtaatctggtgcagcatatccatatgttcccattacctgatcaaatataaaaatcataactaatcagagtgatttctttgcatttgttacataagctcataaatcaaggctgccttaaatcacaaaatttggagaaagttataatgtttttagagcatgatcttaaaatatgcaatgaatcaagaacaactttaggaaatagtacttactgcagttgagacatgagtatggccagccgtcggcccttcccgagctagtccaaaatcagacaactttgcattgaaattatcatccaataacacatttgaggctttcaaatctcgaaatatcaccttcaccattaccaaaaagaaaaaaaaaa

SEQ ID NO: 201323 - DNA, 822 bp, Cannabis indica
taaaccgaccattacattaacaaaatatttactaattaatgttatgagcctacttatttatttattttataattgtctttattaacatggttttccactacctaatttgtcaaacttaaggctatagttgagattatcaaacaaacttgttcattgttgccttctgcttgattttgtgtttctactttgttaggtcagctttaatttttcccacgaggctaataaaggcaattacgtgagttctagcaccttaatgaaatctatcaaattgtgtagctactcaattttttgtagcgttttgtctaatttttattttaagtttgttttattgtttttttacatagtcaaaattggttttataggctttgttatgattttgtatgagttttatgatttttttttatacggtagaaactggttttactgggttcaaaattggtttttacacttctattttgttttagattttgttttgtattatttgttgttttgattatatttgtgagtatttttttgtgtgtgtgcgttttttttttacatttggttgactaatgaaattagtttcagttaaccatttatgttttgttatgaattttttatagggtctggtttcatagggatttactagtttgaaaatagtttcacaagattcatagattttaagggttttgtaatggggttgctccttttgtgatgttattgtatattttttattattttatttttgggtttgaaattggttttcatacttatattttatttttggatttttgttgtgcattgtgccttgttttaattatatctttgagttttttttttttt

SEQ ID NO: 201324 - DNA, 1135 bp, Cannabis indica
ttattaggtttataaaatgatcttaaccagataataaatatgcatctttacattttgtttgggatcacaaaagggttatcaaatcaaaggagtacttgtaaggaaagaatgttttggcagcgttagtttggtcaagtggaatttgttgtgagctcatattcaactcaagaatatagctaggaacctcatgattgcaatttcttttatttttgtttattaaataactttgatatatatatataaaattattatttgttcttatatatatatattggtgaatgtcatgattgaaatcgcctaccatactttagatataatttcgtttttgtggagttatgtttttgctttgtacatcagataagcgatgccttgtttcatacattttccccatgtatgtatgtataacatattatgttgtatacacttagataattatccgaattcgttatgacacttattttagggatttgttcatttatatatatttaaagtatatattttttttatttatacggtagattggtgttgatcttaaatttgatcaaccaacaacagaatcatatatatgactaaaatttctacgtttacacaaatagaataagcaaccaaaaaagacactaatttttatagaggtttaaccccttagttagcgggtaataatctatttcccttttggttgtatttattagagataataccactcagatcacaaatattgaggattctagagtgactctcttaagattacaatagtgagaataagaggccaatctcaagtaaatgacatgagggagacttagtctcttctacactgataatggcgtgtagaagagaaggtgagctagggttttgagtgtttgaactctatgacttatgagggtaatagcagtataatgaattcttttgagatgttgcaggaacatagtgaaaccaaaggaaaatgaactttcagatgcacaaggggaaattcgagttaagacaagaggagggggagtgcctcccattcaaaatggataaaatactagcttggaatgtccaaatagccaacagccatcataagcaaagtttgatcaagtaattgattcactctcaaaatggtggggcttgttggtctccttgagcaagagtcaaggct

SEQ ID NO: 201325 - DNA, 1540 bp, Cannabis indica
gttcaacaaatataataaaaaaacactcaaagttcatgacaagttcttgtggaataaatttacaccccatctgtgacagaagagcggcatgtggtcatcatctactccaacgaatggtagatccaataacttatgttcgatatgctctatgacgtacatcctacaatcaccactgcattagtagttaaacgaaaaatttagtaaaccacaaaaaataataataaattttttaatttaattagtaaacgtattctcaaaaatgtacttaaattacctcgattttgtttgaggtacaactttattgtccatgagatcccagtcgaatgttctgacctggcttttggaggctgtcatttgagggaccatcaccatgtaatgtgtgtcaaataaaccacactggtccaccaatttggataatatcttgcaccaagcatccattagtgtcttcaattcgtcagcagttaaagttctaatacttgaatcaaagacgaacacctttcacaactcaagattcgcctccatagccaaccaatgtttctgtcagtccaagaagatggccatgtatatgcactccatatcctttcaagatggcatgaattggagtggatcaccacgaacaatttccacgatggactcatcccaaacaacgccaacgtggttaatattttccttccaagcatcccatcgacctttcaacgatacacttacgtgggtacaactctaggaagaagtgttgatgtctcctcatcatatggaaagctgcatccaaatgatggataatttatacaaataagtcatcacgagcacattagaacattaaacaaaataaaacaaataacaacagtaaataacaacaaataatacttagttaagaaacttacatcattagaaagccattcacggggagtaagtagcttctgaaaccaagccacgccatgtacaccagtgaagacgtcactcagatacttgtttccaatggctcccactaaccaattttggaaactatgtagtagcttctgatcaacgggctgaagtgggtcaacattcacatgagctatcgatggcttcatcttcttcttcatttcagtgtactcgtcaaaccacctcggtctcttctccaccggtgttggaatggtctctaaaacttgtacctctaaatcttgtgtatctctaatggacatgatcaacatgttctgaggtgtatgcagtatatcttccacatcatcaggtttgtaatcattgggaagattgaactcatctcccaaagagatggggtgtagctgtggctctgcctttgtattggaccttctcggatctcccacaagtgccaacagggtcttcaagtaacccataatctttgtctgccctttcagaatatcagtctggcctagctttaaagcaagttgttccctctcaacactatccattcatgccaatatggcagaagatattggttcttgaggctgtgaagtgttggacatagatgctgactgcggcatcgatgcaaacagtggaacagaacaggcccctgatggtagag

SEQ ID NO: 201326 - DNA, 909 bp, Cannabis indica
atcagccgaatgagacattttgacctcaagctaccatggctagtcagtataaaagaagccagaattatttaaaaaattaacagttatactctcaaaacaagtaaaataacagaatgaaaaactggtatcctttgctctcgaaagtttacagccccttgagctgtgaaacaaggccagttaaatttgtccatttctcaaatgcactggcagaatccacaaatgcaattttagaggatttaacatcattttgagtcactgcatattcaaaacaggaaaacaaagttaacccttacaagcactataaacatcttcaataagcatgagacaactttggaatttagtagtacattcaaatttgtttaactcacccgatgaaatcaatgatgataatgatgaattgaaagtatccacttcattcttctcctcaggaccagagctcagctgttgaatagatacacaagacattcagaaaagctaataccatttaatccacaagaaaatgaattttatgctagtgactggctaatgtgaccttagtgaaagctacattggcattcttaacccaatctgaattagtgctgccaccaagaaccgaacttgctgcagataaatcattgttgtcaatggcttggcctactttgctcagcttgtacacaacatcctgtaaatatcctgttccaaatcattcatgctcatggtaagcctcatacaagtaagaccattcaaggttgaactttgtggaaagatagggcagtgtgattctgaaaggatctaatgcattgtatttatctgatttacaagggaaatgaaagctagctaaacagatttcaatgacatggtttatctacattttacacttgccaagctcttggagctcaattaaaagaattccttatagcattgcagttt

SEQ ID NO: 201327 - DNA, 2538 bp, Cannabis indica
tttttttttatttttatcaactatatatgataaaatgagaaaatatttaccctgttagtagttgagaaagctctaccaaaatacagctcattggtacttttactatggacacagtcataattttaagtgtccgaaattcatgcaatataatcaaacaatgatgacagccctttgtagaaagcatcaatattatacatctagtaccaagaaatcataacttcagcatccttttttttcctttttggaatttaatctggtaaatttttttggagtaaagttttaattcatgttcttgtttgaatttgtgattcttatgagtagttataaatcttaaaaactaatttaatatgaatctaattcacattacatgtataattgatgataagaaaaaaaaaaggctatttaaacttgtttattcgtacaattgatgttactttttagaaaacattagtacttaaacctattggcctaatactgcttttagacaagattattataaaagattttatagatcttattatgagaatcttattgactttttgggtgtaagtatattttatttttattttttttttccatttgatttttttgattaattatcctcacttgacaacaaggacttttttgctagacatatgagaacatagagaagatttccataactcctaagcattaattcgtttcttttggatttataaagttaataaaattattgtgctaaatatatattagttttgccaaatcatcaatttatttttatttggaaaacagataattatttttaaagaaagtcaaatttttttttccgtcttccatactggaaagatctaatggttcgacattgtttagatgttatgcatagagaaaaaaatgtgtgtgacagtattatcggtacctcgcatcatatttctggcaaaactaaagatggtttatcaagtcgtgtagatcttgttgaaatgagaattagacaatctttggcacttgaacagaaaggtaaacacttttgtttgcctcctgcatgttacactttgtcaaggaaagataaagaaattatttgcaaattattattagatatgaaagtacctaatggatacttttctagcattaaaaacttagttaatacagctgaaatgaagctaatgggtatgaaattaaacgattgccatgcgtcaatgcaatattttcttccaatcgtcatccgaccggtcttacccaaaaaggttcgagagtgtttgactcatgttttgcattttcttcaatcaactaggcgggaaagaattagaaatgagcaagttggatgcattacttgaggatgtagtcaatactttatgtgaccttgaaagctattttccaccattattatttgacatcatggtacatttgatgattcatttagtgtgagaggcaaagctctgtgggctagtttgggcaagaaggatgtatccatttgaaaggaatatgaaagtgctgaaaagctatgtgtgtaaccatcatcgaccggaaactggtatggttgagtgttatggctggagttgatacaattggaatcactaaacccagaaattgctcagatgagtttgataaaggattgcgagggaaaggaacaatggttattgtatctaaggcagagttagatcaagctcaattagttttaatgcacaataatgcagaggttcaaccatatacaacgttagtgatctatttttttacacattgacatgttagaaggaccaagcgacacatgtcctgcatttttggtacctaagtggaggtaaatgtcccgaacatcttctgtataattaatcatcatctttaattattgattaatcgaccagagtgaaagacagagcatccgaccaggtagaaatctggcttgccgagctacttacaaggacttaattacttcaatgatcttgtaaagtcttggtacgaggacaatccctataatcgtaggattgagttagagaaatatgtaaacctgttctagttttctattttgtgtatcgtgattatgtaataaatgtaatttcctattttatacattgtaagaaatgggaaaccatccctcatgtattatatccctataaatagtggcctagcctcactatgagggggatcgaaagaattgctagagagagattgtagagagaaaatattgatctaagagaattggtcagagatcagttgaaagagcttttagagaggaaaacacttctttctatctctcaagttaatacaatataagggttacaggctattcccaccctcacggggccaaacctcttaaaaattcagtgttgtttattactttatcgtttttgctctctttttattatatcattaatggtttaataattgaatcactgttgttggctaaaagcaaggtcaacattttggtattttcattgaaagaaaaaaccaatgttttttctatcttaagttttaataggtgttaggttgtttttagtattatttttaggttaatttttgtgtatttttaatttaatttcacttgtgtttggagaaattttacagttt

SEQ ID NO: 201328 - DNA, 999 bp, Cannabis indica
gttgtttctgagattgaaaaataataataaaaggaataattttttttccctttaatagaaaaaaaaaaaaaaaaaataaaagaaaagaaagattttactttaagcattcggactccaaaggctccacaaacgagaattcaataaccccaatacgtccggcaatacctttctagccaaacccttgtggtcattcgccgtcgtcattgtccgtacagataccgccacgtcatcgctcacttccgtgagctgctgctgctcacctttgacggcgccgttttggctttcatcttcaaacttttcgttcttcgctgctggagcatcgacaacagcaacatataacggactttgactcccatgactattctcctccggcaccggaagcaacgttggttgtggcggaacatcagggagtactagagggctctggaccagctggtgatgatcgcggcggccgagcttgtcccggcgtttgcctcggccgctgttgttgttgttgttgttgttcttggacttttcaccgtgagaaaggtggtcttcaaaggcctcaatgacttggtgaatgagttcgcggttaggggaggagtcccacctgaaccagtagctggtatagcagtcaaagcagtcgcaatcgaacataggaggcttatgcccaatattattactattattattattattattattattattattgccagaacctttctttgaggatttcttctttgattctttggtcaccaatgaagaagatgaagatgaagaagaggaggttttcatggacctggtaatcatataagctaagacttctttgtcttcgagagagagaactgaagccaaagctagaatggcagctggaagaagcttcaaaacagagagaatttctgtgtcatttgatgaagaagaagaagaagatgatgagtttggagatgggtaaactttacccttgttctttatcttcatggtgactactactaggctgtgggtaaggttagatgaaaa

SEQ ID NO: 201329 - DNA, 1083 bp, Cannabis indica
atgtgattattttgaattggtatttgtttatactttctagaaaactcaatataatgataagaacaaacataaatatttatttatttttatttttttaaaaagaagtaacaacacaacttttgctgagtcaattcacactccaactttttgcaaaagataaattaaatttatttgatagggtaaattcaaatattcaaacaagtgttttatatatgcttatttcaacaacttgatattcattatatttttatactctttcgtacactattaggattctttcattatcaataaacatacaaacaaactaactttcatttaaaaagaaaacattgaaacattgtacaagaaaatgtcaactttaaccaattcaattgtttaatatttcgtttttatatataaaataatatttgagtggaaaaaaaagaagacagaatgatcactataaatgtacttaatccatcctaccaattgatcatatcacctactaattatattcttcattctttcctaggtactattgctttctctcaattttaaggtttttctcaagaaaaagaaaaattatatttttttttgtgtaaagtacataatacaaagcggattctgaaatatgttgagctttagatttttttttaaatatgtatatttttaaaaaatatactttttggggtctttagactaggtgagctctaagtgcgggtcaaacttgcctcagcctaaagtcgatcctgtatatatgtaatatgttgtatatctatggcaaatataaaaaaaaaaaacaaaaacaaaattgacacatatatttgtattttttgtagattctagacagcaaatatggaagaagtgaaattgatcggttcgaaaaggagcttattttgtacgagagtagagtgggcattgaagctaaagggtgtagagtatgagtatttggaggaagatttgagaaacaaaagtccaattcttcttaagtataatccaattcttaagaaagttcctgttttttactacttgaactaaacctatagctgagtctttagtcattcttgaatatattgatgaagtttggaaagagaccctttagct

SEQ ID NO: 201330 - DNA, 559 bp, Cannabis indica
gtttaacgaatccgttagaaaaaagaaccaacgaacttatagaaaacgtgacattagggactattatagctaattttttatgttggagactaatctgcatcaaccctaagtttttggggacttttgccctaattatctttttttttttcactttatctcacatcattatactcatcattttcttatattattttctctctcatcatttttctcacataattttctctctcatcactttctctcttctcattttctatctcatcaaggtttgggtctggggccgaggtaaggggttcggggtctgggtccaaggctggggtttagagtccagttttcagggttttaatccaggtttgggtctgaggtttagggtttgggtctgattctgggtccgagttcgagatcggggttcgagcccggggccaggtctataggatccagggtccaggttcgagttcggcaccgggtccgggtctgacgacgagttcgagtttgggttttgtgtctgggattgggttctggggtctatggtcggggtctggcgacttgtgttttaaaa

SEQ ID NO: 201331 - DNA, 812 bp, Cannabis indica
gaacaaaagttagaaagtacacaacacaagaaataaaagttccgtgatttgagaaatgctaaaggacactcatggtgcttagctcgctattggtgcagctcaatattaggccccacttgttttactttaataaatattatagaaaatcactaaccaattataggacgacacttatcgtggtactaggcatcatgggtacctcatggcaatgctctttatatttgtgtgtataaatattaacaaaatatagatacctctttatctcactttttgtcaaatgcaatataatgtactaacttgtcgaaaatataaaatttgaatttaacttacgactttgaagaaagcttgtgctctttgcagggttgacaacatcgtgcagcgttttccagactcctgcaggcttcacaccagcttggctttctttaaatgcctatgaaagcaagaagaagagacctaattaagtataaccaatgaactttttcataaaatatagtcttaagggagaagtatcagagaatcatgtaacagagtatggagtatttattgtatgatccctacaattgaatggaaaaactttccctgaatgaaaaggcaggaggaggagattatactcatgaagaggaaaatctagtataaacttatcctaacactacaatatccgacatcattttaatttaaaataaccaactaaaacaaaaaattagcaaggttatgactatggcatagtaaaatatcagacaacattaacacctgcatgcgagtccttgccaattcaacggggtagcaagtaacacaagccaatgaacgagcaa

SEQ ID NO: 201332 - DNA, 1627 bp, Cannabis indica
atggttaccaaagtagtcctacaaattcttaatgaaggggctgatgccactgcacttaaccataccattataacactcatcccaaaaatcaagaagccacaacgtatcactgactttcgtcccattagcttgtgcaatgttatctctaagttggtcaccaaggttatagttggtcgatttaaacatgtcctacccatggtaatctctgagactcagtcaacctttcttgcaaatcgacaaattcaggacaacattcttgttgcttttgagcttgttcatgccatgaaacataaagaaaaaggtcgtcggggtattgccgccttaaaggtagacatgacatgagtaaggcttttgaccgtgttgaatgggactttctaagaggtgtaatggctaagatgggttttgcttcagcttggattaatttaatcatggcctgcttaacttctaatagcttctcttttctcttgaatggagaggttacgggtttgatattgccaactaggggacttagacaaggctgcccactctcaccctatctgtttttaattgtctctgaaggtttctcacggctttggcaacacgaggaaagggtaggtaatctcaatggctttgccatcactcaccaggctgccccaatatctcacctattttttgctgatgatagcttgctattttgtcaagcaaatgaacgttcttgtatggccatcaaaagagtacttgatacttatcaccgggcttcgggacagctgctcaatccagataaatcagtcatgtctttttcaccgaacaccactctcggcatacaagtcttctttcgcaggcagcttcatatggccatttgtgagtgccatgagacatatcttggcctacctgccttctctgggagaaacaaaaaagaactctttagtggagtaaaggagaaaatctggcgtcttatgcgaaagtggagagagcaactctttttgggtgggggtaaagagattctcttgaaggcggttgttcaatccatcccaacttatgcaatgagttgctttcgattaccagtgactttctgtagccaactagagtctatgatgtccaatttttggtggggatccaatgaaaatggttcaaagattcattggcggaattggaaatatatgtgcaagactaaagttaatggtggcttgggtttccgctctttcattcacttcaaccaagctttgctcgcgaaacaagcatggcgaatcttacaaaatccatccaaattctctacgtagcaagctttttcaatgtatgtatcatcctaataattctttcctggaagcccatcgtggccattcaccatctttgacatggcaaggcatattatggagccgtgaacttctgcaaaatggtctgcactggaagatcggtgaaggtcgttcagttttgattgggcgtgatccttggatactaggtcacaactcttttctcccaatccgatatgatggacctgccaatggagtagttgccaatctcataacagagaatcgagaatggaatagccaattgttacaagcttatttttcagttgtggatgttgaaagaatcatgaccctgcctctcagttttttccctaccttagatcgtctcatttggcatcatc

SEQ ID NO: 201333 - DNA, 1154 bp, Cannabis indica
ttgtctttgttgactaataatttaatttttcaatcaaatactcattgtaaaaatctcaataacccgattctaattattaagcttcttaatgtcgccaattacttaagcgtcacctattgcacgtgatttggtgaacgaaataccaaataagcttatctcaccttgtaagcttcacaaacttaaatggtgcacgacaacaataagctagctcttattttattatgagcttgatgaaccttgctctaataccaccttttgagtaagaaaattacaacactttattatcattgaaaagtacttgggtaattgactctaggacactcttacacttttacacactttggactctcatacttacacttgaactatcttactcaaacttgcattttggcacgaaccatacttctatatatataggctacaagtgaagtgtctaagtcttttagaattttctaattttttaagttttattcaagttttctattatctctaaagaagtcttgaattatctatacttagcctgagtaattctaagcttactccataactttctagaatattttaattctttcctaactagtacttgacattatagatttggcgatgactcttaagagcatctttaatttttcaatttaaatagagagtgtgccttaaaaaattaagccttaattattataaaaatagctctgtataataaaaaataggcaaagagactttttatttttttattttttttgtcttattttttaatagtatttaatcaaaagcattattagttttttattattttattaaataaatttatatttagcaaatttaaattatgaaatattattaaactaatcaaaatatactcataattaaagcaaaaataattatttattttaatttttaaactattttaactaaaattgaactaaaaaatagataaaaccttagagatgctctaacaacttgaagattcatgcatgatgcatagataataaatcagtgcatgtactactgctttcttgccgtgtagtttgtctacaagttttaaaatattatatactaattcttcttcaataacttataattattatttattatatgtgaaaaaattgtacatatatgtagcacaataatcatatgttgaataataagcgtataaa

SEQ ID NO: 201334 - DNA, 799 bp, Cannabis indica
ctattttactgagacaacaattttaaaaaaataaagatattgggatttcgaacaaaatgatactgtattagaaaacatggtcactaaactctaatagttatttctactcgctatcaatagaaataaataatatttattattatacaattaatatctcaataaattttgaacatttatttttgatttgagtattacatttttcgtgttgatcatctcattatataaaaaataaatgattagtcaaatacataataggtcagacagaataattacaatcattaattacatttaaatgaaatgaaaacgttaataaaataaatttaagaacaattttgattgttcttattaaagttcgaaatgggtgtgacaatattgatcgcaaccgttcatatactagaaacatacgaacttgggggttcaaacgagttattgtgtatgttcgatcttgggaccaactaaagttaaggtgaaaccttaacaaagggcgctggagagaaacatttggtctccgcatataatcaatatatgttgcaacttttgataacttctctctatatcctgcttttattctattatattatgcgatgcacaacatgtgactagatcttgtctcggtcacaccttcttacatgtttctatcatgcaaggattattgcctttttggaattatagtttaacacgttatccttcttctaagagcaacatgtcaatgtgttaattaaatacgagattgcactcgtcatttaaatgaagaaatcctctgataacaaactatactatccaatcccatacacttaac

SEQ ID NO: 201335 - DNA, 3050 bp, Cannabis indica
tatatatataataaaatataattatgatgtttttgttaaattactttgaaaattcaatttaataagaatgatcaaatctataaagtgtaaataattaggcatgtagttaattgctaaacactttttgtttctatttttaggcacaacattattacaaggaccacattaaattaaactaaggaaagaagtgcattttctttttattctttatcaacaagaaagaagagtttgatttggcaaatttctctacttaggaaataatcagcctagagattttacagcaaattgaacacataattattcccttattctatgacttttatctaacacatccaaaggaattgtggttgagaagaagtatttactaactagtagtttacaaatctttcttcaaattgtttgtgtccttcatgtttcaacactcagaaattgttaaaaagtaattttgggttaatttggatttgccctctgaattttgacatgtactaaatcatgctattgaacttttcaggtcgttaaaaatttctccaaaactattgagattgttagatttaaggatttttgtctaattttactaaacaaagtctgatgtggatgaaaatttagggggcacaattttgtacttttaaaaaattgaggggcatgatttagtagatatcaaagtttaaggggcgaaatttagtatatggacaatcgccgtattagtaaaattgaatgaaattggacagaattctttaaatctaacaatgtcaatagttcggaaggattttttaacggcctaaaaagttcaaatgacatgatttagtacatgtcaaagtttagagaacaaaaatcctaattagctttaattttcagtaatgatatatgaattcaaaatatacattaacatattacacaaataataggacattgtttctaaaaatttggagtctcatctaaaagaaatgtgattattttctttgtttatatgcacattgttttttagtttttcattcattttacacttccattccaaattttgagtagtaaaataggaaagaggtgttagaatttagaattgtatagtaagatatatggattctatcttaaaataaattggtaataagaataatagttcattcatcttatatattacagtttattttcatacactctaatacactctcctcacgttgggtcttaaaagtatatgtataacgaacgctctttaagagaccacaggactgaacgtgacatttgaaataatcccacccggtcaaattgagaaatttgtgagtgtacacgtcaggaaatatatggattttgaaacaagtgaaaaaccctacattgaaaataaacacatattagccgaaaggtaccaaatagaagttaaatgggagatagtggaagtttttacacttaaaggtaccatatcatcttaaaatttaggattacatggtaaaatgcatgaatcccatctcaaaactacttaacaacgaaatgaaagacaatttatttccaaacaacgtaaggcaatattactttctatttttgaatatatggacaacattgtagtattatgacaaaattaaacgaaatatgcatatgaatgatgatttattttcatcattaacttacttatcttgtggagcttcatatatgaaatatagaaacatatatatttgactatacattgcactataatacacctttattttctatatacgtacattagcataccaagcaacttattaatcatgtttttattagcttataattatcatatatatccgtacatggtcatgttattattacaaagtatattccaaactatgatatttattatacatcattttcttgtattttcaccaagaagaaaaatttaacaagttgaaattacataaaagccctcctcacacacacatgacacacatacatacacctctatatatatagtcacgagagtcacttacaaaacccaaccaaaccacacataacaacatagtgatatacattagagtccatctcacactctctttgtttctaccagagattaattttagccatgatgaaaggcttcttaatctccacactagctgtggtacttgtattactactaagtacagcccaagcatcatcaaacaacaacaactgttggaagaagaaagagcaaggctcaaccttagaggtgttccacgtgtacagcacgtgctcaccattccgaccacctgaggccacctcatgggaggagagtgtcctccaaatgcagaccaaagaccaagccagggtgctttacctctccagccttgtggctaggaaatctgtggtgcccattgcttcaggaagacaggttgtccagagcccaacatacattgtcagagcccagatcggtacacctccacagaccatgctcctagccatggataccagcaacgacgctgcctggattccatgcgacggttgtgtcggctgctcttccaccgtcttcacccctctcaagtccacctcttacaaacctcttccttgttccgctcctcagtgcaatcaggtacattttttacgtttgaactctgttttccacaattttttttaatatatcacaattttttattttttattttgtggtttgtgtttttatttttttagtaaaaataaataaatattttttaaatgaaagaaatttgatgttgtggacctttatctttttctatagagaaatgctaaagggcaacactggtgcctagcaccctcctacatgtcaatatcgttattgatgcaattaagtatcgggtcccatatagtttaatataataatttttatagagtatcgctagccaattgcaagtcgacacatttagaaggtgctaggcaccactagtggtgtccaataacaatgctcttttctatatggggatcgtaatggggggttttaaatttaattttgtaaagtgaagatattaaattattaatgctatgatgtagggtagttttgccaacgaaattccactaatatcttctcctgtcattttgcaaaggcgacaaaagtacttaaatagatgctcttatgtaac

SEQ ID NO: 201336 - DNA, 625 bp, Cannabis indica
tattattattattattatgtgtggaagggaaaagaaaccttaccatccaagattttcaaaaacagtacaacaagatcttgtttggcatataattttgatgtagacaattaactcactttaaagtgacatctaatttctttttatgaagaaaagtgttttttcattattattttattttatttatttttgcatatgagtagacaaattggattaccattccaattataaataactcaattttcagttaatcacggctttaataacagtacaaattattctactccatccatgtgtctctctctctctacatgtcttattttaatatcttcaattattttcattttgtaatttaataatattaacaatcaaacaaataataattgcacccaaaaactagcaaactacatgacaatgacccttaatttcctgcaattaattcaacccaaaagttttcaattaaaataacttagagtgtaaatatttaaatttaattttcagtttctaataaatatttaaatttatttttttacgataataatatttatgttatatttttagaatttcattagaaaactagttgttaaaaatatcaaattattttctaagtgtcatttttttattggta

SEQ ID NO: 201337 - DNA, 723 bp, Cannabis indica
ttaatcaggacaagtatgccctcccctaaacatttccgttttagtcgctttgtgtgtaactttcatagaagccttcaattttgtgaagatctcataaactgcttgctgttgtttaatctgaatatctgatgccttctaaatgctgtttgataacataaaactgatcgagcttctttgaacacacatcttaccaacagttgtagagattttgttttctttatgaactttcacttgtcataatccttaaatacattataactttttaggcggcataatccttgcaataggcagtatattattgtatttgtgtcggtaagtctttttggcagccctattattatttacagtcgtaacgttcaaaattttgtaggtatctaaatgccattcaaaccaatgctccccatcttttacgctacttggccactgctttcgttgttaacaagagaaggagacaaaactttaaagactttatcaaagttattcagcaggagcaacattcttacaaagatcccatcacagaatttctagcatgtgtatatgtcaattatgattttgacggtgcacagaaaaagatgaaagagtgcgaagaagtaagtcaatcggccccaattcaaccacaaaattagtgttccattataattttcaactgcatctacattcttaggagcatactgatttgtggactttgcttactgttacattttgacaaatgtaggtaatact

SEQ ID NO: 201338 - DNA, 972 bp, Cannabis indica
aaaaataatctttaaatgtaaaaatgtgaaaaatttacaaaaatgagtactttatctaattattccaattttatatatatatggcatctaaacactaaatataatattttttaaaaaaaactttaaaatatgagataaatcattgtaatttaaaaaaaaaaatactataaaaaacttaaaactcatatataaaaactagtttattgatgaagaaactaattaaaaataattttgttaaggaaattaattaagaaaccaaatactttaatgtaatcaaaattagtttcttaataaaaaaaccaactaattcaaaataccaaaactcatacaagatttgttcattatgaaattggtttttcagtttaagaaaatggtttctaaatctccaactacagcagaatatgttcgatcttttggagttttggtggtggacatctcgtatccagggtttgtttagtcgtcgatcgccggatgtgtcatgaatgaaggtcagtaggtaggtgtattgttgaaaggtgaaacaggtagggtacttaaatggaggagaataaataactttgagattttttattattttttgaaataatttatttaaacattaaaatatgtactttaaaaattaaatttatacataatacatcatagaaaataccataaaatattttaaaaagctaaaatatgtcataaaaagtagctaaatataaaagtggatatttttgtaacaaagtttacatattgagtgtcatttccattatccctcataacccaattaatttaagaaattaaaaaaaatatatatacaataatataacaattttaaatatttgtgtggttatgttgtcttaattgttgattacttataatatttttaatgccacttgtcaattatttacataagtgagtgtaatagaatttctaacactcttcaatgccacctctccattataaatatatatatatataaaaaaaaaa

SEQ ID NO: 201339 - DNA, 1093 bp, Cannabis indica
ttaataattaccaatttgtagtggatttttgatactagtttttttttttttgccttcaaaacgtgataatattctcttaacattcaggtgaggattgcattggtcgggaagtatgttggtctaacagactcatatctgtctgttgtgaaggtattatatatgcacttgtctgttcatatgtacattttattatagcctattgataaatacataattttttctttttccgagtgattttgataagctaggtctctaattccaaagaagctaagtcacagggtgtactaacaatgctgaattgtgcctgcaggcccttcttcatgcttgcattgcctgttctctaaagccatcaattgactggattgcagcttctgatctggaagatgattgtgctgaaatggtattgcatagaaactgcaatgtctgagtattagtggatatctctgttaaatttatcttacctaaaactaacttctctttttcatcagacaccagaagtacatgcccgtgcatgggagacccttaaagtaaagcctttttactattctgttgaataatttaccattttgcatggctttttcctgtaaatactgaatctggagtggcagtatcagtgcgattgaattcattatcaaggtgtagaacttttatccttgtacagaatgcagcatgcgtcttggtgcctgggggttttggtgatcgtggtgtgaaaggcatgatattggcagcaaagtatgctaggcagaacaaggttccttatcttgggatttgcttgggcatgcagatatctgtgattgagtttgctagaacggtatgtgttggtacactctctcatcactctcctctatatatatttgaaggaaaaaagataaagtagaagaatcacaggtagcacttttaaaatgacttgcttaggttttgggtatggaaagggcaaacagcatggagtttgatgattcagagtcatctcagcacgttgtaatttttatgcctgaggtacacattactgtgatgcttctcatgctcttctgaaaataaaatatgtaaagtttaaatgcttcttagttatttcattattgtttatctacattag

SEQ ID NO: 201340 - DNA, 947 bp, Cannabis indica
tgtcatttgattaaacttaggcatcaaaaagtacaagtctaacacatttttccactcatacaacgtccttgacgtcaagatgtcaacctgagcactggacgtcaacctgggcggcggttgctaaacaactttcagtaaaatggtcgtaactcaccaatattactcctattcatgcaatttgaagtgtgttaatttgaaagttcttttctagatctttttacacatagctcacacagatttcaattcgaaaaattgtccccaagtcgaagtgtgattttgtctgtaaacgacttaaaaacgatttgatggacacgattcgagtttcaaaaattgatgattatcatccgaagtcatttcaaacattagatcaccatcaatagtcaagattagtctataattatttttcatattttttgtattattttattaatattttaatagattttcttgcctataaaagaagagctccactagcttatttttcacattctgtaaaagtcctataaggtcagagcttctctctctagaaatatgagttcttttcttagtcgattctcttgtaattcttgtgagcaataaaaactcgaagtagacgtaacttcattaccattgcgacatagggagtgaactattataaattgtggtctctcttatttaatttctttcatctattacttttcttgtcaatgtagccagacgatgttggccaatttttagtttcaacaaatagtcattttcaccaaaataatgaaaaagtcaatctgctaaaataacattataataaattaaaatacaaccaagcaaataaatagaataaaaattatttgcttctactctattttattacctccaccaaccaaataccacataaatatagtcccatctgaattaagatggcatatggttagaggtaacaaagtggattgaaatggaaagaaaacaatttt

SEQ ID NO: 201341 - DNA, 851 bp, Cannabis indica
attagtactggagctagtattgtaaataactgaatttcacctatgggtatatcataacattgtcttcataagtcaagattttgaggtggtgctagttaattggattgttgctcgatgttgaaatttgcataatagtgtaatttttccattcgtgttatgctttttcttaatgaaaaatgagcttggggcatctgcattgttcttctggttgcaatatttgtcaacttatgaacaaggatttattacaatccactagtttagtttcatttctcatacgcatgaattgttgcttatggccagctgcgggatggctcatcgcatcagggcactgttacatctatggaaccaaacgagggcacctttgtgctgcattctgagaaaacaaaggtagcatattttagctcattttcacatattttagctcattttcactatgtactgcatatgtacacaactgacacaaggaaatatagtgtattctgttaagacatctttgccccgaatgttgtcttttgtaatagacggatgcttagtttatgatatattgatatgcatcttctcttgtacatgtaaatgtatgcaatgaactgcaatttctttatttctagaagggtgatgtccataataatctattcccctcctccttattatgaattttcttaacagaatggaaaaacgaagccagttcatcttgttgatgttcctgggcattctcgtcttcgacctaagctagatgactttttgcctcaagcagccggtctagtttttgtggtggatgctttggaatttttaccaaattgtcgtgctgcatcagagtaagatattatcacttgtttccttttatttctgtt

SEQ ID NO: 201342 - DNA, 1447 bp, Cannabis indica
taacctgaagaaaattgaaacataaaaacagcaattagtgaattgcattaagagaaataatgaataaaatcagcacagaaataataaccacaaacttcaatatataaaggtaaaggtaagaaccttggccaatggggcaaggcaattggtagtgcaactagcattggaaacaatatcgtactctggcttgtattcgttctcattgacaccaacaacgaacatgggtgcatctttacttggggcagagatgataaccttcttagctccaccctgcaatagcgaaccaattcaaattcaagtctatattaccaatgaaataataaaaagacctaaataataaatcaattccaaataatacaggttccaacaataacaatatatgtcaccatagtcgtgatagtctaattctacctaataagtagaaaattaagattaaatcattaaaagaaaatcgaagcaaaccttcaagtgagcagcagctttgtccttgtcagtgaaaactccagttgattcaacaacaaagtcggcaccggtctcgccccatgggatttcttctgggttccttcatatacaaaaccaaaaagattagccactcaaaattcaaaacaccagcacccattgaaaaatcacacacaaacacgacagatctgtaaagaaattagatcagtacctgacaccgaaaacagtgacgggcttctcaccgaagagaagggtcttagagtccttgaccttaagctcatgatgcttccatggtccatgaacggaatcgtacttaaacatgtatgtctgaaaaacaaaaaacacatcaatcatttcacatttccataaatcaaaacaaatacaaaacaaagcaccggtgtacatatatatatatatatatatagatatatataaacaggtgtattactcaccatgtaatcagtggtgataaatggatcgttaacagcgacaagctcaacatcgtccctctggagagcaactctagcaaccaaacgtccaattcttccgaaacctacacagcatttaaacttctcaatactccatttccaaaacacaaacatacataatagaataaaaaatccagatcaaaccattaccgttgattccgatcttgatcttcttgtctgatggtgctagtcaaaacaaaaaaaaacgaaaacgaaaaatgtcagattaaaaaccacagattcaagcagaaacaatcaaaacagcacgatcgattgaagaaaagctcaacagtaagaatcgttacccattgtaaactgagaagagagtgactgagatttcgaggaagatgaaatactgagagaaatgatagtgagaagaaagtgtcaatttgggggttatatttaaaggacccaaagacgcctttgggttcggtcccagcggttcgatcacgtgccatccatttttttattcattaaaaaaaaaaaaaaaaaaaaaagtt

SEQ ID NO: 201343 - DNA, 1056 bp, Cannabis indica
gaaaaaaaaacaaaagaaagaagaagtgtaagaatcagtatgcatggaataaacaaaaaaaaaaaaaaaagaaaaaaaaagaaaaaggaaaaagaaaaaagtaacagacaaatgataagataccatcttccacgaatcttcctttgctacatcagtctcacttaaaagtactatattctcaactcaattatatatatatatatatatcagcaaaaactatacatattacataaatatataaatatatattatatatgtagctttcaataatgaatgaataatcgaaacaacccatgaactctcttttgagtctttgactactagcacctaaggtttcatacaatacatccaagtaaaaaagcctgtaacacaacaaatttaagacgaagttaattattagagcatgggtaacaacgtaatttcattataagctttgtgatttccacgtttttgtaatacaaacaaattacaataagagcatcattttttgccctaactacggaaggtacgtaaaaactaaaaggctataaaaagttagatgccgttgtagccttatgggatttggaatatctgtattgaaacttacattttccaaccaactgaacaaaaaaacaaacaagatcaaagcaattatattcctcaaaagaatacacaacctcacatatcaaagtattattctcaaaaataaaagctcctctttcttatcgtattcgtaacattatttttttaaacttttaattttgcagtcattatatatataattagttaattgacttaaaaaagtaagtgttgatggttttgataggtaagaggttgagaaagttgccttatatatattatttattttaggatatttttataaaagcagacattggtcgtgacatctcttgtgtaaacatatttatatttatgttatattagattttaatatataaccaaaagttgttttataatttaaatttcaatttattatatatttgtttatcttttttattataaatgtgtttatataatataaaatatttttataacattttaatttaaattcattgttta

SEQ ID NO: 201344 - DNA, 517 bp, Cannabis indica
acatttttaacatttctcattccataattgtatatcatctgtgttcataatctaagacaaaaattaatactgtatacttataaagaaggaagagaaatgataaattatatatatggacaatttttgttattgtttattatattattattattatagtgataatgtaagaagaggaaaatgaaaggagatgagaacctgaatatgatggcaagaatgaaagtgaaagctgggatgagattaagcatggctgtaccaagtgtgggagagctatagtcaatacccacataaccaaatatctgtcctgaacacctgaatatgaatttacataattaataatatatatttattggtaactttatatatatatgtataattttgttttggaatgatattaatgtattatgtatactcctatactcacccaaataaggcaagaaagaagaatctgcagactatggaagaggtcaagggagggaggtctgaagatctggtgaattaaaattaatcttaattagta

SEQ ID NO: 201345 - DNA, 1664 bp, Cannabis indica
ttttctctattttctttaatttttattctaaatttaaaaatataataaattgattctatatatataaagctgagacacgaagtggtgacgtgattaattttaaaatttattctaatatgtctatttattctctcctagttctcttattttcttaattttttattcaatttaaaaaatatatcaattaaataattctaaattcggttcaaatatctctacttagggcttttttcagtaagatggttctacttaactaaatcaattatattgtatataagactttttttttacaaaattatggtgatcaatcaaagagtgattagaggaagaagaagaaacgttacgatttgcactgaaactccggtataactgagattgcaatatggtttgatggtaattgaaggttgcaatttagattgtgactggacatagctgagagattgcaatatagtttgatggtgatttaagttgctattgcgacttcaaattcgttatagagattagtggaagcttcacgtggtggtatcgcgattcaagtggcaggacatgactgagattgtcatatgatttgatggtgatttagggttgcaatttaggttacgactacaatttattttggaaattaaatattgaagcttcacgtggtggccggtctcgaacaaccacaaaggaaggatggaataatttatatgaagaagaagaaaggggatgagattgcaatatggtttgatcgtggtttagagttgtgacatgtattgtaagttcagttttgattttggaaaaagtcaagtttcagtttccatggccgaaaataacaggaaggaagaaacagaaagaactacaaaaaatgagcaaaatatcttaaaaatgaattagaaaatgtaaataaaatataaaactatacaaaagagaaatttaaaaaataaaacgtatacactgtaatcttccatttatttattctcttattttcttagttttcattcaatttaaaagatatataaattgattaatttaatgaaaaaaatattcatatccaattcaaaatcttaaccattcctacatcaatttattttaaaaaatatctcttaactaaaatatcaaaactattttgattatcttcttattttatttattctaataattctaactaatgcttatttaaaggctctaatccaattctcattatttcttttgtcttatttgcttttttcttttctctcaagcctcatttgatacattgtattgtactgtattatgttaaattgtatcgtattattttgttgaactcgataaaaaacttcctaccatggaaacatcaattctttgatgccatcaaaggccatcgttcaattaaatttcttgatccaaaattgattccactcgaattcctcaccactgaagatgaacttacaaatcaaatctctgaagaattcattgagtatgacattcaagatagtgttctggtttcatggctcttattctccatgtccgagaagatccttggtggtgcgccatgaccatcgaaaaaaatagttagagagagaaagagtcgcaaaagagagaagataataaacctcttgtgcatgcgacaaggtagggctacgacctctaatgtttgtccctgattcccttggcacgctgagctacatagctagtgacgttga

SEQ ID NO: 201346 - DNA, 861 bp, Cannabis indica
aaaaaatttaaaaataaaagtataacaaacgctacctagtatcaatatgatagtactttttaaatagtctcattgattgaattacatgcacatcatttttttttttgattagtgtttaaaagggaaacacacccgcagacagccagaaaacaagcaaagagacaaaggccaccagcggccaaccaacaaactgaagagaaaactagaaaaactgaaatgaaacaaactaacaaaagcaactaaactaactaaacagaaccatgaccatctgcacttaacagctgcagggagtcaccaaaattggccaaatcgatgaacccaaatttgttagatcgatttgcccattgagccacggaatgggctacaccgttgcagcctctaggggtccaaacgatctcccagagattgaacttacccgcaatagagaggaacttatgaacatattcttgaatgttgaattgcagcttatggatgtcttgagttttagttttcaaagcagctacagcatttaaggaatcacattgaaacactaagttatcgtatccaagctctaccgccaaacctgcactttcacacacagctgcaacctctcccggtagaggatcgtagtggttcaggcggaaggatgcagatctcaggatgttgcccccactgtctcgaaaaatagcagctcccgacgattggttctgccctatagccacgtctgaattgcaagccacccaaccctctggtgggggctgccactgagaaggattggtgtggacagaatcagtgggttgcataagttcacgaagtctattgttgatggagttgatcgagacgacgaaagggttggatcttctatcatgaattcgcccattc

SEQ ID NO: 201347 - DNA, 2121 bp, Cannabis indica
ttttttttttttttggatataagcatatattcaatcaaacaaacattacaacctaaaaattttgaactatttacaagtatcacaattttgtttaaccaatcttattatataattgttctatatgtgtccctaattaattaattaagctttgtattctttacaataatctgtttttgtactatattaacagtaatctgaaatggtcttaattaatcttagtgttcttaataagctttcctttcaaatcatgtaagtacaaacattgcctatctttgataaattaatcaaaattaatattaatattgttatacattaaattttatatcactaatattttattattttcatgaacaccctacaagaacatgaacatgttcattaagtaatatggataattatatataaaattgaaagctgaaagataaactttttcctgctattaaataataaatataataaaaccaaactagtatataatactaatatactaaaaaataattaggataaatgcatgcagtactgtcactaaaaatttaaagatctgcaaatatttattaattacttaattatgaggtgattttaaaatacgtgatatatagtatttagatacatgcagctacaaccataatactgagactagtatatttattattattatttgaataatgtagttgttataattaaaagtgataaataagcaattggttgagtaagcatacatattattttgtaataatatacattatagttggtagctatacaatatatatgtatatatattttgaaaaagatatgtctagtcattagagcactcaaactttaaatttaggaattttttcattaatatattataaatgtcatacaatttatatgctttattttgaactaattttacagcaataaatagtaattacttgaggagtaactatatcatgagtactattttaaatttattttattagttttttaattattttatatctgtatgtatatctgcatatatatatagtaatattatatgtctaaaataaataaaatatattaaataatatagggaaagaaattaactcactcaatttttatcccattgatgcaatttaacttgtattttaaagctatttaatccctctacaaagctatgtctcacacaccatttgaaattcttaatctatcgttgctaaaatttatccaagggaaaataagctctaggtaacagcgggacctactagacgtaaaaaatcagccatcattatcataaactaatttttacctttagatcatcatcaacggtagaaaatatactttatttgtaatttatctcctatttttttaggccttcttcaactataaaatgatagctcccttagttcatttttcacaattagaaaactacccgcaagatcagagcttctccctttagactttttctctctagagtttgaagtttttgatacttaaacagtttctgtaagtaccatattgtgagaataaaaactcggagtagacgtagccccattattatcgcgacgtagtggatgaactattataaattattttgtctctcattaattactctacaacctttcatcatattctcgtcaatctagcgagtgggtgtggcttaaaagtctagttcaaatttatgagtcaacatgaactatatcacttttagacttttaccccttccatccaaaaatctaacgatttgcaaatgtggcagttaaagaacaatattttatgggatttttattaattcaatatttttaaatttaaaaaaaaaataataataaagtgtaactaaaaattgtttatattaccaattttactaaaaaaataatttaaaataaaaaaataaaaacttaatttaacaaaaacaaatcaactaaatttttacttcttcttcaagtgtagtactcttccattttttttttttgggtaacttcttgttaagattgatttgagttttgagtttttatttcaactataatagtacttgtttaaccatcacattagcaaactgttgcaagtgctataatttggagatcctttttgccaagcaaataattcaaagaacaagaatctacaaatataatagttgggggttaaaaaaatttttgtacc

SEQ ID NO: 201348 - DNA, 886 bp, Cannabis indica
aaatataggatcatatatcctttttgtaaatattacattaattttgacacaaagaaaatatttaaacttaaacatgatacagcataattttacaatttgacagaaatgctcaaaagcacaaaatgttaaaaagtgcaataacttaataacaataaatagttattaataattgtaatttaaaatgataataaatatttaaattctatttttattatatgattgtatacagtattgccatcaaaattaaatttaatactagtagcactttttataaaagcctgaataaatgactagatattacaacctttcaaaccaaatcaaatcctcttatttaatattcttaggcattatatgatcaattttatatttaacctgacaaaatgtacaattgaattcttcattgtcactttttgattccaaaaaacttgattacgattcctctagagagcatatataaaccaaactcaccattgttgtagcccacacttgccttcgaagcttgctcattctcgacttctcaatctttctagctaaagaatataagaaaattagcaccttgcaccctccaattcaaccattgcttcagatctttaagccaattggtactcatgcaacaacgacagagcagatgatgaattgtctcattagtagatccacatatgcaacaagtctttatcttgactaatgctatatctaagtagtctcttttgtatgcaatctattcaatacatctagcaaagcaataaaactatgtttaggaatattcaacctgctctaaatagccctctgcaatcttaatctttgagattaacgctttatatacttgagctatttgataacctgtcattggatgatgaaggtgacacgagcttctcaatttattttt

SEQ ID NO: 201349 - DNA, 922 bp, Cannabis indica
tcaagatctatgaacatcatttgcctacccttcctgcactgccagctctggctggggttgcatcgcttgccctgggaccaggaaccccacatcctcttaggctcattccaccacctgtggatggacatgttgcaacaattttaggaggatctcatctcgccgaactctttcgcaactcataaaagagatacttaagggaagtagatgaaggtgaagtatacatattggtacaatctcccgcacaacatccccaaatgatgaacttactaatcaccttcatagaggatgatgctaagaatgtgcagttccctcacaatgatcctttggtgattgttgtgcagatcactaataaatgggtttctagagtcctggtagacaatggaagctctgttaatattttattcaaatttgcattccaggtgatcagactcactgaggcagatctaactccattccccatctaactgcaaggcttcaatagtgatgcgttattgcccatgggtaaggtttagctgcttatcacccttaaaggggaaaatgaggcgagtgcgttcaaacacccaaccttcgtggtggtggactgcccaactccttaaaatgccatattaggccagccaaccctagtagactttggggcagtgacttccattcaacatttatgtatgaagttcccatgtgacaatggatgcatcgacactataaaaggtgactagcaaaggcgaggaattgcaacaacatggtgacgtggaccgtgttcgtggttcgggaagaagtacccactactcctggggcagaagacttaatggacacagaagtcatccgggaaaagtttgaggatgagttagatccaagagttagaattgagagaaatttggaaccaatggaggaggtacaagaagtgggtatcagtgaagaagatccc

SEQ ID NO: 201350 - DNA, 565 bp, Cannabis indica
caagtaaattctattttaccagcgcaatactaacttttgccaacacaaaaatgtgctggcaaaagtgaaatttcttgtagtgagaactaggcatgttcttatactttcgtgtcgtatgacctggcttgttacagttgtaacatatgaataaatcaaatcatttctattagggggtacttgttgcctattattttggttcctttggtggttccaattctaattgttattattagtctgaggttgattgttgcagtttgaattcactttgcaattcagaacagcagtggatcttttattagtattgttgttgtttccatcagcaagtacctcttccttttgtcttgtttttaagcttcatcctcaattgaagatgagtgatcagactttccaataaaaactcttttattttgtgactgagagtattttttaaatctttccacaaagaggataatttatcaatgataacagtaacttgaaattgttcatcaataatcataccttcaaacagaattttgtgagctattttctgaacctcgtgagattaggcttcgactgatttatcatc

SEQ ID NO: 201351 - DNA, 540 bp, Cannabis indica
gtttaatattataaatttaaattcagtttaagataaatgttaaaatgcaatttcaacaatcaatatcaaattgaaacataaaaaatgtatatttttaaaatataaatattagttagttatatacatggtatagatattattttcagaattatacatcaagaatttttttttaattaattaatatttatgaaaatttaatatagtaaaaaaagtttaatattataaatttaaatttagtttaagataaatgatacacatgtttttaaactatagatattttaacaaataaaatattatttttatgaaaatccaaacctatataactatgctaaaaaacaatagaaatatgttttttatttatatatgtagttttttataattaaataattattatttcatttttttttttaagttttgaaattagttaataaaaattttattgacaatgtaatcaattaatacgtgttagtttagtcaaatataataagattggaaacatcaacaacactgtatccaatgttaagatagattaattaatgt

SEQ ID NO: 201352 - DNA, 1157 bp, Cannabis indica
tttagttatttttgaattgattaaataatattcaacttatttttaaatttttattgaattttttacattttatattattttaattttttaattattaaattttttaattttttactataattttggatttttttgttgtagaattttcttgtctctatcatctatgaggaatatgcaatgatggaaactaaaattcataacgggatagggtaaattgctcaccaattcctcatttagtgtgccaaaaaaaaaaacaattgagttgcaacattgccttgaaaatagaaataactataaaatttgatgactatttcttgttttttccttttattgtacaaagatataacgtttctttctttgttcttcttcttttttttctttaaaaaaaaaaaaaaaaaagatagaagtggttattctatgattttgggtttcaatgttctatatttgtaaaaaattcagtataagctaacatttttaatattaatttatgttttgggttttactaatttttgtttatattctataaattttttctcaaaaaatttgaaaagataatctctataattttacaaattgtagatctaatatgagatattttcaaaaaaaaaaaaaaaaaaatttacaaaaatacggttgtgtataattttttctttaatttataagttttaatttaaaaaaaatacagacaatttataagtttttatttacaaaaaaaaatatagacattgatatttttatgttatgtttgtgttataatcttgttgttttgatgttgatttttttgttatttttttgttatttttcatgttatttttataagatattgtaaaattataattaaaaaaaataaaaaaaaaaaacttagaaaaataatgtatatatataaaagttattcaaccctaatatatttttctttaaataaatgcactaagataaaattagacctcacgattattacaaaagatattgttcggaatggaagaaacacacatacgaccataccgattgtgggtaaaagtccatttagccacattatgggtcataaagttacaagttttgctaacaaaagaaaaattaacaactagcaaaataccgagagagtctattacaaaacttagcatagttctcaatgttggggtttgtgcccgtaaataaaa

SEQ ID NO: 201353 - DNA, 1123 bp, Cannabis indica
tagtggctttttcttaactgcatattagaaatagaacagtcatatactagcataattaatctaagaactatacttaattttcttatcttgagagtggagagaagaaagaggatgcaatactagcttttaaaaccaatttaaataggtagctagttcacactacaagaaatgtcacttttgccagcacatttttatgctggcaaaagtttgtattgcgctggtaaaatagaatttacttgtgaattgtgatgtgttggcaaaagagggttggcaaatcaatattagtattagaacttttgccagcataaaatgaaaagcgctgacaaaaatgactttttccgcgtaaatgcactggtaaaagttagattttaaccactgcaaatgtacgctggtaaaattttgacttctttgtcaattctaatacatattttcaaaccaaactctatcaataaattgtatttttgttgacactatacctctaatttgatactttacatcttgcttaattctttttgttaaaattgttgctgtgaaaactttctgattccagaatacttcattttggcagttccacaaatgatacaccatgactgctaccaaagtcaccataacatgcttcctgaatttggctactttaagtcgagtaatccatctcagtaatctcaataatgaggatgctgatgtgttccatcctagccaatattgttcaaacaatccttactcagatggcatgcaaaaaacaaatgatctctgattttcttatgcattccatacaacaaacatatatcatctgttactacattggatatgaataatctcactttcacttgtagtctatctagtaccgaaaaccataaaataaattgatgctttggtattgttgttgtattccatacatctctataccagaagactttttactgttttaagtataatctctggtatcctttgctgcttttgtaatgcccttttgtgaaatcttgagccaagttttgatctttaacgctttccttcaccttaaccacttgtcgccaataccaactgcttgtgcccaatgccacataggcccactagtgttcattaccaagatagacagcatgtacccattgaacccataatgtat

SEQ ID NO: 201354 - DNA, 832 bp, Cannabis indica
atagtaacaataaattaagataactacactgatcaacaaagaaaccattgttgctctgcttctgttgtcacgtaaagaatccaccaatcatgcataacatttgtctcgttatttgtgtacgacgtgaggaacttaccctataaaattaagatatatatttgttagtaaagacctaatattataggctatttaataaagaataatttttgttataatacttattaattattttagcagttgtgtcaattcttgtaattgatcttctacggtcaagaaactttgaataaatttcatgacatagtatctacattatttattatctggtggttctgaatataccagacttatccactcgataggtctatcaggataatttgttattatattgtaaatggtaaacatcctagacgaatgtttcaaagtcctcaagaagtacaacgtgaaacttaatcccctaaagtgctcctttggagtcagctcggcttcctaggctttatcgttaatgcccgaggaattgaagccaatcaagagaaaattcaggccctcctggataggatatcacctacaaaaactaaggaagttcaaagtttgactagtcgaattaccacacccagtagatttgtttcaaagtcaacagaaaagtgtgttccgttcttcatcatcctgtaaggaaataagcaatttgaatgaacagaggaatgcgaaaaaaccttgctatcacggaacatgcagtaagtgccgtactgatcacaaaagagaacaatatccagaatctagtctactacatcagcaaacgactcattaaggctaaaggccgatatccattgataga

SEQ ID NO: 201355 - DNA, 592 bp, Cannabis indica
taataataataataaattaaatactatatcattaaatttaattaatacaacacgtgaatggtctcctaataattaattattattattattattattattattattattattattattattattattattataaggctgttttataaaaagactgtacgtattttagtaaaaaaaatttgtgtgacagtaaaattgtagaaatacttaagacatatatgtagaaagtttaaagatatatagtagtgttgaattactttttttcacttctttatatagaatacttagacatatatgttaataataagggtaattggtggcgaaaacttattatatattttaatttttatccaatttttttttctttagataataccatcttaactttacttttgtttgaaaatagtgaggcataagttgaattctatccttaaatgtcaattgagaaaactaaaatatctcaaaactaatgaaaacatgtcacacaagatgtacatatttaataatggaatttaattgacacttcaaatttacaaataaaaataaagttaatggtgtattgccaaaaaaaaaagctaagtgtagaaaactaaaa

SEQ ID NO: 201356 - DNA, 1005 bp, Cannabis indica
cttatgtcaacttaggtgcttctacagtgcccaacgtgcaagttgactaccatctctaggatgcgaaaccctaggattattttcctttgtgtcacatgtcaaaaatgatatccacatcatcaaatcaaactttcgtgtaaatagctgtctcgatagtttttgttgttttaattttttttattactcattatattatattaccctattttgaacttataaaatattattatttttattattaatgtaattatttatttatttctaaaaagtaaattgttatttcatctatcactaatcccaaaaagaagaaaaaaaataagaagtatgaaattgtaacaaacaactttcattaagaaaaaaataaggtaatagtacaagaagagaatcaagtagtcaaaacttagtaaaaaaaaaaacttcctagtacaaaaacaagttgaggagttgattttgagttgtatattgtaatagggttaatgtcttgttattttttgttgttttgtagttgtcattttgttgttgtttttttattgtctaattgttttatagttgtaattttttggttgcttttagttgtattttttttaattgaaatacaatattttctaattttgaaactctaaaacaatatttttgaaaatttggttttgtgaaaaaaaaaaaagcaaagacatgaaaaatataaaagtaacatagaattaaatatttatgtaaaaatctttttattcatagatatagatgtgacatgacaatagctagttaagtgaagtaaatagttaaatttaaatttggaacttacataattaattaagaaaatttaatgagaatgataaaattttattaatcaaatcattttattttatggtacgtacaatatgggattaagtacgacacaatatagaaaatatgggcataggctcgacacgacatgataagcttgaaaacacgacacgtaagcacaaataaattaattcggaagtatgacacattaaaaagctcaataat

SEQ ID NO: 201357 - DNA, 1382 bp, Cannabis indica
gctcgaattagggacgttataaagaatattagagccttgacccaacctgaagtatggtcgacgaggatgttagacaactaaaagggggtgattacgacagtcggagtcttgtgatctgcaaggggaaagactgggagctgtgcaatcccaacatcgccttgggaaggttaagtgtgatgattctgagactgcgtaggtatgggactacactgttaaaaagagattaaatagattgatcggtactacctatatcaaaaaatgtatcttctttttggtagcccatcatgaaagaactccaaaattaagtgtttttaacctggggtaatttcaagatgggtgacctcctggaaagttctcctaagaagtgggcgactgaggataaagcatgctggaaagactagtgttggtctacagggtcagtcatcattccatgaagcatccaagagtgacatagtcgtgtataagagtcattagtatgtgggggaaggcccaatggagacgctacaaagaaagtacaaaggctagatctaaactaaagtttgtgttcattatatggcctattattgggataacatttgcagccaaaggttttaaaccaaatataataagacttttgattaaacaaaacatccaagggacacttattttgctacacatgagtaagaagtctagtatggggataaacagttgtcctaaaggcttcatcaaggaacttgaaggtcatagtggctttaccaagcaaagttaggctatttttaataatatgtctatgtttttcttagctagccattctgattgtaacaccctactggtttaggcgtgctacaatactttcttaattattatgaaatctttgctgatcaaagaatttcaaaaaatatgatttaatttaaacttttataataaataaaaacttacaatttgtttccaaaatctggatcccgtatctaattttttcaaacatgtacgtcataaaatatgagcccatttttcatcgaagatccaaacacataaaaattggatagataatattagtgcaagtgggagtatgttgagattttatgttgggattttatccaatttatcatgaatagtaaaagattactgaaatcttcactgagctcttgactcacagctactcagttctagtcttgccattacccacacatgtggtagtaattgtgagtcgacaaactcaataagaaaaatataaaaataaatatatataaccaacttgcacctagggccccatacacctacttacaagtcttaagagacaatccaagaatgttcttgcatttggtaagattgaccatgatatcagtctcaagcagcattataactgtactactaacctgacactatgatcgtaccgctatgat

SEQ ID NO: 201358 - DNA, 1258 bp, Cannabis indica
acgttttacattctcaagacaatcatcatttacattttacatataaaaataagttatcgattttctttttttgaaagtaagttataaattgatttttttatttttgtttttgacattaggtaaaggatgtttcaaatttgggaatttctctttggtgtgaaagtgaaactagactatgcttatgacagtagcatatcgaaaaactattacatttaatatgaaaacatttgagtggaatatatattttttcagaaaaataataattttttttgacaaatttaattataaaactaaatcaattgttacaaaagtattttaatagtttttttttttttttaacgtttgtaacattgaggggaagaacaacaagctcaagttacaaagagaaagtttggactattgtttttccaaaccaattcctcatcaagccctaaagcaccttttgccatttggtgagcatgagtgttattgctccttggagtgtaagtgactgaggcattagggaaatgtgataaggaattcctgatgtcccacacaacatctgccatagctgagaggtccttctttcggctggaaacttttccaaccagttgctggcagatctgagaaaatgatggagaggggaagcttgacactgctgcaccagtctaaagccagtcgaagtgcccacgcctctgccaaagcaggttgaatgttggctgtcataggcacggacaacccagcaataacctgtccattccaatctttgactactgcacccaacccaatcttaccatttctagcttgaatagctgcgtctgtatacaattggtaggatccttctttaacttggttggctgaagttggaacatttgcctgatgggttgtaaccatgtcaattcttttgagctgtgcttccttgtattgggacaaaaaagcactgatccattgaactacatcacctgcatttgagttagtatttctgaacagtttcttgttcctaaattcccagatagaccaaagtgtacacataagaagagagaaatcatcactagacagatcagtatatgcagatagcattaaatctttaacatcagagtgcctatgcaaaatgtaaaaatgatataaaggagagagtttccaaacctgtctcgccctggaacagtctaaaagagcatgtgttacagtttctaaggaacaaccacagaaagagcaggaaggagagggaacaactttccttctaaagagattaaaagcagtaggcaagatgtgtaaaagg

SEQ ID NO: 201359 - DNA, 2532 bp, Cannabis indica
caattgtaggttaattatttgtgtaaatgatgaatgtcaaaggaacacaatgatgaagtcaatgaagaagaggttaagcttttgtttagagaggtgaatgggggtgaagttttcttggcaaggagttcgtctgagatgagttctctgggtgaaggattgctactaaaatggggaaggaaatatgatttcaatcgccaagacccctatttatatggatggcaatggttcaaatgtttttgaaatgcacggtccatattaaattgatcaagggctacgccatccaatggttgaggatatgaaaggtttgcatttaatgcacccaaaggaaaagaatataagatttattactcatcattttgtgtttatgtccccgatgtgcatgaagtttggcatcttttttaatccagtactcactcgcttcacatgagagatgcacttaaatttagagcataggcttcacaactccacaagcatcacacctcaaaaaatcgacaacaatattggaggacatgatatcccttgagataccagaggcaatgaattagagacataaggcaagcatctaggagaaacctacaagctcccaacactcataattcttgggatcttgggggtaaatattatccgtattctcagatgaagtgtacaagtgaatcacaaaaggatgccacgtcagattacacattgttcatgtttaatttttgctttttcgagtcatgaaaggtgcgataatatcagactttatatagtgtccctccctgctagcatcgacagaaaacaccccatgatcctcattgttagaaccactacaaaggagcagaagtcacacatgctctaggattgtagcagggcagttcagtctgagaaagccttagaaagacattcttggaattctcttatactatatccgaagccaaacttgacggttggataccttttgacaccaaatcagaccttggtagtgcacatatgtgctttgaagcccctctttgtctaacaacatgtatatacaccaacttttcaaggtgaaacctttgggcagcatgcgcccttggccacacaggttgggtaggaatatttgtgaaccacacgatgaggaagttccctatctaccaactgtgatattgtcaagttgtaaacggcaactaatgaggcgtgcttaataataaaccctaggtgggtgaagggtatgccctcaccaacacatgtgcctatcaatacccttattggtcatatgtaaatggtgaacaatttacagttactttgccaaaatttctataaatctttgttcttattcttcaagagaaacgaaaggaatacaaagttgttatgcatactataaacacttgtaatacttaaacactcaccggagaggctaatacaatggacttgtggactagggattattagaacccaaaccatgtaaaaaactttttgtctattatttattgttttatattttccttaagctctaattaatctaattccaaaaatctcagtaaacaatatgttcttttggaaaatcaacaattttgagttgccttccctggaggaggtcttgttctttcatggagtgaaaccttaaccaatgtagaacaattgtaaaaaagtaggtttttataagctcaagaaaactcgaacactcatttccccacaagccacacaaaaggctcccacgacattaaggaatatttgtttttctctactagtttctcggtgaagagggtgcccactataacgccctgactcacagggacgccacatgtgtacttttacaaacttattattaactaacctattagtttaagaaaaattgtgatttaattaaaaacttttcattaaattaaaataagactttaatacaaaatactgtcataatacggggatcccctatttagaaaattcttttacatccaattacaaaaaccatcattacaaaagtaacgttacattttcaaatatagaaaaagggttgatcctgcttcccggaagccaagacaccactacagatatgttcatcactgagagacctctgactcatagccaaccacaacttctatcctctttacctgcaccatgaagcacccgtgagtcaaagttactcagcaagaaaagctacttgatcgaaaacattgaaagtgcaagtattctcatcataagatagtatacatactcgtggtttattacatattcaacatgcatatatattttaatgtctatacaaacacatttattacacattaaaagaaaatcatagcaactcacagtcatcaatttcatcttttcactaaacagatattcattcaatacatattcacatattctcaatgcttcataaagcatcctaatcacacatccctataattacataattgcagtgcttcataaaacacccttatcacccgctatatacgagctatgtatggcactatcgtttcccgataaagcgaacgataagtaagaaacatatcaatggtttcaacgagtaattactcataacaataaatgatcgtatcttttcctcgatcataa

SEQ ID NO: 201360 - DNA, 1065 bp, Cannabis indica
tttttttgtgtgtgtgtgtttggtacaacaaaatgtttgaatttttaaagtagaataaggccctttcaatatgagaagattccattttgcttcatatagtagttatcaaaacaaggataaaaggtctaaaacttaaaagggatcaaggtgacatcactttttaattttatatcttttataggataccaaaatgcctttggcaccaagtaggaatagaatttttattttattttaattatttttattattttttttttgtacaaaggattccacttgtaattgcttatgagcacatattttgattttcagtgctgttccaacatcggccattagagaaattagcaaggtcgacttttgctcttctttttcttaaaatcattcttcaaatccgatcccaaatcaaccatcaaacaatgcacttaacacaattgtaactatatagaaatattctttcaaaagaaaaaaattaatagcaataaatctatttacttatggatatattatatatatatatatatataaatatataaatcaaattaattgagttttacaaatagtgttgtgcacacacaatcatgtgtataattttagccatatatttatatgtatctttatataaaatgtgtggctatttaacagtttttattggttttgttagacatttatttgtatagactaaaacatacatgattatgaataaagtgcggaattaataaatcatatatgcactataatttaaggatcgaaatacctccagccattgaatctttgagctttagtcccacataagcttgatctgcaaaagaaaccgattgatgtgggtaatcgggcttcctcgctctctcaactctctttagatggattttgctgttatgaacagaatgagtgaggagctcggggaccgagaccctatatttataggtgagatactccatcagtatctgcgccacattaattgtcagaatattttgacaattaattcaggaaatcaaatcaggtaatgaatatagaaatctgaccatatatagaatattacataattgattttgtccagattcaatgtaa

SEQ ID NO: 201361 - DNA, 621 bp, Cannabis indica
tttgtggaagataatgccgagatacagagatgatcctccagctgttcgtgtttatacagtctgcgatgaatctaggtttatctcttagtccttttactttacgaatttttgcttgaacaacttttgatatggtgaaccctaaattcctaatatttattcacaaattgatcatattgagatgatttttaagtatcttcactctttgttgctgtatagatatttaatcgtgaggaatgttccagcattgggatgcggagaggagttgctgaaactattttcaacctatggagacatagaagagtacttccgtcagatttttgttttttttttaatattttcgaacatttccttttgttgttgttgttattcttagtgccattgtaatttgtaattcaggtgcaaaccgatggatgctgaagaatgcgaagcttacactgatgtttactggataaaatttcgtttagtaagcaatgctaggtgactagtgttcgttgtgcttcttgttctatggttgctttactactagccatatattgtgtctaaacaacttgcatttcaggtttgcaaaaagaaaattggatgagtatgtttttattgggaacccattaaaggtttcttatg

SEQ ID NO: 201362 - DNA, 505 bp, Cannabis indica
taacaatattgttatagatttgttgattgagatttttgacaattatttaattttattttaaaaaaaattaattataagtaaagaataatatttgtacgtagttcaagtattaattaattttagtgtacgatctacttttattgatgtgtgtaatattgttattacaatagagaatattcttttttatagtttttgagtttcttttttttttccttttgaatttcgatcccccatacctcttacattctttttctatttataagcaacgaaagaagatattacggggtgattgatacatctttcctttacctctaggctctgtgtggcctttttttaagtataggaaatgatgtttataatgtgtgcattaggtgggctatgaagtaagaatttggtgagacaagacctgacttttttgcaaatgatgggacactgtgaagagtagccgccaattagcatttattaagggtgtacgttggttggtttggtcagtttatgctacatt

SEQ ID NO: 201363 - DNA, 841 bp, Cannabis indica
aatatatttaatgtaattaaatccaattaagggtccagccaaagagactaatagagaaagacaaataatgtgagaattcaagttatatttatctgttctattttcatattaaacctaatataaatatacacatagataatttacgttggtagttaattgataaacctaagagattgaaaaataacaaaacataagtaaagattgttaggttttgtttttaaaaaggtaaattgaggagttaaacgtatcaatatgtaaatattagataattttaccgtaaatttatcatattattaatatttcctgtaagagaagtgttaattactattttagtctcttattcaatattttattttaaaagatatctatcaggggatatttttcataattttttcacagtggagtttgttgtaattatggcattctttttgtaaatttttgaagatttttgagtagtttgtagtgttacaataacaaatttcaaacatatatatatgtgcgataataaacctgaatatatattaggaactttattgttagtgctataaactattcaaaaatttttgtaaaaaaaaatcttaggatgtgaattttaagaccgaacaaatggggatttataaagttagaggaagaagttcagctagtggacacagttggtcagaaaatagccgacccaagtcctgcactccaaacaactgcagctaatacatctgtccagcaagggaacagttccaaccatagtggtaaaaggtcaacaatagaaacaaccacgtcaatgtgaaagggggaagttcaataacagctctaatcaacaatactgccgagataaggcatcaaagtt

SEQ ID NO: 201364 - DNA, 1301 bp, Cannabis indica
ggtacgaaaaagttgttcaaataaggttgtacggacaaccccccaaataagtattggccggccaaggtagacagacatgtcgtacagaccctaaaaagaagggtcgtctaccaactggtgcatacaaccccaaaaaggctgaacaaactgcgcggtccaccataagtctactagaagattttcaagacaaactacaagtttgggacaagtttaaaagcccttgaagttagggatattcccttaaagatattatcctagattctggggatttaattattcttttttgtaattcaaatataagataaaaatatgttatttttcctactttaaaagggatagctttacctatttgagttaggatatttggtaagtcctaaaatatataaaggacattatatcacatgaaaaatgatcacaaatcctaagctacacgcctatagttctctctttctctctctaacctccataagcaactaaggcctccttgactctaagtctaatttcttcataagttcttcatagaatcttatcagttctttatttgtaacacttatatctcacaattataatactgaagagagatatttctagaaattacaaagtttttacatgtaatcttcatggtattatcttaataattgaatataactaactgggagtaggtcattactcgttcatcaagggggtcaaatctgtataattttttttgttatttctacgattaattattcttatttacacatggtaataatcagcaattaataaggctccgttgtcagttggttaaattttaagtcattagatattattactgtttggaatatttattagatttaagttttttttggtttattcttactaaaatgttgtttattgtctcatgtattcctattaatatttttcattttttgtaatgaatttggtttgtgtattttgatgtttattgttgtttttaggacaatttttaatatatatttcagtttgatattatattgttcatttatagattgaaaatagttgtaatccaattgttctttctctttttttttacaatttgctttgatcatgacactttttggtctgatttcaataatgggaatgcaaattccttgcatatgatcattataaatctaaagttgtctcgacttttagttacatagttattgagaagcttaatgctaatctttcaacaatgtcaaggcattgtactgggctacctaattctataaataattagacattctttcctgtaaattctacccacaaattgtgtatggacatcttttaagagttgtggagca

SEQ ID NO: 201365 - DNA, 634 bp, Cannabis indica
catcttttaagagttgtggagcaaccaaatataaaggaatttcaggcaaaccattttggtcattgtgttcgtttattgttgaagagtttactttgatttcctatctggattgtatgggtgattgcaacaaaactaatttttcttaggaattaaaccagattattgacacttatttttgcagtgttaaatagattactaaaaaatttgtagaagatgttgttttaggtgtttctttttcattgtatatttatgcttcttaaattttaggatgttgaggatctatgattagtagttccttataatcagtgaattttgactctttgttcttattattttctagttgttctactatttcttctgccaccagttttgcatagtcaataatatcaaacaatatcttcccatcttctagcattattccatccatgttttgttgttatgtaagggaaattttaatatttatacattttttgtactaaaattggtcaactaaaccaaaattattcaacatatgtagaataggtcaattttttactaaaaccccatttcaccccactcattccaaaaagtggctctctcttccttccctcactctctttttctcgaaccttctcgaacccaccaaacccaccac

SEQ ID NO: 201366 - DNA, 664 bp, Cannabis indica
ccttaagcagacaattgataaagcttgggagactaagaaagtttctttatgtccatatgccaaaaactccaacatattcagaagctgcatactttggtaaaataccatgatcattgtccacctttctcttttctctagccactcttgtgaagaaagtaactttgtccttgagtgttggaataaaaccattgttcccatgactttaatttcatctttagatactttcttgtaaaaacttttctttctcaattagctaagtcttagagaagttattggacctgggatatctgcatcaatgaaagctttactattgcgaggctttcctctccgacaagatataaagggactaagtctaaatgtaaatcttgatgacatgtttttaaatcttcaattcataatatttcaatctccattcatgagtgtatttgctgcaactaacttattacaacattcagttttgctaccttgttaaagttgacttctcttccttattattaaaagtttttttgttaattaaggataacgaaatacatgtctgacttcggggttaatgggttatattatatcatttttcttaatttaaacttgtgagtgacatatatcggtgatgactaccgagtgaactgaccattggtatttcgattcaattattattattattatt

SEQ ID NO: 201367 - DNA, 1689 bp, Cannabis indica
aggtgttgtgttgttgctctgtctgttcccaacaaggaaggaggcgtcatttgtctcttgttactgttcacagtacaaaagaaaaaaaatgggcttgggcagtataaaagaaaaaaaatgggcctggacaatataaaagaaatttctaccgtgtggtagtatttttgtaaagataagggaaaaagttagtatttttgtaagtttcccttacaataagggcacttgattacccttacatgatttcctcacatttttttaatttttacttcaattttctcataaaataacatttttgaaagaaaaaaaaaaactatatttttgcacaaaaaaaaatataaaaacctataaaatttgtaatttcttaaaaaaaaaatactaactagtatcaatttttttttgtaaggaactattatcaaatttagtattgtataccacatttcctatcatagccatagagatgtgaaaattgacagagataaattaatttttatttttgtgagagaaataattaaaaggaaatatattaatttaattattatggtaggttgtacgtatatacatatttattaacagaataattagtatttttgcttcctaaattttttacaaccagactacgaggtagataaatgaaactatatttttgtatttttaagcatttaatgcttcacctcaaaaatgtgtcttgggttgcatatgttgacagttggacacctcaatgagtactgattgtaccgtttggggggaaacccaaaatttaaatcgttgaattacaaaaacttcctctcaaaaacctataaaagggactttggacttcatttctctagttgggctattttgaaattaagaaatatcaaagcaataatgcatcctctctcaatcttcaagttttcttctaagctttaaggaattccaagacgatctccagatttcaactcacatttttgctgaatttcttttaggtgatattcaacaatgagtaagttcttgaactttttatgcaatttctttaaattcttgtattttactttaaaattgtgtcttgaatatctctgctaatatctgggtttcaaactaggttattcttcatttttggaaattagaaattatattttgatattgaatttatgtgcacgaaccataatctttagtttcttgcaaattcccatgtttttgttaaacaaacactcaaaataccttgttgggatgttctggagaattctgggttcatccaagttcttgaacaccttcagacaaggttttttgtctttaggatgaaatttttcttctttgatctttaaatttgtctggttgaagcatcaaagtggtttctatccgtgaccttggtcggttcttacctccctttccctcttttgtagatgaacctgtgtgaattttggggaggtaagcactgagtagatgatgacttactctaattgctctatgaggaccagtctagactctgtgcagcctcttcatcgttgactgagacttcaatagacgagtgggaagtcataagagaggagtcaaaacctccaaaacctaccatgcaacaccattattaccttgatcaggttggtggtgaaaattatggatgattcatttgggaactgaatgaaggattcagacgatatttacttatttcttggacatacaaggtcagagaaggggtttcagacactttaccag

SEQ ID NO: 201368 - DNA, 1271 bp, Cannabis indica
gaaagtctcggcagctcaggtcacggtagaggagcctgctgcatacgagccgccgacgagagcagttttgaaagaggtgagttctaccaacactgatcgggttgtgatgaacggcggtgatgagatggttgtaccgtcgacgtcgtggaacggccttcagaggaaagattcttctcagctttgcttttccaatgagaacgagaaaccaccgctttcatctcggtttggtaaccggaaatctgtcaaaggcagtcccgaaggtatttacagctgctttttaaatttttttgtataaggatatgactgcttagctttagaccatcctaactttcggtggtccgagttcacaccggattaatttttctcagtggcaaaagtgttattaaagtgatataggtgtttaattttttctttttttttttgaataggtggtaagtcgcttagagtatcgaaaccgccgaagaggcaggacacactggagaacacgtggaagacgataacggagggccgtccgatacctttgacgaggcatctgaagaaatccgacacgtgggattcgcacgcgcgacggagcggtcaaacgacgtcggagttttcatcccctcctccagcgccaaagatgaagaaatctgaaacattcagtgaccgaaactcgtcgatgacgcagctgagcccggcgagcggtgggtccgggaagttgaggaaggaaccgtcgctgagtcaggatgatttgaatcggcgagtggaagcgttcattaagaagtttaacgaggagatgaggctgcagaggcaggagtcgttgaatcagtaccaagagatgatcagtcgtggggcccactagacgccgttaaaaggggcgaggagcgtgttctcaatgcccatcatcatcgagatgatcaagttgatcctcatttagagagatgaccacgtgtcatgttttgattcgttgttcatacttttcttttccattccccggaaaaggaaaaaaaaaaggaatatatatatatgtttgatgatttggaagaacatagggtgtcagtatagtaattaaccaaagttgtagaatgcgaaaaagacataaatgtaaacggtaaagttttgattttttttttgttcatttcgttgtatatttagcatattgctaattgattttcattttccctctgaactcgaaattaagtttttttattttttatttattgagagatatgaattgtgtggttaacaatgttgaaaatgattgtgcttttgtagcttatagtttgtttatt

SEQ ID NO: 201369 - DNA, 967 bp, Cannabis indica
taattattctaactttgttaaaaatttaaagaagaagaacaaatcatgttattatttgaatttgaataaatcattcacctccattatatatatgtaattaattaagatctattattcaaatttcaatcacatgttaatgtttcatttaaataattagcagccaaagaaggaagtggaacacaaatacattaatagttgttaaatgaacatttattaattgattattgataatataaatatatatatatatatatatatatattttttcttctttcttgtttattaagttaggcagacctatatataaataaattaatgtttattagtgccagagcttttgggattagatttatttaatgacaattaatgcttaattggacctatattgtataaaagaaataaatttatcaataaaattattatttgaaagaagagacaaatattgtgatttgtgaatagtcatcatatgtttatatatttacacataaatatttcagtaaaaaatataattagtatagataataactattagagtagattaattcagacatgcatgcagaatggaaaagattaagtttcctaataaatttgttataattcaaatttgaagagaattaaatattagaagtgattgctgataattgtcattaatttgtgacatgtttcaaaaatcaatttatataaaatatataactataataataagaaaaagcctgtccaaatttcaatatttatagctaggcataaatagttataattatatataaacatataaatatataaatatattgagatgttgaaataggaagtgaggttccaaatttgaatattcccttcttatataaaataattaaaaactaattttgtttaatgaaaggaacaaactttttttttttattggtttgcaaatgcatgcaagtatgatcagaaattgtatttaacatgttataaatttaaaaaaaaaaaa

SEQ ID NO: 201370 - DNA, 704 bp, Cannabis indica
gtttgtagtctataatatatatagtataaagaatcatattttagataaatgaatctaaaatggatattcattgggttttctattatttttttttccttattaaaaaattgacaaattttgtgatcacttatcacatggtttcactgtgatcacttattacatgaatggtattggtgggttttctgccaacaaaataagctgcccatagataagtgtacgtttatgatagtgactttttgggtgaacacaataatgtaggatgtatctttaattacttgatttactttttcttggggacttactattttcgtgtatgatttaacatgcatgtgatatgatttaaaaaaaaataaataaataagatgcatgtgatattattgtgtgaaataaatgtatgctatgttactctttagcagtaaaaagcaatttttgataatgacattccataaaataataaaaagattatgacatttctatgtgataaaagtttggattattttttccctcttgaattaagaaaataagccaaatattgggtaaagggactaattaacatctaggaaagcatgattatatttttatcattttcataatcaaggaccggtggcaatagtggctccaagaaaacttctttgcaagtgttgaaaatggctcttcaatcagatgtagaattcgtagaaatggagtacgaggtatttttccat

SEQ ID NO: 201371 - DNA, 1315 bp, Cannabis indica
acaaagacaataaaaaagtgttaatgatatataattgtaccaattagtgtaaggaaacaagcattatacaaaggtcaattaaatgttggacaacttaaaaaggacataaataaatatatattatacataaatattatatatacttaaagaaaaaggctgaaaaagcatgttattttgggtctaattagcttgcaaagaagataacaaatttatatatcttaattatgtctaatcaatatgtctaatatgattattagtctaaaccacgggctaccgttttttttttgatgagttttggcattattttttgttttattattattattttggaaaaaaaaaataaaaattatctcatattaattttagagtagttcagttcatgggccgggccttcttcagccgtttgatccattcaacggtttatatgtttcccagctttttgagcaatgaagcccttttttagggcccattaagtctttttgattaaggatgtctttttcaaaattattatttggaaagaaaaatgtaaaaatagaatgatgatatgagtacatatatacattaataatctaacgtaataaatttacacttgctgaatattaattataaccaatgatgttattcaattaacatgcattttttttaattagagaaataatataattttttaatcacaatacgcatgctaatttgtaacaagaaaagagcaataataattaagtttgctttacaattttgaaacaataatcgtgataatcatatacatgaattctgttattattatttatttatttatttattttttaaaaaaatagtaggaaaacttaggcttttgaaacaaaattaatagtatctttccatcaaatataatacaagcgaaatttacacaaagtaattaaaatcatatatatatatattttttttacattttatggttttttttatatatatattttttataaatttgtgactttttagatgaaaaacaacattattttattattttatgttgctacaatgttatattatatttttgttaacgcataaacaaaagtattttatagaacaacctaaacataacggtcttaatcagaattttgtaaaaaaaacataaatttttttttagtatatttttaaaattaatctttatgtataatagtaaatagtagaataataattttttacggtctttttaaaaacttttaagtagtaaatggtctacactttatttcttatatacaaaaataataatgtaattaagtctgttataacttggtcaaagtacttgccatgataaaccatagcacctaaaaat

SEQ ID NO: 201372 - DNA, 1391 bp, Cannabis indica
  modified_base (1325)..(1325): a, c, t, g, unknown or other
aaataaataaataaaaacaaaaatgctatcccttgaaatctttcttatattatatatcaactttcacacagaatttaagttctatttgaacacttatattaaggagtttctaaatcttgttggtgatatatttcttttaattatctttttataatattatatactattatgtataatttctaggttgttgattagtgcaatcctgaaggacaacaaataatgttaccaaaccagtatactaatatttttttatcgagcacaagacaaaacatatgcatatcaaaattaagttcaattaagaacaaaagtatgtagtaatattaacataatcagagttatatatatatatatatatataaatagtatattctaataatctatacaatttcaggggaaggaggatgatgaggagggtgttgttggaagatattcgaggatcctaatcgtgtggcattaacataatcttgtggactatgagctggtatgcctggcattaccaaaccaatgatcctaaacaatcttaagaagttcccttctttgtactcttttcccttttttcttggaatagtgaagcttcttaccaactcacaaaatgcattcatcatcattggtactgcccctaggggtgaaaaataattcttgtttggttcttcttccactatctgcagtaatatttatcatatatgtttaatcacacaactactaattatgctaattcttttgtcaatatcttgtgggatacacatacacttatgagaatatttaacaaaataatttatatattctttttgttttgacaaatagatctcttttttaaagttattttatcggttcacctgttatttttttttttttttttactaaaaaaaaaaatgtcatgttaccaattatttcattaaagaaaatgtttatattttttgacttattactcgaaattaatattaatgagattaatataagttagttatttacctttccatggtagtggcggttgaagtagaagcaagtgccaaaatgcttgaacaagagatccttgtcatcataaggcaacctaggaaccatgtcattaccataaacaaatctaaaatactttatattatgctctctcaattttttggtcatgaattccccaaattgcccatctccaaccctaggttgccccaaaagtgtaaaccaccctccaatctctccaacaaaaaatcatcctcatgtaaatccaaaaacagttggaaaaagaatagctagggcaccaccaaagctatgccctgtcaatatgaaatttgctttgtcgtttttactcacactccctgtttatccctatggcntagtagcagtgccgggcggttctgctgctccctgtccaatcggtgtcgttttgggccgtgatatcg

SEQ ID NO: 201373 - DNA, 855 bp, Cannabis indica
gtatgagcgggtgggaaagattcggggttgtcaggttgcaagaggggctcctgtgttatcacacatgttttatgctaatgattgttatgtgttttgtaaaggctcagaggatagtactatttatgtaatagaaatgttacatatttttcaaaaggcttcagaacagcaagtcaatctgcaaaagtcatctatctttttcagtgctaacactgataatggggtaaggcaacgagtttgttctaccttgggtattaatgaggcaaaggaagaaagtacatattttggtttgccaaatattgtgggaggcaataaaacttccttgcttggtttcttgaaggataaaatgcggaaaagaattcaaggttgggaaggaaggttgctataaagagcagggaaggaattgttaattaaaactgtggctcaatctcttccaagctatgcaatgaatgtgttcctacttccagtggaaacttgcaatgagatggagcaattgatgtgtaagttttggtggcgatcttctaagaataacaaaggaatccattggaaaaagtgggatgatttgacggttcataagtcaaaatgtggtatggaattccgaaatcttagagattttaatttgagcttgctttgtaaacaaatgtggagactatttagccgtctggactctctggtcagcaggatatttaaggctaggtattatcgtaatggtagctttttgaatgctagtgtggggagtaatccaagcttcgtatggcgtagtatttttgaaacacaggagatagttcgtaaagggaaagatgcagagttggtgatgactctagaatcagtattgtatggatctgtggctgccaaatg

SEQ ID NO: 201374 - DNA, 2419 bp, Cannabis indica
tctcaatttttctttcatcttattcatcatggaaatgttcacgatataattatctaaagtaagggtagacaacttaccctcaatagaccactcaatcaaacactccatcaacacttttgctagaagcttagtagtatgaggggcagacacatatataaacctgaatgtacataaccaaaaaaaaataattagcataaattgatatcaaatattggcataaattatattttttctaactaatttattatattacctgataattcgattacgcaaaatccaagaatcatcaatataatgtgtcattgtttataaagatgtctttagtcgcctaatttataactctactacaattttcattatttgatgtccacacatgtcagttgtaattgcaactctactacaattttcatttattgtgttcattgtcttggtcttttcgttctcatatatcttcaatatgtccctcctaatagtagttcgagatacatgtctgaatagtggctggagagagttgacaaaacttctaaatccatcatgtgcaaccatattgagtggatactcatgcaaaacaatcatcttagcaagtttttttctttacaactcttgttcaaagttgtgggaagcaagagaagtacttccatccttcttcttgctttgattcaagatcgattgttttatatcacgattttttctacgaggacaaatcttaaaatgatcatgtaaatgtgtcattccatttctacttgatcctcccaatttcttttgacaatagttgcaaactgccttgttaactccttcaatttttaccttcttgaaatgtttccaaacaaaagaagtcaaccttctcttccccaaaatattttcatcatccaaaatagtttgagtttctgaatcaatatcatttggaggagttgatgagtctacttccttaggtgtatttggtgttgatgctccttctatttgtctatatgttgatggagtatttttctcaatctcactcattgttacactgtatataataatctaaaaggtaaaatatataattaaacataaaaatatagatagtacagaataatattttattaaatatgatacaaatatgcaatcatacacatatagaaaatacaaaaattaatatatatatattacaggagttacgacggcgcacactcactctcacgcaacttacacaaacaaaagtaaataatatataattgggcatagggtgcgttctctctcttccactggcagagaaaaaaaggaacgtattgaagcctgctaaaccagccattgtcgatgtacatgaagattaagagccttcgagccaagatggagtggaagaacagaaccaggcggaggttttcttgacccctacgaacagttccagttatggagaaaccagcgaacaaccctgttttacagaattgggcagatgagatggagcaagttgattatcaattgaatgctaaggatatgtggagcaatttgaaaacaaaccaggtgagaactccttctactagacttgaatttacagaacctttgagagttggggatcaggttattacaaaattagatatggaagaaatcgaagttgaggcggcctattggaaaaatgctattgtttgtatagttcttggtgctaacccgccttttagagtgcttgaaggttttgtgaagagagtgtgggggaacttaggaattgagaagatagtgagaatgcattttggattcactcttgttagctttagggatgaggcaacaagagatctagtgcttgaaacaggggtgatacattttgataaaaaaactagtagtattgaggccatggtctactgatattgatactgcccaaatggttaaatctgtccctgtttggataaggctaaatggcttgggtcttcaatattggggtaggaacagcctatgtgcttttgttagcaccataggaaaactaatcatgatggataaggtcacttaggagaggacgatgatcaaatttgcgagaattctggtggacattgagattttagacaatcctccaaaagctatatcattcattaatgagaagaagcaaatggtagaacaattaatagagtatgagtggttaccttctaaatgtatggcttgtactatgttaggccatacgatggctaattataataaagaaaaagggtttgtttggaagaaaaaaagtgcatcgagtaagaagcaacaaccaattattgaggctgaaacagaagtgaaaaaagatgctgagattgaagaaggagctgaaccttaagataccattgtgaagaatgatgaaatgaagaaaacatagagggaaaagtcgatagcagtttcgggaggttcaagggattggattacgcctaggaagaaggggcataaagtagtgaaaatagcttgtccgaaggccaca

SEQ ID NO: 201375 - DNA, 774 bp, Cannabis indica
tatgtcattaaacttggcctcagtgtcagagtcttttgaggctttgatagacttattatcaagcttctcactttcatcatcttcctcaatattattattatcatcatcatcatcatcaccgccatgattactatcattacgatcaccatccatatcctcatcactatctccactatacatgattagcaaaaatcacaaaaaacgtacgaaattcagtttaaacatctcggaataatagttaaattagaacaaacacaaacaccaaattaccttctttccaaggcaccactcttgacaatttcttcaatttcttctttggaaggcaagtcagctacagaagggattggcttgggtgctcctttcggaacccatgaaatagccgttatcataattagaatggagagcgaagaagtccgtggcagcgggttcaaaacaagaattgtagcaaggcaacaccgaaccccttaaaccagaaggttgaagacaatgtagaaggagatgacagtagggttttagacttctattggacgagtaaggaaattgggcctttctgatgggccggagcgaaagagaagggaacttccaaaaatattggaaatttaggttaatttttacaaaaatactgtcacgcggaaatcttttcaaaaatactgtgtttttataaaacaccagtaaaacacagagcagaacaactcaaaacaacagtagaacaacaaaaaaacaccagtagaacaccagtgaaaacttaacacagtatgctgcagtatgaaactt

SEQ ID NO: 201376 - DNA, 1219 bp, Cannabis indica
ttttttgtatatatatattttttgtttgatggctttaaatacagtcaaaagtttctatttattaatacgagtttatcacctgatctttttgcatcacattttttccaccaaaacctttttctcagaaaattcttactaaattaagaattatccgggaaaattccaatagtggaaaatcaatcataagagatctaccaaagatctaatcaaaatgtcaaatgttcatcttcaatgtatatagtaaaatttttaaaatactttagtataaatttttagttaacttttatgtctgaaattacatatcagaatatgttttttaattttttcatagcgttattcgttatagttacaatatcatttttgtaaattttaaaaaattctgaaaagtttataataccgaaaacaaaattcgtgatattccaatttaccacgcgcgcgggttcaaaaaaattcaaacatatttttagcactgtaaacaactcgaattttttaaaaatttataaaaatgatattgcaaaataacaaaattaaaaaaaaaaattatttcgagatgtgttttcaaatacgaaagttaactaagagaatgtgataagaaattatagtaaaactactcctcaaattcctaaaacaatttacaacatgaaaatgttgctcaaatcaacaagttactgaaataaaataaaagttttgaacatttctaacaaattaacaatggattaatcggctgccctatgatattttataccatcattaattgaaaataagacatatatctagatacatttctattgttataacactgtttatgaagatttgacaaaaaagaattaactcttactataaaaaagggtttattttaattttaaaaaaaaatataaaagcggcttactacgtaaagtaaaggaaattaaggaaaggttagttatatggtttttaattattgaaaataacttgaagtgtgtgacttcctaaaaaaaaaaaaataagccactaaggctagcttagtggtgagggagggaagggaaaaagggagaggtcatgggttcgaacccaggacctttaagctattatgaaaataatgttttcaaacaaatgattttgttttgttgtctccttttgaatagattggcaaaaattttggggagaaaaagcagggaaattaatttgatttaaatagaagagtgagacatgcatatttgagtgacccaagatgaaaatt

SEQ ID NO: 201377 - DNA, 706 bp, Cannabis indica
caagaagtatacacgagagaaatagcaaggagtatttctatagttagttttttagtttttttttttttttgttctgaatgtaagaaaaatacgggttaagaggcattagatggagaaaattgaaacaacaagattaaaagatactagcataaatattgtatggtattcactaaatttagatttaatcatattcagagttctctagaatagaaaaaaaaaaacgattgagaaaatcattttatatttttgatcaaaaaaataaaatcccattaattaactttttattaaagttataaaaaaattaaaataaaataatattaaaacaattaataacatattccacaactcattataaccctatacatcttcattatccaaccaatcaaaattttaaaaaaaaatgttctcatgagtgagagcaaaagtggtgctctgatcacctaaaaattttcctatatataagctaatgaagtgttttgaaattgagtaatttgaagaataaatacttaatgcattaataatattaaagttataattgtgtaatttcgataggtacttcaaattgtcactagttaattttttattggtctaagtcattaaaattttatttttttaaaaaaatattagtttacatataccaataagaaaataactcgtggataatgacttcatatcagggccgtctcaaggtgatgagaggcctagg

SEQ ID NO: 201378 - DNA, 1014 bp, Cannabis indica
aggtcgaaaacatttaaccctaaaaaaaagtatggttacttgcatgagattataataaaaatagaaatttaaataaggacaagtaaacttcaaccaattaaataattaataatattttaatattgatactaactaattactaaataataataattaactaattaaacatatgtttcaaactaattaatttaagaataattaacatttttatctcttgaatttttacactattaagttgtgccccttatagtatatggttcgttaatatactaatgtagttctttcatcatattctataaaattttatcatgaagtgagtgacacagtagatggtctagttgataaatgaatgtaaattaaataactttcaccatttttacgtaaaaaaaattaaaattaaaaatataaatataaattaattttaaaaaaagaaaaatttcaatttattttattattcattacgtaaaaatgatgaagggtatttaatttgcatccatttacaattatcatctatcacttcacttatttcacaataaaattaaataaatgatgaaaggactgttataaaagttatatttcgaaaaatattatcaacaaaccgtgggacacaatttaattagtattataaaagttcacggtaaaaatgctaattgtttttaatttaattatttatcttttttaaatgtgatctactaattaattaagaaactagaataaaaaagtacagtatttgagtagaaagtcaaatcacctgtgttgtaattttatcacatttttattgttttaattattattttggtccaaggcaatttatctattgtgaattaatgtatttatgaaatatttagccgttgatttagtctcaattaagaaacttagtcaactttgaaatagttcaaaggatatttttttttttaaaaaatattgtattctatatattataactcataactaaaatgaagaaaaatagaaaaaaactgtaacgccctaatgctaaggcacgctacagtgttt

SEQ ID NO: 201379 - DNA, 2248 bp, Cannabis indica
attacccgatcagcgaataagctctctttcttatttgtcttgaacaaagccagttgaaactcttcctacaacacaagtgtaacgcaaacgagttaaagactacttaatcttaatcaccttttaaaccacaaaggaagataacaaaccttgttaattaatccatcatcgatcacagcactgctgatcttcttaaaaagttcataaagcgcttcaatttcgcttacactgactgcattcaatagacataattttctattgtcaataggtagaaatagtgcaaataatttccaatgattccatacttcaaattctttctttctgccatcaataaccaaagaatattcattgattactcctactttatactctctctctctctctctctttactttatattctcactgtggaaaaaggcaaacaatttgcaatgattcctactttttttcaacaaaaaagaaaaagaggctcctcacctaacccaaacattatttaggtacttaaaaaaatagtcaaacctcaaaacttgttggagcaaaccacacaagattgaacatttgagctacccttcttgggttttaaatgattcctactttaaattatgataatttgacaattagattgaattattcagcaaaagcaatataatatatgaaaattttcactaatctattttggttgagaattcagaatcatacacacagtctcccctgcaagaacagcggggtcgtctagccctctcgattggttatacaagtcgagatcaaagcatcgcaatagggaagcaaataaatgcttaaacccatctatgcactgcaacatgatattttctctaaatcaaaacactccatatctgttcaaagaaaccgataaaacatgtgtgagaaattcataaatgtcttgaattcgatcgatactaccttcaaagtaatgaaaaagcacaatgaatgaacaaacctgttaaccatttcctacttctgatattaagctcaactacgaaaagattcttcgaattttcgaccaccaaatcttttatttatttgtccctggaattaacacaatatgataaaagtgttcaatgttgaaacaacttaaacatgaaaatgagtaaatttgagtcctaaaagattgaactatcatatcattactcataaaataagaattttttagagtcaaattattttcatgtgaagtatcaagattgtactcctatatatgaactaaattgttagaacaatgttaaagaagtaaaatttggaatcaacacagtgttcaatgttgaaagaactttaatatgaaaaagaacaaatttgagtcctaaaaagattgaactaccattactcttatgaaataagaattgttttagagtcaattattttcaagtaaagtatcaatgttaaagatataaaccaagcatattattagaacaatgttaaagagagtaaatttgggtcctaaaagattgaactatcttcatatatatcatatgaaccaaccagattgttataacaatgttaaagaagaaaattttgaagctttgttacaagctaccatgttaactaaaatattccaccatttaaattttgaagcaaaacttcaaaagattcaaacttccacatacccagaaagcttaaattgcaattcataaagaaaaaatcagatattataaacacaaacagaagaacaaaaatcgaagaaacctatttcatacaattaaagaagaaatcccaaacctatacacaagaattacccataaccaagaattcaccgatttttcaaatctgaataaatggaacaaaaccagatccaagatcccaataaagaaagccaaaatcccattacgaaagtacaaaacttgaaagcagacaaacgatccaatagtgcaaaaggaaaattcccagaaaaagagttgaaaagaaaacccccaaaaatgggttatcaaaatattggaaagatcataatgaaaagaagaaaaaggaactcacttttttgtttaatgcgtttggcttgagagaacaaaaaagcaagtgagtagagagagttgagtcgagttggtggctttaaccaaaaattgggaagatgacgaatttgacagattattcatatatgtatataacaactctatatattgtgatagaattatggtctggaattttaaatatattatattaaataataataatgataacaaataatattatttattgtttagagatatgaatgaaatactatttaaaaataaaaaaaaaaa

SEQ ID NO: 201380 - DNA, 865 bp, Cannabis indica
ataattaaataattctaaaaaaggaatgtctactatttaattaattattttaagaaaatagttaattataattaattaaatttaaaaaaggaaagtctacctattagtaacctgctattacaggttaaagaaaaatgtaaccatatagttacaataaaaatgtaaccattgaatagtcacccatatttatatatatcctacattacaagtatttatttatagaatatacattagtactctattacattaatttattttttttgtctatatttaattaattaaaaaaattatttctttatttttaatatttttttaactagataaatataattttataatttttatgattttttttaactaattcgttaaaatctttaataaactattttaatattaaataaatattcctatttgtttattttatttgtgaaatttttacaataaaataaaattgataaagatcagtttcctaatctaccctccttaaggcaaaaaaaaaaaaaaaaacgaacaaattatatgaaaagtagatatacacattatattattctgtacatacctatatttatagccactatatatatatatttatttatttattttttgtaaaaaatagctttcattcataaggaaactaagcctcatggtcattataaaatacatttgtaggaatggatggagggtccaccaaaccaaaacaattgtgcgataaaacccacttagccacgttatgagcagtaaaattttagatccttacaatcttagagaacatacaaccatgaaaagagaaggaaagacagtaacagtaattattatagttatcaatctcccatttcgtgcttgcacgattgagagcatcaatgac

SEQ ID NO: 201381 - DNA, 841 bp, Cannabis indica
agaagaagaagaaaaagaaaagggaaatccaaaatacaaatcgagagagagataaatatgagaggtcatatctaagggtttggagagtcggggtcacaattttgtgctctaattggtgcattgatgttagaaaatgactggactgatgtgaaaggtgtcgcacgagaaggggaacaaaaaaagtgcatgcgagagagaaagagaaaagaaaagaggtagggtgtctattaagatttttaatatatactattattaaaagcagtacctgctgctaataatatttaatatatctgcctctaaaattttttaaaatgaatgttggaaactcttccacaattcatatttactaatagataaattttttacactaatactcatattaaaataaatttacttattatttgtccattattagtggtgaactcgtaattgttgctgctaataatagggttgttgcactaccataaaactaatgtcgtgtgacggttttaaaaatatgatgtggatgttggtatgacgatttcacactgctttacactgtgcaatatcatgcttgtggtggcgtattttaaaagcatcatgccacgagataacattgccatagaaatcatcatacaataagaccacgattttactataactgtcataccttgtagtctatggtatgacaatttagaggacactatcctaccatatacaaaaaatgaggaagaaatttctcattatttaaccactatttatattaaaaaaattaatatttatttcaccactacaataagactaaaatgaataaataaaattgatgtattctaaacatgaagagattaaaaaaaaaaattaa

SEQ ID NO: 201382 - DNA, 1045 bp, Cannabis indica
aaataaaaatcgggatgtatgacagtatgataaaaagtatttaaaaaattggaataaaaaatattctattatcgcgatttattcataaaaattgggataaaagccaatttttatgcccactccattatacccactcgaccagaaatagaaaagtatggtttccattcccgagccttctaaaaagccaaaatgttctgttaccccagcgctagtactgactttgggattccagccgaggttgaagattttcctgcccctccagccatcctcctgactctggcccagcccgacgaagagaaaaatcagctctgcattgccaaacaaaactatgccgtggacgagctatcaaaaggtgatgccaaagtcgtggctctaaaaaagtggctaagggagattcaagatggaccctttcgaggcgagtacattggtgaggtctgggatctaaatcttgatcctaagaccgactggttcaaacgctacttaggtggactttggcaacttttgctttcgagatggtgagttattttccttgagatctgatccacttctatctattgttgtcagattgatgcggagatcggtcgtctttcgaagcgttaatcgactaagggtttgccatctcagagctgggtggcatgggttgagttttaaagaagcttggggaagctgagagtcagatggagactcttcggaatgacactttggccgagagggcccttaaggagtgggaccaggagactttgatggctaaggatgagatcattgcctccacccaaactaggttgaccaaagtgaagaaggaccttataaatgcttgagaagagtttcagggactcacaaccagacccaaggctcttaaagacttatataaagccaacatggaaactgagcaagtatgtcagtgagttgaaggagttttgtgagttctgggatcagactatgaaggaggttgcgaaggctacgagggatgcattattaactgtggtgacctataagcactgtgtgaagcgcttcaaggatatagtttttatgtgctggaaattga

SEQ ID NO: 201383 - DNA, 992 bp, Cannabis indica
aggggctgctgcccaaagacatgtttgaattttttattgtttggcttggtaagcttggtatatgcgcaattgtatgatgcataaaacctttgtttttactggggagaaggcgttggaatgggctactgattttttgcatgatttttgggataaaaagggtagtggacaagtgtgtgaggctaagcaaaagtgcaaatggagggctcgggaggtggaatcagttgtggtaaatatggacgcgggaattgatgtgggggctgattgttgcagtacaggtagtgttgttcgtaatcacatcagaaatgtcattgcctcacaaggtattttaatgaataagccattttctcctattgctgctgaatttttagctatcaaacatgggattgaattggctaggttgctgtctttggagcagtgtagtattgtttctgattgtaacatggcagtggcaatgcttggtaggccgccgaagctatgtggggagtgggatttaatggtatgtgatattcgcaagttactggatgagaatggtattttaggtgtcttctttcaaccaaattcagcgaatgcacatttaatagctaagaatgttttatgttgtaaaacttcttgtttctaggatggaagagttcctccaatggctgcctctgctatagtggaggacaggcctatccttttataactctgggtttgcttactattaaaaaaaaaaaggacaatagttagagagtggtggaagagcccacgtcgaaagccttggtggatatcttgtcagcaatttaacacgtaagcaatagaatgtgggacccacatcccagtccaactctttaatcagcttagaccaagacaatcaacaaaaacatatttcccgtttccttcctttctcaaaacaattcaacttatttattttgaatatataaatattattccttctccgatcctccctgagcaggtaatctctcacagcaagtaattctttctttttttttttt

SEQ ID NO: 201384 - DNA, 744 bp, Cannabis indica
tttttttttttttgtgaatactatactttgagtaagagttatatatttattgcgtcataattaattgaataaattctggtatatatgtacttgtggcttgtggtcacaataacaaattatttttaaaaatatttgcaactaaaaaattatatttataatgatcactataattcagaagaattattttcacaaacaaaaaaaaaataaaacaaaaaattcaatttatttctttatttaccactatacttccatgtggtatatgtatatattcttgtactcacataataactaattaataaacaaatctatataacacactctctacatatatatttgtatatgtatatattatttatgtcttgtagttgtataataagtgtattcacttaagtggggcataaatgggattgccacaatttttgttccccatatataaatatatatatagggcaagactatggtaggacctaacaaaagttccctaccggtagggaactttttttgaccattgattttagatcatgtggttattaagatataaggtgtatactcttacaataggactgcttgtatacaattaaaactttatacatattataataatatttaattatatatttattttaaaaaataaaataatattaataattaaaaaatttattaatttttaatttgaattattatttttttttaagttaactctcatgtaaatcttgacagtttccgcaccaatattattgttgt

SEQ ID NO: 201385 - DNA, 881 bp, Cannabis indica
gtaattttaaaagtaaaggttaactaagagattgtaattaacacttctaaaaaaattattcattgtacctttgggctgtcagaaccaggagtgaccatgttgggtttaagaagagtcccctcaagaagaacatgttgctcattcaaagccttataaactgctgcaagaacagtctcagtcacagctgcacacttttccacactatgggccccatcagtcaaaatttctggctccacaatcggcacaagtccattctcctgacatataatcgcataacgtgccaacccttgcgcgttctgttgaatcgacagctcagatggctcaattacgccaattttaagcacagcccgccacttggcaaatcgtgcgccagccttgtagtactgagcgcaacgcgcacccagtgagtcgaagccttgagtggtggtctcgccattagtgccagccaactcaacagtgcccttgtcgaccttgatgcctggaacgacaccgttttcttggaggacttcaacgaagggtttgccatctgaggtcttttggtagagagtttcttcgaaaagaatgacgcctgagaggaatgggagggcgttggggcaagtgaagaggagctcgcgtagggcttggcgattggattctatgttctctacattgatacttgaaagacgttttccaattgtgcccgtgctctcgtccgcagctaggattcccttacccggagtagcaatgtatttggcagttttgatgagctcatctagatgacatagaatagtgttgagaatggctcatatggttcatatattcaatcaagattcaattaaaaaaatatatatatatatatatagtctaatttaatatacaaaatctaaccacttgagctagct

SEQ ID NO: 201386 - DNA, 1222 bp, Cannabis indica
atatggattgtctagattttttcaaaagggtttagcggtgacttttcagtgtataacacccaatcaacttaagtagcttgagtacttgcaactttgaatcgttcactctaataattatttgtttgtcaacactcaatgacatcaataacaacatgatcaatttaattacattattttatgaacaataatttttaataacattatcaatgcaaacacatcaataatatggcccgtctagctagtcaactaaaattgaaaacaaaatttctacatacatgaatattatctccatatggaaataatgctcgaaaatgaagtcatgttgttcatcatttggcttttcagtccatctttcttattgctctatctttaagtttggattgtaatgtttctctcttctcttgtggaaatattaccaacatagattttcccttttggggagaatctaggccgttacactgcggctatccaccgctaaagctcaactgctaccaaaaccaaacaacaattgaattagccaacatcaaatacaacgtttttgagctaaacaagagttctcgtattctcaaactcgaaagatccgaattatttcggggaatttgttcaccaggatcaaaaggaatgacaggaaatattgacttaatgccggggctccttgaatatgccccgggttctggaaatttgtcatttttttataattgtaccaagcacggtggtaattctgtggagatcggagatttcagttgccctaatggttccatttttaaaaatggttactatggtttagaaatggaaagtagaagatgtagttggaatgtgagtgttgggatagaatcaagaggaattgggtttgcacaagtagatgaagctgttagacaaggattccaagtgagttatacggaagcttccataggaaattgtacggcatgcattagtaaattcaatggattttgtgattatgattacaattcaacaaagtttctttgtcaccatcctaaacctcctcatcaaggtaccccaattctatctctaaattcttttatttatttatttatgttatagccttccacattaataattaagtctttgcctttcatgttcataaattaatcctaatattaattaatactgcttaaaacgaggccggtcctatgttaatttgaggctattaggatttgaattctcaacctcttaggacctaaactaattaaattactactag

SEQ ID NO: 201387 - DNA, 1308 bp, Cannabis indica
tttagggcacaaagcccaacagggttaacatgcaccaagcataaacatcaaggcatagtaaacaaaggaggttattcctaccttgatgtcctaattctatctcagtagattcataaattaaagagttggtgttgtcatctcctaaaaaactatcggagggaagaaattagcttcaagttatctagcaagaatgatccaataagataggaatttggagactagaactcaattgagatcagctcacgaagccacttgtgtttaaaaaataaaagtccttttccctattgccccaccgagtatggggcatccagaacctatatagcctcacgccaaagccaaccgtctgggagtgagagtattcttgaactaaatgaacataatgaaaattgaagggggaattacgggttccagaagtattggctccaatggtccaagagttgggaacccaaaagggtaaatgtggcctcgcggctgtagaatttttccctatcttcttctggtttatcttgttggatgcactttgaaggcatgtgtatggtttttctacttatttttgtaccagtacctattttacttatcctcagctatttctatgatctccagcaggagcttcttctttggtcctaggttcttggcattggggcatgataccttggataaattgaagtcctcaaatgtttggtggctcaagataagtttaccctagcagcaattaaaagtagtcatcaaatcacccacattcaatttttccctcttataaccagcaaatattttggcatgatttaaaaatagtttagtgggagccgttcggtgcaaagaagggatcataccccactcagtcagaaggtctgagcgttcgaaggttttgaaccccaatgaagagaaaacctatgacagtattccttgatatacttttgagagttgaagggaactagggtttcattggctagatgggttagtaacttataaaatccatctttgtacttgtcacccttttcggggatggatagtagttcgtaaaaatataaaatttttgtggggctaggagtgggctagccctttacagcataaaaaatgaaaaggcctgagagcaggccgtaaggttgaggaatcagtttatatggggcttgtccaacaaaactaaaaaatcaatgaaatagtcttgaagcggtaacatggctcctaacttaagatgggtctaactccatgctccaaattattgtaattgtgattaggcattcttcatccaagggcagatgatggtacactctgaaatcggttggctggatcccattctatgctacgatc

SEQ ID NO: 201388 - DNA, 1460 bp, Cannabis indica
attgtatgcaatgattgattttagataataaccatttgcaatgtctcatttgttagaaatatataaatcacaagttaatttactattgcatacatttaaaatattaggagtaaataatatatagtaaacatatttcattcttctttttatagataattaagaaaaagtgatttaattaaatatttaatttaatttttggttgcggataaatatttaattataatttttaacggtaataatacttaagttatattttcaaaagtttcataaatactatctacctattaattgtgtgaagttgttatttattgtcactttcattaatatatttaaattaattttcaaataaaaaataaaaaatataatgacctggaccaaaaatagagcaataggggctaacactcaaatctcttcacccaagcccgaaaaatcatttaacaaagagaaatttacattatatgttgtatgttttaaatttctttctttttgaattgtcttacggtattatttataattatactgtacatttttttttattttaagtcgtttatatattacaacttatactgtacaatatatatactctaaattgtgtacacgataaaagttaatatactattttgtttagtcacttgtcacgctagagtttattttgctctccttttttgttaaaagagtttaagaaagcttaatttaatgtgggtagccatgtttcttaatgttttattcttatatatggctcagtatttttaatttgatccatatgaaataatattattcaattctataccactattttttattattgttttagttttttcttctttaatttttttcttttgtttttgaaaattttaaccatatttatgtggtgattgcagttgaaagttagtttttaattggttattttaaagatttttctttttcaaaaattatttttcctttaatttttttttttgtctatttgttgttgcttcaatcctataaataaatattgttcttatttcatttcaatagcaattacccattttaattcatcgtcctctgttgtcaaaaaaatccaaaaaaaccttacctcaatccgtaatggagaagaagaattttaaagagaagtctcctattgctcctatatatatattagtagattccttttagagagtcttcgtagaaacatcctatattttatatattttttaaatttttacagagtttttctgtgtattaatctagtttgttgagaaaaattaggattgcaataatgagaaaaatagtttgagaatcgaccaaatattattttttgtttaaatgtttatgatttaaattcggtcaacaacaacttggaccaaaaaaaattatatcaaaatatattatgttctaatttctttaaagaaatttaaatataggataatgtataaatacgaaattgttaattctccattttttttgcacgcctgaagaat

SEQ ID NO: 201389 - DNA, 725 bp, Cannabis indica
aaaaaaaaaaaaaacctgtttgtagaaattagcgaggcgcctaatatcagtggattctctggaaatatggttgagggtggctcctatggctatgtcccctgacgctgcttccgccatttttcacagtgactaactaaaatattagctaaacatacaatagaagagttttctcaataaatatggaaaaaactaatgaagtgtatttttatatgttagaaatgaataaatgtaaaaaatgagagtgtcactcatttttacaccttaaaatagtatttttcttttatatttttaggaaatttcacataaaaattctattgaaactaagaacaacttatattacaactaaaatccacataacaacccacataaaaatcattaaaaaaattactagagcaacccaaattgtaaatttaataaaaaaaaaaagttaaaaaatagtatttagagtaatttctaaaaaaaaaatatgagtaaaaaataaataataattaaaatataagaaattaagtaaaagaccataaataaagttggtaaaactcataataataactatcaccgaaaaagtcgttgaagtagatatccatgtcggaagagtcattaactccgaagaagtcattgattccgaaaaaatcatcagcactaaaaaagtaattggcgccgaaaaagtcattgaagtttttatcatcatgagaaaaattactggagttagatgtttcagataaaaa

SEQ ID NO: 201390 - DNA, 1585 bp, Cannabis indica
aaatttttttaaacggttaaactttttttggttttttttttttttaagggttttttttatttttaggtttaatttttttaagtttagaaaaaaaataggaagtttattaccacatttaactttcatagtagaccgacaaaaaatgtaaataaagaaaaaaaattgtagatttgtatttttgtaaaatttttgttttattttggtatttatgaaaatataccaaaaaaaaagtcaaggttatttgaatttatactagaggctgcttaagctaatatgatgaagtgacttgtatatattgaacatttagaaaataaaaaacaagaaaatgtaattaattagtgaaagtaatacaattcctataagtatataagtgtacccaacttcttattaattagcttataatgacatttgtggattaaaaataaattttaatttaatatattggtacttctgtagtacgttcagtagttgcataaatagacttttatttatttatttatttatttttgtgaataacggcgaatagggaccgtaggatatgaagcatctttcaatggtgggccccagcccaaatgtaataagcaagcaataccgttgattttcggcccaatgaaatacacacaacgacgttgactggagaatagcccacacaaaaagcccattttgtgactcttgtcagtcactcagtcagcaccaccactttttttttccccttataaaatgggcggtggtaatgagttgtaaatgggcccactatatttttggattgtgggccccacacaacttcattaattgtatcagaaccacagccgtcagatcaaacgaatgttcttccttaatctaacgtcacgtgatcctttgcctgtccccacgtggaccttatgagagagtgtggaacacgtcagcataaatatttttttgattaaaaaattaaagagtgagatttcccccttagttgggtttagttgagtttaaaaggtttaagttaagacttaagtactaataatgaacatatttttcaaaaaaaaaaactaaatactaataataaattgtgttcttcaaactttaatatatattaatttgtgtatcttaaatttctgtctcagagttggataaaaattcttcaattcaacaatcttaataatttgatgagaatttttaacgacttaaaaaatttaggaacacaatataatatatgccaaaatttgaagataaatactaattaaccttaatataagtatgaaatattgcgctatgattagttaataaatttgatgagaatttttaacgacttaaaaaatttaggaacacaatataatatatgtcaaaatttgaagataaatactaattaaccttaatataagtataaaatattgcgctatgattagttaataattttttatattatctaagagtactgttattaagtacgagtgatattaaatacgatattttacgattagtagacgaacttttaagtagtatttaatacaattataaaatggcatcttacaattgattaacaattttattaaaatataatatattattaaattacaccattaattactaattctgctatcga

SEQ ID NO: 201391 - DNA, 1929 bp, Cannabis indica
caaaaaaaccgatccaaaaaatagaaccaaaagagttcacttgtgattaagagataatgaactaaaaagagcctcttgtgaccgagctattcaagattggtgggcaaaaaaaagccaccatcttgagaggttagggtatgttagagattcttacattgataatgtgtggaaatatatttagcatatataagatccaatgactactcctcttgcacttaaccttccaagttcaaattttagagtttttagagtttttagcgactaaatcctcccaactatcgtttctcttgcacttaaccttccaagttcaaattttgacagtaaatccttccaaactattaaactgttagcaaatttaaggtgtcattcagttaactgccaccataaactacttatgtgtacactcttgtacactggtacatttattttgatgcacctaatattattatttcaaaattcattttaaaattaaataaaaataaaaaaattaaaaatattataaattttaaaatattcttttataataatattaggtagactaatatacacgtgtcacgtgtaacaaaaatatatacataaacaattcatattggcagttaaatagtaaaaaaatagatatcaacataaatttactaatagtttagagaattttaaaaactaatatttaaacttaaaaggttaaataccagtgaaataataattaaagggatttaaccgtaaagaactttaattttttatataaaaccctgtacactttaccaaattctatcctaatactacatttgcaatagttttatttttgggcccctgtaaagtacaactgcaccaaaccctatatctctaaattaaataattaggaaagtcaaatatttggcctaattttgacaccaaacttaattctataaatatcgatggtttttggttatagccgcaccgcataattaagttaattgttaattaattattattagttccaatgactaatattaatattattattgttctcgtactaccttttctctcactgcaatggctgctcatttctggctcacccacgccgactacaaatcagatccccaaggtacgtacgtaaaataatgctgatcattaaaatcatatatacttggatcatctcatctacattcttgtaaatatagaaattcatatatatatatatataattgtcataataattaagcagcattatgtgatatatatgggagcacaaaaagcatcatcaaatgtaaccaaaaaagatgttaaagttgctgatgaattagctcacttgcagttactctcctccatcatcccaaggttaattaattattatatatatatatatatttacattattattaattcgttgtacactacgtacatataaacttaaatttaaatattatgtaaataaatttttggcagggaagagaaggaaagaatatctctaatccaccattatcaccatgcaattagaggattctctgctatgcttacagataatgaagtttcccttttattaggtatatttgtctctcttaataattttatgtagtttttatttaataaatattattatttatatatatgcattcgttttgtcttgtgtgatgaaaatacaaaatgggagaacagatcataatagtgaagtggtatcggttattgaggataaaatagttgaaccacaaactactcgttcatgggattttttagaagcgggaatgcaatcaaaatggggtttggataagccactcaccaataacaccattattggtgtaatagactcaggtacttacatatataacaatatacacaggcccgatctgagttgaaatggatcataagtaaaaaaaatgtttaaactcttacttataaaaataaataagtatttaaaaataaattattaaaaaatatttatattttttaaaaaat

SEQ ID NO: 201392 - DNA, 790 bp, Cannabis indica
ttgtcttacaaatccaaatctgttgtaatgaatctgagggagcaattaataataataaagaacccatgtgatagtggactgttattaagaaaagattagaacttattctatttccgtttttggatagaagaaaaaagtaaagtttctagtacctttatgaatcttatcatagtagaacatccagaagacacttaagaaaaaggtggtggtcccttctattttaatgggatttgaaaatgaaacttagatcaaagatgtaagtgctgtcatcatttactctttaattaattgttataggaagccaaatgaaaattagtttaattaagagatttttacactatgtaatttttttttactaatatttaatatttatacttgtcttctcttttttttttttttacatttttatattttaaaattttctctaatactattataaagtttactaattataattatacgaaaaatattattttttcttcttcctcctttatttacacatatctatttcaagtggtagtcatctccaccctataagtgttgtcggcgatggacaaaaactcactgttttgttctacaaaaagaagaagttcttttggggaagaagtctctatgtcgtttttcttttttaaaaaaaaccttagtttttttaattttatttattttgttatatggtaataaaaacataaagtttgacccaaataaaactatatatgaaaaaacccctctaattaactcataaaggtctttaagcatttaatcaatttattagccgtgtaagtttctagtg

SEQ ID NO: 201393 - DNA, 1283 bp, Cannabis indica
gcaagaactttcttggaagttatggaaactagaggtttagcctctgtccactttgtgaaaaagtcgactgccactactgcgtactttgctcctcctcaccctgtgggcaatgccctaatcaagtcgatttctcatattataaatgggtatggcaaggtcatcattctcagttctgttggtggtacgtgaggtatatgtgaaaatctctgacatttatcgcacctcttgacaaattcatgtgtgtctttatttattgttggccaatagtatctttgacggattatcttcattgacaagctttgccaacctgcacggtctccacaaaagccttcgtgaattttcttgattatctcgcttgcttttgtggagagcacacaatgtaggagaggcattgaataacccctcctatataatttgccttctactatcgtgtagcgagatattgaatataagagttttcgtgcctcatttttgtctgctgaaagttgcccgttgagtagatatttaactataagtgtcatccatgtgggcgaggcttctaatatttcaacttcttcaaattcacatatactgggtttatttagaactttgactggtaccaaattcaatttgtcaagttcattttgcgaggccagttttgccaaggcgtcgacatttgagttatgttctattagaatttgttcaattttaaagaaatcgaacttctccaagttcttccaaaccttcttcaaatatcttgccatttttcaacccttcgcctagtattcgcctagaacttaattcacgattaattgtgagtcattgtagcaacacaaatccacttctcatgaaaccctaacttgcgcataagacaacaaagaaaagaccactcaactcgatcataggccttagacatattaagtttaagagcaaaagcaccaatttaactctttaataggcatttaagatggttaacacactcgtttgcaataatctagtatgaaatattgcaaaatagggccaaattcggatgcatgcttaggattataaagaataagagtaacaggcactcaaaaccttttcatcttatgaagtaatgtttctatatattccgccattttgaattccttatctattttcgtaattaattgtgtgaactaacgtgcctctcctgctactctatatatttatataaaaaaaattaagaatgatgatgtggcatgtcatatttttttcaaagtatttttacaattttttggaaatttgaagtttttacttaagaaaaaagttcatatttttttttt

SEQ ID NO: 201394 - DNA, 811 bp, Cannabis indica
ttgtaaatttctaaaaatagaatacaaccttagatttggtattcatcaacaatgttgcattgcaagaaagtaataatttatcattcttttaaaatcctattgcagtaagtgaaattggtgaattcatgagttgatcttgtattttgcatctattatagataaaaatattataataaagatatatttcaaaacaaaattaataaaaaagaaaagaaaaaaaactatactctattaaattgcacacttggcatgagagtggtgagcaactctgagtaaggaacacatggagaaaaataaattcagcgtggtcaacattatgtgcatccaaataaatttattttaaaaaagaaaaagttattattgtaatttaactataaaagccgaaaccattctcttttttatagaagttgtagattagttttaaataacatattttatcttttctcagttaaaccttaattctttaaacttgtttctctcagtatctttttttttttcagtcagccaccgcctctctcacgcctgagtagatcatcgtggccactcccacgtctaacacgacgccatctccactagaattatacttgtgagattatcacaggagatggtgaggttgacgagattggtgcaactcccaatctcatgtgattgaacaaagggaggtttgtgaagttaagtgtgataacacgtgagtcgttgtcgcacatgactccagagaaggaacataatgatgaagaaaaagaagatgggttcttgtcgtcaagaccaccagaagctagtgacaaaagactgacaaaaaaaaaagaagaag

SEQ ID NO: 201395 - DNA, 1753 bp, Cannabis indica
cattaattaaataaaattagactcacggttattacataaaaggtcttccgaaactgaggaggctggaatagaatcatacaacttgtgaataaaagtcaagttagctacattatgggctgcaaaattacaagttctactaacatacacgaaattacagtaaataaaagagggagatgacttagaacaaaaggagacatagttctcaagcgcccaaagtgactccgtcccattaagagcattgataactattctcgagtcactctccactaaaacatacttataacctaactcttgagtcaatgaaacagctaaacaacaggtcgctacttctccacataacacatccgagaagtccaaccgagccgtatgaatccgaaccactctacccagaagtccaaccaccgctatgcacatgctttctaagcccaccttgacatcacaattcatttttatccaatcctgaggtggtggcctccaggtcctcctcaaagttggtgtagggcaagacaagaaaacatcataaagctctgcataagtacaaatctggtcaatacatttcaaaacatccagatgagagttattatgtataaaatcgttttgcatcctctaatattttagtggtttttacatcacatactgacatgttttaaaaatatagtgtaagttttatatggttgttttatataaagtgtaattttttaaaaaaaaaattgtttaacagtaaaattgtaaatttttactttatgttaaagagtaactaagttgtaattaaccatttctcttctatagcgcttctcaatttaagatttctacaactgtgtaatgatgttgaaaagtaattaagttgcaattaaccatttgccttatcatggtgttcatgttttcagttctaaccacttatcttattgattctctattatatgtaatgaacactattttgcttgtttttaaaggtctactcaatggtattttccaaacttttgggatggaaagtttgagtaggcagattcaaaaacattaagcctgaggaaatatcaaacaaaatcatagcaacaaatacgtagaaccgaaaaccgaagcaaaaccaaatcagtaagaatttaacaaactataacttggaaatcaaatcaaactactacaaataccatgtttcaaaagattgattgtctgcaaattttgcactaacttaagtagcaaacagaatacagtagtaaaaccatttaaacattttgttccaatattgaatagtcgacttaaaaggaagtcaaaatttcactcttagcaacataatgtcacttatttagctgccaacttttccttagccttttgaatcttcaaaaccttcttcacaatcttttgttcttccaccaagaaagcacgaatgatcctgcacaataaaatggatttgttaagagacacttagacataacaattgggaggatgagtgttattaattaacagttacatacctctccctaacagcacttccagaaagaacaccaccataggcacggttcacagtcctacggttccttgacaatctagagcgcttgtattcagtgggtctcaagtgaggaatctgcaacaaaccataaattagactttaacaagttgggatgtgaaggaaaagtcgccatccaataagatgataatgaaacataaactaaacaccaaacaagctaaatcaatagaactcaaatgggagcaacgtcgcacacaagagtctaaaccccaaattccaaattcttcattt

SEQ ID NO: 201396 - DNA, 346 bp, Cannabis indica
acaactaaaaaaataatttcatgacaactataaataaattataaaacaactaaaaaaaattgtttattattttgactaacgatgtatttttgtaaataaaaaattcaaagagtataattaaaaaaaattctatgttgaagtatttttgtaatttttttttttaaattttaaaattttattgtatttatgtatacgatttaataaaatattatatttttgtccttagaactttgatacgtactaaatcatacttctaaaattttcaagccattaaaagttgttactgtaactcttaagattgttggatttcaaggaattttttttttaattaccgttcaattttact

SEQ ID NO: 201397 - DNA, 1150 bp, Cannabis indica
aaaatgggtgttgattactataacatattgaaggtgaataggaacgccacagatgatgatttgaagaaagcttacaggagattggccatgaaatggcaccctgataagaatcgtaataacaaaaaggaagccgaagctacatttaagcagatctctgaggcttatgaggcaagttcttttcttttgttcattgatgtttgtttaagcttcttgagttcattttaattgatgggttttgctctttttttgtattattggaattatattgtttgatattgggatatgagatcatagttcatgattccttatgttaaaacttcatgggttattttgtattgttttaacttcaaaagtaataattgggatatgaggtaagtttgttttgccattgggattgagacttttctgttgttttgttcttaagatttggatgctattgggattttcatggtggtattctttgttagatagaacagaatgatgtaaacaggtttatgtagatttttctataaagggcatgagcttgcttgtttcatttacacattatatgaatgaatgtattggctataaaattcatatttcatttaagcttgttgtgtttaggaatgaaaaatgtgaatttgatgacttcaggtattgagtgatcctcagaagaaacagatttatgatcaatatggtgaagaaggattaaaggacatgccaccaccaggaacttctggatctccatttggaaatggaggttgctcaaatgggtttaatcaaaggaatgcagaggacatctttgcagagttctttggaagtagtccttttagttttggttcatcaggaccagggagatctatgaggtttcagtcagatgtaggaggaggaaattttggtggattcggtggtggtgaaaatattttccggtcatatagtgaaggttttgttccaaagaaaccaccagctgtggagagcaaattgccttgcagccttgaggaactatattctggctcaactaggaaaatgaaaatctcaagaactgtagcatgtgccaatgggtatgtatttttctaaatgactcctctctttgataaaatctttgaatatcatatctagctaagtgtcatatagaaaacattagtcatttggctaggcttctgcttctgtt

SEQ ID NO: 201398 - DNA, 765 bp, Cannabis indica
aactatccttagttcacgagtccatcttattaagcactctagccggtgaatattcatacaaattagtgtataatggactgaaactctctatcattcttgttccttttgaagaagaagacgtttcataggaaatttttatagagttattaagtagtatatattattttattttttttttgtcttcaaagagttctttcctatcctatagaatgcaggggtatttataagccagtttctctccatgcgctggctggaatgatcacaattagaggagatccgaccgttgatttagtaggtggtcgttttatcacatggcatttaagggtgtcagatggtacaggccggacaccatacacgtgtcgttccagggtcttccttttaaatttcccttgtcaatggtcgttggatcattcagacaggtacaattgggcacgcatgctttgtacgatgcatatcatgggggacaagtcttgacaccgtacctaaaaaagcttagtagccatgtcggcaatccgacacgtacgatcagagcttccttgcgataatgaatgggacttcaacacaatcgaacttcctccgcgacctatatcggcgctcagcgacaaggcatcatcctttgcgggagcatagaacttcagccctcaaaattgaagaggttttctgatcacgaacgccccccgcacttgttgccttcgttaggggaaggtaatctttctatggaggaacctttcggttgagctagggcgtcctatcttctaggtacca

SEQ ID NO: 201399 - DNA, 866 bp, Cannabis indica
ctaataaatgcagcttgtgtactgatcagaaggagaatggccagcatttgtttttcaaatgtagctttactgaccattttcaccaagagattaagaaataactctcttggaatgcaaggactaataatccttctcagcttataaggtggataggtaaagcaaagctgattaaattaaggaaacaagtacttgctgccgctattgctcttttagtttacaacatttgggagacccgaaatagtgtcatttggaaaagggagcaaataataagcaacagattgttagaagaagtaagatggaaactcaaaattaggatgtatagatatagattggttccatacattgtaaggatgtatatacatagagaaattgtatagttaaagttgaagttccgaaataggggtgctgttagtgtgtaaaaattgttttgagcaatacaacttcttgatttattaaaaaaaatagtataataataataatataatataaataataatattaataaaaattttattattaatatttattttattatttcttagtcaataagaaatctttaattctaggatatttggtcaacttcgagtaccccaaaataccctggtatttttagaatcaacttgtctcaataatcccatcaatattactaactaaaatcattttgatatttttggcttccaattgggtctccaaggttgccgatcctaaaaatatttttatttcacaaataactcatattatattcatattttttaaaaacaaaactttgtgattaacaattaaacttatttatctacttattgtaaaatttataatttatgctaaattaggttagctagatcataatccttctcattactacgtaa

SEQ ID NO: 201400 - DNA, 902 bp, Cannabis indica
atcagaaataatgttttacatctaaagtattagaacctttcattcttttgtttgatattctctttttgtttcccttcttttttgctgtagagattctccaatttttgaagtacattatccccttccttctactttccaatttttgattttttttgtttaaaaaaaatgaaagagaaaagaaatagcaaacaaacgtggaaagttgaggaggacaagtgggttggggagcaagcttctctcaggaagagacacctcgtgtatgtgactgcaaattttgaccaatcccacccgcattcatctcaatttacactacatataaataaatatacattttaattaaccaaacacaaacccaaaagctcccatctaaaatactattctttgcgccttcttttatattctcaccaaactttctgtgaatccctcgttaacctttaaggtacgtctctaatgtttttgtgagattttcttggttttgttcaatgaatactgccaaacttttctccttcttttgtttatttatttatttatttattaatggaaagctttttagatcgtattttactctattttggacgcaaatcttgtgctttacgatgttgttttctgggattttgggctcacttacgaagtcccagtttgaccatatggggaatctgatcatatttgaatcatatttacaacagacccttttcctagctgaagatgtagtattgattaaagatcttgctttgagtgacaataaagggaattagattgcttactacgttttatgtaaaagctttattaaactgaacaaacaacttaaaatcctttgttcatttgttcttcatagatgaaactgaatctgtccttttctgttttcaaattagaaatgggtagcttgacaatcgaaccttttt

SEQ ID NO: 201401 - DNA, 1150 bp, Cannabis indica
ttaaagaacaactaaaataatataatatgattatgacaacataactgatactggtatctcataaaaataagttatgatagtcaaatatttattaattactactaacagtagtttttttttttccgcatattttgtaataaatataaagtatacaaaattgtaaattttttttatatttataggatttttcttaggtaggagcgttacttttgctctcataattgagagcattttcttatacttttgattggttgaataatgaaggtgtatacttttaaaataagttgtagaacattctattagttaacttcaattttattttctgaacaaaaatactttaatatatacatgtgttaattaaaatattcttttacattcaggaccgacaatatgtgtaagttgtgaatgtaacgaagaagctggggagttggtgtgtgttcgtagtgattcgagaaagggaaagtgtccatcaaactgcagtgaaagttgcgcctgtgacaggtctcgttgccctcgttgttggtgcaactataaggttgtgggatgcccaaaaatctgccccccacctagtatcaccaacgcccatgttgcatttgagaatcttctcactttcaagacaggctaagtaattaacagtgcagatgttgtgctttttctaataaaatcatcttattattacccatggatcaagtctatgtttgctaagctttgcatcaaccactactattgttgatgcttgtctctattactaaataaaatgcaaactgttggtatttactttgaactttttacctttaaaaatcatgttataagttgccacaaaacattgttacgaaatgttatgatcaaatatttggggcaaaggatgattatcaaatggataaatctatatctataacatatctataatgatgaagtttcattctaaaatttgtcttcttctagagtctttctattttgtgtttttgtgtctattctataccatttatataggtaaacttccttttaaattttggttcatgtaatgtatttttaatttgtgaaaattacatggaatatggaattttgtaaaaaagttacaaaaatatgacatttataggtttgtcactcttcaatggcattttttcacagattttttatggtatttgat

SEQ ID NO: 201402 - DNA, 1296 bp, Cannabis indica
ggttcaagtctggatctgggtctagtcgagttggggtctggtccaaagttcaggtttgggatcaagtctaggtccgggttcaggtccatggcctgaatccgagtttaggtctagggtctgggtctgggatctgaggctgaggtcggggttggaattgaccctaaaacctttgtaaatattataatacaaatctaatacgagtcatttgttatttaaatataataggactcacgttgtattaaaatttatagctgtcataattaatacaacataatattttatccaaacatagtgttaattattatttaataccatacgaccattatacgttttacaaaacgaaccctaaaagtattaattactacatattataaaaataggccaattaattagaatttttacttccggagctttgacacgtattaaattatatgtccttaaattttttaacttgttaaaatttttctcaaaattattgagattgttgtattcaagattttatgtttaattttgttactaatgtagcaattattcatgtaaatataaatcgtgtctcttgaatttttatccatgttaacatctattagtataaaaaattaggagaaatttcttaaattcaacaaatctcaataattcaaggtaatttttaatagcatgaaaaatttaagaagtatgatttaatatacaaatcatagtttgaaagaaaaaaaatatcctaattaatttttattttaattaagtaatctcgtctatagtcatctttttaaaactcttaaacactggctggcagtataaattataacgaaaattatttataataacacagtatatatattttttttaaccaagtaaaaaatttatcaaatattaaaatatatgttagctaaactatgtacaccatattgttactttgtctaacataatcaataaagttttaaaaaaataaaagggtaagacaaagtaataacattcaaagccatgatttcatgagtcatggcactgattagccatgcaatttatccatgtatattagttatatatattaataaatgaaataatttggaatatagttaagtattccatccaaacacattacacatgtatagatattttatacatatatatataaatgatgaacactcaattcaatatccttttcaacttaattaatattgattgctatcttttggtccattattttctttttctacttttcttccacattaagaaatggattaaattataatttaatattgcatacacgtatattgtacatataaataaaatatatatata

SEQ ID NO: 201403 - DNA, 2050 bp, Cannabis indica
cttctcttctcacactctctctctctctttcttgattacccttccctattgctccctcatcttgcagcgccgtaaaagtttatttcttgtagtggctctcgctcacccaaccgctcactctcttgtttctttactctcttccagtctctctcgtcgttacgacatcacagccgttgccagcccaagcgaaccaagttggcgaagccaaaactggagatcaaaccccacaattaaccctgaaataccacctcatgctatctttctcactctcatactcttcctctctcatctctctcaactaaacctcgacgagccactccgatcatctaccttgaaattaagtccagcgtggcctttgatgttggtcaaaactccaagctcgaggttctcatgatctttgccagcaacaccgaatggagcccgatgatgaaggcagctcactgtggctaacacatttttttagtagatctaaagtttgtgtttggttgtggcattttgatatgaagtttgttttttaaagtttgttcttaatattgctttcatgtttttcgtaaatctattatttgtattattcttaatctaaatttttcatattatttttgataatatatggtttgctgtttggattttaaaatgtatattgttgtttttcgagaattttttgttgagaaattgttatttctgaatttgataatgtaaatttcatagtttggattgcatatttggctcggagtaattcgtggctaggtttgaaagtcttttttgtggtgttggttctaaactaagacatatagtgaaaaataaaattgcacacctgtaagtgttagtttagaactgacaacaatgcctaaaaggctcggttcaaaatcaacaccaaaaaaaatatattttttttcacaatggaataggtgtcagttctatgaacagagactataggtataagtgtgagtccataaccgacactaaaagtgaagtttgtagtagtgtctgtcaaactccacaagaacaacttcttactctagcaacctcagatcctatcggctatcaaagttcatcgtcttcttaactgcatgtccgattcattttctccatcaaagaaattcttgagtgaaattaatcaagcttcgggtacaattaatcctctatttattccatcggaggtgcaagattaattactctattcgtggcttctctcctcgatgaccgaaggaattctcacttgtgtggttgggagttgttgtatgatttgtctcaactaagctattgccacatcaccatattatttcatccttgtcattagttagttaagttagttatataaacttgacacctaagcatacctacctactcaattcaataccaatgcctataaaaagaaaggcaccaaggctgcagatgcagttagtcgaatccgagcctctcacctagaattctctctaattttctgtaccaatcttgtgagtgtttaggagggttgtaaaagtagaattgctcatcctatgagatgacttctaccatgtgaggtttgatatgtaatgtgtcttacacttagactcaaattgagtacatgaatcggattgtaaaggtgctagacattttgaataaagttcaattgattcaatgctaagtcttaattaattttcattcatttttggttttagtttttctgatttgtattaatcttgtttgcttgttatgttgttgttgttgttgttcttgttgttaatttgcactgatttggccaagtattgagggtatttttcaccacaggagtgaaatttcatctcaagtctggagaacttttgaggttttattcgttactcaaacctcgacaaagatggatcaattcacatctcaactgcaaaagatcaagaaattattattttctatcaatgaatacatggtatcaagggtatttttgactgtctaggatttgttggtcatcacgttcatgccatagataatatgattgccatttccaaaggtttacccaaagattatgagactttagtggtttttttaactctcaatgttctttatattgtttcaa

SEQ ID NO: 201404 - DNA, 540 bp, Cannabis indica
atacacttgttcacagttcatggatgatgatgggaagtgctacttggatgttacatactacttcgacatcgcaaagaattggccaacatcctcttgacctgaaattaaatttcttgtataactatgttacattcggccattaatgttagtctgtgcccctctttgtattttgtaatccaattaacacaagtgcaatgcatctttttctctgttcaatgaaattaaaataagtgtaaacaactctctctttctatctctttctttaatcggtctacggttttttataaaattaataataataataataataataataataataatgtttattcttaaaaaataaataaactagcaaacatatatatggagagcaaaattttacaactaagtgagacaacattattctaaacacttaaacagagctcagtgacaacttaaagtactaagtatcataagagatagtgtacatgtattttaattatgagtctaaaatattttcacttaataaataatatgaaaaaatgttaattaattatgtat

SEQ ID NO: 201405 - DNA, 1978 bp, Cannabis indica
gggccaagaggatggagtaagtgttgtagtaaggctcatactctcgcaagggcctacccccagtcttgggcttctttcaattggggagtttcttggcttgccaccgttattagatctcttccctctatctgattctcctttctttccattgccctgcgccttagtagtaggggtttgggagtctggtgacttcttcttgccaccctttgagcccttggcttgggtgatagcttcttctagtttgataaagtcatctactctattaagaaagtcattcatggtgtataccgccttgagataaaggtcaaaccacagaggactcgtctccttaagttcacctgtaagtgtcattacccttgcatctttgctatgacatttggtcttagcgaccgcctctaagaatcattgaatgtagtccttgaagggctcatcttattgttgcttgaaattcaccaagttaatggattcgatcttgcattgtcaggaaggagaaaattagttaccaaaagtgtccaccagatctttccatgagttgattgatccaggggagagcttaaggtaccatcgctgagctaggcatgtcagtgttgtagggaagtttttgcacctcacatcatctctcacaccttgcagtttggtctacacttcaaagtagtggatgtgagataatagatctttcttctcgatgtactgatttcacgaaggattcttgaactttggagggataggaagagctttgatttgttcggagagtgttgagtgccgctctctgtcaagttcgaattttgacaactaaggagtcatgattcccttcactaaggctactaaggtgtcaaattctgcttggttgaccccatgggcagtggtctgcatcctagttggaccatctattacccgagtagggtcccctttagaagttatcgcttccactgaccgtttcttggtcaagaggtcatgcaggtgtcttggtcttccaagtcaatcgtggactctagtcagcttgggtcttgttgctgtttcctaaccatggggttgtgaagacaactctagtgaagtctctagaatgaactctggatcatcttaagcaattttcaatttgaatggtcatcaagagcattgtagtggctacttcatcaaagtaatcttcatctagatcacaagtgtgaagagaattggactggttgctcaagttcaactcctttccatgcacttgatggaagtactcatactcttggccattagggccacgagcaaaataatggcctaattcacccctttcatctcgaaagtacttttgagtatgaagtggttcattggtccttgcccgcaaaatctaatagcctttagttttgaagtagtatcttttattactctgttagttttaatagtaggttcatttccccttggagggtctccaggcctggtgtcatgagagcgttgagaaggacttggtggaggagtcatgtttgctctctcggtgttgtgaggtcgttcaacatcagatggagggcccgttggttggcacccacgagctttagtcctttcaggctcttgctcaaaggtgctttccctctgggaggtttccagacttgatgttttcttagtgcctactggattaccatgtgtggttgtggcattttgagtgttaaggttttccccttgagcactagttcccacatgaccagttggttgactagaagtctctctcaccaacttggaaagatccctacgggaagtagttctacaaccagagcgataagttctctaatctattgagacaggtcagctttccattgtaagatctctattgttcctactcaactcgctggttttcaatgttcctctttccataaaccagtgttgaaacaattcgtgttaattattaagagagtctcacaactgctattataagtcagctacaatttagctgagctagggacctaaagatcgacctcctcatggtcataaatctctatgc

SEQ ID NO: 201406 - DNA, 2034 bp, Cannabis indica
ctaaatatatatccagtacttctgtaaataattttgcttcatttctataaataatttagttaattggtgtaagagtttagacagaaaataaagtatatataatagtctaatgaattatgagtatcgataagagttaatgttttattgttataactacatttagacagcttaattaagtatttatagcccttccgcaactatatatacgtgagactccatgatcacaagagcaaacgtactattttgaaaaaaaaggatatatataattaaagaatgataattgcaacgatttttatagtatatattgggaaattttcgcaacaataaaaaggttaaaaaaaaaaaaattaaattaagaaaaaaaattaagtatgcttatatatatacttgaaattatcatgttacattgttttctgttaacgtctgttattttctcattcaagtaaaatttgcactttaaatacatcaattaaaaccttctaaaatgatcgaattagttttaactcattataattaataacatatttaaatgtgggggtgggatatttatgaggccttctctcctgggtgaagattaagtttactgctgccaaccttttacagcttttatgaatcgttgtatatttgtgaaacaatgatgtgacagtttgagtaataatatgtatgtttttttaatggaaagtaataattaatatatacgcagttcctcaccgagagtaaatatttgtaaaagttattaattagatcataaaatatattttatatattttaaaaaggtaaaaatagtattttgagttttatttttaccaattttattttttaatataatcaattttaagaaaatttttaacccgaacataaatagaaaatgtaataaatattgtcatagattattattaagttttattttgacaaaagatcaatttagggtcctatttgtacaatattagaaaatacagagtctattttatcatttaacaaaatagaagatctaattggtaactttcgtaaaatacagaatccaaaataatatttaccatttcactaataagttgaaaattacaaccacttgaaactagctaagtggcataaccatagaaaagtgcgtgtgtgttggaaatcctgagttggagtttaaattttgcattataaatatataaacgcttatttcaaaaaaaaaaaaaaaaattaacaaccacatatatttattaagttttattacatttatcctcataaagtgtagtcccaagttagaatctgccttgtaaatgtaggaaaagatgtaggaaaagaaaaaggaaaaagaaaaaaaaaagttaatagctgcaatagctatttgattaatttttacttgagttatatagcattaatagttgtcctgtggctgcatatacatagaagtataccgctatgaaaggtaaaatatcaatacaaatgtcagagaatccttttataaataattcatttgttcaatcaagtagtaatatctcgctataaagtcaccacactccctcaacatgtgtataataataaaatatcataaatattattaacaatatttatgttttggggtggcatgtatctgttcccagaaattttgttaatttttttttttttttttttatatttgtgtatgttgtaattagtttaaaaaattctgaataatttacaatattaaaattaatgtttgaataattacttattatgagaataataataataataaaaaaaaagttgcgcgtacaaaaaatatgtaaattttattttcaacattgtaaattatttaaaattttttaaaaaatttatataagtagtcttaaataactataacatatacgatcatgaaaaaaaaaattaaactaagaagttttctttggtgccgaaataaacagagaatctactgaaacaaccatttaagggaatatatattgtaaacttaccctatcttataattattcttgactttgagttgagtgtttactttatgttataaatatatatatatatatatatttatatatatatatatatata

SEQ ID NO: 201407 - DNA, 2211 bp, Cannabis indica
acggtattaggcgattgcacttagtacttaacaactaagttgcttacgtatccatttttttaatgaatcaagttaaccgtagttcatgatatgatatttttgtgatgctttcttaattaacaggcgaatgacctctttttggaaacaccatttgattccaattacgatgatactaaataattgaggtaaactttggaaaaattagagtcagtttggaattgtcgttgaactcagtaattttgaataactgagctgcctatataccttctctgtgaaggatcaagccaattgtagttcgaaatgaggtagtttaggatttgataggaagaattccagtatatgaccactatcaggaattctttgctctttgaaaatttaggaaaaattcctaggtgtatgaccactttcatgcccacacatagcaagtcaagtactcaatcctaataaataagacggtggtaaccaacctaaaaaaaaaagagattcaggctcaaatcttgataatattctgcgacagaaaggaacaagggttagagatattggcgaaatgagtcattatattctgctgcaaccaatgtaaggttttctaaactcttatgtgtttaattttattattttagagattttcatatttagaatgttaatcaacatacttattagtaaatctagatcctcataaaatattttctacatatacaatatatattatatatacattatatatatacaatatataacatatataccgaatatatatacatatacatatatatggttgggtatcaaaagggaaaggggtcgaccaccacatcaaccactgtggccggcagtggccatggtggccacgtgatgagcacgtagcaagcattatcgttcaaggggagacggatcacgcgtgacccagtagacccgactgggtcttctcccaagcagggcctcacggccttcaatggtggtcgaatcaccgtgtatggcttggggacgacatgagctttgggtcgaatgaccctaaacccgttcgggtctcacaatgtttggagaagggacatcgaacctatcatgcatgtcgttgatgttggagaagaaaggactgaagatccttgtatggtggtcggaccaccatgctcccctagggactcacgtcccaatccatgcatcccatgcatgggattttctcacgtgggcacggtacccaaaactactcgagtagttgtgcatggatgggaaaatattcttgagctgtgatgatttcgatgtgcatggtcagatttcaagattagaaatagagctcacatgcaatgaatattacaacaaataatttttacgtaaaatttaattttaaaaaataaataaattacaatacataaaaatttctatggctcattttagcttacattattttttaaaaaatatataatctccacctaattataccatataattaatgattcatcacgtctcatacatttataataatataatcatccattcacgtaatatcacatatatatatatatataaatgcataaaattcacacatcatttaatgtatacacattcatgaaactgttcttgatatcaattgttagttttatggtactaaatcaggtacgcagcggaagagttttgtattatctgattatcattggaccatatcccaaagaatcttcagatgtgtgtactttaaaattaaaaaaaaataaaaataataaatttagagtatacctcttgacgcttatcttcaaaacttcttgtaagttgtattccttaattcagatgatgagcgaattgcaatttgaactcacaccagtgtctttcgaatcgagccaccacacacaaggaatagtgctgactattagaataaagtgtattatatttttttcttgttgagttctcaacacataagcaagaacaactaagaaaaaaaaaattaatttcctttttctctataacttttgaaatttactatgtaaactatatatccaatttctcaaattaagtttctatttatagtaattaaataccattaatttattcattatttaattgtttaaacaaataaatttttataattgaattcgtttactgatatttatgagagaatctctcaactacttgagagaatatctcaacaaccttgaaatatctataaccactttttaaattagatatttacttaattgaattaattaactcaaaaagacaaactcc

SEQ ID NO: 201408 - DNA, 773 bp, Cannabis indica
cctttttttttataaaaaaaaaacttctatttttcatacccaaaaatatatcctcggtgttagatcgtgtttttcttcatttttttaatgcaaaacgagcgaagagttagtagtggtggtggttgtagctctagctatcgtttttggtattaaaaaaggttgaatcagaacggatattaaatataaatctaatctctaataattttattaatgtacaatgctttattttttattttgtaaattttttgaggatttttttatattactaagattgtattcttggttgtgcgtggtggtcgaattttggttggcattgatggtcgaattacagtaataaggtaataatttaaattttaatagtatatatgtatgtattttgtgttgtattgaatatatatgtatatgagaatgagatataggagagtacgtattttatgtattgtatatgaatatactgaatgttttaaactaatagttttgtgaatattgtaaatgagaatgagataagatcagagtatcaaaacaaaagtttaaaattctaaaaattagtttggaaacaaaattttaaaataattatattttttattttttatttcaattttattcatgtgtttttatttttagtagctagtaaatagttagttacaactatttaacaagctactaattttcattcatattaatgtattttattactaactagatactcattaggaacaagttagtaatgaattaactagttagtaattagttacccataaatatattagtag

SEQ ID NO: 201409 - DNA, 1287 bp, Cannabis indica
tcacttgatgtttgcggacgacatcatgctttttggagaagccacaatacgagaggccaaatcattcttggactgcttaaactactattgcaattgttcgggtcaagccatcaacttctcaaagtcatctgtttatttctcgcgaggtgtggccagccgtaaggctcaagtaattgcccaaactttaggaatgaggaagatgaataggagtgcaacgtatcttggaattcccctctttagatcgatcaagcgtacagaggatacgaaacacctaattgatagggtgcttaaaagaattcaggggtggaaaatgcggctactgtcaagcgctgggaaaacttgcctagtcaaggcagtcggctcaagcctctcaaactacgttgcctcctctgatgtaattccttcctcaacagctaagaaagtcgataagcttttgcgggatttctggtggggcgacactgaattaaaaagaaagatccacctagttgcttgggatcgtctctgtaaaccgaaaaatgtaggaggtttgggatttcgggccactgagacgatgaatgaagcatttctcatgaagtgggcctggaagattcttaaaggcgaggagtgcttatggcgtaaggtaatgaatgacaaatacatcaaaaaccagaatttccttgacttggaggccaaacagtcggactcaatgctgtggaaagcgattctccgtgcccggacgactcttggaaaaggcatttgtcggaaaattggggatggcaactccacctcgatctggtttgatccgtgggttccaggggttatacgacaacctactccttctgtagatgatgcgggaacaatcagcttggtaagtaatttcattacggaccaacaatggaataccgagttggtaaggagatggtttcgacatgaagatgcaaaacgcattatcaacatttctctccctgggaggcctgttcgtgactcttggctgtggctgccaagttctaatggggagtttactattaaatcgacatacaaattgttgaagaatggtaaccacagtaatggaagcgacgggaaatggaaatccatttggggagccaagatccacaaccgcctcaagatgttctggtggagactccttgccaattgcatccctacaaaagaaagacttagtatgtctatccccattcaagataccacatgcaccttttgctttacttgtgctgagaatagttttcacttgctttgggagtgccaatacgcaagagcaatctggtttgggtgtagctggagtgttagagc

SEQ ID NO: 201410 - DNA, 574 bp, Cannabis indica
cattttagtgagacacgttgaccaacacaaattggtccttttgtagtagtgccattacagttttttatgagttgagaatacactgtaatgaaataaatttattcatcatatataatctataagccttctcttatcttgaatgttgaggctgatttggaagatctagtgtggattcttcatcaagcccataaagttagatgttcgaacatttatacaaaaagattcaaagatctattgataggcatcaagaggtaaaatctttattccaagtagttagatttaattcatgttatattgtgttaagatccaaagtttatggttcatattggattcaacaattttcttcttaaaaccttgatctgatttctactttcgctgtgactctgatatgaactctaaaaactaatatttagaacccaacaaggaattgtagaaatcaagaaaggctttagtgacacccacttgattgtttatccaagtgcccttttgatctttaattgaataaattgtgttttgttgtcttctatactttaaacttacatgaaacaatttggtattttcatcactatttttt

SEQ ID NO: 201411 - DNA, 1570 bp, Cannabis indica
  modified_base (1543)..(1543): a, c, t, g, unknown or other
ttgactttgaccagctctccttggactgggttggattaggtgtatttcagggcttcctcgcattttccttcttcagataaacctcatgacgtaaatgtccctacataatcgagattccattcccattggatgaaaatggggtaggttgatcgagtttcgagttcgtgggttttggatccaaaaaaatttgcaaccgaatccaacccatgaaatgattttgggttagtaggttcagtttggtcggattaacttggttaaggcttttatttttatttgagtaatttgaggcataaatacttaagtttaactctcagttgcaaataaatacctaagtttaatttttggcggtaataatacctaagttatatttttggaactctgtaggtacctaaccgttaaaatattatgtcattatccacgtgtcatttttttattggtatattttaattaattttttttcaaaaaataaaaatttaatgacttggaccaattaggagttgccacgtggcaatttacttaacaattaacagtcaggtacctacaaaagttccagaataataacttaggtattattaccgccaaaaactaaacttaggtatttatttacatctgggagttaaacttaggtatttatgccgtaaattactctattttttattacccaaattctttataaataataaaaaaaaatctgaaataaaaacgtaaatccaataattcaaaaacaaacaaattattcgtcaaatttatgtttattatttatgaaaataatgaataatgaacacgaatcaacatgataataaaaactaaaattatcaaaataaattatgactaaaaatttaaatttgagtttatattttataatccatccatacattctatactaattattatctatatcatagttcatacatataatatgtacatacatataaatttaattatgtatactggtcttgatcctaataaacagttgcaagtgtaatatgtatatgtattgtagatgatgtttatataaaagggaaatttagattaatttttataaaatactgtcacacgaaaatcttttaaaaaatattgtgtttttataaaacaacaatggaacacaaaacagaacaactaaaaacaacaatagaacagctaaaaaataaccgtaaaataatagtgaaaacttaatacattacatagtataaaacttatacagtatttttgaaaatatttcgtcccacaatattaaaagtaaaaaaattaaaattttcaatatgtggtgtaatcattggcggacccaatgtaggaccagtgtgggcttaagcccatgccttaaaaaaaatatttcttttactttttacttttttaaaccttaattttttttttttaaaatttattttttaaaattgtcccacaacctaaaatgcgcaacaaaagtggagataaatagttgaatgatagtttgtacagtatatctcaaaaaaacgaatagtatttcaaagttgctattgacaacgagtttacttattcattcgtttttacaaaactaaacgtnaaaaaacgtcgtacggacttgaaccaa

SEQ ID NO: 201412 - DNA, 635 bp, Cannabis indica
ttcctatgattgatggcatttactatctcgttggcaataaaaacattgtcaaagatgactctattcttgatgaaagcactttggttgtgagaaataagactatgcagaacgtccttcaacctattggccaagactttagagacaatcttataaatagtagaacacagactaataggtctaaagtctctaattttagtggcattcttcttcttagggatgacaacaatgacagtagagtttattggagcaatatcagcattgttgttgagaacggaaaggacagcatcacacaaatcagagcctaaagtagaccaatttttctgataaaatcttgcattaatgccatccaaacctggggctttgtccccagccatatgaaacagggcagttttaacctcttcagaggtaaaaggctgctcaagcaaatggatatcagaaacagaaaggcggttagggataaaatctaagagcaaatccacagcagccctgtctacaccttgagaagcaaaaagagaattatagaatgtgaggaaatgactgctaatatcagtaggattctcaacaagctccccattatcaagaataaggcgtcggataaggttattctacgcgagaggaggctttagaatgaaaat

SEQ ID NO: 201413 - DNA, 537 bp, Cannabis indica
tattacgttttcaaagatcaatttaaaaaaattaaatttcaatttgataaccaaatgaacttctctacttgttaaaaaaaattattgctaacttaattttaattgatcaatctacaataaatattaaaaaaaatacccaaactcttgtaaaattttctattttcctatcaataataatagtctatcgatatttttaaaaactaatttaaataagagcttaagaaattaaataagtaaaaatggaacagagatggtgatttttacgtggttcgaatgctaattaaccttagtccacgagtcaatgtgttaaatcaaatgactttgatgtattacaataagatattacaagtttaagaaccctagcttcttgctatattttctcacttacgtttttctaacttagagaaaaagaaaacttaaaaagatgtgaagtaaatcgtccgtcccctttgtatgattgtttaaagggatatttataagctaggatttggatttaggcatacccatatttcgttaggattttgtgcaaaatggacc

SEQ ID NO: 201414 - DNA, 2098 bp, Cannabis indica
aaaatcaatcacaaaaaattaaaacttgaacttaatttaaattagataaataaaacttaattcgagagtaaatgaatgatggatctttattgaataagaatagtcagtagtacacaatagaataagcccatgattacaaattagcacaataaaatattataaagaaatgtctcacattgagggaaatcacttcaagagtgatactcccattacatccttccacacacactcactatgattttggactctctctctccaaactgaatctaaagtatgaacttggagattagagattaaaaattctgaactgagaactccctttgagaataaaggaacacacctatttatagttgttggttgggttccctttaagttggtattaaagccaactgttacaattaacagcaactttttttttattctatctaatgagcaaataaatgaacctactgacttgacagagtaatttttatttttttatgaaaatttctcaaattgttttgatgttaaaaaatgggagtctttgttcaaatttaactttaagatgtcatttcattaaagagacaaaacatagttttaatttctaaaggtataataatgaaataattcaatagaaagtaaaaacacaacactgttttgcgaactacaatttttcatggatagagagagagagagaagggtaatagaaaatcaataattatatgaaattttgattggcaatatatatatatatatatttatataatatatatataggttgaccagtaatgggtgtggttgtggcatatgatgtaatgagtcagtgctgcttggatcttctttaattattaatttggcatgccaggccttggccatatggaatggaaggaactaataaagggtttattgattggtttttcttttcctttcttttcttctctattctatgtagccacggaactttccttttcctgcatttgtttgaccttaattttttcttggacaataaaattaatccatcatgatctatcatggataagttttcaaactctagctattagggaaagatttaattattaattatatatttatgaatgatgtaattcaactgttcattaagaaaatgatgatttggatattaagtgtgtgttttcagtttggtaaacatctttttttagcaagactgatgaggaatgatgattgtacgtagctgtggaaattaatgaccaatgaaaacattacaacataacatgacactgaacaacttttatttgtctcaactctagattttggacatgaagattgtacacacacatataagataattttgttcaactaattcagattctatttccatatatgataaagacatcaaataataataataataataataataataataataataataaagggcattgcaaagtggtagtactgaagttagaacttagaagcatgtctgggccttgtttgagagatataatagcaatgtggcacgccccaagcatgcaactaaaacgccatgcatcatgaaaatgaataaaacaaataatgaattgttctttagttttgataattttaattgaattttattttatatctttttaaacattggtgataatcatgatgttccattgcttggtctgccctcgtttaattattttgttgctttgtaaattatatgggttaaaaaaaaaagaggggagggggagtcgacctataaaatagagtggtggctattaacaaaacattaattgagtaagaaatttgtgtaattgctttctcttgaatgtgttcatttcaatgattaagtgtaaaattttacctaaagatttatgaacattgttcattgtctgacatgcactttcttgggatccatcatcgcttcaaaaatatgttcatgtatatttttaattttatatacaaaacataaataaaaagcctgctttgtgcgcaatcttatcaagtttttatttctatatggttatgttttatgtggttccattgttccattccataccactacttttctaattcaaattcaatctagttctagccccacctcatgcatgagagagaatatatacatagaaaacctttactactcaatgccttc

SEQ ID NO: 201415 - DNA, 832 bp, Cannabis indica
tcattagtgtccactgagagtagccatgaaacctcatttttaagggtaaataaaaatttctatatataattacattaaattgagaaatgctcatacaaaaaggtgcaaataacacataattttgtttatcgattttctctgtctcaggctttttaagactttcactattcttgtagtcttcgttgcttttagattcaaccagggcttgttggtggtttctgaccctgggcatgcctctgctggtgaggctttgccttgattactatagcctcttctgttatattatttgttatttaacaaataatataatataagattaatgagagcgattaacataatagagattatattatataatagttttatacacttacattgtaatataagagaggttacaaaatttaaaataatattattagtaacctatgaatcataattgcactaaaaaaaccaacctttaatgataattttttactaacaacataattttttaatcactaatattgacttttagtcagaacaaaatattaattttgactaaaatataatatttagataaaagttgtcactaaactaaaaatatatttagtgacaaaaaattataatttttttgacaaatatttttaaccacagactttttcgttataacataagaatggttatttaaattagtcacaatttttttactttttagtcacaaattttattgttactgaaactaaaaatttttgtagtgttggtaatatgtcattaagagatgtaattacatataaaggttatgaaatcaaatggggaagtttctagatgctagaaactgtaaaaaatatattta

SEQ ID NO: 201416 - DNA, 2387 bp, Cannabis indica
aaataaaagaaaagaaaatacaatagtatttgtggaaataattgatttgagtgatttagacattcatacattattttataacactccctttccctttgatttctataataattcactcattgaaaatcttgtcagaaaacttagtaggacaaaaactagactaagaaaaaaaaagtgcattgtgaattaattcttcttcattttggtgtttttggagatcttattaatcgacatattcttatcttttggactatcttctcaaaatgctgatgttggtgatgattttatgaataaatttgtaaaattgtcacttgatcaaacttattgaccatcaatattaccacttccttaaaaattgcgattaaagaagaattttgatgaaatatgcttcgtttcatcttagtgtactctccttttcgttgagtgaataaaaatcttcatagagagtcgcttatacttttttattggacgttaatacacattttcttgaatatgttgtgttcttaatctcagctacacacattctctacttgttttatgaattgcaagtatcttaacataatttaaaattatatcgttaaaaaatttgtcaaaaaaattcaatgagacaaaacctgaactaatagaaaagaatatatgttcaagtatacatatatatttaatctttacttgattgatttatgattttattgtataatatattgaaatattttaaacaacccatttcttataattttatgaaataaaaaacattgtatgtgttgggtgtacaactaaagttccacattggctagaaatgtaaaggatcttgggtatataaggatgatcactatttgcattgaaatgaggccttttgggaaggtgcccaaaacaaattgtgagggcttagatggtgtccgacagtccttataagtggtatcaaagtcaaattctaaaaattagccatgtgaatgtatcctcggatttgccaaaaataaaggaggtgaagcttgctgttagagtcgtcagaggttcaaatttggttcgaaggtatttcgaatcttactggtgaaaggattaatctagcttactcaaggggatcttgagtgttggaatcgaggaattcgggtattcgaagggattttgaatttagctggtgaagggattcatctagcttactcaaggggatcttgagtgttggaatcgagagattcaagtttagatctgtaatcatttgaggagagccaagatggtcctttatttgagagaaggattgttggctgtacaactaaagtcccacattggctagaaatggaaaagatcttgggtatataaggatgaacactatctccattggaatgacaccttttgaccaaagtcccacattggttagaaatagaaaagatcttggaaatataaggatgaacactatctccattggaatgagactttttgggaaggtgctcaaaaaaattcgtgagggcttaggcccaaagcggacaatatcataccaatagagaaatagatggtatccatacggtccttacagtatgtatcagttcagaatgcatatacttgcgtactgaatttaccgaacaagtttttgatgccattatcaaggattgaaaattatcaatataagtttaattaatttttttttctaatttgattttgtttttaacctgtttagttgctattattgcttatctcagttgaatttattatatgcatagtagaagaggtgcagatagcccagttcctttgaatcctgagattgagaagtcttgtaagaaaaatagaaagaacaaaagagaggccaagaaatcagagaagatagcgaataacaaagggaaagatctaattcatgtagctatgcaaggaggtcaggggtataaaacagtatcagaccaccaacagtagaagccaataattttgagattaagccagctatcttgcaaattatgcagtccactctccaatttagtgagttgccttctgaagatcctcacactcacttggttaatttttttttaattatgtgatactttcaaatataatagagtgattgatgatgctatcaaactgtagctttttccattctccttaaagaaaagaaaaaaaaaagctagttgaagtctctacaactaaattttattgtcacttgacaagatctgactcaaaagttcttatcacaattcttcatttgttcaaaaattgctaaactgaggggagaaataaataatttttattagaatgatggtgactctttgtatgaagcttgggagcattttaaatatctgttgagtaagtacccccaccatggtatggagcattggattctggtacaaaatttttatactattgtatgtcctactactagaaccatcatcctttgattattgttttgt

SEQ ID NO: 201417 - DNA, 882 bp, Cannabis indica
tttttaaatcaatccttttcccattattattaagaagaaaataacttatttatataaattaaatatattttatccctagaataaaaaagtaattgaaattttagaataaatattttttttctcccaacaaatgtatcttaaatttttatttaacctaatagattatatatattttacattgtctcatttgtatattcagcaaaatatatttctcataaatcaaataaatacgaaaattcatacatacaatcaggatcgtcttaaatattaggcagcttaaattattatataagactctcaatttctaaagtttgatttttttctttctattatacatacataaacaaaaaatttataactaaaaatttataaatgtatcttacaaaaaagggaaaaaaaaagactagtaataaaattgtgattttaatataaacaatctctatttatttattttaaaagaacaaattttaaggaataattacataaaatactattttttataaaagttttatattcttatatttttacaattttacagtttttttatagaaacaacatgaaaataataaaaaaattaataacaaaaaaaaaaataatctaaacaacaataaaaataaaatacagattataaaaaatcaacaacaaattaacaagagtacaacataaaaagaccgtatttttgtaaataaaattataaaaatcgtaaaaatataaattatatttttgtaatttctttattatttttgtatatttgtgaaataatcttaaattttaaaattttgcacaagactaaaatattcttgagctagccctacatacaattacactattctagtaaggttagccccaggatctagttacaaaatattgccttttaaaaat

SEQ ID NO: 201418 - DNA, 1128 bp, Cannabis indica
tatacctattatacatggatcttgacataacacgaatacgactcacaaacatgaatttccactcttagcttatacactatcactaagatggttgccagcggctctcctatgaaggtataccatggcctatcttatagggcgcacaaacagccgctactcctaaatgagcgccacttttaaggctcatgataagtgctatcatgggactagaactctgaagaaaaactaaatgaggaacttagtgtaaagtcatctaactaattacacactaggtggtataataagtgtcattaattaaaaaaaaaaatagatatgtagtggcgccctcattaagttttttcaaaagaaaatggttttatagaattaaattatttatttatttatttataataataattttttataattagaaatatttggatgaagaataatttcttttaatttgtttttatttaaagaaaaggtctaaaatatatttttttatataattaaccgtctttatattaaaatatactatcaaaaataactaattatcatatttaaaaataatattgactttaaaatttaattgtaaatttttaaaaatataagatctaacataatttttattttttttttgaatttaagaaatcaaaattggtaattcatcgaaacaggaaggttcaaaataattaataaaaaaaaactaattttcatgtaattaccatagttggagtgcaaaataaaaagaataatatagcggactgttattttatatataaatatatggataattatgttaaaacatggctatatatatatttatttatttttaaaaaatctatatttatataggtacgtatatgaagacagtatatatataggagttagagtaaggttactattgtttgattctagctagggtaaattcagagcagtgaaaatatcatggtaaatgtcatttattttgtatttttcatttcttctatcatcaattttcgtaatattaactttttatttatttattaatttatttttattttttttttgaaaaaaaaaaaagaagaaaaatttgtcaaatttagcttactgttacgtgacgataaattatacatgcaatagctcctataaattaaagacttcatttat

SEQ ID NO: 201419 - DNA, 756 bp, Cannabis indica
caaaggtccaacagtatcccagttgtgttgatagaacattgtagacatgccatcaataccaggacttttatcagctcccattattttcaatgctgaaagaacatcttccttagtgaactcttgtaagagaaaatcattgtgagcatccgttattatggttggaattgttgacacaacatgagataatgcccaatgatcttcaacagaagctttgaaaagtgaatcaaaatagtgttgcaacagtggcaacttcatcacgggagtagacatattgtccacagtcattctgcaatttgctgatgtgattgttggctttccgagacgaggctttagcatggaaaaatttattattttgatctcctgatttgagccaatctaccttagatctctgctgccaatattgctccccataggctaaaagctcatccaaaatagcttcggtcgagtgtactgacttagaaaaatctgaactagaattagaacaattatttaattgttgcactctggtttgagcctccttaatgtcttgtttcatgtgaccaaactttccattatgtcattgctataagttctttgcacaacaatgaatgcttgctgttaactgagagaaaatgtccacatctgcatgctcatttgtattccaactagcataaattatgtgtgaactttctgcattatttaaccaaagcctttcaaaccgaaatcttgatcttctttttttgatatccaactggtttgaaaagttaagctcgacta

SEQ ID NO: 201420 - DNA, 627 bp, Cannabis indica
gtatatgataccatccatcctatcctatatttgcatatcatttttttttggttcttcgtcatccataaacaagagtgggtgcagattaagttaattgggttgccttctcaaacacaaaaccatatcattttgctcacaaacacaaggtagtacttacattgctcagtcaagaaaaataggatgatctttccggtaccacgtttttatataattttatcgacctagttatatttcttgatagtcaatcatattcatctctttagcccttgctgcattttttcttgtttatacacaaggagaggacaattcaattgacacattttgaatttttgaaaaattataaatttatttattaacactttatctttcttttgaacaaataattgtttgctcaagcaattcactcactttaaatgacaaatcttactgtcatttaatcttcggcttcagattgtccggttactaccatattatgagtttttcttccctctttaccaaaaaagtaaaaataaacaaatataaggacaagatactgaagtacaaaatggctgtttttctaattcatgtgacatttctgtgatcagatgatactcctgaattcgttgtggttaaccccaaccccaagga

SEQ ID NO: 201421 - DNA, 1608 bp, Cannabis indica
gaagtaaaataaaagatagttggcgatcataacaatccttgtatttgtcattgttatttatttaattttaattttgttttgttttatatacttttctccaaatattactactaatcaaatagaaacaaagaattaataaattagtaattgataatcaattatcgtgggaacgatactttacttcatcattacatgacttgattcgattgcgtatacttgcgtattaattttactgaacaagtttttggcacttttgctggggattgaaaattatcaatattagtctaattaatttttattataatttgactttaatttttcttgtttctaacatgtttagtttcttagtttttctatttaaggtgaattgtgttatatgcgcaacataagaggagtagaaaatcttgttcctttgaatctcgagattgaaaagtcttgtaaaaaaaatagaaagaacaagaggaaggccaagaaattagcggagatggcgcagaatgatgggaatcacaagaatgatctaattcttggagctatgtaaggaggtcaggctcaaaataatgctgagaggagcttgagagactatgtactccctactctattaggggaacaaaatagtatcacacaactagcactggaggttaacaactttgagatcaagccagctaccttgcaaatggtgtagtccactctccaatttagtgggttgccaactgaatatcctcacgatcatttgtctaatttttttggaggtttttggtactcttaaatacaatggggtgagtgatgatgtgatcaaattgagttttttcccattttctttgagggaaagagaaaaaagttggtttagttccttgcaaccaaattctattattacctgggaagatctggctcagaaattcttgtctaaatttttccctcaatctaaagctgctaaacttaagagagaaattaataattttttctcgaatgatggagaatctttatatgaagcttaagagtaatttaaagaattgttgaggaaatgtccacaccatggcattgagaaatggatgttagttaagaacttttataatggtttatgtcccacaactagaaccattattgatgcagcttatgaaggaacattcatgagcaaaagtgcaactggagattataaattacttgaagacatggctatgaacaaccatcagtggtctgatgagagagcatctgggaataagaaaacatttaaaatgtgttatcctgattttcttcctcctgacgtggcctgcttacatggacaaaatcagtgccacatggcagtacaactcaccaataagaaggccaagtcagcacctaagaaaatagagaccttgacgctcaaacgggcataaagtgacaaaccaactcccccacaaagctggccggccctatggctggccagcctgtcctcaatcaggttttggcttgccaagaggtgttttgcaaggtttcttgtgcacttctacatttggaaaacatcctttaggctgcaaattgggcactaaaaccccaacagaatagctgaataacatccaagctcaagagccttttggtcatttgtaattaaataataaaatatacaaatat

SEQ ID NO: 201422 - DNA, 1503 bp, Cannabis indica
gaccgtttttttttcctttcttttctttttcacgttttttttttttttttgtaagtactcttcattaacttctagattgctttgttttttagtgaatgccgtccaaagtatcatatcattttgattattgattatagaacacaatattatattatagagcaatcacattacatatattaggttttataataattattgaaagagtgttattattgcttttatgattgtttatccaattggggaagtgagtttttttgcttaggttgaactcaagctcctaaataattggggaagtgaaatatagtatatccataggcatatctaatagagtattaaatttgtaatacaattgtcatattttaatatttatgtaaaaataaagaaattaatagtcatgctaaacatggtgtcaaatttgacatataataaatacaacatcttttatatttataatagtgttatcaaaacataaatgaatgacttcattaatatgtttaaatttctttgttgaaaatgcacaataatgtctaattacaatagtgagttgtaatttgtaattgaaatatataataataggattaatgtattattggctttagaagaagatccatttagatttagcttattgatctctctttctcacactttaactagaagacccaaacatacttaacttatctttaaaaccacaatatttttttaatggaattttggaaccattagatttgaagttaaacatataataagaaaatgaaaaggaaatattcccctaaaaaagaaaaaggaaaaaggtaatatgaacattgttttagtaaaaatcatattcctcatgatatgattaaataattttgcacttttgcacttttataaatgatccatttcatttctaaaaaattaaaagatctaattttacacaagtataattattattattatagttatgtgataaaataaaattattaagtagaaaatttgaagaggaaaggaaacttaaaaaagaactaatttttgctttgtataatgtcaaaaatataaaaaaaataaatcaaataaaaaattagaaaaacaatatatattttttgaacaagaatcatgcaattgcaagtggacaaaatctccctcagctcccactatctcatctctcaaaataaataattatatatttgttatagtacaattcatcaattattattaattagaaactcagcatcatgattcatgacattgtagaatatttaaataatattatttgttaaaataataaaatataaagtaaataatttcctcactactcttgtgtaaatattagttgaaaaaataactaaaatttaaatctttttttatacatataatatatataaatttaccaaaaaaaaaaaaaaaaccttttaaggtatataatctacacatcttttaaaacaaaaaattatacctctactattaatatatgatttgaaaaaacaaaaagaaaaaaagaatttatcccaaggcttgatttataat

SEQ ID NO: 201423 - DNA, 619 bp, Cannabis indica
cccaccaccatccacaaccactactaccaccactgttgaaacattttctcacatcacaaacccaacaaaaacccacaaaccccgcaatcgatttcaaatctgtaatcacaaataccacaaactaaaatacaaaatcaatcgacaaaaaaaacatatcaacaccaggctaagtgtcaagattcgcgaggaggaaccttggggttccgttagttctcggttggatcgcctgaggtggcggtggtggtgacgtcgtgataacgagagcaccaagagggagaaagtaaaaatgggttcgaggtttttaggcttcaaggtttcgagaaaagggaccgaaagtccacctaaggtgagaggggaaggtcaacgatacttcttcatggtctgttgccgacgtcgcacagagatgttagggtttataccctaaaaagcttgtaaagatattttctgattattaaataaagagtttaatatttgatatatgtatgaatgttaagttataaatatttattattaaataattcatattgaatatcaaaaattataagcaagtcatgtttgactcatttaatttatttattttggaacctctatataaaatatagagtaatttacgacaaaa

SEQ ID NO: 201424 - DNA, 528 bp, Cannabis indica
cagaatataataaaaaaaatgttaattttaacgtaagttacaaaatattatgacagtgcataggcacatctttccacttgcacctattcttcatagtgttatttaaatagtaaatatgaaacattactgaaaaaaatggaacacgtgaacaaccattttatgagaacaaaccccattcttgttcaaaaaaatttccattttatgtgaaaaaccatttccattttcacaatccatacttctgcaatgagaacaaagtatattgttgcaataattaaaatcctaatcattgagaatcattcctataactacaaatattcttatgacagtaagaatatttcaggaaataaaacttctctgctccttgtgaagaatttctggcaagagtattgacattgtcatgtaaagtttttaagcttagaactttgaaaagtttgaagaacaatacaaatataaaggtaagtttaattacttctaaacaaattagaaaatataatagattaaaagtatgcaccgaaaaatgaaaaaaca

SEQ ID NO: 201425 - DNA, 1025 bp, Cannabis indica
tttattataatactaaaaaatttgttaagccttcgtgctgcgtattttgttgtccgacattctatttctttagctgaaagtatgttttctattaatagtgttccttcagatctcatgtctattcttgtgagcgattgctcgatttaatatagaacacttctttcaagaaaaaataaataataatactaaaaaatttaaattaatatttattggggttagttacaaaataaaaaaaagtgtccaaaaattttgacaattgaagaaaatccgatacaacaattaattattaataataatagtaataatatatattcatccacttgcccaaatcaaaatcaaaccctatattaaggtagctatattagaaactttataacttatgaaaaaataaaccaagtacgaaattacgtatcttccagataacataattagtttttaggaactcgaagcaagcgcaacctgcatcttcattgccatttctctggtagttgacatgatttatgctattgtttattgctgattgaaattgaacagtagttacatcttcgtcgtcgtcgtcatcatcatcagagaaggagatataaccataaacctggataaatctttttatgatatgttgacaatcgtcacaatagtgatgatgaggcgatggacgaggaggcaactgatcaccatgaagactactccattggccccactcacccttttcaagtagactttctctcagtgtactttccttcaccatttttttacttgaaaaaaaacaatcattaattaattaattgattattattttgttcacgttctctcaattgctttttgggtctcagcttaaacagacctttttctatatatagctacaaatttaattacttaactaatctatctcttataggagtaggaaaccaccctgccattaatttgaattgatttaggaatattcaaatgtcattaagattttaataataataataataatcatttaaaatgacgttggtggtcctataataaatataaaatgtgat

SEQ ID NO: 201426 - DNA, 826 bp, Cannabis indica
aatatgtaattttcacataaagaaacactcttgttttgaggcagatcaatgatcatgcctgcgcctatttctatccaaccaagggagaaaacaatattttgtaaaaatacacaaaaagaattagtaattttcaaaaataacacatttttagattaaggatccaataattaatattcttttaaggcccaaacactctctggcccatcttgatacatatatacataaaatatatatatatataatatggtatataataaaggaaattggttatgaaggttgctgaaggtgcaagagcaagaggtgcatccaaaataattggtgttgatatcaaccccactaaattcagcacaggtattaaattcacacacaaaatatatatacatatatataaataaaaatatacaacctcacacaataaattaactatatatatatatttgtgtttgtattttaattattaggtaaagcaatgggagttacagacttcataaacccaactgagctagaaaagcctgtgcatcaagtaagtattaatattattattttagtccaatatctcttatatttattcatgtataattttaattattgtaatgaattgaaatatataaataaataaaatttcagagaattagagagatgagtaaaggaggagtggactacagctttgaatgtgcaggcaatgtagatgttcttagggaggccttcttgtctactcatgaggttattatcattatcatcatcatcatcatcatcatcattattattatagtagtgttcttcattcaaatatatatatacatatatatatatatatatagtctac

SEQ ID NO: 201427 - DNA, 521 bp, Cannabis indica
aaatggtatttactctttatttaatttagaggtatttattaattagttaaatcttcattttctttttctaaagaatttggttatcaccgacatattagaatttaaaagcaactacacctaactacaaaagatgtacaattttcatgtttcctaatataacaatttttaattaatgcaattaatataattaattacgtaatctactttataataattaagtttggttaataaattgcaatcttcctaatgttcaactatacttcttgtaacaatccaattcaaacaactaggactctacctatactttaactagcttttcacctaataaataaaaagaaaaaagaacaagaaaataaagaaaagaagttataacttatatctatctacttattccaaactacttcacttataataattaataattaattcattaaaattctctttaattaatcaagcagaaaattgttatattagacattaaagctcatttggtacatgatgtattgtataataatgtatta

SEQ ID NO: 201428 - DNA, 950 bp, Cannabis indica
gattaattactatagaactaaaaaaaaaattataacgttacgatatatatatatatatatatataaaattcacccccacaagtattcaattaatacatttcgattttcaaatattgactatgtttgatatgtattacgataatttaagttttgaatgtatttaattttatttttttattcttacaaaaaaatatatatttaagtttataatgtttttattgtgtaatattaaacaatatcatacaaaatttaattattatttatttaattaaataataatagtttataatattattgtttttcacatatagtttataatatttacaatttaacattcacaaaataaattaaatttttaaactttataataaaaataaatatataatataatgatacgtttgagcacttgaataccaaccatcccattattgtctcacataaagacaaatggtctggaacagaaaaacatggtgacaaaactattggaataaagtattaaaaagggttgaaaaacagaccaaaatcaatactattgaccaaaaaaaaatggttggtttagccaaaagagagaaatccagactcggcagaaagggaacctgcaggttaatttggggaagtcatccttgatcctaagaagaaaaggatgttgttggagcctaacctaaatggaataccaatagagagaatttggttgccaattgtttttgaaatcgaaaggaattagggattcgagattttgacttttgattttgggattttatttttcttaatatcttaattggggcagctcggtcccgacccgaaagaaagtgtggcatggtgggggtagaaacccgattaaaacccgagcatagcaaggtaggagtcacacaccgagtcgagacgggcccgactcgacctgcaaaaagatccaaactgccatctcaagccaccctcaaaacttttaaaaa

SEQ ID NO: 201429 - DNA, 980 bp, Cannabis indica
atatattgatattgatattgattcttaatagtaaaaaaaaaaaaaaagagaaggctattacaataattagaggccaaacatgtattgtttattgttcttgttttattattaattactctaaaatattacaactttaaagactgtcattggctaaattgagttcaacattaatgtttctaatttaagatatacatatttgatatagtattgttgtctattttattgtaaaataaaaataaaaaaactgtgatggttagatttgtaaataaaatgtaaaaactcataattttgtttattctcaggggagggaaaaaaaaacttaaaatttttccttttgtggtcttctctttactattctccatttccatcccaagggatgcgaagccattgtttctttctaaaaagttcatacgaaaaccctaaattctatatctgccgccgctctcttgggtcctccggccaacccacttcgtcggttcattgatatcaggtaccttacatgattcatatgatattacttacattttattattcctttggatatatgtatattttcggaatgtagtattactgaattatggttagattccattcttgtcagtgaaagaaaaatttactcaattttggtacagttgaaactcattcaagatcatcccctaacaagggaagtgaaacaattatggatcaaagtcaccaagtcagtgctaatcttccaactgatcatacacctatcaaaaaacacaatgctgagaagaagaagaggccttgcaagatcatcggtggtggtctaagacagttcagtactataggtattttccctttttgttttctcaattcaatcaaatttaggaatcacattactgtcgatatgtttttcattgtatgtttgtttgaaaatgtttttgatttcctgattgtactcagtttgtaagaagttggaggctaaaggaagagccacctatggtgaggtatggggtgtc

SEQ ID NO: 201430 - DNA, 1359 bp, Cannabis indica
ctctctctctctctctttaaaaaaagatgtaatattttaagacaatttgatgtaagtggcttgcggagcctcttactcgaactcctgcctcatggcggtatccccccttttagatacatttcaaggaatctgaagtttcttttaatgttatgaccttactttgctatttattttgttattactttaattgtttttgctattatcttcttggcacaaatatggttaggaggattgtatgttgacaatgaggcgacggttttaatcctttgctagttatcaggattcggtggaatggggagattttggtttgtatgcctcattttttatattagtttaaataatttttaaaatgactttacacttgtccacatgtgggaatccaacttattaatgacatttaatgctttgacaattggtagttctaccttttcatctaccttttttaatgagcctatttaaacacatattcttgtttgagtcttcattatcgtttataacaatttttttacataaccatcatatttatctttctctttactcttcctcttctttctcaaagagatgtcaaaccgtccaagctccccactccctcaatcttctagtggggattagtttcactctaatgtcgcggactgttcccctacttgtcttgaatcattcgcctatagctatcggcccactattgaggccgtaatcaagaggatgatgcgggcctatcgtgcttgaccttgacgatgcctcttcatcttttgacgaggaatggctttagattttttttgaaaatgaagggaaaaaagttccctatactgccaatgttctggctgaatttcatgctcttcgtgtgcgggatgaaagtccccgtgagctttgttgtatgtgagctaggggacaccgtgcataggaggaagattttgaatgtgagcgtttagaaaacgagaggtggatggaggaatgcttaagagatagggtccctttttacccttcaggcttccctactggatgttgtcggtgcaagaagaggctgatgaggggttccatcgtgattgtgggctcattgtttattttatgttggcaccatcttgatcatgagaatttttaataagactctcggtgtacttgcatgtaataatttagttctagttttaactttagtttttcagttaggtttttttttttttatattagtctttttcatatttgttagttctcaattcggctacttcttgcttgatttgcacgatcgtggatctgatatttttgttggagatatattatttattgtgttctaaatttttaactttgtttttgtttcatgtatgtagtgctcatcggtttgagctttgagggtgatataattaa

SEQ ID NO: 201431 - DNA, 1244 bp, Cannabis indica
tttttttttaatttttttgtttggtttaggtttatttattttagtttttttagctctttcagtgttgtgcaccttatgtctttagtggcgttggtgttaagccttttataagaagtttgttcctctttatgctcctgtgtgagccttgaacttattgcttctttcaaattagtgttgttggccaacaattattatctcttggtgagattttggttttttcgctagacgtgtaggtagggtcaacaaaatgggtagatacgataacacaactagaaatttataccaaagttaaggggttgggtttggtttaaatgggcttgggttgacttgtctaactcatttaataaacaagtcgtgttcgagttgacatggctaacacgaaactaatttgttaatgacatatttaaagttattttttgtactttaacaggtcataaacatgttgaatatctctaaacttgttattgattgacatatttaaataaaacatgcttataaacggattacacggctcatgtcgtgtcaacccttttatatatacagatcgtgttcgaattttattttctgattaataaacgggtcgtgttcaggtcgacagtcgagtatattcttgttatacatgggtctcgacacaacacgatacgaatacgacccgcaaacacaaattatcacccttacgcggctcttaccatttgatcaacctcaaatgaagttaccatttaaaaaaaaaatacttcaattcactatatgtatatatatatattataaaataacactacattatagatttgaaaaactttgttaagaaaattaattcccatgaagtaattattgtgcttttgtgtagctttcaaagttatagtttaattattatcaaagtgagagtataacatcaagtggattcgtggcgcaatggtagcgcgtctgactccagatcagaaggttgcgtgttcgattcacgtcgagttcactctttttctttatttattttttatttttgtttatggttcgaattttggatccaaacatttgttaaaaatgttgtttcaatagtgaaatgaaatggtttggccattgttgatttcaattctgtatctctttggttcataaaatgacaaatcattgtttcacctcataatataatcaatgaaaaatgtcacaaaatgtaatcacatataacaagttttaggtgggaggttttaccattttccctatcccaaattcccaaaacaaaaaaaaaaaaa

SEQ ID NO: 201432 - DNA, 519 bp, Cannabis indica
attgtgaattatgttttgattaggcaaagtgaactaaaatcctaatttagtacatttttacattataaaatatataatatagttagctgtacttttttggagatgggtgtcagcatgaatttgggcaatgagtccaatccaaaaaaaattaattatttaaaacaaaaatcttatcccataaataaaaaaaaataattaattctctacttgttaatcatgactcagaaacaactaattaagtaccatttaacatcagtccactgaaatcctcaaataagtacttattcaatattttaaggatatttaatcacttgcaaaatgatgattttagttcattttgatgatgttttatataactatttttttaaaaaaaatatatatatatttatatttatccaacagaacaaaatgatagtattagctttaagttttagataaattttcaataatttgatgttttttgttgatgttatattaccaaacaaatttattgcacaattttcttttcaaaattacagt

SEQ ID NO: 201433 - DNA, 897 bp, Cannabis indica
tatattattaaaattataaatttacaaattcctaaattgaaatagatgataaaaaaaataaatgttaaataatagcaaaacgacttattttatttgtaaaaaaataataattatattttacgttttatttaaactaaacagttttttttaagaaaaaaatttgtgttatttttggtaataattataataagattgttatatatatacattgtataagtttttataattattttttgctgtatatattttattagtatttctagtatacatatgaaaaaaattccttcaattttttttaataaaatcacacttaatatagtgtttattcaatgtccaaaaaataatataaaaattgattgaaatttcctattttttttaaaacaaaaaactaaaaatatcggttttttttttttaaaaaaaaaaaagtaataaacactgttatttactatttttactttgtataaaatatttgaaatttttaggtagatgtattatttttgctcctaattaggagcatttaataaagtgtattttgtttttaaaaaggaagaaaatagaaatagacataattaattacttaaaaaaaactattttttaatcattaatccatcaaaattaatatatgaagagaatttgaaaaataagtatttaaaaaccaatggagcattgagagataattaaaaaaattgattaatataaaaacccactttcttgcaccaatattgaatacataataagtttagtttctaacatttcaaataattatttttctttttgactttggatcatccatggtaatctattttctataaaaccatttcctcattacaaaatattatattaattgacattttactaacattttttattagataaagaaaaaataccatttttggc

SEQ ID NO: 201434 - DNA, 613 bp, Cannabis indica
aagttgatatttatgtatatatagccgacaaaataatgttgtattgaacaaccattccaaaagtgtaaccaaaattaaagaaaacctttttcttttttaatttcttttttatatatagaattattataagtacatcttttggactggttctcttctcagcttcatatacaaactaaactactcctttcttttttagctatttaattttggtcttcaaatatatccaatccaaatgaccctaataataataataatactttggttggtgtgtttttatcttttcttaacaaacatatagattatctcttgaagaaaaatgacttaaaaaatgtacttgtataacaactttttggtccaaaagaaaaaagggaaataaaaagacatataaccaaatttgatgagagaatattggcttcatatttcttgaaaaatgggatcaaattaacaaaaggataaagatatacaactggaaaaggaaagtagctcactggaattggaatattaatttaaagaataaattaaaaaatatacatgtaattcaataactttgatacactccatgccttcttgttctttaaataaagtagactataattcattgttcatgcctctc

SEQ ID NO: 201435 - DNA, 671 bp, Cannabis indica
actttgacatgtactaaaatatgacccatcaactttcatccaagttagatttttttactaaaattggaaaaatgtctttaaattcaacaatctcaatagttcagggagcattattaacgaccttaaaagtgtaaggggcatgatttggtatatatcaaagttcaggaggcaaaaatcataattaacctttttataataaagttacaaaatctcatatgtcatgttattttcactttattttattatcgtgtttgactctttttatgatttacatgtaccatttcacattctcttattagattcttatacatagtcatacctcatactaatttatctaaattcctcattctataataacactttgaatactatgtttctattcatgaagaaaacgcaccagcaaaaaaaaaaaaaaaaaaaagaactctttagtccttatcaattttcttcctaaccaaaacattcattttttattctttaatccaaaggctgagttgggatctttttgaagaaaaaaaaagagaagacttttcaaagttttagtcaaataaaaaaaaaaaaaaaaaagaaagatatacatacagctactccaatcattgttcttgttctttaacgttttatatatagtaatgtagtgagtgtcgtttaatcaagtgttgtttgtcagtttg

SEQ ID NO: 201436 - DNA, 835 bp, Cannabis indica
cattctctcaaatctctctcaatagggttcaaagaactaaaaacagtaatgtgtaattgtgtgagtttgatcgcatatgtttgaagactaaaagcggttagtctgttatgttttcttttagatcagctataaataagtgtaagtctcaccaccgagatagtatattcatttcaaattaaactagtaagtgtagtattcattctctcaaatctctctcaattgggttctaagaactaaaagcagttcaatgtgtaattgtgtgagtgtgaatgcatatgtttgaaatcgattgtttcccaacaatctggtatcagtgcagagatgttcttggagcttggcaatttgttgaaagcattcttgagctttgaagatcgacaaaggagctcctgcagattgtgtgaagaccgtatagtgagaatcatgagaaatgggaaattagatttggaaaagtttacaggaaagaatgattttggtttgtggaaggtgaagatgagggctttactcgtacagtagggtattctagatgcattgctcggagctgagaagatcaaagacaaaaacagacaaagaaacaataaaaattcttgacaaagaacatagtgccatcattctttgtctcaaagacaaaatcttgtgggaggtttcgagggaatctacagttgctgggttatggacaaagttggagagtttatacatgactcgatgcttttaagatgttacctggttaataaaataattattgatcttgaaaatattgatataaagaacgaggatgaagaccaaacaataattattttgaatgaataaaggaagaaaatcctagtgaaggattgct

SEQ ID NO: 201437 - DNA, 853 bp, Cannabis indica
agttctcaatacaagaaaaaatgatacatctatcacaagacaaatcatcttaaaagagattgccctgaattaaagaaacaagactttaataagagacatggtaatgtcgatatggtctttgagggcaataactttgattggtatgagagtgctaatataatggttgtctccaagacttactcgggtgttgattgggtcatagatttagagtgctcttttcacatttgtctagatatggatcaatttttagagtatagggaaattgatggtggatctgtgagacttgggacaatagagcttgtccaattattggaattggatctgtgaagctacaattaaaaggaggaaattctcataaattgcagaatgtgagacatgttcctaataaaaaaagaaatttaatccctggagctatgctggataaggagggatgattggtcaagatggaatctaggatattaaaggtgttaagaggcttaatggtactgatgaagggtgccatgattaatggagtctatgttcttcaaggaaactccaccaacagctttgcatctgtggcttctaaaagcatgatcaactcaacaatgctatgtcatagaagacttggtcatgtgagcctcaaaaggcttgggattcttgacaaaaaaatgctgcttggaaagaatgtggtgccaaatttggaattttgtgagcaatgtgctttcggaaagtcaacaagggtaaaatttggtattggtatgcatactactaaggcaactctagactatatcccctcagatgtttggggaccatcaaggataatttctagaggtggatatagatattttttatcaatcatagatgactactctaa

SEQ ID NO: 201438 - DNA, 886 bp, Cannabis indica
ttagaactgttgagatgatatactttacatgattaacaagtgattactataacgctatacactttcctatatatattaggatgaaccaccaaaaaccacaccatatttaccattcatttatcctcccctacccgcaactcaaattgtctgagcactcaaacaagccatccaagtcatttggtggagtgatcctcttccttactagcaattctacaagacttgggtactttctcttccgcccacctctcggcctcgaacggaactgctcatcagcttcttcgaaatcgccctgatagatccaaaccagatttatatacccaataaattttctaaagacaaggagtgtttactgtttcattgatacaagcacaaaactcacatgtgtgtaaacgtggcaactgctcttctcgtggttatctctgacgtgtttgtaagcaaatctcatgccacaaccagaaaagccacagacataaggcttctggttgaaatgcacagccttcaaatgttgattgagatttgatttctgtaagacatgtatatttatcaggtaaataacaatttaatatcttctcaagtcaaaaaacattcaatgtcaaagagcgaatcttacagtggagaatgtacaaagacatcccttataaaggcacttgatgctttcaaatgaactctttcgttcatgtgtacggaggtgccttttcatgttctttttgagatgtttggacccacatactttgcagctaatgtgtcggtggcacaattgaatatgatccttgaggcattgttcattagtaaatactttcatgcagcctggttccgcacataatgcctcaattgactccaatttaactgcaacattaagaaaactaataagaatatgaattttcaa

SEQ ID NO: 201439 - DNA, 939 bp, Cannabis indica
agtttttttgcatgcttttgaaattttatatttaaacaaataaatgaataaataataaatatttttagctaactaactaacctgtctccatgggaagtgttttagggcagcaaaggcgatggtgacaacggggttgagatgggccccagagatatggccggtagagaagataattatcatgacggtgagaccggtagccacagccaccacagttagagtctcggcatcgtttgtgttagggttcaaaatagctatggctgtcgctgcgaatatcaacattagagttcctacgaactctgctccaatctgtaattaattaaaatacattatttttaatttttggttaaaagtaatatttttttttctctaacatatattataaaatcttatatatatgtgtatatttacctttcttgctattgaaactacaggagggcctttccttgaagtagagtttggtttgttgagtgatccttcttccatggcagaccattgatcattattatcaccacacaagttgcttagcatggattttttggtacctccatgagttggagtaacaggtatagttgttgaaggaataataactctctcattcgaattcgccatatatttgattatatatatgatgattaatcactctatataataatataaagaaatatgtaagtatatatctataccaaaaagattattataatatatatgtttgtgtgtgtgtttattaattaacacttcattttagtttcatcactcaagtagtgatcttttgatgatgatgagtttgttttgagctcactatagttggtatttatagaatgttatagtagttgacatataatagtataaagagagagagaaagagaggagaatatgtatattccgacaaagtacttattgattaattaaaatataaataatatataatgtataataaca

SEQ ID NO: 201440 - DNA, 777 bp, Cannabis indica
taaactattgagattgttagatttaaggacttttgtctaattttagtaaaaaaattccacggatgaaagttcagaaggcatgatttagtacatatcaaagtttgagaagcatgatttggtagatatcaaagtctatagggagcatggtctattacataaacaatcactgaagcagtaaaactgaatgaaattagacaaaaatcattaaatttaacaatctcaatagtttggagggaatttttaacgaccaaaaaaattcaaggacacgatttggtgcatgtcaaagtttaggggaaaaattactaattaaattgtgctcttatagtatatggttcattaataatattttcaaaatatgtttttaaatataatttttttattgtattttatttaattttattgtaaaaagaatgacgcaataaataatagttaataaataaataatgcacattatatacttctactattttacttaatgattaaaaaattaaaaatataaatataagttagtataaaaaaaaatattttatttattatttattcacatgaaaaagatagaaaatattttatttttcaactatttttcaccactttattaatttacaatagaaaaagtgattttgtgttgtgttgtaaaagactgttatcttatttccaacttttctttccatcacttcacttttctcaatttaaataaaaaagaatggaaagaataggaaaatagactcaccggaatcttgaagtaggtgaagtaaaggccgataacgcaactgatcc

SEQ ID NO: 201441 - DNA, 1248 bp, Cannabis indica
atttaatgtaaccattgaaacctcctccaataaataaatatatatatatatatatgtattaaaaaaattaatgtacatacaatttatttcacaaagagatatagttaatattaaatattataatttttcaaaataaattattcactaatataccacaaaaatcaaaattctaaactaagttatgtttatcaccctctctcccatcacataataaaagtgaatactaatcgatcattgcttaatttattttatgtacagagtaaatctattaaaaattgtgttaataatgattacaagtgagatacggtgatgatattaactttaaatacagttgttactacaaataagatacgatgatgatagttgttttaaaattatataatgagttttctataagtttactaccttctctctattttaaatctctattttgtataagaattgttgagtttttaattttttttacttataatattgaacattaaaaaaattgcatgattttatatttgtataaaaaattgtataattttttttttaatatttagagttttttatataaatttattatttttttaataaatatatatttttctttctaagaatatacataaaatgtatttaaaattatttaatactaattttattatttaattaataattatataataatttaactgccgcacgcgaaaagcatggcatgcctactagttatactaataaataatatgataatttggatggtacatcgttgttatcttttatcaatatttttctgtgcagatatatgtatttttagttattgtttgtataacaaaaaattttagtggaaagaattcaacttttatttgaaaaaaaaaaaaaaaaacctaataaaggaaaggcccctatagccaaactattttgtattttcttttaaataattgctgaagataggatcacttaatccatattgatacttgaacaactaatatattccacacattatcgagatacacatatcatccacttttttttttctttttggtagaatcacattcatctacttcttttttttgaatttacacattcatctacttttagtttatactattatgtacttttttcttataatattttacatttaattaattgactttgcaaaataaatcttttagtatttaatttttgtataaaaaaaaattaaatagaactccctaaaaatacaattcattattgtcattgggtcaattaataattaaatatatttat

SEQ ID NO: 201442 - DNA, 735 bp, Cannabis indica
atttttttaatctcattttaccaaatttcaagatcaattgaattgcgaaattctattttaatgagaattttgaaatagttaaaacttacttgattttgtgtctttataaagtaatttgaatcttatattatggaattgaatctcataatatttaagagaaatatctttgataaaaatatattaggactatatttttagtcaattttatattttgtcgtctttgttaaatatacccatatatatacatataaatatagatatatttcaagtgtccgctttgtgaccttttagttttcaaatgttgaaattaatattcataatttagaattttctaaaatcttgatatacatatatagggataggattttgtcccgttattgtattttttggtatacaatccatgattgtactgtagccgttagattgagtctagtcattaatcaaatggttgttactaatttgtagagttagtaggctttagtaggggtattcagatttattaaattggtaaccagttatatgagattaatataatattaattgtttggtacttttttaaaaaataaataaaaaagtactgacctgacatgattgatgtcagactctgataatacactatactttttaataatttgtcaaattatattgattatattgtattttttttttaaaaaaatactataaatcttaatttcaactgttattcatgaacttcttcaatatatttttttataa

SEQ ID NO: 201443 - DNA, 554 bp, Cannabis indica
ttcgccacagagaccttcgaggaaaaatcctgagaaggaacaatcttttcaccagaaaagacatccacatagggagaagaagcgaataaccatggtccgaatatgggaaaagggatcccaagattgttcaacaccgtgtctggggaggatagattacaaccgcatcgttgatgcctcagcctgccataatgaaagcagaatattcctagtttctcatatttgaactgtaaccatcttctaacaccatttcacagattaaagaaacatcttgagaagagtggtttagcaatatcgatcttaacctgaactttgagccatttggcctaagttgcatgattatcctcatccaactcaactactattaccttacaagcaagggctcccagggattttccattagcagtggagaaatacgcatgagggagaagatgaatctaaaaccaaagacgaagagaaccaagcgagaccatgcctgcatcactcgaggttcaatcttggagaaccaaagtataacctttaacacaccatggaccattctccagagcccaaactct

SEQ ID NO: 201444 - DNA, 606 bp, Cannabis indica
aaaaaaaccaaaagaaaagaaaaaaattctggtacatttttcatttgttttagtatttagcaaaattgtttagtcaattttttttattatcgtatatattgtagttatttaaaattataaataaattttatcataaaatttcaaataatttgtcgtgccaaaaataataattaattctgttaatatctatacaacttctttcttggaaatgctctttggtggtgttaggataccacctctgtgtgttatgctgtcaggattagacaccttttagtcgttctcctagtccctgctttctagtaaggtctttgtttagaggtatgttgatgtatgtgtatccatcttggttgtctaacacgtctgttccttttgaaacaaaaggacttagttctttaaagaattaagcaggtaccaagttttccttagttgtcaaggcgcggctggctagttgaacgagtgtgttggctgttgtgccgtctttgggcacttgccttctagtatagcctttgagctatcttaacagcttcagtaggccatcatcttcttgtattgagctttatattcacctgggacataacctacaactgctgagggtcgtggtgcatg

SEQ ID NO: 201445 - DNA, 846 bp, Cannabis indica
gatccaggagtcatttacttttaattctctcggatagccttacttggaaaccgttcccttactccgaccgtgccacggtgtctgatgaaggaaaatttggataacagttttgttctaataccatgttaaaatttggtatggtgtgatttaagatggatgaggttctatctcaaaactaattgataatgaaataaatagttcatgaatcttatacattctactattctctaaatattaataatatgaggctctataacacataataaaagctccaaaattcatttaccagctccaatcttgcaagcctgcaatacagaatttggaacaaaatgacaaaggtagaaaaagagagatttgattgtaaagaaagaaaaagtgccaatattaaaaagataaaagacaaatattaaaggtataacaagaaagttttccacacaaaaaaagtacatgaagctatgcttcattagaatttgttattctttatatactttactataggaatattaattaatagtgtgtaaatttccttcatattctttggatttgacaataaagaatatattatattcaaactgcaatttaagctttgaagttttctgaaaaatatgaaagcccaaggggattcctaattatattgattccaattccatgcatgaaccttgaagttgtattttatcgaaagggtagccttataatagtgcctcaaaagaggatactcttcaatattttttaagtataaaatattgtattgtattaatctgtgtacacaactggacaaacttatattacagtcctaaaagatgtgttctggtagaaatataaaatattgtacatgtaaattctttt

SEQ ID NO: 201446 - DNA, 758 bp, Cannabis indica
cataacaatgatttttatcataatgataactaattaattatagattaatcttgtcaaacaatataaagttctttattaatatctatatatgtaaaagaaaaattacagatgataatttgaaggtacaacgttaaaaaaaaaagtaaagatttaaagcaattatcacgtatagatattgtaaaataaaataataatttgtgtttatttttagttagaactgtcagtgtttacgtaatggaccgggtcaaaaacaaacgctcacacgtgctaaagcgcgtcgcacgtgttcaatatgtagtgttactatcttgagatttttttcttatttttttatcttgagatttctttttgaataaattatgttattaacatcagtttgttaaaataatagtttatagaattaaaaaaatgaataaataataagtcttagattaattgacaaaaaaattgcagcatcaaataatgctaagaatacttatattcacttttatttatcgttcaaatagtatgataatagaaactctcatgttcattcagcctcatcccttaagcttcgtcccttaaacactaattattatgcaagatacgtatgtgcattactaacaactccttcaatcgcagaaaacttgttatgttagattttttattttgacctacattaaattttattggttttattaaaacttgagtttgattggatagttctttattgtgttagctcatattgttgggggtaaagtactattttggaccctgtg

SEQ ID NO: 201447 - DNA, 866 bp, Cannabis indica
gtaagaatatctcaaatttgaatacgaacaaagatagtcatacccctacccaaaaacgctttgagacatttaagaatacatgaacaacccagaaaagggcaagactataacccctcgccataacaaaatcttgatacaacaccgttattaaaaataaaaataagcatattaaagaaaaataagacactaataacaacaacacaattatgatctaatttaaagccaatgagcaactctcaatcattgagagacacctttgaacccatggaaccaaagctagacaccaccacgccaactcgccaatcacccactagcctatcctctctacctcctcgataattggactacgatctccaatttcagcccccaaatcacgaccattttaataggtccaacataaccttgacactccccaacaaccccaacgacaaaaggatgaacaccagtgaaattgataatagtgtgagaatcaacaaagccctaccaaatccacgttgtaaggtcgagaataagcgacgagcccttttcaagaaaaaaatttcaacaactaggatgaagaaaaagtaaacctaaaaagtgagcctcttcgcatgcttcatttggtcttttgtgtttttctgatgataaattggtgactttaaaaactaatatactactttaatagtcacggagtaataaaaaaaatctccttacaaatttttttttgttcatttatgtattataaataatataattattttaataaataacatacatattttttagatgatataattattttagaaatttttatagtgcactccctaaatattttagataacataatatattttttttagattaatataatttaggagtattttttt

SEQ ID NO: 201448 - DNA, 1462 bp, Cannabis indica
agatatactgatatccgtacggtaaattgttcagaatggagaaagcggaagggcctgcacatgaaagaacatttgtgtcctctgttaaaatatcaactgtagatggtgtactatttatgatgggagatggaaaatcaagagtaagagatgcagaaagttctgcagcttctttgatgatccgcgccttgcaagaatccgatatactttaatacagcccttccttcttcatcgtttccaatctccaacaactaattgggtcaaggatcaagtatgtaagtatcagggtcatttacactttttctgcttttctttcattaactaacatcatttatatacttatatattgactacttgaattcaagtggagatgctgcttaaatgttgtttgaagtgaacaaatttctatcaaaattttgagtaaagtttctttttcgttttttaaaattctattgcagaatcgggatgttcaggctttgcttcgcgtcgcagtgaagcagataagcactgtatttatacctggaagtgaaaaaaaatcagaatttatcattgatgttgttgctgtcaacaatgttgggttcattccctgatttttaatttttgttaaaaggttttatttgtagggtgcttttaacctcaaaatgatagatgttgatgatgacatggctgaaaatttagacaaactcaaatattgaaggtttgtcaattggcctatctccataggaattgaaccattaagattaaagttttaattgctgttaaaactgagcttatgtccctgtcggtcagattgaagttgcagagattaatttcggagattgtatcggtgacattgttgcagacaatcccaattcaaagaaggaagctttctctccatttgacaagagcttcatcttgtgtttgaggttatgaagatgtgatcttaaatggaaacaagagaataatgatgatggtgtttgttgtttttgtgtgagaattaaaataagttgttaatgattgaatacatgacaaaggtatataagtgcatttttgtttttcgataacactataaaaacatctctaactactagcaaaaagtacgtgcgaggcacgtatactaaattttatgttagttttttttttctatattatttaaaagtgatacaattaaaaattaaagaaaaaatattattagttattaggtgagattattattacgtgtatctaaataatatactttataatttggatatagtgcgtggaatccgtagtccattggatgcttggcaacatcttcaggctcgattctagcagtgttctgaatttgcaaaatgaatattaagagtatgaataaatatacaactcctaaagtcataaccccaaagtgtagcagaaatggttctgagaggtaaaactgaatattttaaatggaatgccaccggtaagtacctttattataaaaactaagctcgttaaaaatgtgacc

SEQ ID NO: 201449 - DNA, 663 bp, Cannabis indica
gggtagagtctcatggactcagagatcgcggcatgcagatactgcatgtcgcgaatctcttcatatgtgtaggcaaatttttgtctgttttctggctctcttcgagcccgaatggactcgagttctttcaggatgtttgtttgtatttctggtcttgtggctaagagccagaagaaccatgttagggctgagactgtggtgtcttgggccgcaaggatgactccgatcgtcatgttgcgatgaaactcggcggagtagtagtttccttcgttgtcgtgcatggccattaatcggtcaaggagatcgggtgttcgatctttgttttgtttggtactttttttgctttctttgattcttgtttggactatgttgtctacaaatccttgtagtgttatgattgctttttttgagacgtttttctgagccaatgttgagaaacctcttggttttccaccaaaatgatgggtacatgcacctatataataattaaaaattatttatattaatagcaaaattatatatgtaagaattaatatttaattgtatcactactagcaagaagttaaatttactataatacactataaaaatcttattttattatattaacatccaattttaataatattttatttaataaatatcaaaaatattttaataata

SEQ ID NO: 201450 - DNA, 2396 bp, Cannabis indica
gctgatatcctctcgcgtattctcgagaatgcccttgaggctagttccattagaattaccactttgagtagggatggccttagactctcccatctgttctttgcggatgaccttatccttgtgggtagcgcgactattggggaagcaaagggattttggcaatgcctggagaaattttgtgattggtctagccaacatacaaacaaactcaaaacctcgatcttcttcagcaataacactagtgagggtatgaaaagaggcattctccaagaggttgggctcaacatttccattagcaacatgaactacttgggactccccttatttaagtccaatcaaaatgatgttgattttaatttcattattgagaacttggttttgaagctccacgggtggaaattgaaaactttatctaaggctagatgtgcgaccttgatcaaattagtgggtcttactacgccagtctacattatacagaccaccaagctttctaagaaactcgcatccaaaattgattgtatggttaaagatttttggtggggttgtgaatagggcaacaaaggtatctatttgaaagcttgggatcgtctttgcctacctaagtcctggggtggcctaggtttctgaaagactttaaaaatgaatcaagctttgctggctaggtggggctaggtcctcatcaatgaggatcaatcctaaaaaatctcagattcttatttctggaagaatgttgtgaaaactaaggaaatccttaagaaaggtgcgtgaaagctgatatctgatggggaagagacgaacatttcgactgatccttgggttattcacggtcaagatttttacccaaagccaacttcggctgggccaaggaagtaacgaaggttgcagaactattgttagataacggagactgggatatgctaaagcttcgaacgattttagacccataaacgatcagggatatcattaaaggtggtacaccctgtggttaggttattgacatgtggatgtggacaaaagagcctaatggtttatttactactaagtctgcttatcttatcgaagctcttgagtgacccactgcctgcgtggttgcccccacctagtggaacaaactctggaacactaaaattttggagtatcataaggtactctggtggtgtatactttctaatgctcttcctatgagtggcctccttgctaagagaattcaggttgatgagatttcttgtcctctttgtggggatggtgaggagtcgatggagcatcttttcctctattgcaattttactttccgcctttggagaggtcatctccttgaggagttacgactgtccttgaatctggtgctcgagtttgggattgggtaaaatttctttggaatttaaggtcaaaagggctggatactgacaaattatttctctatgcttcgattgtggtggatacgatttggaaagcccacaacgacaaggtacacagattaattcagcactgtattaattctatctctacttgttacacagattatgagttgtgtttatttgctccgacgatggatgttgtgtctcttgtttggtcccctccctcagaggattggatcaaaatcaattatgacgttagagtggacagttgttccatgtgcgtggtggctttagctagggatcacacaggagctattttgtggatggctaccaacatgcttaatttctctgaaccgcttattggagaagttgcagcatatcggttagctttggagacggcagtcatgatgaatcaccgttttgttatgattgagagtgacttaaagacggttatcaatactctgaaaggaaattgttctaattggagtattgataattatatccaacaatataaaaaagctctctaatcttttatttagctgtaattttttatttatttctaaattttgtaattttgcagctcataattgtcttagtgggcttttgctaaaaatattattgatatggccgagctatcttctatactagaaaatatcttatgtaacgaccgtgaggtcaaacttctttatttcctattattttttcaaaaaaaaaaaaaagacccaatatatatacccacatatggaattcgtctaatgtttttgtagtccctttgtttattttttctgttttttgttttgttttcttgatttgtttgatttgttgccattcatatataattaataataaataaatggtaaagggtgactacttaatggatacatttttattgtaaccatatggttacatttttctttgaccttgtaatagcaggttactaataggtaaacattccttttttagtaattaattaattataattaactattttcttaaaataattaattgtaattaactattttcttaaaataattaatt

SEQ ID NO: 201451 - DNA, 1339 bp, Cannabis indica
cattaagaaataaaaaataagaaagcaataatttgaagagtcaataaggtttatctcattctcacatatgccttaccaaaaaaattttcctgtatttagaaatgtagtgattgaaatatatcttatatatacgtaatacgtgggcttagttgctgtttgccttcatttcatgttttcctattaataaatatgtttttctttatctaatttttatttaccgtatcataaggagtaccaaaaaagtcaatgacagagtgttgatggtcttcaaggaattactgtccacagcttacaaactactctctccaaagggtagtccaaattccaaacttgcagttagaaatggaaaccaaataaggaaaaaataaaattagaaaaaaaagtaaaataaaactattttctgttcacgttgcaaaaggactgtctcttagtgaaaatatatttttgtaaattctatttgtagatcttattgataaacatgtgaaagactctgttttagagtcactattctattaggtccaatggggtggtaggcatgtgcatttgtgtttttctttttcatttttttttcctttttaactttgaatttatataccttgagtttagccacctatatagtttcttttccatacataataataccttaatcatttcattccaaataacaatgcacccctatggcccaaaaacctaatataaatttaaaaagaaataaaacaaaatcatagcagtatattgttcatatcactcattcccatgttactatcaacgtccttccaactaaacttctctgtctctctctttctttctttctctctcttattcttattataatatagtaatataataaatctcttttatctgggttcttttaacaacatgtttaattaattaaatacataaacttgcattaattggaaggttattaattttgccggtaattcaaatctttgtctagtcaagcctggagtcgcggtttggttagttatctaaaattaatcaataaattaaaaaaaaagagtaaaaaatatatatttaaataaacagagattttaattttatttgtatttattttttgaataaattttgaaagagaggtgcttttactacttgagagtcttaatagattggggtccctcctccttttgaagggtgcatggtttggcctatgtgcctttctctctcttcttcatacggtggttcagagacatcctctataaatatgcacaatcttttggcctaagttcaaaactagagcatgcccataaacatttttacagctctctagagggagtagaagggttagaacttctagagagttttgtcatcatcatcatca

SEQ ID NO: 201452 - DNA, 1418 bp, Cannabis indica
tggttggtttggccattgatgaatcgattgagacaccaactagaaaaaccaagaacaatgaaaaacataataaagttaaggaacaacaatagtgctgcaatgtttcttccaactgtttgagccatatttttgtatttactaatgaaatattgaagtaacgtagtactacgtagttgatgagtttataaattaaaagttttggataggaatgtatacatatatagatatacaatatgtataaaatacaagggctttgacacgtggtgatagaagaggatttgcatgtggaatatttgggtacaggtgttgggacacgtgtcgatgtctccataaatgtatatattttttattttttattttttatgaagaacgagtctagtactttttgatttctttggattaatctcgaaagttcaatcaaaacggtgcgtatttgtcctatggtggggtggaccatgcattgtattgtattatgtactctcaccaaatgttatttttatttttttattaggttatttatatttttgttctttttatatttttaatttttttttactattaaatttttttttaattaagattattgaatttaaaattttttatttaattttattgtttatgtactaaatatactatttaaattttgatatttactaaattatatccctcaaatattttatgtattaaatcaaaattttattcatattagatttttttttattaaaattaaataaaattctttaaatttatcaatctcaataatttaaaaaataaaatttaataactataaaatttaaagtgaataatacaataaattttgttgagatagaagctagatatatagaatagagcttaataacttcaaaaaaaaaaaagtgcaagttagacgttattaaaattaattccctttattcttgtattacgtagtgtgatgatgtgttccaatttctccatatactacaaatattaaagccacatatttgtgtatttatttactatgtccaaacttctcctgcagcaaatatataaactactcatgcaatgaattgggacagagatagaaagtatttgtaagggggcagagtactaaaaaaaattaaagagaggccaataaataaatttttaatgaaaaattaaaaaattacaatatttaacttgaaaaatgggagtcactggtcaaggaccttatactaagtattgagaaccatttaggtacacattttctccataaaataggatctcagccttaatgaggtggggattgcatgtctaaatggagaacagtttgtctctgcatataccaatacacttaacaaaaatgccatatcatttatttttattgtaagcatatgaatagattatgtattttcttttatttttcctatggattcacaaaaagttcactcaacccgaagaat

SEQ ID NO: 201453 - DNA, 3162 bp, Cannabis indica
gtctctaaccattgtccatttttcagtttctctcagtcctccacttatccatgtttgtaaaattttagtaccaccacaatacttttgttatctcctttacaataatgaataaattgtgagtattgaagataaaatttgctcaattatggccccattaagccaagaattactaaaagaatcacgaatagaaatgatatgttccattacaaaattaatcaaaaaaaaaaaaacatgggtaaattgcgacataaatacttaatattttaaattttatacacttaaatactttatctttatttttggaggcaaaaatactcaatgttataattctcttacactgttactaccacttccgttaactcatatatatatggacacgtggagggctcagatgcattacatttatttattttattttaaaatttaatattcttaatatcaaaaactaaattctacttgtttcgaaaaaaaaaataagagagatacaataccaaactactatagctaagtgagaagtgcagtatatagaacatgattatcgaattgaagtgccaatatcatgtgaaaattgttatgataactagtttttttaaaacaagtagcatttagtttgtgttattaagaatattaagttttaaaataaaaattaaaaataaatttgaaccccccacgtgtccatatttatgagccaacggaagtgctagtaacagatgtaagagaattgtaacattgagtatttttgcctctaaaaataaaataaggtatttttttatgaaccagcaagattatcattactccaaatgaccaattacatcttaaacagcatcttcaataagagacctgagggaataactactggttgtacaacaattacatcgtatatatctattacaaattctcaaaccatattctattcttagcactaactcttttaggccatacagttttgactctatacaaaacatctatttttgttttagctactatatgactggtttgtacattttttcactcaccagaacttcattccaggcctcccaaatattgtaggctaaggctactaatgcagcagcaaaaatcttagttttgaatctgttggttttttctctttgtagccacctcactactctaagaagtgaatgtgacattgccctccactaaagccatctttgattttttgcaatcattctcctgcaacattacagccgaaaaagagatgctccaagttctccttaccatgtagagtaaacaagtgtcttctgcaattattatattgattttgcacagcctctctcttgtttttaatcgatcttgcactaccaaccaaatgaagaagctatacctgagcatattatatctgctccattcgatatggcaccattgtaccttctctcctttaggtctggacattttataagcttttgaaatttgaaacttactttctctcatcaactgttgaaaatacatggattgcttgactgtttccttggctgcatcaatcctcctctaataccagcttgcttgaggtggagcttggtaactccactaatctttccctttgatatacacattaggcacccacttgatccataagttgtcttctttatttgttattgcccaaatatactttgttatagctgccaagttccaatcttctacttttttgaatccaattccccctgtagttttgggctggcctactgaatcccatgctataaggcttgtcccttgtagcatgtgttggcctttccaaagagatgccctgcataaggcttcaatgttcttaataatcttctttggtaagatcattatttgactccaatatgaatgaatagctaacagaactgagttgattagcacaactctgccagcatatgaaatgttccttgaactctatacccttattcttactgtcattttctccaccaagataacacactctttgctttaaattctcttagcacatattggaattccaaggtatttaaaaggtgtttcctttctgctaaaaccagaaatgtcaacaaccctttgtacctctctttcttccataccacaacaataaattgctaacttcaaagggttcggatgatgcccagatgagcatgagaataacttcaaggcctgtagcatacaatagatactcctaaagtcaccatggcaaaataagatcacatcatcaaagcataggtggttaagattgagatctttatacctttcaaagaatttgaactcttctttagcccctgctttctttaagatctgagatagatattccatattaaggaaaaagaggagaagagacacaggatctccctgtcttaatcctctactggcctcaaagtaaccatgcataatcccattgaacattaaagagtatataagagttcttacacaagtcataataagctttatgaacatgcgaggaaacttgaaagcttgcaaaatttcttccaggtagtcccaatatagggtatcataagccttctgaatgtcaagctcatcctggtttagttattttcttcccaaaatgcctgatttaatcctgacatattattatattgtgtgctataaatctacctgagacaaatctcccttgattctgagctattagaatatatcagctttgttgctactttatagatgacattgcagcatgcaatgggtctgaaatcactcactatatttggacacttaatcttaagataagtgtaataacattggagtttatttctttgagaagttgaccagactgaagaaaggaggacactgcaccaaagagattatcccctataatttcctagttgtcatgaaaaaagtagcttgagtagccatctggacctgaggctttaattccaggagtcccaaataaacatctctgacctcttcttttgtaatatccctgagtagcagttcagcttattgacttgtcaccagtggcccttgactcataatacctctcttcacttgttttctattgctcattttccctcctagcaaactttgtagtaagcaagaaaggcctcagtcacttgttctagatcttcacatctcgttccttctttggattcaatgtatagaattttattatgccttctcctatctttgatgctggcatggaatagagcagtgttgtcatcaccccctctaacccagttgatc

SEQ ID NO: 201454 - DNA, 836 bp, Cannabis indica
taagtaaactcactaagtatgtttggtataaaggaaagaaaatttgaaagaaagaaaatatgaaacagacaaagatagaacaatttaatattaaaaaaaattaacttatttaacttcaataaaaattaaatccaataactgaaaatacaatggattatctcaataaaataacaaaaaattataagaatatgcttgtacaaaattcaaaatatttttacttttctaatgattttatttacggtaattaaattatttaatgtacatttatattatattttttttaatgtgttatttatatattattttaatgttccttaaatataatattttaaatataattttcttattgttttcacaaaaagaaaaattatgctttatttaattatctaatattataatgacaccaaatttggaaaatttaaaagttaatcacagaattagttaaaatattctttaaaatctattttctaaaccatacttaagttactagttactagtcatacctttaaccaaatctcatatcttaaacatgtttagtgagaataaacttgtacatttataaatggtcattcaagatcttaagattcaacaacataaaaataaaatcaataacaaaaaacaagactttcattactaaaatcctatcaaatcaacatttgggtccctcacataatcaataagagacttttcaattacaatgaaatttcattaccatcttcaaatccctaagctctctcgcctctaattctacgagccaactgaatatccttaggcatgatcgtaactctcttagcgtggattgcacagagattagtgtcttcaaagagacccaccaa

SEQ ID NO: 201455 - DNA, 1118 bp, Cannabis indica
aagtgggtggaattccaatttaattaccagatttgatgatgatgaattatattaaattaaaattaataaaatgattattgttataattattacctgttggtgaagtttgttattctgatcttggagagaatcattatcagccttaagaagatcaaactgtttcttcaaaacatcataatctctctcaagttgttttgtcttccacctggctcttctgttctgaaaccaaatagcaacttgcctaggctgaagacccaaagccttagccagttgcatttttctctcaggctcaagcttattccccatctcaaaactcttctcaagtgtcttaacttgttcaagattcaacctttttttcttctctccaagttgggatccatcatcagacaactcatcctcaccaccaccaccacaacccccaccatgcaacattaacaaatcttcattattattacatttattactattattattagtattaatgttttgatgatgatgatgatgatcatcaacacctgaaaaaaaaagtgatctcttcatcatgaatgctgcctgttgctgctgctgctgctgctgttgctgattattattattattagtattaataccacctgtaatcaaatcacataattatgattattaacaaatataataatcaatagatgaagacaaggaatatatatagttaattaccattgaagtgggggtgatgatgatggtgatgatgatctacttcttggtgagattggaagatgaaactgtgaggtgggtaagccatatgtcaatggcacatatatactacaacagtagtagtagtagtagtagtagtatagatatggggagagaaagatgaggaagagagagatttgatatatatgagatgttataagtagaggggttttgtttataggaatttaagaattggggtgtgggatgatggcctggctctcactttgatggtgtttgtgacaggattttcagaaaggagagaaagatgaggatgggttaatatgggtgcagagacgtctactgaaagacagccaactttaggtgagagaaagaaaattaaagatccatatcataacactacacatacatacataccatgggtccactaa

SEQ ID NO: 201456 - DNA, 752 bp, Cannabis indica
aaaaaaaaaaaaactattttttactatctagaattgcttgatttgacccaaatctcaaattgttaagcctataaaaactatgtcttctagaaaaaaaaaaattatacccaaattgataatacttttttttttagaataagaaataaaaagtatgtcttctagaaaaaaaaaaaaacatagataatgggatttgggattgagtaaataggaattttgtttattaattatgatatttttagagttttgtcgtaaaaacttttttgttgagaaaattttccctgaattatataaatcgttacaaatatattctttcagttatattttgctcattttattttaaataatttatttatgtactatgagttacatatataattacaatataagagtttacttaataactttaagctccttaaaatttagtttagtgacattaaacatataaacagtacatctaagaatgcacatatgtactataataattcattattagactgctatttatgtgtttatttttgtctgaacttttaaatggctagattaatgttatgttagaacatctccatatagtgccaaaaaagtagtgtattggtatattttatcacaattaaaaaaaaaactactactcctatgatgttctgaaaagtgtgctaatttggtacataataaaagtttaatttggcacatgttaaaatttgtgctatatttggcacaagatatagggccagtttgcaggcccggccctgggcata

SEQ ID NO: 201457 - DNA, 1099 bp, Cannabis indica
atcagtatataataagatcaagagcttgatcatatatttagaactctagtagataaattgtaagattgagtagagaagtttcacctggaagttatagtctatgaccttcaagttcaagtactggctctgatgaagatggagataagtaaaaaatggaggttttgcgttcgaaatggaatgaagacaaaatccaataatattgaaggagagaaagtctaagaatgaagagtcattttcttcatgttaaggcaaatgaagtcaatgagtgacagagtaataaggacttaaggagtagtggtaatgtttttaacccaaaccaaaccaaacttttcaagaaaattacaaagacctaaggctaaatataatcgtgatagtaacagttcttcaaaacttttaacttttcttaagtatgtgccaaactctctaaatatccaaaaacatgacgtggggccctctttatttttttattaaatggaatttccttaatttgaggtctgcttaacatatgagtttttattcacagtcaacatttaatttattttcttcacaaaatttactgttaacatattatgcatgaatatggcatggttttctaattaatcggttaacatatttatttttttactatatggaaaatttccttaatttcagtttttttccccttgaaattggcgtgattagcatattatgcatgtgatatatagcatggtttcctttgtttaccagttaacatatttatttttattaaattcataatatacaaagtaaaaacttaataatcttgaataatcaaagacgaaattttgatataccaaataaatttatctatatccgttaagaagtagaattttagcttaaatgtgatttttcattagtgcaatttaatgctggctaattagtaatagtttgggaagaaaagccataaatcgcggcactctcaaatctaagattgatagttagattgtcacaatcactgggtgtgaacggcaatgaagtctaaagagagagaggagaatggttaaggatgaatagtacctaatgataggcctcaacatgtaatgatggttgattaaatgtgggcctatgggctttaaaatta

SEQ ID NO: 201458 - DNA, 993 bp, Cannabis indica
ataggtcaaatggtacgcaataaggaacgatttctcaatttataagaatattataattttccttataaataataacaaaattaaaaaatgatgtacattcaccaatctttcaatagcatatgatctatatttatatataaaagctaacgattctgttccgttttggattacttcccattcggaataattattgtaggacctatatatttttcatcattgttggcatgtgataatctctttaaactttaaaatatatgaagtattgaagcattactgcttataagttatatgtagtcagtgaaactaatattacttaattaataatattcatcgaaagtgcatggagattattgttaaggtaattggtaatcatcccatcataataatcatatgtatataggtgtaaaaagtatggtccactgtcgaaaaaaacaagaagatgaagacgttaatttggtccaatcaccatgaagtgaattatagcttagtacacgtttatatgtagcttgacaaaataaatgaaagtgaaaaaaatagtaaagcaacgttttgtaacatttttattttaataaccacttataaattataatatatattatgagggagaattacttgtctttattttatctttctaacaaaaccaaatttgcaaataaagtgttttttttcggcttagtttgacaaaagaaaagtacttgtaaggacaaatccatgttactttcagtgaaatgttatggacattaattaattaattaattaggtaaaacggccggctcattaatcaaaaccctaatttaaatttgtggattccaacctatttttattgatcatcatagcctcatcagcatgctctatagtacaatacagatttatttcatgtaaaaatatagaaaggatttgtactattttgagcgtaattaatgtattattgttgaaatatataaaaaaaattgatattgagcttaaaattcgtcaataataaattaaaaaaaa

SEQ ID NO: 201459 - DNA, 623 bp, Cannabis indica
aaaaaaaattatttgaacaatccttggtatcctgtatacgttattgcgaacgagtttgtgaggatataaaaaaaaatgaaaagaaaaattaaaatataagtttgaaattaattatttgaatgtgagactagtattaaaaataaaaaaatgaggagaggacccaaatttatataaactcatccattaaatggctaggctagctagtaatcatatgtagttttcctttttcttgttcaattttttatcatatatttttggcttgatcgaattcataagggacaaattataatgggcgatgagtaatataaaatcaagctactaaggttagcttagtggtgagagagagatgagaaaaaggagaggtgatgagttcgaatttaagatttttaagttattaagctattaattgattgtaaaatattattacgttacattaaaaaaaatgactaatatacaatgggttatttaatttttattcagaattctaatatattattctattcgtaatgttgtaaattaattttttttaagttttatcacgtgacaaatataataataatgtagcatctccttaaataactactacataggtgtcatattaatgccacatgtgtgattaattt

SEQ ID NO: 201460 - DNA, 1088 bp, Cannabis indica
ctacttgtgagctctttttttcttcttttttttattaatataacccattttatgacaattaaaaattacaaagatctaaaaggagaaaagtcaactttctaattttgagcatgtggatatattggatgaaagaaaaattattcttatccaaaaatcaaagtacaaataaaaatttatgtattaaattttttgtaataattaatttttcaatttgcactgacataatttgttatttcatttttctaaatttttttttctcagagcttacataaactatttttaattgctgtttataatgcaaaatctctcaacaccactataacatataaaataaacatataagtttattggtatatatggaagatacatttttattaaaaaatttggaatatttataaaaaaatcttgaagctttaaagttgaagacaaaagggcagatatttttttcttttcagaagaaatctggaaggattaattttcaagcttatggcaagtgtactatatggtatttagagtcagaataaattaattaataaaaaaaaaataatcataattaatatttgtaacatgttgtttattaaaattatttggaattattttatttattttatcaagaataatcagaatgcttaaattaattaaattgttctttatagttaaactatactatatgggggttattttgtaagacatattttaaataacaaaattatcattgtatatttaatattaaaaataaataaaaattattaaccttaaagacatttcttacaaaaaaaatagtgaggaaaatatttctttttatcacatatttaacaaagttctctattttctaattaagtcactaatagtcaagcatcaaataaaaatgaagaatactaggtttttaaactgattgaacatctaacagagtccacttactaatgattatcaaccaatgatcttctagtaaagaataggacatacataaccctcgagaatcaaaaagagagctaagaaaaactttttgaggatcatggactcttggattgatagtagccatgtagtcatcccaagacaaccaaggaatccaagtggagcaccacaaa

SEQ ID NO: 201461 - DNA, 563 bp, Cannabis indica
ttttttttttcaatatttaggtctgaaattatttgtgaaaataatatttttataagagtatttattataattacagttttatttttataaatttttgaaaaatttacaatttaaaaaatataatttgtcgatattttaatttatcatggatgtttaaaaaattttaaatatatttttaatgctatttaaaaatttataaaaataatactataagcataaagaacactattatgaaaaaaaaaaacttctaaaaaaaatctaacatatgtttttagacataaaaattaactaaaaatttataataagagtttaatagtagcactcttaatataaaaattcacaaacaacaagttgaattttttattagacactattaaaatttttaatcaattatgaagaaagatccatcatataaattaaatgagaatatgttaaattcaactatcatttttttagaattcaaagatttttatgataacaaaataggaacacctatttaagatatttttatacatggtacaagacaaaatatgcaaaatcaaaacaccgtatttattctctct

SEQ ID NO: 201462 - DNA, 872 bp, Cannabis indica
tctctctctctctctcgatctgctaccctagtatgatgagtgtataaaagtacagtatagagattttcatacgtataaataatatcgtggtctgacagtacataatatatttttttatatatatacaaatacaattgagagtacataatatttaacgtatgtccaagttagtttgatcgagccctttcgcagcttcgaagcgcgtgacgcgtgttgtgtcaagtcttgctagccgacaaaggtctgctttgtcagtttatgaggactttacttggcagttgccaccttcatctacggactcaataaatcttactttgcacgcgcttcaacgtggtgcgtgaaatcttttcttattttgccaagtggacttagtcaaagctgcctcaccttcgtttatttatttagagaaatttacatgcataaaacaaaaaaaaaaaaaaattaaattataaaaaaaaaaaaaaaaaaaaaaaaaaacatgcatacattttgtagaaaattattctcaagttattgtgcaatatttagagagtagactaataataagtctaatccccataatacccttataattcaaaaaaagaacatttcttctttcttcctttcacccatctcttgtctcttctcttttctctcaatcttactcacaaatctcattctcttcactcatttcatcaccaaataacacaatttttctttttatataaattatactacaagctcggtactttggtggttaatttttttttttttttggataaagcatcatacatgaattcaataggtaatgatttttttgtttaatcttgttgttggttgttatatttagtttataatgttgtttcgatagttgatctgttagttgttgttgt

SEQ ID NO: 201463 - DNA, 841 bp, Cannabis indica
atatatatatatattagaaaaataactctaaccacctacgtacgcacctccaaccaccgcccaagcgaaggacctctgcttctttccccattactctgctattaattttaggaaaattgtaaagaccacttagttttagtatgcgaatatattaacagataattagggttaatttagaaattagattttttaattatgatttataaatttatagagatatatttgaattctatgtgtgttatttatgttatatatgaaatttcatatttttcatattttatgtccggtaacagtggaacgcgacatttggccaataaagtcactttttcaattggtttagtaattttagtaatagcgagacaacttagatagatattgagaatgtcgggaatagttgaggtattaaatttgaccaaaatacccctaggtggcaaagatactttttggttaagttaggggcaaaatagtcatttttggagaggatgagtcagtaaggactcttatatatgcttctccaaattatccaaacttttttcccatggatagtttgagctattttatacttaatgtttgatctattgcttatttgattatttcattagtagagattttggtatgtcgtctccttacacgttgttataagttgacgaacttactattagttttcttacttatgagaattgtggggaggcgctgccaaaatttttacaaaaataaagcaatcttaagagcatagattgtactatatctatattacaaacctaaatgggatatgttatttacctttttagtaatggagtgagaatgtagattaggacacttgcatatatatatatatata

SEQ ID NO: 201464 - DNA, 693 bp, Cannabis indica
atgtttgaaaatggtttcgttttcatggggtttcttttgggtgcgatgagatcgaactttttattctgatttagtacatgtaaatttgtttttttctttctttttttgaaataatataaaatgggtgtttaattcttgtgttggtttggtgaaagtttggattttatttttttttgagttgagatttggaaagtagggtttttggtgatttggattggttagtagggggagttggtttgggtttggggttggggtaggaattttttgtgatgttgtgtttgggtgtggcataccatttggatctaaggtttttggttacttagactaaaatagcaagggaggaaatatggaaaggaagaagctttggtggtcttcattttgcctttggttgattttggtagttcatcctttatgggtgattatggtatctgctaatatggaaggtttgtatgcatgtttttttcaatttttttgggttttttttttcatagctttgatctttttatataatgggttttggagggttttgtttcttggcaattcttttgctgcattattctttacttatttgataatgggtattgaaatacttttctcatttttgaatattttggaaatgttagttgttttgtgtgtaaatgaggttggtgaaatgttgataaatttggggggtacctatgctgatcaccttgt

SEQ ID NO: 201465 - DNA, 1885 bp, Cannabis indica
tgttaagtacctctatatcagttttactcagaaaaaataaataaatacaaatatcctcttgaccttctatgcctactctttctcaaatggaaaactgtaaacctacaactccaaccctagaaggagagcagcatgtgatggctgcagctttgcacctaacaaaagctttagtgggaattgattatctgaatgatgatttgaagaaaatcctcagtgatctagactcccacttgtctgccatgcttgtaatcacagaaagcaaagaaggggagtttttggaattggaacagcggcttaagcaagtcgagaaaaaggtcaatagttgggggttgaataagctgatggtatgtgactgttcccctattgaagcttctcagaacatttaagtcattgatcaaatccatgacctgatggaaagcctcagaagcttagcagtggatgagtatgggaaaccaataaagcttcttcaaagagctaagagtcttcttcagacagcgatgtcaaagcttgaagaagaggtggattacattcttcatcaacaaaagcaatactttgagcctgaggacatgtcattccgatcttgtggatcagatgtggtatttgacgaatcctttgtttcagttgaggaagagccacaagaagaatcattgcgaagaaacagcaatggctgtgaatcagaagattatcttgttgatctggtgtgtccccatgtattgcctcatctgaagtccattgctaacacaaatgtttgcttcaaattatgcagaagaattttgccaagctttcatcaagtcaaggaaagaagccttagacacatactgggttagtttaggcatggagacattcagcattgaggatgtgctcaaaatggaatggaaaagcttaaaccacgagatcaagagatggtcttggatcatgaaaatcatcatccaagtttatcttccaagcgaaaaaaggctctgtgatcaaattttaggggagtttggatctcactgtttcatggatatctcaaaagctttattgatgtacctgttgaattttggtgaagctgtggtaatgggagattatcagcctgaaaagttgttttgattgctggacatgtatgaggttttatgaaatgttctctttgacatagataatttattgtcagaagagttgggatctgatatccgaattgagtttcacaatcttctagagaaactataagatttctcaagagcaacattttctaagtttagaaatgccattgcttccagcacatcaaccactccttacacaggaggtggtattcatcctctaacaaagtatgtcatgaactacatcaaggcccttgttgaatttgatgatacactcaatgtttttctcaaggatcaaagttcaagttttcctgaaaatcctgactcagtttttgagcttgacaatattcaaaaggacggtggttcgattctaacttcttgtcccatagcgaacaatcttcgatcaatcacatcaactctaaaatctaacctcgacaacaaatccaaattgtacaaaaatggtgctctgcaaaatgtgttcttaatgaataatgtcaactacattgtccagaaggtgaagacctctaagctcagactcttttttggagatgtttggatcagggagcatatggccaaagtacagcagcaggcaacaggttatgagagaacctcttggagttctgttgtttctttgatcagatcacatgacggtcacacgcttccaaacgcagttttcaaagaaaagtgtaggagtttcagtgttgcctttgaagaggtttatagaaaccagacagcatggtgtatcccggattcacaacttagggaagatcttcaaatttcgatttcacaactggtaatccaagcatata

SEQ ID NO: 201466 - DNA, 624 bp, Cannabis indica
agaccactctctagaactactatcaccagtcagtcaccaccccataaatatatttatgcaaataccaagattgatagaccaggccaaaatcaagaaaataaaataaatcactatatacttactgaagacaggctcagactcaggctctgcagtgaaaatctctctccaatccaacccttttatgaaaaagccttttctctcaagctaaagaaagaaggaagaactgagagttaatgcagtgtaatgtaatgtaatgtaatgaaaacattgtgatgcttttacaacccaataccaacttaggggcaaagaaacataaagtgagtgtgaagatgtaagaaaaagcaaaaggggttgagaaagaaagagagagacagagaatacctcttagtgaaccaaagaatatatgttgtttttgaaatattttagttatatattaatgtgggtcttctcctcttttgttcagtcatgtaaagataaagcttgtataaaaggatctcctaatctccaccatcgtcacctttactattttctgataactcaaacttaacttttttgcaaacccattaaagttctgagtctcaagttcaaattttgattgaagattcaagatggggtttttggaat

SEQ ID NO: 201467 - DNA, 596 bp, Cannabis indica
aatatttattttagtataattttgcaagtcttctatgcaccaccccacatggagtcatagaaattattatgagccattttaagtgaagttcttatattaatatataagtatactcttcatcaatttttacaggtaaatcttctctggagattagtattattgctgtatatataagttagagcacacttatatatactgcttaatatttttctgaaaaaaaaaaatatatctatatagtaagtatttatttattaacaacatttaaatcagaaattaatatatataaaaattagtcaagtattggcgtcgcccaggttcgaactggagaccttcagtgtgttagactgacgtgataaccaactacaccacgacaccgttttgattagtctctgctcattattgaatatattggctttgagtagttagtttaattaatctaatcaggttaatggttgacttttatattttatcaggaaaaatcattaaataaaatataattatatcattttgactttatgtagagggggattcgagtactccactataacttctatgtattgaaaattataaataaaaatattaataagtgaaataaa

SEQ ID NO: 201468 - DNA, 986 bp, Cannabis indica
aataagtatatatagaaagaagttggtacattaaatatatcatataacataacatattttatatatgaaaatttatttatgaagatctcgatcttatttgacattcccttatacttatatatatgcattgacaccagtcatcgtttacttctcatggaacagtgaactctgcaaaaattaaaaaaaaaattacaattagagtttagattatatatatattttctattccctaaaataaatatataaatttaataaaacaatgtatattctattcttaatataaagtatgtcatgctaatgattatgtattaagactttgaagtattaatggtgagaaaattcgatccaatatgtttatcttaattaagtggaaagactttattagtatatttattataaataacttttatatacattgaaagggacttttaattcatgatcattaactttgacaaaatactaattgaaataaataaattccacaaatgaagactgagtcaaagattttgcaaactcgaatcagtactagtgaaataataataattgattattcaattattagttgtaattaaaaattaataaaatttacaataaagaaaaccatttcagaaacatatatgagatagtatctttttaataagcaaacgaaaaggtcaaaatatagataattatttaaaatgaatgtggctcatccactatatgaaaaaaaaaatactttaatattatgagaaatatattaggttttcatatgatatttatatcaatatcaagctttcactattacatctataatgattttttattttcttttaaaaaaaataatatatatatatatgacgaaatgatatcgtaatattcataaaattattaattgcaatttctttcaatatattatatgaaattatttactccatcaccattgtatttcattcaaaccttatagtggaaaatagaacctacacccatttgaaataaataaataaata

SEQ ID NO: 201469 - DNA, 802 bp, Cannabis indica
caataccaaaaccaatcaaactataccaaaacaatctcaacgatcaaaacgaactataactggacaattgaaacgatcaaaacaatcaaaaccatgtcataagacaagacaaacgatcttcaatttctattaaaactagtttttattattagatgaaatttaaaaaaaaaaattcttcgacagcctgaaatttgttcaataatatttaataatttattccaattttaaatacatgttatattaaagaaatcttatctaagaactcaataagtataccaaagtccaaaactatatatgtactcacattaatatgtaccaaaactatgtactatgtacacatattattgtttccagaaatatgtagtcccaaaactattataccgaaagaatcaaataatctatgagacacattttaataatgttcggggtgataaataatctaaaatgatcatatatgttgtttttcaaccatgtgaaattttttgatttttgacttgagccatattgatttttgtttcttgttcattttgttatatattactcacattaatatgtaccaaaactatgtactatgtacgcatattattgtttcctttccggtaatatgtactggtaccaaaattatatataccaaaagaaatcaataaagataaaaatgcaagtacaaaaattatgggacacaatttaataatgtaatttaggtgataaacatgagtattgttattgagtatcactagtgcttagtattttttataggtgacactttgcaattagttagcgtcagggccgtcttaaggtgatg

SEQ ID NO: 201470 - DNA, 662 bp, Cannabis indica
gaccattttacccctaaacctaattatttcttaagctccaagtaaggtaatttttggaattttccttaagggttttaagtttgtcttgtagtggtcttgaaaaagtgccaatgtttcatttcagattatctagtattgatttattaaaaagaaaattcagtttttaatagataaaacataaccgaaaatctaattttatccaacactctctttgtctctccacctcttcggccttaagaaaccaaagggtttctccttcaattttcaataatttcagctagttttcaaggaatcaagaagctaaaatctaaagtaaaccctagattttctttgatttttagaagcttaattttttgttcaagcatgcatttttgaggttttggttatgtccgaatgtaggattatttgggttgaagttattttgagttgcttaacttttgtttaagttgtttttgttggttgattcttgagttgagcaagtttgagttcaagaactcaaacttggctcaacaatggtgaaatttgcatattgaggttatttttggttttgttgcttggaattggtttattatgatatgtttatgtgatttggagcttagtttgaagtttgggatcgttttgagttatgttgaaaactctttatctttctgcagcaaaaaaaa

SEQ ID NO: 201471 - DNA, 1575 bp, Cannabis indica
acgtttataagcccttcttcttttacgccacttcttcacaattccacccatttttttgcattcacgcttccaactataattatagtcgtactcacgcttcctcttcacaattccacccatttttttgcattcacattcttgtacaaagaataatagtattggaaagcttcctctccgttactaaattctggttcaataaaataaatagtaccatcaataccattaggatttccattgtttaatgaagctaaatataatggatacaaatattcaaattcgcgatgatcttcttcattcatttcttttaatcagtataaagttaacctttaaagttaatctttcttagagagaataatctcaaattttaccacttcaccattacacaattgttcttgacagcttgaagtgaagatcgaggaagaatacaaggaaatttacttgtagaattccttactagctcaatatgaccagtttaaagacactatcatcacctcgaaggacacattaattcttgaagatattataagtgccatttactcgaaggacatgtccctaaaacagtgaggaaaggtttcaagaagcaactcagaggcttagtactcgagaggaagagatcaacacaagggacatcatccacccaaaagaagaggaagaagttagagcgtcaaggaaagaggaaggtctcaatctaggggtcctagctagaaccatttgtaaatgatatcactatgataaaatatgtcacataaaaaaaatattgttatgaaactaaagggaaggcctggagggcaaagaattgacaatcaaaacaataaagaacaagaaacaacagccaattatggagagcattgtgaagatggagaggtgttcatgggacagtctgcaacagaaccattggtcacaaatgaagtgcctcataagaatgagtggatcattgattcaggatcaccttcaacatggcaaaacataaaacttagataagagacctgagagtccaaaatatggcaaagtgatacataattgatttcagtgtgttagttgtggatgtaactgttttatttcttgtttcccttatttggttttttctgttaatgttagttagttggtattactagttttatatatttatatttttaggatcatgttagttagagatgtgagttgtaattagagagataaagagatacacaaagagatagagaaagagaattctctaagtgcaaaaaattacatgttacttattcaacgtcacgaaagttcttttggatgaggtactatacaatttataagtaaattgtttgacgatattgcaagagtgtctaaaataatattttcattataaaatttcaaatatataattaatctttaaattaaattgtagctaagtgatattatgaatttatattgattgatttttatttattttaaagattatctctctgttttagtactctaatcatcacattcacaaacatatggagatgtttatagggagatgttttataagagatcatacacatttataaatttattattattatatataagggtacaatacattgattgttattattt

SEQ ID NO: 201472 - DNA, 517 bp, Cannabis indica
tatgtacttcaaaatctatgtaaaagcttatcatgtatttctgcaggcttggcttgggtgccaaattttcacgccaattcaatgttggaccattatctgatcccattgaacgaaaactctttgccaaattggatactcgaactaaacgtaccgaggagtctaacttagctactaaagatgaacttaatgatgactctgacgatagtgaagatacagaaagcagaagccaagtttttaacaagaaaagagcagcaactccaatgatgccatctgtacaaacaaagaaaaagaagaagtgactctcaacttcaaattttgtgcgctgtcttttgaaaaaaatatgccaactttcttatacgtgtaatttagtggatctagtaaatgaggtgagttaaattccacacaatgataatttatttatcattgttctccatgacaaaggaatgtttagtttcttgttcttgatgtctaagtatgtaaggattttgaaaagtaactgaaggcaatgtcatcattc

SEQ ID NO: 201473 - DNA, 1332 bp, Cannabis indica
gatagaagaaaattgtatggaaagctagcctaaatgcatcctaactttatgctaatccgactatacatgaaatgagcgcttctaaagtatgtttaatttgtttatagaataataactaacttttcatgccttgtagtttttgtccttcccttaaatatattcagcatgtgtaggatttgaggggcttggatagtttgaagatgacgccaatttttaagaacttttgattgggtatcttgtctaatgataataagttgatttctaatgatatggttagtagctagacttttagctatctttagcgattctaaaattcccaacactactctgatcagccggtcattgtgagtttctcacgatcttcttcttgtcatatagtgggggtggggtcctgagttaaatttgagggagtttactttgtttgtggatgttggtatttgctctaaaaggaaacgttttatcatgggagcgattgtgtctcgttccaatagtgatgtgcttttgttctgctgctacgccagccaatggcatgcttgaactgcatatagtggaggcttcgaccatgctacaaggtcttcttctttataggcaattggggtatacttagatttgtgtattttccaactgtttgcttttaatgaattcagtctctatatttttcatgtttggaagtcttttctcatatttgtatctcattgtaaccgagctaataatgttcttgcatattctttagttaaagtggctctcactttagatctctcgagtctggtagccaagttttctgcctaacttactttagtttctcatgcctgtaatggtcgttgaatctctttcgatttatgcttttttttatcaaattattcttttttcctcaaataaataaataaataaataaacaataaaaaccttaactaaattgagactttctttttctttttgaaattaactaaattgagattaaaataaaaataaaaatcttctcaaatttagattctcacaaaaacatccttttattagagctagaatttcccttaataataatattgacccattaaatggttggaggtgtggttggaatagggaaccttcccattgcgactttgacagggtacaatccaccatgaccacccccacacccaccaccataatcatcaacaacaatcccacatctccaaaacccagttatcaaaaaccaaaattttgacaacaaaacccaaaattaagttattcaataacacccattccattaaaaatttagtctttcttcaccaaaaatcaaacaaagattgaaactttatttgatctgttggttttggagatgtatttgggatc

SEQ ID NO: 201474 - DNA, 645 bp, Cannabis indica
aaagtggcataaatctaactctacaactcatatgtaattcagcccaagtctttattttaagtccaatctcatataaatctaaccctaagtgaagcctgtaaatggaaaacaagagagctttattagatgatgactttctaagctagaaaacactaaagtgctcacttcttctttctctttaattttcaaaaatttagaggctattttctcttggatttcttcatgaaatattgtgctccttcgtgttgagagcttgccaacatatgttaaatcaatactcagcatagtgaggaagattatgtaggtcaatcgtcatcaagaagaattaggtttagttttctcggccagcaacctcaaaattaaattttaggtccaatgtcaggcaagggtagcgaaaatttatgttttaaaagcagacattagatttgtaagcctttattaccaaatatatatgtacattgcattgcaacaatacatttgtaagacttctaaatgaatataagaagtttatcttttcaaattgcaccaaataacttgttaacaaattacctttttatagttaattttatttttagttaaaaatgtgttcaaacaagtcctcccaataaaatatataggcaaagatctatagtacgttgttcattt

SEQ ID NO: 201475 - DNA, 1750 bp, Cannabis indica
aaataataactattcttaattaggagatatatatctcatggtactattggacacaaccatacataatgataattataatataaataaataaattaataaaatgctttaagttttgcttataggatgagatttcttatatattaagacaaaaaaaaaaaaaatattgacttttaatttgtaggtgtgacaactattgacaatttcttcagtttgatttttttatttttttaattagaattttctttgtgaaaacagaaaaattacaccacttcaaatgcattaatttataaaattaattaaaaaacattaaatttccttcctttttgtttaacccaaaaaaaaaaaaaactacaaaaagatatatgtatttaatttttactagggatatttaattaatacaacataaaattgatttaaaagaaaaagaaaaaaaattattttttactttaaaaatcaatggcaactagatagagctagttggccaatacctattaaatttctcttaccaaacctaacatagtattaaagaagactttatcaaaatacataatatgtaacatcattattatttttttttaattgaaaaagtactctacaataaattcataaatttttatcattaaaaataaataggaatatataagtaaatcatttagcaaatataataacaatctttttgtaagaaactatctttgttattcctaaatttacaatatcaatggttatagaccaatgaccacaccaatttaattagggaaatagacttttatagccaaattattagagattaaatgcaatctagataagagagttaattaatttttctatcaatatcccatttaaaacaatatttttcaaattttatattggtcccacaaaatgaaatttccaacattactttattatatttaccatgcataatatttttctttctaattagaacttcaagttcaagtagatatacattgaataaaaataaattaatttttttaaaaaaaagttagtggatatagttaactagttcaatctgaaaacaattttttttttggtttggaaaaaagaaaaaaaattaaattagatgcatgttttaaaagttgataaagatacataaaaaatgataatattataataaaaaaatgatactaatttctataataatattagagattataaaaatttactttaatataatatatcaaacaagactaatctaaaactaaatacataaagaatttatatatatatatatatatttatatcaatgctatttttccattattttttctagtttctaaaggtctttgcggtatgaaaaatactaaaagatatcagtggtatataatatttttcaaaatattatatcgttattgatataattaagtattgagttccatacaatttaatataatataacttttatggaatatcgttaacaaatcgcaaaacgttacttctaagatgttgagcaccactaatatctaataacaatactcgtgatcgcggtattgtgattcaaaacattttttaaacaaaaataaaaaataaaaaaaataactcactaaatacattgtttttcaaaaaaattacctcaccaaatacatgtgtaactgtgttagttataaacaagtagatgaataatacgtatctaatactcatattttttagaatattaatttatcatttgacaataattattaataataatattattattattttgctataaagtttttaagatatatatatatat

SEQ ID NO: 201476 - DNA, 775 bp, Cannabis indica
aaaaaaaaaactctaatttttcatcaagatcacataaaaaaacccagttcaccaaattttctatttccccattttctctattttctcacaccagcaatcagtatattaatgtttgagttactttcgaagaggagattataatctatgatattccctctagtttaatggaaattctattagaatagttaatttgtgtactaaaacaatttgctattttctctatttttgtggcttataacctagtttgttataataatttcaagttatgataattgtataaaaaatttgaatgtgggtagtatcgactcttgacttttgttgcgtggctcttgatgcctcggtatttgaatggcttgtttgcaaatgtgcaaatatcccataacaattccaaatcaaaatacccattcttcctctgcttcttacccttctcaactcccactccatcgccagagaatcccaacaatggcgctctccacctttctctcttcctccatttgcttccatctaacttcaaaccctagattctcccaatctcaccccactactaccttaaggcacctcagactccttgccccaccgtcggtctccattcctcctcttgctgtcgacgtagacggcaccaccattgttgtcatataagtggtggctcaggcgctgtcttagccgtcgcccgctccctaactaacctcgagtagcggcacaagctccacaccgaggaggtcggggtggcgataaggaggttgtgaaagagtatgattgtaaagaccgcttagtt

SEQ ID NO: 201477 - DNA, 689 bp, Cannabis indica
ctacatgaaatgaaatagactaaattgtaaataaggaaaaaaaaattatgagcatgtgtgcattgtctaagttaatttttaattttttattcaaatcgttaagcaaacaaaacaatataattgattttctattttgagaaaataaaaagaaatataaagcataagaatcggacaataggatactattttggtggacagaaaaatagaacaggcatttgcaagtcctttcatccttattataagcaagtcttattaataactcaaccactaattctctcatagttttaggtccaaaaaaacatacctaaaatttctccaccccactattcctagctataaataccaaatacttcaatatatattacatatccatctcaacaagtcttatattatcattaacacattattatcctcataacaaatataaaggaacaaaattaaggataaaaaatggccaacaagatggttgctgctttcgccatttgcctcgtggttttcgcggcgctgtacgcgagcgaaggtgaggcggccacggccgatgttgacccccagtacagtgtttgctacagtaagtgtagcaaagaatgcttaagtactcttgaaaacaaaggtcaatatactaagtgtgaaaccaaatgtaccaacgactgtgatgatgaagaggctgccggtaagtaaatctaacaatg

SEQ ID NO: 201478 - DNA, 571 bp, Cannabis indica
tcatctaaaagtactcctattactttctctactatatcataaatattttattaaagttcaactttctttaatttacatcaaatgtttacattaatgttatattttttctcatatattttattagtttctctatatcattttaaagttatattttttctcatatattttattcttttttaaacacataaataattatacacatatatattaaagaaaactttaaaatattaatataatatttatattttagctcatgtgatgtaatactatttttactatttattaagctaaaaaaatatacataaaagctcaaatttagctcagaaatatcacttttaccactttgtctttatattttagagaataaactataataactcattttataagtactctaaggatattgattatattatatataaattatagtgggaatttctgcaataataaatatatgtgtgtgtgtggggaagggacaggaaagaacccactattaactatacctacataacgagtcaactatttaacaatataataagcgaaaacgacacagatttttttttttgggtat

SEQ ID NO: 201479 - DNA, 798 bp, Cannabis indica
ctactatacaagactttaagactatgtaataataatgatcactttttaagtgctgaccaggattgaatttcagattgagttagtgaaaaagaaaaattatgatcttattgggatttgtgggtattcctatctatttttctttcttttaattaatttaaagtatctatttaaatgccaacttttgtcttcttcgatgggttttgttcatctttttttggggttgtgtaaatgaattttggtcaatgattcttaagggcaatgggattaccattctcatcaaaaaccaagatagaaagagatatatagaataaatattgtaatgtagctagttttgtatagttttaatagtctttaataatagttatcttagtggataagtatgtatcaagacttgcataagtcacacttgacactccttagtgtttggtacttccttttaatagaatattagtttatatggaacaaaacactataggtttaagtgaaaataaaattacataaatatttcataaatgactaaataaatggcaaattattgcgtcaaaaataatagagcataattattcaagaataataagaaagataaacaaagaatagatgctccaccccctttgaaatatcgataattagttactttgatcaaaataagtaaaacaaaattaatagtgatactgataacgctccaaactgcattattaccactgacctaaattaaaataaaatttacacaagtcaaggtcatatataatagaccaaatgataaaacactattattttggtataaataaaataaaaata

SEQ ID NO: 201480 - DNA, 2682 bp, Cannabis indica
ggcagctatatgtaagtacatctgggctatttcaaacaagcaggagagcctttggcaaaaatggatacacagtgtctatctcaaagaccatgactggtggagctactcagcttctatccatgctagttggtattggaaaaagctagtggccatcaagaatcagataaagcaaatgagtgatacaaaagagtttcaacaaggcaaatacactatagcagctggatataaaatgttttccccttctgctgttgccccgagatggtgtaaggaggtttggagtagattaaatactcccaaacataatgttatcttgtggttagcaatgctaaatcgtttgaaaactcaagacaggttgatcaagtttggagtgcaagtaaatggaaaatgctgcctgtgtgaggcaggtgatgaaacaaatcaacacctattctttgaatgtgttactgctgtaaatagtttgcaggaaattaaaaattggttgaagtggaatgttgtttcaaccaatctcccccagctgctgtgatggatagatagagcaaagctttcgaaatttcgaaagatggtgtatatagctgcgattgctagcttggtgtacagtatatggaagctgatgaataacataatttggcagggggcttctattgactctaaccgaattgttgaagaaactaaatggagcatcaaaatgagagtggctatgtttacttctaagaagaccaaagatatagataaggagtggtttaatgagctataatgtaaaaattgaggaaagatatactattgtatagattgtgtaggcccggattgggtgctaattggttgtaaattttgagttgtgcaatataatgtcctgattttttttaaaaaaaaatattctccccaacttatttgaaactcatggtatagttatgacaaagcataataataaatgggtcaaaaaaatttctctcttttctttttttagctcaaaaagtatgtatttaaaaaaaaatatatattttgaggctcaaaaggagtaaactagggataatcacaaaataggttagcttgaaaggcgcaaacattgcaaataaattacctaaatcatttttcaaagcataacttatcaatgatttcgtcttaaaggccaaataatgcaagttctatcaaattcaaattaacataccttcaaccctagtcaagcataaataattaaatccaaaatattgtattagtaaaacatattaaaaatttcccacataactttttaattaaactctaaaacaattaaactaggcacatatattagcaacttccttttcataggtaaagtaatgaaatatagataaaaacaatggcttaaaacaaataaacacaaacaaaccaaaaataaaaataactaactacaaattatatgtccctcccctaaatgaaagtttcacattgttcccaatgtgacaataaaaataaagagagagaacttacctcaaatacacgctacatcaatgagcggttgacgtttataataagtgtcatgcaagacaacttgaaagttgttattgtaaatgccctcaaacttggcatgtgatgagtttgatccaaaagcagcaccaacaactcacgactttggatgaagagctttgggagaagcctttggtagctcgtagaggatataatatggtgaatatggtattaatggaaaataagagtccattggtggttcataatatagtgacatcgctgacctcaaatcagcaactacaagtaattattcagccaccaatgacacctctttctcgatttcctcaaatagcctctcaattggttgttctttttccacatgaccatccacaatcttgactgtgaattgatcttaaataacttcatcaccaaggatggatatttcttcattcaccaaattgagatcatcatttgtggagtaagcatccaacgtacccaaattttcagtaacttccaaggattctttctcttcaattctaggctcagtctcttctgtgtattcatgtaatgatatttctacattattcaaacaactctcataaattttgttgttcatgttattatccttagaactctccaaattatgcactattaaattatcacataaagatcttactatgtttgccaagtggttaatttcttctacaagtgatgggttatacttctcttcctcaatattggtgactccaatcttcaagtgatggatcccaatgccaatcgtaatcaaaatctgtaatgtcattcaacaaattcattatatcatcatggcttctcattaacaaatactctccagttatatctactccataatccacacagcttttttttttttttgtaacaagagaagctgcagaaaaagaaaaactaaaacacaagcaacaaaaagaggcaccaaaacaatcccctctagctatcttctctcggcctgggggcttcttttgtaaggccatgggcgtccatattaagctgacgagggagaaaatgcaaagaagcatcagggaagttggagaagagcaatcgaatctgagacacaagactagaaagagcagaattatcttgccaagcactattcactttggataccaaattcaaacaatctgagaagacaaacttaggagacaattgagaatccaaacaccacagtaaactctgcaaaagtgcctggccttcagcaaaaatggg

SEQ ID NO: 201481 - DNA, 830 bp, Cannabis indica
atcatgtcacaaataaatatttaaaataattcatttcataaatgagaaaacaagctcacaacaacttaatgattttgtgttttactaggtaaattattaaaaatattacccaaagtttggagagaaatattaaataattattttgaaatatattttgtatatgaacgtgaaacaaattgttttgaaatttatttttgggatgattcataattattatttattttctaaaaattggtaaaatctatatacctactactaatattataacttcaaatacaatagacaatattgctatttttttttaaaaatagtttaattattgaaaagtttatgaaaaatgcagttatattttctagtgtccctatataccgaaaaatagagagtcctatggagaaagcatagcccaccaaatatttttcctagatatttccattaaaaataaaactaaacacatttttttcttttacgtaaatatatactcggtttttggttatgacatcaacgcggtacaactagggtggcggtgtttcgatgcagtactaatatttaattgggtaggtgagttaatttttattatgtaatattatatgacatatctaataaactacatatagatattatagatatattgtttttctaaccaaatatatatcacaaaatgtttacttctggtgtcatattatatcgtatcgtatatatatggtcgaatgcgtgacaaatattcaactatgtttcacaaagtaaactctaggactaataattttcaatatttaattatgtaatgctgtgaaattcaatgagtcaccatttcgtgctatatattctcatcg

SEQ ID NO: 201482 - DNA, 1926 bp, Cannabis indica
gtttatatcacgattttgactaattatgcgatacccgtcttttctttagcgaaacatctctcgcgggagaggaaaaatttattccaataacatgtatatattttaaaaatatataataaattattttcttaataataattttaaaaggataaaaaattaaaatatattctttctattttttatcaaaacacacaagaaattttttaatcctaaaagataaataaatagtttatattgtattgaacttgaaaagcaagttctaaaggagccacatttgatctcaaatatttagataaagaggaaaggaaaagtaatgaaaagaagaaaaaaaaaaaccaaactttaattaataaaaaaaacaacttaaaacagtataatacatcctttctttttatctaaaaatttaatttttaaatctcatgtacttggttttttttttttaattcttggatatataaattttaattaaatttagcattccgagcacaaaatagcactaagttcatcaggaacattgtgctcgaaaatgctacgatcaaagtagtatcgagaattcctaacaacaaaatatacagctcgatttgctgatcgtcttacaaaaggtaatctaacattattcatggaagaaagtaaactgcgacaatcatgaataattaaaccaaaagggggactcatcacttgatcactgtaaatagcttgaaaagagagtaagctgtctgattcaatcataactgatctccattgattacttttattacccagctaagtgcctccaattgatacccattgcttccattatctcagccgcataatagcccccttgaacaagtgtgcccgagcctcaaccaaggagcctgtgttgtttcttgccactaaactgataccttactttgaatctgactcaaagattgccgcatcaacattgatcttgattgtattttcaccaggttttatccaacactcagatctatcatctttgttgccaaagcataaagatgataagaaattttatcctgagcttttctccaatgatcaagagtaatagaagctgaatcaataatttcatcaacagaagaagttttttgtttccaaacaatattatttctagctttccaaagaggccaacaacacatgactgcacgacacacttttttttctatcaaaacgtttaaatatcagctcaagccagctaccgaaagagctaccgggattacctatagaagccataccttgttgtaaccaacaagcttgtgcaacggagcatgaaagtatatcatggttgatggatgtagaagaacaatctgggcaagtagaataaatattaacatgctttacaactagttggagacaagtaggaagacaaccactgactgagcgccaaagaaagttctttacctttggaggtattctcaggtgccaaagacgatgccaaaacccaaagttattggcactatgatactgatttttctaattctggagcaaattataagcacttttgacagagaagctcccagaacgttcttccttccaagataaataatcttttgtggcatttgaactgagaggagtacctaagatcagagcaatatctcggctattgaagatgtcgcaaatgatttcagcatcctaacttcgtgactcaaggtgaaacaaagagctaacatttttattaatgaggtcaggatgtgttgtggtaacatatttcgtaacaaatgtactgttaaaatgcttataacatggataaaaagatataattatttacagatattttagatttttttagttggaatatgttgtaattgggatatttttattattgatatgtttagctttttttaaaaaaaattaattttttttttttatttttgttaattattaaataataatattaaatttataattgagaaacattgtatatagttatgg

SEQ ID NO: 201483 - DNA, 830 bp, Cannabis indica
attctcaaagggagttctgagtttagcgtttttgatctctaatctccaagctcatactttaaatttagtttagagagagagagtccaagatcatagtgagtgtgtggaggggtgtaatgggagtatcactcttaaagtgatttcccttaatgtgagacatttctttgtaatactttactgtgttgagttgtaatcttgagctcattctattgtgtactactgactattcctattcaataaagatcaatcattcattcattctcgagctaagttttatttgtctaatttcaattaagttcaagttttaattttttgtgattggttttagttttgtttgtgcattcttagatattgttactactataacaacctgttttgagggtgaggattcaccacacaaacaatttgagacattgttgttataatctcagttaaagtgttaagtgtaagaattagtttatgcttaattattatgatttttgattttaagattgtaaattacaacctcgttctcaactttcttcatatcgaaatattttttttcataggggtgtttcttatgatataaaatcattctaataaatttttaaaaaattataaataatttgcagtatcgacaacataattcttgatattccaatttaccaaaggtgttaaaaaaaattaaacctatcaaaataatgttgtaattataacaaatactatcataaaaaaattaaaaaaaaatatatttcaaattcaataaacattgtcgaatgcaaatgttgaaaagaatattaataaaatgatgtaattaacagttctttctttctttttacattatcttgttg

SEQ ID NO: 201484 - DNA, 763 bp, Cannabis indica
tataagttttgttaggactaaaaatacaattttttatagtatttgaccacctcaagttttaaattttacatatctgccacgtctaatggtcacaataaacctatacgtactaattaatatactcagagtcactaatgataattatgattgaattcatatgataaaagtaacctagttttggttattatgaagtatcattaaataacttgctcattatattttgtttgtgcatgtaaatgtaatgtgtgtgtgtgtctatttgttactatttattaagggaacaaataacacaatatttaaaaccattatatcatatataccaaatctcactcgagctagcattgagttaaaaaataaaataaaataaaaaaagtacttgaagataaagtaacctaatgcgtgaccatcaataaactcaccctacgtactatcagtcatcaaactctatctatggtactctagagtagacatataatatatataatatagcaatactctttctaatttctatactatattttttcttatcatttcttttagattgtgcttaaagttttcctccttgatgtttaatttacaaaaataatataatgattggaaaaaggatgctacatatgtttcatgacaaaagaagaatacaatgaactggaaaaagaaaataaaaagaagaacaaacaaaaataaagaagtgaatatggaaaaggcccagcccacacactccttcaccccaagcttcttagcccacacacatcaacatagctta

SEQ ID NO: 201485 - DNA, 3154 bp, Cannabis indica
ttttattgataatatcgtcatcatatgttatcaaagcttagttgaaagaaaaagaagtagtagttgcagattttgatttttcatcaaagcttagttgaagtgatcccactacactaatgccttgttcgactaatagtgtaggggccataccttagtgatggacctcctaactaaaagatgacttcgtcgcatcttgtcggttcaagaggtgatcaactcacttacacaagataaagtgaatctcactgtaaagtgaactatctaagaaacagttacttcattgataatatcctctcaaatggtccccgttccagaatcttggtactagcactggattcaagtggtagtcatagctaactccaacctgtttgtctcgcatttgaacgcttctatgatgatataagatccctccctctttcattgggagtcttcaatgtcgctttcttggtcaatatctttagaagactcatatgactcattttcactattgctcccctattcttgatcattgttgaaaatagagggagaatctttgtcactgccccatgtcagtgtcttgggaagtaggggagattctttgtcaatgctctctttctcgatgttgccttgagaatagcaagggattcatcatcactatctccctactcgagttaatattgagaaacagaagaagagtctgtttcattatgggcattaggtgttgattcttcttcacttttctagttgaggtctatttgagaatgacgaaatagataagcattgtgattggttgcttctggttgagcaactcctttgaccttcttgacgactcctttgatcttgatgaaatagttagctctgtctagaaactcttgaatggtgtatactgatttaagtttcaagtctttccagaatggactcattattattagttcaactatcattgccatgaccttggcgtcttcaccaagtatcttcttctaagtggtgtcctctaaaaattgttgtaggtaatcctttagaggttcgtcttcttgttacttgatatagactaaatcgttaggttcgattggtctgtaccttgatgggaagaattggtcatagaatgattgcttgagtattttctaagaattgatagatcctggagaaggtttgagataccactattgagttgcttctaatagcgtggccgaaaagattcaacaacgaaaaatgtctcaaattccttacaggttagtatgtacttcgaatttgtttatgtgagagagagtcttctttgccagtgtatggatgtcacactggatttccaaactttgaggggatctccaaagccttggttcgatctgagagaggagaaaactgcttttgatctaactcgtactctattgtcttcagagtagtgataactttaaccaaagcagcaagagtgtcaaatttggccatatacacatcatgtgtggtaatttgtgtatcaactagccacttcttattaatgatgttatgtaggctcttttgtcttcaaagtcaatgaaaggcattgatcgacttaggccttgtggttgttgtctggtcgtatggccttgctgacaattgtggggatctatctcatatgatgatagagtcatctttcaagcgtttgcttcgtgagaaatttctcgcattactatactgactatttccttcaaaatagtcttccttagagtgacaagtatggtacataaattaaagctaaaatatatattttattctaggttgttttcactacgtacttcagtaaaaaaaaaatcctagattttatatataggtattagagtattttagaataaacacttaccagtttactgctaatgtgacttaaggcctccgatcgtcaagaagattttccactcaagttgacagacacacttgaatttagatttaagctaagactaatattcagatttacatatgcacatattttagatatacatgttttatgatactgtttacctaatatactagagatagtagtatggatgtagatagatttgtatttaaatattaatatctagtaatactagtaggtatcgtatagtatatatatatatatatctaattagattaatgtattagaaatagaggtattgtgtacgtagagttgcactagaatactgacaaatatatgctaggtataatatgaaaaagtataaattaatgctaccaacactagtacgactagagtacttagtgcaatttagtattatggttaattgtacttagttaagaatattcgagactcaattatacacgttagatgctggtagtagacttatgattattaggtgtatgagtacgtaattacaagtcagataaatgttgtatgttttatgcttttcttactgagtgtcgactcaccgttatattttcatgtgtaggtaaagacaaagtaaaatttgaacatcagtgaatgacgagcatggtgtatattttacatatctagacagttcctagagggttacgatctttgggacatcacatgcttagttttgtttagcgatacttttgatattatgtattttatgtatgttataaaaatagatatcaggatcccggattgtactattttggaaaagtattttatgtttattataaagtcttatttattatgaaaattttactaaacacgtttttttttactaaaatcctttaattagcaaaggttagcaaagtaattaagaaaatattgtaacgtatttaaactaccctttgattagtaaaggttagcaaagtaactaaaaaaatactgtaatgtatttaagctagtaggccttaaaagtatctttttggcttgacaaatgtctttcatttcaaatttagttttcaaatgagtctttaaacttccaatatttgatcttatcttgcaaactaccagaatatcatcaacatatagatgttggtacaatttttcatatgagcaaacacatgaatggtgtaccccaatcatagagtttgtaaacgatatacatttatgagtgacaaatgaatgaattaaggttataaaaaaaaaaaaaaaagaataaattaaattaaagataatagatattttttgtttaagacgtaaatttaggtttgatgttatattttgttataaaattttagtataaaatttttaaaaattttaaaaatttactagtac

SEQ ID NO: 201486 - DNA, 680 bp, Cannabis indica
aaaatttatcttgtgactaaaaaattgttaataaaaatatctattttttgtagtgatataacgtaatttgttgtgaaacagaggatattaaaaaaaaacaatcaacaatctaaaatcattttctagaaattcttaaatctacttaaaaatttagaataaatttcgtttatccaatttttattttgatccattttcttctattgtatacgaaaatatatagaattgctattttgatacgttgttgacaaatgagacctcattcattcctctaatttaattttctattatagttgttcataattcatccctatccacgaccatatattggtgcaaaccaatgaatatatgaagctagattagcctcaaacatgtactaactaaactaaggaatataaccataacagtatattaactaataaggacctcaaaataaatttgacaataagcgcctagatctgagtatctaatttttacatgcatgtacaaaaatcatcataattagctgattaaaaatctatcaatctatcagctctaaagtaaattagtgcatgtttgtcatcataactaaaatattattttttgtatttataaacaaaaaaattgtgttcttaaaaacagttaggcttgtttggccgtatttttcgaaaacagttttcgaaaaataaaattacaaaaaataa

SEQ ID NO: 201487 - DNA, 1221 bp, Cannabis indica
tttttgttgaatttcataaggtataaggcataaagaaaagacaatgtttaaaaaatttgatatagaaaacataattcccaatatttgttgtgagtcttgtgacactttggtgagcaacttaaatcatttcacaacttcaatatgaatacatcacattatttcaaaaaataacataattataatgcttaatgcaaaaatttgcagaagtgtactcaaaaccaagaaataatcagaaactccctaagtgcaaaacccattaatttggaacatggtcagtccataaaagacttggaaaaaaaactagtaacctcatcaatttctgagtgttacagatcattatgccttgacatgtttctgaaccagatgaagggcttcatggtgttcaccataatccttgacaacaacataattataatgctcatgcgtataataaaaaaataataaaataacaaagagatcccctaattaaggtatttaccagtaattataactaaacaaacacaaatatcaataaagaattcttcaattttttttcctccctaaattattgtttcatgaattttcctttcagaacacacaaaaaaatataaaaaaggaaaacagagtcactcttgtaaagagacagtgcaatcccaccaattcgtagtgactctgcttgctcaagcactaatgatccagcaactaatctgattaatttaattatatatatattaattatgtttctataatataaatttgttaaaaattaaggtatacatgtacctgtggagggatacagtagtggcaaggccagcaatttctccacccacaatgacaatatcctcttcatgcactttgctgttattattattattattaatttgagctttgacgattaatctgaaatttcaattggatttggaccttttaataatccagtgctaccccgaccaccatattggctctcaaaaactgctgctgatgatgagaacacgaagctgcggccatggcacctgtttagttttgcttaatctcttagtcttaatgtaatttgtaaaacctagaattcttatattaatcttgaatactcaaaaaatgacgaaacaagaaaagtagaaaagtgtaaaggaagactcacgagacgaataggatcagcgggcaccgccggtgagagagagagagagagagaccgagagagagaaagagagagagagagagagatggagagagatcgagggagtg

SEQ ID NO: 201488 - DNA, 1461 bp, Cannabis indica
aacacttattttgattttatttttgtattttttaaatcatttataaaaatttatataatcttttatttatttttattgtcataatatttaaaatataataataggtatattttttttttaagaatataaattaaaagaaaaaaatttaaaaattttaatttaattaaaaatataaattttttataaagtaaaaattattgaagtagagtgcttttaaaaatttgttaaatgtaaataaagtttccctattcttaaatacggtgtaattacacttatttccaaacttaccctaacagatggagcaatcaaaataggggttattttacaacaaaaaaattacaaaaatatggtttcacaaaatttgaaataattttatgatttttttgattttatttatagaaaatacggtattttcatgttgtattcttattaatttgttgtttattttttgttatttgtatattatttttttgttattgttttgatgttatttttatgttaccgtaatttttttttttgttattttcgtattatttttataaaatattataaaataaaaattcaaaagaaatttaaatgtaaaaatataatttttttttttaaaaaaatagtgcatcaaaatatgtatcatacaggatagagagtcgggatgttatatcgagatctccgaatccgaaacgatgaagatagaataactaattaatcaagtattacctcaacctaaccttttgttatttggttccaagtaaataagttacgcaaatatcaatataccgtactattattaatattgtcaattgttaaagtcaatgttttactggcagatggagtagtggttatactttataattttatttctcatattaaatatttatatggtatatatatataaataaattgtagagctagcactcccaagatacttcgagaaaaatgagatacatacaacaaaaatgagatacatacaactatatatataatatttaaatagttataaaaataatattttaacaacatactttgaaaaattggctaaagaagttattgatgagtgtgctctaagaagagactaagacgtactaataataatatatatatataattaataaatatgtgctaaattatattaaaaattagtaacaaaatgagttgttagtaacactaagaagaaaagatcttttaactacaaaaaaaaaaaaaaaagaaaaaagaaaaagaatacttgagccaccatcgtcagcggatcatgatcgatcatcagtcagatcagattaatacaacaataataaataaataaaagaataaaaccaaacctgaaaaactctgttaaaaagcaatgccgactgtgcaaaaagacagttgcgaagaaacacatgaccaattgaatctccaagaccaacggaagtatgtaatcctctgccttcgacttcttgtacatcaactctaccagcggcaatatga

SEQ ID NO: 201489 - DNA, 1453 bp, Cannabis indica
tttgccgccatttaccctttttacgctaggtctgatgctggtacgatgcaggcctaatgccttttctgttattaaaatgagtaaaggttgaaaatgtaagtcaaatggtggcccgatgtaagtccgatggtggcccgatgctactcattttttatttactttttattattttattatacataaaaaataggtagcatcaggccaccattggatctacgtcttcaatctttgttcatttcaacaacaaaaaggcatcgggtctgcattggaccaccttccgaccatatcctacatttatgggtagcattgggccaccattagacctacgtctttaacttttactcatttcaataacagaaaatgcatcgggtctacatcagaacaccatcgaaccttcatctataacctccaaattacactactatcgtactcagtatcggaccactatcgtacctggttgtaccatatacaaaaaaattacaaaaatattgatttcaccaaaactcaactttttaccaaacaataaacaaaaatatatgtataaaatatatattaatttaataaaaaattatataatatataatcttatatatgtatacaatatataaaattttaaacttatatattatacaatatataaaattttaaatatatattatagaatataaataaatatttattatataatatatataattttgtaacaaaaaaaatatattaattttttttatatatatatattaatattttttctagtttaggttagtaataattagatagggtttttctaatatattttttaattaatatatgtaaataaatgtaattaagaaattagaattatatatattatttactgggttggcgcgcggtttcggatccaactcaaaacccgatgaacattaaaatttaacccacaaattcgcccaatggagtaccgtgttggacctgagtcgtctaaacatttttttttttttaaattttgcaggttgactgggtcagattcgagttaaatccactcaaaatattcagtcctattataaactcctcaaaaaaaaaaacgtaaaataaataaatctaccaattcaaccatttgaatgtagggctgggcatcggtcggtttgatcggtttttttctatataaaatccaaaattcggttttcggtttggattggtgcaatccgaaaatcgaccgaccaatccagaacatatcttaaaaccgaccgttttgaacctcggtttggtcggtttaaaccacccaaaatcgattattttttttttaaaaaaaataatccaatttattctataaatacattattttacattttacaattacaaacatataaattaattgttcaaaaactaattatcttatcttttaactttaatattataaaaataatatattattagtaactataatacataaaaaaaaaccttaaataaattaaat

SEQ ID NO: 201490 - DNA, 609 bp, Cannabis indica
actgaaatcacctgaaggcagtccaatgacccaacaattttatgatacgttgaacaaacttccattgtgatatttgcaaccagaaattgaattaatcatctctgattcacatgtttattaaaagctctcaaaccgtggttacaagcatcataaataataagagaagaaccagacgaatactaaacactcaaaccaaaccaaaccaaacaaaacaagcgtaaacccccgaaaaccgagacagccaaattacaatctaacacgaacactgcttgtttcaggttgtggaagctaccactttcctgcctgcattaaaaaaacatgatttgggtgaagttgtcaaccatatgatgagtaattaattagaacagcaaatatataaataaagctttaatttttattttactttttaataaaataaaatcaaacattcattcaaaagaaataaagaaagaaaaacaacagaaacatctcagcagattacaagcagctttcctattataaataaattaaaaattaaaatggaagaagaataagttaatgaaacaaatccaagtcaattaccaaatacaacattgggtatgtgactaagttttgaaaatacacagatac

SEQ ID NO: 201491 - DNA, 661 bp, Cannabis indica
cttaagttagaaattaggagagatcttatttagtctaagccactatatttagataatgctatggctaaagcacgactatttaaggatataaatgatgatctctcaggtctttcttgtaatgcttgcattttaaaacttacaaatttgaagataattttattataatatatttataaatctcgtaaactcggatctcgagtttcaaagcatagttgaaaatacatttactagatataaagtttcgtaataataatatttttttaactactggacagttacaaaatataattcaaaatgctgtagaccgaaaccctccaagttgcactgccgcaatatgtacaatccttgccaagctctaactcactgctacatttacctacataaggtagcaaactgatgagtcgacagactcagtaagatatgcataacatatttataaacaatgatataccgacttcatgctcaagccgtcctgagcacaattgctaagctcaccaacaagttaagaacgttctcaacagaaacacgaccaatgtaccatatgcactagagtaccgactctgtactcgtgttggtagagccattattatactttcgggagttactgagtgttgtacaacctgcatgacataccccctcgtactcgtgttggtaacactgt

SEQ ID NO: 201492 - DNA, 933 bp, Cannabis indica
gcgttcctttgtttaatcttctttcagatagtcagaaaagcgattacagctgggtttttcgccaacgcatgtaatttagaggtaagtaaatttgttatcagctgcataatcacaagtattttccatctatttttcttttctgtgatttagctatattttactatcttgataaaaattctgtgacattgtgactttgcatctgacaaatcttcttttaactttactaaaggcatacagtcacaatgggaaatataagactatcagaggttctcaggaagtttacattcacccctcatctgtgctgttcaggttagtagagacagtttaaaggtccgattagtatgtcgtattgtattgtgtagtattatatgtcatatttttatatagtactgatatacaatataatttacaatttagtataatactatataatataataagatatgattcatttgttgtatatgtcaaaacaatgatgttctatgttgatcacatgcaacatcaatgtatatatataattttctttttgttctttcttggctgtctagaagacactttcaactctctttgatgctttagatgttagatttgtatgaataatgcgtaatttttgtaatttttactgtcttgcagagttaatcccaaatgggtaatatataattcactcgtctcgaccgacaagcaatacatgcgaaatgtaatctccatagacccttcttggctaagagaagttgccccacatttttaccagcaccagcgtccatcttcaatacctcactaatctatacgtttgttgggatttgcatcctatccgaaggcttcttctgcaaattacgagtacattttcagtgctagttactagtgtggggttctctcaatgatattcaagtcctaaactttcaacgttttcgacgtaattagtacctcatgata

SEQ ID NO: 201493 - DNA, 737 bp, Cannabis indica
accgcttataaattcaaaattttaagtacttacactataattatcccttatatttatgcaatatttttttttaagtgtaacgttataataatactatatactaataacttagggattttagattcaatctcataccttttaccttttttccatccctctttgatcactgaactaattttataagaaaaaaataaaagtattctaatgactgaattattgtagttatttaatttattacttattataaaataaaagtgagccatgaaaatggccacacaattaatacataaatacaaatatttcttgggatttattcatttgagagatgaattaatttcagttctcttatgatatgatcttcaacaaaaaaaaaaatgttgtagagccattataagtttctcttctcatacataaaggagctgagaaaaaaaaaagaaatcaaaacacaattatgagtaacaacagaagaaaagaaaaaatattaaaaaaaaaagttgtaaactttaaagtttaattttacattcataaaaatacagaatcacatactttacaacgttataatttgagaaaaaaatttgatttttaattttaaaatcaaatataaaagaagaagctttatctcaaaaatgtagatataaccatcaaagcatgaaatctttcccaattttcctatcttaaaaagctaaattttaagaaaaaacccaactttatggtatttccctttttttttttttttt

SEQ ID NO: 201494 - DNA, 1139 bp, Cannabis indica
aagttggaaaccctacccttatattatataatcaaattaatattgaactacttatttacatattgtaagatcgattttgcaaagagagaaaaccttttttttattctagctatttagaagagacttgattaatgcaacatacatatatatacatagcattcttcttgtgtggtttattgggtaacgagaaagttaatatagagggaggctcacaggtcgagagattaattaatatattttttttgaataagctgttgaacaaattaacctcgaaataatacattccatgcaaatatcatattccttcttatattcttggccatacccaatcttattagctttaactctacaaagattcattcattactcttgctactgacacacatgcatggatatatacattgtttatgatacccaaaagaaaaataattaatatataattaacatgacaaattcaatttaatcaagtaattaattgtcaccaagtcttaatttaagagaaatttaaaggcaaacatgtatgtgtctgaaactaattaacaaaggtcatattatatagcacaatgattacaaaagatgaagaaagaaaagaaaaaggacaaaagaagttaaaaagaaaaaaaaaaccatagtaagtactctcttcttaattaatattctgatttcttacctaagattttaagtaaacctcaactaaaaaaacaccttaatttccatttttaaaaccaggaaaagaaattaacaaaaggaaaaagattcatttgagaccatttccaggggttgaaataggtggttcagcccaagaacagaaatctccaccaacaaaggcagctccaccatgattatcaccattctcaaactgccacgtgttaccaattcctctaagtgcactaccaccattgccattaccaacaccaacaccagctccaccaccatctcctacaccaggaaaaggccaaatacctctcccaataccaaagcccaaatcatcaagcccaccaccaagcccaagcccaaatccaccaagagcaagaaaacccgggctttgagtgtttaaaagagaagtaaaactcccaccacaaagcccaccaatgttgggcttaacatcaccaaaatgcaaccccgacccaccaccaccg

SEQ ID NO: 201495 - DNA, 1014 bp, Cannabis indica
acttttacaagtttcatcctcctacaccgacgttgtgatcgccttcatcctccttgatattttcttttacaagttttagattgccttttacttgacaatcatcaaaactttttttggattgcaagtttcaaatatatttttaacacattatggctaatagaaatttaaacaacaaataagagaatgatgtgtttatctttgtgctgccaagagagcaaaggagaggggcagagcgagagagagtggaggagaaggacggcgtggcttgtggtcgtgaaggagagagaatcgagaaatgaaattaaatttacaaataattttgaaaaatggaatatgagttttttttttggggggagggggggttatatctttaattggaggaaaataaaatttaagatagagaaaataaaattttaaaatttaagatgctggatataaaattttagatctgaaacgctttaaattttagtatgagaattgccaacagttattcccatttacaaatacatgagatttttttgaggtacgtttgaaaattgtcgcctatacatcctgacattttaaaatggtaaggcatacactatttattctgacgattttaaatgctaacttaattttttttagcaatagttctccaaaaaaatatttttaggaccatcttgaatattttttttgtagtagtgactatatatatatttttaaagaatgttatttaattttttattgatgtttattctatttatatttatctaatatttaagtttgtaatattaatttagattcttatatttttgtttgaaatataatttaaatcaaacaattataaagaaaataactcatcaaaccaaagaattttacgaacacaaagtgtggaatcctcatccacataaaattagctaccttttgataacaaagcttaattaattataacatttttaatttggaaaaataatatatttattcttttaaatctcattatttgaacacaaacaactaatgataataataataata

SEQ ID NO: 201496 - DNA, 2057 bp, Cannabis indica
acaattttaaatttagtgacaagtaagatacggtgatgacaattattttaaatttgatgaattttttatagatttgcaattgttatagtttttttttctaattcttttttttttctaatataagtttaatcacacaaaaataatatttatccaacaatttaatttatgtaaaggatatatattttgaaaactaactttatagaaatatatgtattaaattaattaataattatcatttattgagttaaaaataattaaaaaaattaagactctaaaatattaattttttttttttgttattaagagttaaaaaaataaaatttttgatagctactcactattaaaaaaaaattatataaaaatgttaaaatttataatttaatataattttataatttaattatcactaaatagaatacagagcggtttgtttcctagtttaagaaataatcccaaatttatttagtaaatttaataaaaacacatgcattaaaaaaaaaaagacgcatgcaattgcgaactaaatggcgtacaatcacatcattctttagccaatcacaatagattagctagttttttaaataagattaattaaaataaaaacctcccacctgccgaaagggattaaattttgataatgatattttattttttattaatactgtataatataaataaaaatatatataaacactatccaaataacgcgcatatggggttggcaggagacaaaatcacgataaagtaggtcaaagtcaaaagtggggttgtaagagatttgtacttgtggttataaataaatccaccacaccttccctgttacaatctatctgaatctttttatactagttattgatgagatcagctgaataaactacacgtcaaacattgtgatggttattaaatattatatctgttatccactaaagatagagatatacaactacaaatcaaataatagctcatgtatattaagtttcaatttattcggaaacttgtcacatgagctttctgtaaacgtggcatgcatgcagggtataacatgtttaacttacactactgtaatgttagtatctttacattatatttaagataattagaaatttgttttgttaaataataaattggaatcaatattttttaaatagtatatgttatagtgtgaatttttggcttagaaactcaagatcagtctcttatgaaattgacacgtagatctaattcttaagggatgaaattgacccaaactctcgagatgatacgaccttgacagaatctaatcatatactgtaccttgcatagtataaaataagcatgaccaagagggttttatacaagtcgtgcatataccgaaacatatgcgatcactaggtagccctctcttacgactaagtaaaggtagcttctttatataatgaactagtccaaacgacaaagcgtatttgataactcgatagggactcgagtgtctcatgttgttgacgcatattaggtgtccatatacgctacagaacacagaccccttagcacgaggctcactagccctccttagaaagatagaacgcaccccaaagcctgctagtttgtgcaagaacatgaacaggaaactcgcaccctataagtcgcatacgttgctatactcattaaaatgaatttaaactgttcttcattaattcttttacgtttattctaatttaatgtaaatattaattataaatggttctacaaccagtcaaattatgtgcaactaaaaggacacttgctttgtatataaatgagtgatacaatataaataaactagatagaaatcatttgcaacagtggactaagcagaccgtgatctcatagaaccactatattttctcgtgttcattattttttcattttgttctattgtctggacagtctcttttgaatactcgctgttgtaagttgagtattcactactataattttaccttttagtgacattatttagtgacacgcacaaaagtgtgggtcactaaatagttatgagttatgtttagtgacatgtataattagactctaaatgttag

SEQ ID NO: 201497 - DNA, 741 bp, Cannabis indica
attgccaccaaaaaccacaaaagagtatcaagtatttaatttcacacccattttacagataagtaacattttgtcaagaaataagaacttacagtaaggtaatcctcattccgattccaaacaaccatttttggcagttttgtcttcttattggccccgaatgtatcagcaaagtcttcccattgtttgataccaacataaccaaataccaagtctcgatttgcagatgcagcagacttcaatatcctgatcagtttctttgacttctcatcgttttcatcctctacaattgtcagaacaattttcctttcgtcattgtccaacgactttaatgtgtcataggttatgggcataaccaaaggaaacatattctgctttacaaaatcttccaaaaactccactgcacattaaaaggcaaggttaatcaagcaattgaattccttccagaaagaaattgagaaatcaattgctgatgattgttaaagataattaggaaagatttaaaagacttattctagaaacaagaacatgtgaacaagcagaactgaagactagtcacatcctaataggctagtcagtatataaactactacaaactgcatgaaaatatagctacaaatagcacaaactaacatatataccctattccaaaaatgaggactatgaaacagcttagttgcagcagccttgcaggtatgtatggattacattatccaatctttgaattttaaatataaaata

SEQ ID NO: 201498 - DNA, 803 bp, Cannabis indica
aaacgaaagggtgagttcctcacaccaagtttgtcaataaggaaagcaaaccgagaatgagagagaccctttgttaaacagtctgctacttgatcgtgtgaggggatgtatcttacttccaattgtctctgaaggactttatctcttacatagtgcatgtctatttcaatgtgcttcgtccttgcatgaaacacaggattagaggccaaagcacttgcactcaagttgtcacaccatgttaccgagggagcaatcagaggaaagttaatttctttgaggagtgactcgatccaggaaatttctgcagcaacatgtgcaagcgctctatactccgattcggtacttgatcttgataccacttgttgtttctttgatgaccacgagaccagagtttcacccaagtagacgcaatgaccagctattgatcttcgatcatctgggcagcaagcccaatcagcgtctgagaagccatttatggttagtttgttgctgcaggtgatgtgcaaaccaagatgtttggagccttgtaggtatctcaacacttgtttaactccactccagtgagtattggttggctgctgtaagaactgactgagcttgttcacagcataggcaatgtcaggcctagtgtgacacaagtattgcaaggctccaactgtacttctgtaaattgtgggatttaccattggctcaccatcttttattgacataggcttccctgctgtcattggagtaggacacggcttcaagttcctcatgttggttctttctaggatgtcttcaatatattttgtttgagttag

SEQ ID NO: 201499 - DNA, 1204 bp, Cannabis indica
tcttcttcttcttcttcctcatcttcctcttccggttcgggttcgggtttcggctcgctcgccgtcggaacagaagacgatggtggtgagattgatcaagcaggggtcacacaccattctccgactcaggttttgaagaattttaacgagattaagtttctgagaatcgagcttcccagtggtgaattgggtatagacgacggcgttttgttgaaatggagagctgatttcggttcaactctcgataattgcgtgattctcggtgcttcttcggtgatttcgcctggatcgatgaaaccctcgattggtggtggtggtaataatggtggtcaggaaaatgggggaactgatggggtttgtggtgaagataatggaagcattccagattcgttttacacaaatgggggtttgaaattgagagtggtttggacaattagctccttaattgcagcttcagcgaggcattacttactccaaccaataatctcagagcacaaaacgttggataatttggtccttacagatgcagatggtcaaggagtattgtgcatgaacagagatcagctcgaggagttgagggttaagccattatcggcttcttcagcttctaagagaacccttgtaccagctctcaacatgagactttggtatgctcctcatttggaattaccagacggtgtcgttttgaaaggcgccaccttggttgctattaggcctagcgagcaatcggcggcgaagaaggaagtttctgatgggtcttgggtttcaacggcgtttgaggagccttttggaacggcggctaagatgcttgtcaagaggcggacttactgccttgagatgaactccttctgatcacactaatggccatctaaggtatatataaatatatatttgtttatgttctgtgattgattgattgtgtttagactttattaatataaatttcaaattaggttttgattgcatgcattacttctaatgcaataaatattttactaaatatgctaaatttgtttctaaatcaagacaggaaaactgggttttgttctgtttatattattctaactcatgttgatgtataatgtgatatatatatgtgtgtgtgtatatactaaatttgtttctaaatcaagagaggaaaactgggttttgttctgtttttcttattctgactgttgttagtgttgaataatgtatgtatata

SEQ ID NO: 201500 - DNA, 1332 bp, Cannabis indica
tttgcaatctaacaaaatgacattgcttctagtaatttccctattatctctatctaagccaatgactccattagatttcttcttgaaattttttattctgtccccagtatgatttatactattattatttgttttgttagaagctaaggataagtttcttaacagtagattgttttcatttggtgtttttgtttctttatggactcatacttcattatcatgaattatgtcagattaagaaggaaatgttgcttgcccctgaggagttgcaacaatttcagaaccattcatctcagatggctgctttggattttatggtttcagtagccagcaacacatttattccaacctatgacggaaacatggcaaaacttgttgaaggtcaccgtaggtgtgtaataactttctcaacattggtttatgcgatcaaaatgggacaaactcctaattacatttcctgcaggtttctgggctttaaaagaactgtgttactggatcggagaaaacttgtggagttgttggatatgcaacagaatgggacgttatcatgggatgagtttactgtttctgttcaatcggtgcatgagaaaaggatgggacaaccaagtcgacgcagagtaattgcagacaggccaaaggaggaagattatttttatgccaatccccaagaatgcttgtgtgagagaacaagttgcgatgacttgattagccccggtaactcaactgcaattgggtgactgcaagcaaaaaccaaagtattggattgataccacggaaaggttttcacacagaaggttaacaagaaccaacatcttttaacagagatagcctttgattaccttgtatacccacacccaagagttttgtaggaaatggtattaaaaaggaaggatggttgagctcgcatttgagcatctaagttgtggtgttcctattttttactttatttcttctagtgtttatatctatatatttgtttattcatgagtgttcaaaagtgcaacttcaattttacacaacataatcgagaattgctaaatgtagcctttgtttgatcttcatgagaaaatatatttgatgggataggagtgatcgtactgttttctcatgtcatactatgcaatgcaagtactgccatttgtatcataaactaggaaccagggacatggaatttcaatctcttcaagcataatatttacggctacgcctctttggctgacccgtacactaacaagagtagagcgtaacatagagtgaaatggtccccccccccccccccccccaaaaaaaaaattgaattttaaaagcccaagattttcaatagcgttgctt

SEQ ID NO: 201501 - DNA, 995 bp, Cannabis indica
agttattattcggaatgtttacttaagatttggtcaaattttcattaccatcttggatctgggatctatagctattggatctggttttgtagggtcaatctattatgctgcatatgaaaatcttttcgttttaaggaattggttcggtaatttatcttaacacatatttttgatattatgtatatttttctaagttcatttcttttgggtctatttaaatattggtttgttgggacattggagaagaaataaataagaagattttatttttgttgtcggactcgggatggactcttaatgatgtgattttaatgtagtctttgattgaggggcatatgcgtatatgagccatgaatgtcttgttaatgtgttcttttactattttcatatagggttatgcttggtatattttgtttctacaaaagattatttagaatggagaataagtcaaccttaaatttcacttttacaccaaacccaaaggaagatagtatagtgtcaccaacttaccttggcgaccatcacttcatcgaaaaaaaggatgttagttagaagacaggtgttgaagttgcagctctttttggattgttagatctgcatagtttctttgacattatcataatttaatcaatatgttattattattagaaagaccttggattttgcagctacaaattgatatgttgaaagagttgcaattattagaaagactttttatgtaagaagtataacttaaataatttggccattacatattttggtatgtatttcaaatccaataggtgaaaatatgtacctctgttttgacatgttaatctccatttgattaggttcaatgaatttggtgatgatggtgggcctgctgccaaggacttggttcccaaatttaccaccctcaaagaaaatctctcggccaagcttggtgttgcattacctaatattgatgtaagacccttttgatttcctctcctgttatggtttcacattgagactct

SEQ ID NO: 201502 - DNA, 1903 bp, Cannabis indica
cccacttgttaaaatgaggttaccatttatgtcaaagtcaaacttatcaaagtttgatattggtagatctctattagcaatccaaacaggctttgaactgtccttatgaataattgcaaggaagaaggatttggcatcagggacaggaaagaatcccaatccaaagacagagttgtttgatacgaggaataagccatggttgtcgttccaatccatctgagatgtttggaaacctgggtagattttgtcaacatgttgtctaccaccaaaacatgatttgattccaaaaaagaagagtaacaaaaacttcatcatggctctaactcttaagttcacatatctgctatgcatgaaaaaattgcatgattagattacaacataaagcaaaagaaaatatatatggtgacttaaaacaaaagtaaaaggtgggaaaataggactgacctcatttcttatgttctgtttcattaactcatgggatttggaagagttgttttttttttgccttaattttgatgagtaccaagtttaagattgtcaatggggaatctagatgaatcagagctgttcctctgaatatgtaacatttttttttttaattttaaaagaaaaaaattgagacagagaaagagaggacggtattaataaatagagtatgaattagttgatattaattaatctattctcaacactgtcatgactatggggtctttttttattgtatataaactataaattattataacgtgtaaagaacatgttgtagtagaaaacatgtccttgttcacatatcttagacataatacaacacgtttccatgtcattttattttttcgattattcttgtatttttctcaactcttttcatcttcatttgaaatgacaaaattcagggataaaataggattaaggtagaaatattgaccccaaataaatggactaatttggtaaatgtctccttttaatttttttttttttgaaaaattgtcaaatataataaattagatgataaaagttataagaatacttttatttcatgtcaattttttataatattttagatgattagtattgtatattatttattataattacaatgaataaatactacattattaaatatatatattttatacacaatattatttgatatatagtaacacaaaaaattaatctacacacctattaatattctttaagttggaacttgaaaattgaaatttattatagtatttattatttaatttaatttgattgtatagattaaggctgtacatatatagagtattatttttttatattagtattgatgtctaacattttttataagtggcactacaattgattaataatattcttgaaatttattttattaagttatataaaatttaatatttaattatattaataatagtataatacgaactaatattaagcacgaagtactttttataatttagtctaaaatggtaattggtgaagttagtttgttggggattaacgttatcatttgtaatagtgcacgatttgtctctttgcattatgatctaattaagtatatttagtcattggtttcatgtgcttttcgattgtatagatgctgtgcaatcataacatattcttaactaatgattatgaaggaaattgaccacaacacaatttgattctaataacctataaaatccaaaatagaaagggaagaatatttctctaactctaagggttccacttttgagtggtccgaaatccgaatccaacaataaaatattataagtatgtatcttttcatggattttttttttctttctttattggatagaatacttttaaggtagtttggttcacgcactcccatatgccatataccatttatagattctatatggtatagactcattaattg

SEQ ID NO: 201503 - DNA, 2753 bp, Cannabis indica
ataagcctacagcacataacaattagcataggagtagaagcaaaatataattttttcaaaaagatgagataactaatgcaaataagttatgcagaacctccaaagctgaggcaaattttcaaaatgcaggcttttttttttgtttgctgttattttgacaatcaacacctccatgctgagacagagataagctcctttcgctgccagcaaagggagagtgaagactgtttcttctcgacatggaagcccctaaccggagtccgctgcaccaaacactcagcttgggattcagtgaagttactgaatacagctggggaaaacccggaattcaaaaatgaagatctccatggaggtgttgtttcaggagaacggtggcgattcagcacgagtttctcgattcttggttgaagtaggaacttctcaatcttttgcagggcctctaggttgacattaactgcatcaagtgattcaataaggcctgaataagagtgaaaagcgtgaatgatttggtgtgggaatggaacatctgttcgatcagaccctctttccaatgagaccacaacttttggggagagctggttcagaaagcggaggaccaaaggaagggataaagggcagctggaaagagaggtaattgggagatttaccgcaattgcctcatcctctgagatgtgaagaggcactggccaagaaccagagttgaacgtttccaggcttacaatttcgagctcaaaggccaagttgatatcagcagcaaaatgtttcaagttttcgtgagtgaaaccaagctcgaattcttcatgtgtggatggggagacaaaagcagttatcttaagagaaccacctgcagcactagcattccttaaggccagctcttgcataaaagaggcccattgcccaccatatccaatatcaaaatcaataacatgaattctactaaagccttccaaggcttctaaaatggcttggttacaagtgaaattggcaaactgaagaaccggtgagacttcagaaaaagttttgtaagctccaatcttgaaaatgagattgaagggtggcaaagccaatgagttgtgaaggagcaactgtaaggcctccttgaaatagaaagcagcccgttggaaaggcttaccaagaggagagacatggtgattgagccgcgccaatatcccttgcgcgagtaccggatttccggtttctataagctcagcagcctttgaaagttggtcaataaagcctgctgaagctggtggttcgccaattcgtctcccgctcctgctcctgggctcaacatcttcgctttgacacagccatggttggcctctgctgatggaacaactgcagctgctgttcctgtccagctcttgccctgaattcggaaactgaaccttttggagctgatagttagacctaaccccaccagtattcctcttcgccgggggttgagacataacgtggtgctcttgcaattgagcatatgttaaaggcattaccaaatgaggttggttctggtttatcaccatttgaggattggcatccacagagtggaccaactgctgctgctgatgctgttgttgatgaaatactaaaggagaaagcgaagctggcattaaattgttagctgaagtcgaaaacatgggactcaaagaattgttgttttgtgaattggatgagctattaaaagggaaatcagaacaagttgttccttgtacagaaggagggtcaataatgctgctcatcaaattctcatacccttgatccaccacttggaaacctcctccattgaattccatttcttgggatgaggaaacactcccgctctgcaaaagcctgttcaatcccagagatgggtcatcaacatccgccatcatcaacctcaaaatggactggtcatgacccggtgactcagctaacacgctctcccagtcctccattccaagcccacattttccctccactaatgctgctgccgatggggtctcgggggctgctggcaccacgcctccgcccgtgtctgtggagccggttgcggcgccgccgtcgctggtgctggcgagcgaggaagacagtgttgaggtggatctggtaggacttgagctagttgtagggtcgagaacagaggtgggctcagtgctgcccacatagcaattgtgtttggtgattagagtgttccactttggtgtcgtttgctgtggtggtggtggtggtgaatctgaagcagcagtagtagaagttgtagtagcagtagtagtgaagaaatctaaatgcctcttcccttgaaacacctcaaagggtaggagcatggccttcatctaaagtaaccaaatcaaataatagcctattataacccaccactcctaaaaattccagttttcaacaaaagggatcacccaccccacctcacaatcacaaacacaattttggttacttattaaaactttaatacaggagaagaagaaagagacaacacccactaactttctacttctgcagcgtattcataaacagttatttatgcaagagacccaattagactgaatcatcttctttttcttcttcttcttcttcttttttggtgttataggtttgttgttgggttctccttctctttctctttctgtgtgtttgtgttttttgtgtttggagtattttgtcttccctctgttttcagctatttggatgcgtgcaacaaagaaaacatataaaagtggtaaagtgccacttctctctccgtttctctctctctctctctc

SEQ ID NO: 201504 - DNA, 1323 bp, Cannabis indica
aggtccaaattggaattctccaactttcaatatttaaataagtaaataaactcgtcactagaaagcaactccaccactttttaattttaataaatgtaacacctaagaggtccacaatccactatataaccatataatataataataataattgagtccattacatatctagcaagttataacacaaacaaataatattaatccatatttattagactataatgcactattaatttctatttcaagttactaaaaactttaatactacgtatatgcttttatttatacatcatcatttattagaaaattagatcatttgttaactttaaatatttacttctctacttaattatgtatagatagaaaaaaaatttatatatgccaccgactaaatacaatgatatctaattgtaatgacaacaatcaaatgagatttaattaagtaatattaggtaataaaagcttagcccttttattattattatttatttattaaaaagaatgggtaaatctctattttttttaataaaaatgtggtaataatgttcaataataaagtctaaaaaaatcattcactaattgatatttttaataataattgtgaatttatcatggtctatataatagtattgttttattttataaatattgctattagatatgattaaatatttataataattattaaattaaaatatataaaatttaatatttaattatattatatagtgatataacatctggtgatagacatagtgaaaccattgtgtcattttttatttttatgtcttgaaagaaaacaaaatttcttagatataatatatgtgatcaagtacatctaagcacagacaattaggaataaggaaaaaaaatcatatagatatatatatactagtatattgttacgtgcgatgcacgtatgctatgttttatattaagtattatattatgaatttggaagaaaataaatgaattaaaaataaataatatttaatttagagagatttgaataataattttaggtgaaattgagagagagagagacttttattgtgtttagctgtatggtgatgaatgggttaatagtaagattgtttaattttttaaaaattactaaaaattgtagtttgttagagagatatagtagttaatcgtaaatatttatttaatttttggagtttaattagttgggtttattttttgaaatttagaatttagccgtagtaaaaaaattttaaaagtaggttattagtagaaatatgtgtagtaagtattatttatttaaatttaaaaaaagtaattgttttaattttttagggtttt

SEQ ID NO: 201505 - DNA, 600 bp, Cannabis indica
ttctacaatgcaccccctaaaatgagtacaccaatgcacccgtatctgttttgacatctagaaaaaaatctcatcttaattttttttttcatagttgtgtatattataattatttaagacatcctgtaaaatttcaagaaattcgaaataatttataatatagaaaataattttcaagtagtctatttcacacacgtataaaataaaagagtcacgcgcaggggcggaacttggatgagaagttagggggccaaaatattttataaatttaggtttgtttgataacttttttaaattcactttttatttttataattaaaaaatgaaaaaaaaaaattcaaatcatgtttggtaaacacttttgctttttatttttttattcaaaaatcaaaattaataaaattttaaaaacacaattctttcacttttaaacatttttaaaatcagtttttcttttttcattctcccatatgatctactctaatttcttcttcttctctcttgaactcttccatggctgactgatccactttgatttcttcatcaggtaaagcttttatctattctactctctcactccctctcctctctctctctctc

SEQ ID NO: 201506 - DNA, 2609 bp, Cannabis indica
gtcctagaaaaatcacatgaatgattttagaatttttctgttattattacacctttgttttaccaataaaagaaaaatttgtatataggtttctcattagggtttgtttaaaaattattgtgtaattactaaattttgtatataggtttacagtatatgttaaaacataatgtgtgtttagatatggattggcaattagggctgcacatgaaggccaacaacctggcccacccagtgcacctgtccatcccgaacttggtgcacctgaaagcccgaaaaaattatttgaaaaaaactgggttcgaatgttacccatatgaagttcggagaggtattactaagcaatttttttattctgagtttcgagtatcacccagacccagttcaatatacttattttttttaaggctaattagtatttttaccccctaaactttaacatgtatcaaatcatgccccctgaacttttttggacgttaaaaattctccctgaactattgagattgttagatttaaggacttttgtttaatttcattcaattttactattttagttattatatatgtactaaaccatgctcctcaaactttgatatctactaaatcatgcctctcgaactttgacatatattaaatcatgctccctaaatttttatccttgttagactttttttttactaaaattagataaaaaattttaaatccaacaatctcaatagttcagggacatttttaacgaccttaaaagttcatggggcatgatttggtacatgtcaaagctcgggggataaaaatcctaattaacctttttttaatattatatataatagactaaaatttagcctaaaacctaacctaaactacacaactgcaataacccctttatcttcttcttctttctttgtgcctgcccaagccccatcgcgctcactaccaatctttcgcttccctttttgttctttgcacataatatatatatttttgactcaaaaatttagacaaaatttcttagccacaccttctcgctagattaacgagaatgaattgtaagttaagtataaatagagagacacaataatttatagtagttcactcattatatcacgatagtaatggagctatgtcttctttttattctcatgagatgaattacaaaaaaatagttaagtctggatgctctaatttagagatgttctgactttatggctactattctggatataaaaaatgaactagaggagctctccttttataggtgatggatgtcctattaaatgtaaataaaataatccaaaaattatgaaaaatacatttatgctattttttaccgtagatgatgatctaacaataaaaattaacttcagaaggtacaattattatcacttcttattgttgtaacatttaatatatcaattaagaaaaactactattatttacttgcttaatttaattattatagaatatctaacctcaaataatattaattaattgaattacattatattgtattacaatttcaggagcccaaattggtgtttgctatggaatgttaggcaatgacttaccttctaagcaagaagtgatagatctttataaacaaaacaacatccaaagaatgagaatctatgatccaaaccaagaggccctccaagccctaagaggcacagacattgagctcatacttgaccttccaaagtccgaccttcaaaagatggcctcaggccaatcagaagctgacacgtgggtacaaaacaacgtccaaagctacaacgatgtcaatatcaaatacatcgctgttggaaatgaagtcaaacctgatgaacaagaagcccaatacctcgtcccagccatgcaaaacatccaaaactcaatcaaccaagcaagtctcgcagatagaatcaaagtctccacatctgtcgagactggctttttagacgacgaatcatatccgccatctaaagggtcgatcaggtcaacctacaaatctcttttcgactcaattattgagtttttgaacaacaatagagctccattgctcgtgaatttgtatccttattttagttatagcagccaacccgataatattcgtttggactatgctctattcacagcttcgtctgaggtggttcatgatgatggttctggactcgggtatcagaatcttttcgatgcaatgttggacacagtctattcagctttggagaaggctagtggaggatctttggaggttgtggtatcagagagcggttggccgacaagtggtgggacagagacgacagtggataatgcaaagacttataacaataatttggttcaacatgttaagaatgggacaccaaagaagcaaggaaaggctattgagacttatatatttgctatgtttgatgagggtaataaggaaggagcagaagttgaaaggcattggggtattttttctccaaataaggtcccaaagtatgaaatgaatttcaattagagttaaaaaaaattactgaaatatatatacattacaataagatatgtgtgaggataaataataaatatcccttcaaataaaaacatttcataatttcagttttattatgacagtgaaccaaatagattattat

SEQ ID NO: 201507 - DNA, 963 bp, Cannabis indica
ttgttaaaagacaagaaaaataaaaaagaagcacaagaagtgtattccgatatactcggtgtatatgaaactaaatgaaactcgtgaatctatcttgcgaatgaaaatcgagtcgcatttcaaagacctaatactatgagacatgctagtaataagcaagatcccaacaagtattgtcatttccatcgagatatcagacataccattaaggaatgctgccaattaaaagatgaaattatagcgatcatttctcgtggatatttgagacagtatgtaagaaatcgaggaaatgaatagaatttacctaatgaccaaaataacaaccaaggaatacaacctctcccaattgagggcgagggcatattggttatttctagagggccacaccttgcaggaaataacaataatgctcaaaggagatatataaatgaagtgaagaattaagaatttacctttgcttcagaacccttaaagcgagccaagcctaaagaaccgcacattatctttactgacaaagatgcttcacatgtttagtttacacatacggatcccctggtgattacagttcagctcacaaataagagagtaaaaagaatcctcgttgataatgggagttctgttaatattctatacaaagaaacattaaagaatatgggtctaaaagaggcaaaattgaaaccatgcatggtgaacctgtgtggattcacgggcgatagggttgtaagtttaggcacaattgaactctcactcactatgagagagccaccactatcgacaacccatatacaagagtttttagatgttgacatcccttcgatgtataacatactcatgggtcgccctgcattaacaggaatgggggcaataagcttgattaaacacttatacctaaaattcccaactcattatggagtaggaacagtgagaggtgactagctattggttagacaatgctataatgtc

SEQ ID NO: 201508 - DNA, 1216 bp, Cannabis indica
gtcaattgcactgcttagtatgtcaaaatgagatacggtaattaccgttgttaagaatgagttattactcccttttgaaattgatgttaggtttgttatttatcggttgctgaattaagcaatgatagtaacattagatactcgttggtaacgagggttaaggatgcttataaagtatcgagtttgatttatcttatcagatgaacatttatttaataatatttgattacgctttgaataattgcttaagctatatgttgcaatgtatgttctatgttataaaaattgttgtgttatatgtgatgttgtgtgtaaccttcttttcttagtgagtctttgcacgagtgttttgtggtgcaggtaaggttaaggggaaactggaccagccataagtcaaaggtctcccgaaaatgtacatatcaacccgccatgttttggttcttagtggacaaaatcttcctttggttctgttttgaagatgtaataatattttgtaataagctgattttgtagtatttagtaaaagtttataattaaggggatccttgaatttcagtcgtattttgaaagaaaagtttaagttatgattttaataattttactaaaagttttaattaaaccatatttttcttaaattgttagtttattattataaattaatcaataaaagcacacatgtgacgtccttgcagatcagggagttacaaccaactactagtggttagagcagcatagctccaccaatcatcatctttcaaataaatactatgaactcatttcacccacaaattatcctccttaatggtaattgcctaaataaacttaccaatagcacacttattccataatgcaaaatctccaaagctaaggtctccttgagttttagtcttacaaccctctatccaagatacattacctagtccatcataatcagacttctctttctaaggaaaagctcgaaaaatctaattaattcttttaataaaactttttggaaaaataataatttaagaaaagtaagtgtttatagggaacaatataaaattaattagaacacaccttctagcaaaagaaggttatgagatctcaagatacaaatatgttgcatcatgttgtccactatacattcacaatcagactttgagattctcttgttattgatattcatccccaagtaattaaaagatgttatctgtgtttctgagagggtgaaaca

SEQ ID NO: 201509 - DNA, 587 bp, Cannabis indica
gaaagagaaaaaggaaaaggtggagatggagatcgaatagaagaggagaaagagagtgaggaaatactggacaattgtgtgataatgatcggtgagaaagaaaatagggagttttcagccggagaggtaggaggtgatgatgattcagttgaggtcgacaaggtggaaggtgagatggcggctgtcgacggcggagaagaagggcagtctgaagtggaaaagccagaacagaggagggttgaggtgattaatgagagcacaagaaccgaggcagggagtcgactattgagagtcgaaaggcagggaagtgcgattcccaaagtcggcagaaaggaagatagggagtcgattaatattcagagggtattttctcatattttgaatgatttgaaccgaccccctttaattattcctcgtacctgtcccttccttttcattaaggacacgtgtacactggggggaattacagcccaattggttctgggccctagaaattctttgggccgaaaggggctgattgagaatagggtttttaaatgtaacaggggttcggatggggataatagggagataagtcctttgatgta

SEQ ID NO: 201510 - DNA, 1317 bp, Cannabis indica
gttcaagatctcctctgaggtaataaaaaagtttgaatggaaagaggaatacgagaaagctttcaagaatgaaaaaagacaaacttgcaaagagtcccgtactctcgaaaacccttggacgaagaagaatttaggaaatatacttttgctatcactgaatatgtttgtaagcgccgtcctgataagagaagaaaacaacgtccatcatcttgtctactatataagcaacagtctcgatgaagctgagggacgatatcctttaatagaaaaactcgcttactgcctgatcttagcaacaaggaagttaaggccatatttccaagctcaccctgttcgagtgtacacttaccaaccattgcgccaagtattgaaagagcttgatgcctttaggcagttacttaaattggcaatagagttgggtcaatacaaaataatctttcaaccccgtacaatagttaagggataggccttggcagactttgttgttgagtgcacaagcaaaaaagaaacatatgggacaacctggagctagtacaagaacccttgtaagaaaacaacgaagactgacctacctagaaatttcacgtggacagatcagccacagaccagctttctggtgtaggaatctcccttgtcacacatgggggtaacacctgcacagaacaatcactactacgaatggtagaattcacgacagtcccaaaaatgccttttttagcactgtcgttaaaagaattttgagtgttgaaaaaccgtcgcctataatatactataagggatggtttttaacgactcgtatagattaggcgacagtttgtaagtgcaaatttttttgaaaatggttgcccatactttgaccgacgattcaaaatagttgtgaaaaggtttaataaaatgaaccctcgctcctcactgtcaatctcactttcatccaaacccttgatctcactatcaatcacaaacatgatcttactcacatctctctctctctctctctctctctcgctctctctctctctctatctctcttttttctcacggtcgacaaacctctgccccaactggtgacgctacctccgcctccatcggtgacgcacctccgcccccactggtgacgcacctcacacacaaatcttgtttattaaagatttcttttgaaactgttcttcaagcttttaaaattttttgctggtgtatcttctttgtcaactaacctggtaatagaatcagaaaaattaaaaatgattaaacccgtagcagtttcaagtagatctttttgtgtagatttagagtttattttctggtcattctataggt

SEQ ID NO: 201511 - DNA, 990 bp, Cannabis indica
cgagagctaatagactttgatgtttccagaagcagaatatagtatttcagccggctataaactagttcctcaccccccccaatcactcgattattttggagcaaagaatatggtcaaggcttaacactcctaaacatagtgttatagctgggttggcaatgcttaataggttgaagacacaagataggctgatgagttttggcatacaagttcaggggacctgctgcttgtgtaagatgcatcttgaaacctgccagcacttgttctttgagtgcaatgttgctgagaaatgcctacaggatctgaaagtttggctggactggcatgctcaaaccagtagcctacatcagctgcttaaatggattgggaagtccaaattgtccaagtttaggaagggggtcctctcggctgctgttgtaggtctggtgtacaacatttggagagcccgaaatgaagtggtttggcaaaaagctagagttagctcgacccgaattgttgaagaaacaaaatggaacatcaaggttcggattgatagggtgatgcctaaaaagatcaagaataatgatagagattggtttattgctttgtaaatcatattacatatattgactctagattgatataattgtatacatagatatcggcccttttcatgggtgcgtatagtttgtaaaaaacttgttttgtgcaatacaactcattgtatttaatcaaaaaaaaaattaaaataataaatagtaaaatattaaaattgtgagatataagagctacagatgaagaacgggtaagattctatgaaaaatatgtgaagaaaatagacttagagtctaggaggccttagatgcatgtggaacttagagagagagaactataggcgtgtggaagggagtattagagcattatatctatgtagcttaggattcgatcctttttcatgtgatctaatgccatttagatattgcagggtttacaaaatatcttaattcaaat

SEQ ID NO: 201512 - DNA, 1265 bp, Cannabis indica
gaaatccaaagctaataatttcatgtttatcgcttgaaaataagtgggtagttaaaatgattggaacataaaatattctaaagttataatatttaggctgctatgactggcaattactaattccgcatgcggcatgcctactatagattttcataaaaataaaaatacaaaatatcagctggaaagtgttaaagtgcctaaagatatttcataattcacgagtgtttttctttttccactatgtttaagaaaaactcttcaaagaaggaaagaagtaaaagttaagaggaggaaaaagtttcagaagttccccgtgagtggaaagaaaaatgtcgatttacattgataaggacccattgctattgattgtcaatattcttgtagctgtatacactagcataatttccattgttttagttttacacactatagttagtaaaccttaatcaggccaaccatgaagaaataatgatgaaagactttggttggtttcaacttaaaatagaatgcatgaggtacaatgtattcaataaaatttgtccttatctaaaatgttgggttttcagtttatgggtctgtcaggtaggggtattagtattaccccttttagcttctgaaccacattctagttcagtcagaagaagataaaaaaagatgtggtaaatggaaccattgtatatttaaggtctggagtctgaactgtacccaaatcccaaagttcttacaccatattcttatagctctttttgctgagaatattcttagtatttgtttcttgtgacgactttgtgttacgtcaataatccataaatatgtagacccatctaactgtcttacggcccaacttgttttcttccattaatatcattcaacaacccacctttagctaaaatatcttatactaatatatcaacacaacaccatccattcacccgctttttatatcattttccaagcagccgaagatgttagcttcttacaataatgttatcccaaaatctaaaaagccaagcgtcacaccagtaacgaagccagtcacagttggaaaataataataataataataataatagcccttagaatttgaaataaaatgacttaaaaaatttaaatactaactccattattgtcactgatctttagataagctcctaaacatataatatgtatatccttagaagaacagtaattgaaaaagactgagaggtcacacagcggaaagcatacgaacaaaatgcagtttgctttgtttctctcgtatatat

SEQ ID NO: 201513 - DNA, 1121 bp, Cannabis indica
ttagtatgttataagaaaaacttaataggaagcatgttagcagcctaatagttgaataggtgcatattttattttctcaagtaagcggtaaatagaactttattcctgatcgcaaactgaccaggctagctcatggttttgtaggctgttctaacagaatggatgctaggaggaacacgagaagccaaggtagctcgattagatctagtggcagttagggagtttagtttcccccaaatgttcgtggtcgaggcagaggcctaagaggcagggcatgcggtcagggagatgttaacccactgcggtcagtcaagccaagatttgttgagataaaagttgttagaacaaaaaatatcatctttgtcctaaatacacaaggataggcgcctagcatgtaccctgtccctatggagattatctttttgtgttattaattaattaattaattcaattaaataaatacttgaatttgaaaagtggttaaatatatttcaaagttgttgagatattctcttaagtagttgagagattccttcataaatattagtaaccaaattcggttatagatatttatttatttaaataattaaatgtgatttactttaagagtttgaactactataaacagaagcttgatttgagaaattaaaacactctttttgacatattaattttcaaaattaatagagaaaagaaagaaattatttttctctcaactattcttgctcatgtgttgagaactcaacaaaaacaactgtttaccctttatcctaatagaccacactattccttgtttgtggtgtaacgatttggaaaacactagtgtgagtctaattgcatcatcctcttcatctagattaagggatgcaacatacgacaagtttcaaggataccctgatagtcttcaagaggtatattctaaacttattattgtatattttgatttaatgtacacaaatctagatatccattaggatgtgtacagtaataattagcaatacaaaacctttccgctgcgtatctgatttagtaccataaaactaacagttataagggtatacacaatgagaaaatatatgtagcccaaatgagagattgttagattaaaattcttaatatgg

SEQ ID NO: 201514 - DNA, 1208 bp, Cannabis indica
gaatcggagccttcgtctctgccttggttgagcttcacgaccagctttagcttcttctctctcctcctctcgttttcaccttcgccctcgtcctcatcgtcctccaactcctcgtcctcatccagataatcatcaaaatcgatgttatacctcacattccggcgccggtgactccgccggacgtcagcttccgtcgctgccgccggcgactcgccggacctcctagccgctagatctgccttcgatggacgccctttcttcttcctcctcacgatctgacccatcatcagtcagtcaccccctttctctctcctcaaaacccctctctttctctctatctatctcactccactttctcgctccagaatggtttcagtctctctctttctctctcttgatttgggttccattattttggatggttggcttgggttggcttttttcgaaagcgagggcagattcgtgaactctgaacctgacctttacacacaccgagcctcaggttcggttcgtcaaatgaataattgacataattttcaatggtttgttttcatttgtttggtttcaaaaaagaaaaacggcgaagaaatacagcgtttggtactgcccgttgcccaaatggggcttgcgtgtcgctttgcctgctgcccgctttttttggcttccatcactttaccccttttcttttctatttggtggagtacgtctttcaatgttcttctatcaacatggcgcgtgttttcaccttataatagatttttaactgtgaaactcgttaattttatttgtggtgtagttattgttaattttttattacgattgcagttaagtaaaatatatttttaaaaaaatataatttctgcactgcactatagttagagcactagcacgtgaggcatatttattttctttaaagatacatattacttgttataacaactaaaataatatttaaaaaaaataattagacatatttacacttaactacatacacatttcaataaataagagtctatatttgctttatatataagtataattattatatgatatttggtttggtggaatgtaatagtaatagtaatagtaatagtaatagtaatagtaatagtaatgggaattgattaagatgtttggtttattattggaataaatgataaattgacaaaattatctcctattttaatttttatatgagttatttgcgg

SEQ ID NO: 201515 - DNA, 789 bp, Cannabis indica
gattttgattctacaagttgcttttggaaaggttttcgctgttgattggagtccggatggtgagaaggtagcttctggtggtaaggatagaatgcttaagttatggatgggatgagtcaaaaccagataccgttgttcttccatttcgaagtgttgttattaattgttttggctatcgagacagcaaggatcacactatgtagaaagaaggaagtatatctgagctggcgtcttcactttcagaaggaaaaactagttcatctaaagaagagattgagagcttgctcacgttggaagtttctcttgttctttttacactgaaattaagatttcactttcagttttgtagaaaatatcaaaataattctagccccagtatatttgaacaaattcaattctcttaaagaaagaagttacactatttttagtttgaaaaactttactaaattttggtaaatattagattttgatatttgtttcagatttatatgcctcttggcactcatatattaattgataaaacgaccaggaatagataattctactactgtgatactcaacttgtgccaacccaacattataattgttgttgttttattttttgagaagaaaataaaaaaaataagagaacttccattaaagttaacgaatatcatacgaacaagttcctcagtacaatatttcagaaaaagtaaaagttccttagtactataagtttccacatcattaacccttttggctgagttgacccaattataattaatagtaaaagtgccttttctaaaatat

SEQ ID NO: 201516 - DNA, 625 bp, Cannabis indica
taaaaataaaaaagctactattaaaaatataataccttattttcgaatattgaaggacacaaaagattttatttacatttaaaagatatatttatttatttatttaaatatacattgcataaagaaatgataaactcataatacactaattatatgtcattaaatcttctcttaactcttgaattatagttatctacaaaaaaaaaaaaaaaatctcttgaattatagtagattagtcttaaatcattcttatattagataaattatttataaaaataaacaaaatgcagctaaacagataaatttactaatatatccaaacttgaagaaaaaagtttacataaataaataataattcataagggaaaattaggtgttgaatcaaaataataaatgtaaataaaaatgtggatcttattatagtaattctttattaaaagaaaaagtttttcgtaattttctctaaaatctaccattgttttaaaaagggataattgcggcaaaagtccccaaaatcttgaggttgatgccgattagtccatttttctaacggactcgttttctaattcaaaataccacgtgtcgataaataattggtttaaaattataattttaattcaaaaat

SEQ ID NO: 201517 - DNA, 1280 bp, Cannabis indica
aataaaaatcaaccaactgtttacaataaataaaaggaaaaaaatatcacttgtacaacaaagtatttgaactttatttttaatactgtatctatttaaatttttttaaaaatttacaagaagccctaaataactacaatgtacaccatcttgaaaaaataattagattagaaagctcaaccaaactagatatatagtggatctaccagaacacccttaaaaagatgtactataaacattcaccgcaaaactatatatgcactcaaaaatgatgtattacagttactaataatatattttttttattaatattaaagttaaaagaataagataattaatttttgaacaattaatttgtatgtttgtagttgtaaattatagaataatgtatttatagaataaattggatcatttttttaaaaaaaaagttcagtttggacggtttaaaccgaccaaactgaggtttaaaacggtcggttttaagataggttctaaattggtcggtcggttttcgaagcgcaccaatccagaccgaaaactgaattttagatttttatatacaaaaaaattaaccaaaccgaccaatgttcagtcctattctaaactaatatacaaaataaaccaataattataaattcattagagcatctctaaccatgctctctaaacatactccttagctaaaataggcaatgagaattaaaaatgagctccaactataaaaaaatggctttctatagtagagaatggacatggaggtctctaaatgtacagagctccttacctaacattttttattattattttgatcaaaagcactattattttttttaattattttataaaattaatttatatttgacaaatttaaattataaaatattatttttttgaaggagttataaaatattattaaaataatcaaatataaactaaattaggaagcatgattggagcaacaacaataaaaatggctctttattttagttttttagctattgcagctataaaaaaaaaagagtacttacattgtcacatgacgatagtagttaggttgcttaaactctacaacctaactcttttatttacttttataaatagaccaacaatttataagtagctaaggggtgaaacaacccattaaaaaagaatttcacataaattattatttttgatttttggtaaaaaaaaattacacttacgttgaaagaatattttttttacatttttacaatattaataaaaaaataaaaaaaataacatcaaaacaacatacaaat

SEQ ID NO: 201518 - DNA, 813 bp, Cannabis indica
tcattgtttaatttttattatgtattaaataaatttattagagataatgacgattgattataagtatacgatgatgacaataactttaaataatcatgacataaaaataatattaattacaaaaaagagaattgttcacttaaataatttttaacaaataataataataatctaatttttctctatatcactcaatttatctatttttatattaataattaaatttttaataaaataatttaaaattctatatattatttattaatagtgtaaaaattaaacttcttaataaataaataataaaaaatttacaattctcctattaaaagaatttaatttttcaataaataaaattattaatttaaatattttattatttattacattttgataaataattattttttttataaaataatcccaaataatgagtgtacaaacaaacccgataccaactcggaaaagatccgaatggagttcgggaaacgaagttggcgatttcctgatttgcgtcgacggctatttccctaacggctagtttccctatattacaactgtactacacccgactcttcactcctcatctcactgcacaacagagtcggagagacaaaaacgctcttttttccctctccaccaaggaacccactcaccgttgacctctccactcaccggcggcggcgcagttgcatcgtcctctgagagtatgtatgtcgttttagtattattttttccttttcttcctttctatgtctacctcttcgtgtcttgtgtatgaatttttgttatttctcggtattagttctcataggg

SEQ ID NO: 201519 - DNA, 1347 bp, Cannabis indica
ctatcactttcattaactcgtaaatatggacacttggaaggatcagatgcattatatttatttattttattttaaatttaatattcttagtatcataaactaaatgttatttttttaaaaaaaaaaatgagagagatgcaatactaaattgccatagctgagggtagcatttagtttctaaccacattatgtgactatttaataaaatgatgtagtattattttaaatgacgtgtcatgccatttagcatccagagtattagaaaatggagaggtatttacagaacttctaatagtgtgagaaagtaatcttaccggcaaaatgttaaattaagtattaaactatgagtaataaatttaattatttatgccaaagtactcttaaaattaatacagaattaacagcaaaaaaatattataattattatcataacaataatccgacaaagtattcataaaaagctaaatgatattatattaagatgatggcactgtgtaaattgggtgtggttcttttcttcggatgaagtctatagggtgtgttatgacttttattgggatgaacagaaattaatatttttacttcttttcaaaccacaaataaaagccttttactccaaaaacaaataaaaatacttataatgctgtcttactcaccactcctatttctgactttttgcttcttaattttctccaattgtataatttcttcactttccaatttacctactttttttctttgtcttgggaagaaggtatatatacatacttcaacttggttaactggttgtctgtctagtttcttgatatactcctacattttatgtggattttataagataattatgttttattaatttactatcattctctggtaacataattatgttttaattagacgtgtgaattattaatataaaattttgaattaaaaaataatataataatagtacaaaatagattgtccaaaacaattcaatataatactgccccaaatataatattaactatatgacaattttatacttgttattttattggtttggatgggaatggaaatcttttacttataccatgagtttcgaataatggccattgaaccccagagaagagaaagtggtgggcctcgtgttcctttagtaggttagggcaggggcattatggggactttcctcacctagttgaaatttccaccactgatctctctaattttcctccctcaaacttgtaataatttgcaaaattccccttaaatatatttctatttttccaccacttgatctctctattgcatgccaaatcatgttttatagtcaagaaaagtatggttgtgacttgtgagtgtcgc

SEQ ID NO: 201520 - DNA, 1053 bp, Cannabis indica
aagggacaccccctcctcaaatatacgaccaacataacatccacactgtctcgcaagaaaatgtgtagcttgatcaatagatcatttaacaaaatgtaatacaataccacttaaagattgcagtaagtctttacagtttgcaaccactaaatcaacacgagaaagtaggattatttgatccagtccaattattttctcctaatccgacccatatccaagtagtaattggatttataaaattatcatccgatccaatctaataaaatttaaaaatctaattcgatccaatacaactactaattggattagatcggtatttcaattggatgtccaattacactcttgatgtttaatatcgactttaaaatgtaaaagaaatacatataaacaaaatatcaccatttattttaactttgtaaaacctttagttggtatatttggtaaagatgacaaaattaattatgtgtggtattttcaaaataaggttgagattttgatttggtatgaaaaaaaaattaaattcgaattgtgttatatttgttaaataaatacgcaattttcttatttagaatatcttatattgaatttttatgtttaaggaaagtattaatatttattttaattaatctgatttgtttctcaagaaatcttgtacaacttgtatcgttgatgtatattttgtttccttaattatttaaggaaactttgctgaaaaattatctaatttttatgtccagtgaatgtttgaacaaattctgatttttctttttgagaatagtttttcatttatttcctaattgttttcttacttgtaaagcacgacctgtgatgttttaattgagaatatattcttactcaagtaaaaataaatggtttattatgtaataaatactaaatttatatatggtatttctttataattaatttattttattccttttctgatatgatcttcattaatctctccagttaggatgagtgatgtctaaggaaaattcgtgggataaacttaactttgatggagccttattcacaatgctaactagacatatc

SEQ ID NO: 201521 - DNA, 676 bp, Cannabis indica
tattgttgatattaggaagtgggccagtttgaacacacttgaactaattctcaacatgatcaaacttatataaacgtgtacaagaaaaataatataatgtgtctatatagtaatagtaacagtaaaaaggataagaagtgagtgaaccaaaatgaaagagagaatttacattgaaaattcctttgttcagctgttatgttacatgaaaggaggtctcacaagtcactaataagaagagtacatatatatgatatatagttcattgtatcacaacaatattacaccaacttcatcactttcttctattattactttgctttctagttcatcttccttcacttcaggtgttgagttttgatcatggcagccgaactggtagctggtgctttgctttctgacattgaattgcatttataatggtatgcaacctatggtggctgccagacccgtctcaagtcaagtcttcaggaaagctagccgttgtctggaaggctagcttgttcattcgaaagaagtcttgtggaaagttagttgtcgtccagaaaggagttttaaaagggtagcttgtccatccggaaagaagtctcgtagagctagttttcttctagaaaggaattccagaaggctagttgttcaccccaagaaggggttattaattacataagacacaattttt

SEQ ID NO: 201522 - DNA, 927 bp, Cannabis indica
ataggcaaatgggaaaaatcaccttttctgccaaatgccctagtcacgaccatagtcgcgaccaaagaaaagagtcacgactatggcttatgctggtcgcgactattggagcaaactggcagctttagtagatttttttcaccaaattatcccgtctttcgccaattgacagaatttgaactataatgcgttgggaacctgaaacaaggaaattcaagcgtaaaaccgttctaaaaggcaacatcaactgagaaaatgcttattaatttgacccggaacttaggctaaaaatagcctaacaattaattctccacttgattcaatcaacatagtgcttgttgtcatcttattgaatatttctctgcaccagatttagcagaggttccgacctgaaactagtgtataaattttttaatattattaagcaactattttaatacatgaaaataatatataaacaactattcaatcacagtaatcagcaaatgccttaaatgtataactattttgtcaaatgtgaagtatttgcacaaatttaacaacctagctatgaaaaaaaaatatatttaaagtcttgttatgttgtaattttttttgggtcaaattcttctgatttgttttgggtaagctttgaatcctcttctggttgtgttatcaaattctctgcataatagaatttgaattattagttttgagttgttattttgtaattttgaattaacagaggttgtaatctcaattttttttcctgattttaccttttaattttagatttgtcgggattagatcgttttgttgttgagatctacattgcgcccttgtcattatacaacttgtacgatttttttggacctgaaatcgtgccttggttaagaacgaaaatggaggagatctagtgcaactggaaacgaaagagaaagaggaaga

SEQ ID NO: 201523 - DNA, 1006 bp, Cannabis indica
gttacgacttaaagtatgattgaaggagacttgcgatttcttcagtgtttgggtctgcgattgaaagaaatattgcacaataatggtgaagcaaagcagctttgaagagaagagacaccccaaaccatcaaatgaaaagattatgtcattttacggtaagtgtttcttattccattttcaattaattataggtactttttggttatgagagatgagtgatgtagtgtttttaatgcattaagaagagaactttggggaaaatatttttttatttacacaatgagagaggtttttttggtccttttgagtatgcttgtgttgtctctgtgtaaatgatgtacggttgcatcgatgtgtgtatgtgagttaaaaattgttgataataaaaaaaaaatattttgggaccacaacttaaagtattttatgttgttttgtctttatcgagagccatcatcttctaggtttattttgaaggtgcatcataaaggaaaatcaaatttaaaaggtaaaagtataacttttatttgtggggttgttgactatgtgcatcattgtgatgttaatcatatgagtctatatgagctatatgattttgcaagaatttatgatacactaatccatccaaattaggctattattttaagtgggaaaatagtgatgtattggaatatgtaacaaatgaacacattatttttggaaaaaatattggtctaatgtgaagaagacttatttacttgaatgttacgtttgtcaaaatgaaattggtgagaccttaacgccagatttagatgttgaatttgggcttgagttggatgagggaattggggctgcaatagatagaaataggcatactttgggtgctaattttgggcttggtaacacacaaaggtcacaaacaatagattgtggtgttggtttagttgagcaacaagaatcaaaaagtaagaaggttgttattgattctgaaactattttcattcatggtggtttaaataatatcaatgtg

SEQ ID NO: 201524 - DNA, 774 bp, Cannabis indica
caaaaatttaccgagatactgtaactatatcgaataaccgctaataaaaaaaattagaaaaaaaatatttcgacatgtaatttcggacgtagaggatgattaagagcttgtaattagcattaattcctcatagtatattatatactatgagttaggagatatatttataagagtaattggtggtgaattctattgttttaatttttaaacatttaattgtttttctctttgtggctaaatttttttaaaatttacgttttttttttttttgaaatttaaaacatacgttaaatattactgttatatatcaactaaataattactatgaacatttgtgtatatacgttaaagtactttgaaacgaatacagtaatataattcagttagtatttaacgataatattcagttcacaccttaaatttataaaaaaaaaaatataaaaaagtttggctacacaaaataaaataaaagagttagatgtaaaaaatcaaaacatacaaaaattccttcaaaaataactttatttataaatatatatgcttaaacaaaagtcctcctcaaatatatactatttatatattacgtagtagtactgtgtgtctgtgtggtgtggtaaagagaatatgtagccattgactagttattaattaattaattaattagatatatataattatttgtagttaattaattaattgaattatatgccttcgtgttagagcataataataaatatgtaacgctctccaaatgtataatcaagaatatactaa

SEQ ID NO: 201525 - DNA, 745 bp, Cannabis indica
cttctatatcttcgtattgcattgaatagtttttttacgttccatttgaaaatgaattagccaccaaaataatggaaaattcataaataccaaacaataaacaaattagtaagaagtaaatttttctttccatttcattacctctaatgacctccacatttttgctctaataatttagatataatgataattttgtcaaataggtaaacaagaatatattaacgtacaatcccaggcaaccatgttcataaaacttgctctaagttatccacgttaactagtttaccataaaatttcaatatttaatttaagataccacatttcaccatcaaaatctccattaactcctcttacattttatttaacaaaaaagcttatacattttcataatatatatagagagcctcaacatacaaagtgattgaagcaaacatagtataagccttgattggatacatagctagattaactatgattacacttaatctgtcttgagagacagaagattctcaaacttagcttgggcggtggtggtagtggtggggcagagttttgggcatcccttcacctcataggagcaccaacaacgagggcacagagacctatcacaggcacaacctccactgcagttcgatggacacttaccttgtctcgtatcactacgataacacttcccagcttcttcgtcgcactcacagcttaaacatttcgtcggtcctgatcaataataaaaacaaaaactata

SEQ ID NO: 201526 - DNA, 507 bp, Cannabis indica
gtctttaattaattaatgcccatatgaccatacacaataacaatacacattggagagtagctagaaaccaaaccactcttcaaattgccagtaacacattacctcataataattataataataataataataataataataataataataattcataaaatcaggttttccaggctgacggtagccataatacgtcagctgactatcatgtgaaatgatacacatgacgttcacattattttattaactcattattttctaaatactggtcccaatttagactgtaataaatattatatttaaaattactttcagattccactaccaaaattaagattttttttttttggataatgaacaaaattaagtttagatatactattttcatcaaaaaaaaaaagtttagatatactattttgatatattttatattttacaaaatgcagggttacaaatataatctagcaaatgatcaaaatctatagaaattttttattattattattt

SEQ ID NO: 201527 - DNA, 996 bp, Cannabis indica
tttctaccactttggattcgctgctctctttctctagaacaccaataactgaaatcccagaaaacccagaaacatttacaggtttactcaactgggtatcaatcaaaagagggtcttgaacaccacttactactgaagtatcttcattttcttcaccatcttccaccacttcggattcattattctcttcctctagaccaccaagaacttcgattgaaaccagtaagagattgagcagttaagagagaagaagcattgaactgaagatgggtctgctgaaaaactgaaggggtgagttggataaccgaaatggaaaataataccatgaagataatagaagaacagattgtcaaagaaaaaactaataatcttttgggtttgaaggagaaacttctctgcctatccatacccaaaacttctttcattgggtttggaaaaaagaagagacacacagagacgaaaaagaaaagtcaaggagattggttgagaatcttattatactagtaaatggtatgcatgttaatgattgattgatgccagataatgaagaacaattcttaaagaagagtagaacatgtgaacttgtgatataaagcgtgtagtttgatttatttaccaaatatacctgtaagtcgcaataatcgctgtggaatagtaaagtataaatgtgcatttacttttctgacctccattcatcaaacacagaatgcttggcttccttttatttatttattctgataaccaaaatgcttggcttccttcactagttcgtgtgtggttctattctgtgtcatatcctctttcacatccagttatcaaaaaatatatataaatataataattcaaattttaatttgaaaatgtatttataaccggatagtggttacaaatataaatttattagtaactatatccgtttttaatgttttttggtttaaaatttaaggtcccatttggccatttctattataccatctctttcacaccttaccagac

SEQ ID NO: 201528 - DNA, 1336 bp, Cannabis indica
ttttattattttttaaaataaatgtgcataaatgtcattaaatttcacaatcattacaaaagatattcttcagaatcgaagagacaagcacacagccaaaccgattgtgagtaaagacccacttagccatattatgggcgacaaaattacaattcctactaacaaaaaaaattacaagtagtaaaataccgagagaattaataaattcacaaaacagtaacgaataatcagtaatgcagtgtattggcaaagcaaagggcttgcctttataagaagtataaagtttatgcgataagtagagagaaccaacatatttgaaatgtttttgatttatactttattatgctgaactctatgtgagcctttagtggatttcaattttgccattttactaaaatttattttatttttaaaaaaatgtcatattttaattctaactctataaatactaaatctatctatttaataagtataattaattaataaataaatcgtaaatcctcttttattctcaaataagccttttttagtgaaaatttacaaaacattttatttagaattctaattgattaattaaaatcaattaattgagtctacaagacaatattatctcaatcataagtagttttagaatttaccaagtgaattctttatcttattaattcttcctggctctactatagatttgaaattgcactcctgattacacaaaatgctctattcaccaagaacgtatacgctgtgaattatccattgactagggacaaagttaccattctagccttcaatgtattttatccttaaaatacttagtttcttataaatgatattttagtaaactaatataattactgaaataagagctcttccatttatgtctattaagccaagctttaaggaaatcatcatttcaattctaaataattaagccagaacctaaccatcttaggattaagatcttttgatcaaagatcaattaagtggtattgacttagaaaagacataaagtttataatatcttttccactatcaatgtcgatccaatccaatgtatatccaatatatttgatactaatatgctttgctaatgccctagaaaggcattcctcatatcattgtgtaagtaaactttatcactgattatcacgtcagtatgaatccagtgcactgataaatcatgggactaaatactttgaagcatataatcacaattattttctattgtgtcgacaacactataatcatgaataactatatattcatgatttaataaaatttatatattaaacatataatcataaaaaaatgtagcataacttttattaattagtaaatc

SEQ ID NO: 201529 - DNA, 755 bp, Cannabis indica
ttttttttacaacattacatgttacaatggaacattatgcaagacaaattagaaatcgggtataaatatttacaaggagttaagtatgagtttgctttgaaactcaagtatacaaaggttagaagttacttactaatgatagtattattaacattggtcttacactgatattactgtgaaaaataaacgttattattaagaagttaataggtaatgtgagaattagctatatatatatgattaccgaaaatttatctatataaatcgatcactattaatccattcaaaccaaccagtgattaaaaatgccctattttagttgaatacaactttaataggacaggatcaactgatattttctatgctaataagtgtatattttcaataagctccaattcttgtaacttaatcatgacacttggttatgataattaaattactagatctgaactagagctatgaaattcggaaggcaatttgtaagagttgcagatatatatataaaaataaatattactcacttttcaattagaaatttctctcctataagaagccaattatgaaaacagtttatgaagaatttaaagaaagaaaaagaaacaaaaattatttttaaataatttatttatttatttatttatttttattttttaaaattaataatttgaaccaataaaattttaacacctggcgattaacaaaaaaagtaaataactcagttaaaattagaattaacggacaaataaaaagtatga

SEQ ID NO: 201530 - DNA, 948 bp, Cannabis indica
agggtcaccttatagtgtcaagcaccacatggagaaatgctatgcaagaagaaattaatgcccaagaataaaagagcatcagtgacatattgctattgatacaaattattagcagatcctacatgatttgatttaataaataatatagaaaccgtaatcaatcgtaacatgccatatcggtatggtattggataaaatataatacctaatagcaatactcattgttagcctcaatatctaagttacatcgtaaacttttagttgatgccttttatcattaaatttcttagttctccacccatgagctcattgctttttagtgttccctaaaactattttctcaataataataattaatatgttcgacattcattatatattatatatgtacctttggtggccctcccatggaattggtacaataaagcctggcattatccacaagatggcaatatcttggaaatgcagtagcaaatcttttgtgggacgttaactgtgaattcactctcactgcccttccaatcattatagctctcctatgtatatatatacaatattatacacatacatattaatataataaaaaattaattaattaatccttaagtaatgacattataatacaattttatttatctataaaaataatgaattaatttacctaatgcctctaacgacagccaaataagggtcacaaacgactccaaccaactcaattctgtagggctttcttttgggcactaatgagtcattattttctccattaataatgtcatttgctgttatttgttcccaataattttcatttatagtaccatcttcggccactttgtagccaacacccatacggtaccgaaacttgtgaacattcctagccatggccaccgtttgcttcacaaagggctcccacgaaagggtcccatccatgatcacgtcacgcccttcgtt

SEQ ID NO: 201531 - DNA, 1056 bp, Cannabis indica
gtatatacctttagttaatatgatatattaatattattattttgtttttggttcattaaaaaatattgatattaatctctcaattgacatttaccaaacttttttttttgataagtaattaatatgcacaaattcaatcatattatctagacaaatattcatgattaatttatattgtgtgtttaatatgatcatttaagaaggcacacgggtgtgtaaaagaaataaatttttaatttttaatattaatatattaattaagatcatgatcatgacttgagtgtttttattttttatttatttatttattagtatttatttgtgaaagactagctacttgagaatccactttgtaatttacgaaaagaaaagcatctaatgagacttattagtttggcaaaaatgaatgattattattatttaatatatattaatttttttttttttgaaatgaatatatattaatttagttttgtctaaggtgtaacaagttgaacatatatatatattttgtattattattcttaattgaaaagaaaaattaacaataataaattaattaattatagctagaaggattgtgagttcaaaacaccatggaggctacgtttggttgttaacatcgttttatcaataatattgatcttatcatttgtaatttgtaataataataaaaacacaaaataaattactaatttaataaatatgttgttcctataatatataaataattaatgaagaaaaaaaaactaaaaaataataattaagccaaaaactacccttttctcatttcatctatatactaattttgtaaaaaataatgatctaaatattagataattaggaaacaaattacgctttacttgcgattattttttttttataattttatactatatatatctaatatttttgttagtaatgtttttttatcttatttttttcaatgaagaagatcttaacaaaattttattcttatgcattctttttttttcacaactcactatttttcttcacatacacacctctcttatacacaaaatacatatttataaa

SEQ ID NO: 201532 - DNA, 569 bp, Cannabis indica
tatacatatatatatatatcaaataaggaagaaccccttcactttgacccaaaaataatcacacatatatcaataaatatgtatatatacacaaaattagaataaatgggtgaggaaaaatcgtcagacctaaaccaccagaagtctccattacacataaaaaaatacaaattaaaaacaaagagagatatacctcaaaatggagctgccaaaaccaagcccccgtcaaacccaaaacggtcaagaaccgtcggtcgctggaggagggcacgacgctgacgagagaaagaaagggagtaggggagagtgagagaggaccactacgtgactaagaaggtgtttcaagttaagattcgaagctccttcccattcgcccaactgcccaaagctacagcccatcgtcgcccgtcgttctccccacatttgctcgcccggtgttgttccgttcgcctaccattgtacccaaataaattaggattttaattttaatgtggtggtggtagaatctgtaggggggcaagatagagagacgaaaaatctcaaaactgaaaagtttttttttttttttt

SEQ ID NO: 201533 - DNA, 742 bp, Cannabis indica
gtttaacatttccctcctagatatgcatgttaaatttaaaacttaaaacatacccgaattgcagacgatcagtaggtggtctatattacctttcttacttggattccaacatgcttttgggccgctcagtcggtggaggaggagtatttgtctttactaaagctcagcctcttgactgaaatgatgcatgttatcaccagccagaaaagtgtctggttttaaatgattattttgtggcacggttatggaacttccatcttcgagtatgcattaaaaactccaatttagttatgatgtatttatcagaatgaactggaatttggtaggacatttttctcactgttgcttcttgtgtgcagaaaagttgagaagggagatacttaaagacatgtttatctggttttgttcttttacttagcctacctaatcttcacttttccagctctgatcaaggtaagttgattctgacgtacaagtttccaacaaatggagtaattcggaaattttaatttggagttgctatagtgttcttatgtttattgaatgcaaccaaaaaaagaagagaaaaaaagactttcagtgtataatttaaacaaatatatcattatcatagaatgtgttaaaaaaattcatgggggctcattcaatctcgcgagtcgtgagctgtgacatatggtggatatgcttttaagcatacatatggtggataatgtagttgttgatgttggaacataaatgtgaa

SEQ ID NO: 201534 - DNA, 1443 bp, Cannabis indica
gtgtacttttactgaaaaaacaaacaaattaagtattaaatattaacaataaaagatagactggttgtacaaattagatctgtaaatcatccatatgtattaatgtatgattaaggtcaattatggtacccatttacaaaaaaaaaaaaaaaaaggtcaattatggtacaattaaagctaataattatataagtataagagagattaaaatatcaaaacttcaagaaaaaaaaaaaataagaaaagaattagtagtatacatatagatcaatttggaattgaatattaagacaataccatttaagctaatatataactacatttatgtaccatataacatcataccaaaataacgttatataattaattaattagttagtaatttttttattatgtattaaattaaattatataaattttgatattaaaatatactaataatatatatatataccttgacaggtgagctaataatatttttttcctatatatttaaacatatatagagtgatttttacaatgcatcctattaaatatatacattctatacttatttcagtatttagaagaatttttaagtctattttttttttcatatttgtgtatattttacaaagttttaaaaaattcagaataatttataaaatagaaaggagttttaaaacaatctatttcacgcgcgtataaaataaaatagtcacgcgtgcagtacactatttgaatcatattttaagcgtattagattttttttaatttttcaaaatttcacagaatgttttaaattataactataacgtacataaccattagaaaaaatttaactaaaaaaatttattttaaacagataaaaatacatccatatacccaaagatacattacataattttccatatatatatatatatatatatattgtttaatgatatgcatttgatgatgaagttgaggagattataaggatatatatatagaaagaaattaatgaattataataaatgacatacattttctggtcttttgaaaaaatggcagagacagcttttgtggcttcagaaaagatggaatcagtatcaactccttcttcttctaagtttacatttgttgttatgtaaaggcaaggcatcttcttcttctttcttcttcttcttcttctttcttcttcttattatatattcttatagtttgtgtttctgtaatatatacatacatatatattgtttggtgttgtgtatttatagtagtagcaatatatatatatatatattcttaagagaattttcaatgataattcaaaacacgttttttcacacgtgtgtagggcagccgacataattctttcttctctcttataaaaggtcaatagtctttttcattattaagatgtatacacatgtgaactgttatttcacaatgataatattttcgataaatattattttcgat

SEQ ID NO: 201535 - DNA, 1407 bp, Cannabis indica
tttcttttttgattctaactttaattagtttactttattcagactcttcaaccaaaaaagagagcttttgtctccacaaaggtaattttgttgcttggcaggttgaatcacatgcttaaataaacattataattaattaattaattaatttatatataaagaaaaaaaatagtgcttttttattatatataactttgtttaagaggaacctttttctctattaattaattaacaattaatatatataattatatatagttagctcccttaatgactgccagttatatatgctttgatatgtaataattcaaataattgaaggtttgttgccatgcatcttaattttcattttttttttatcaattatatgtattgagtaaatggctaaaaataacttttgcttatagttatacaaaatttatgataataatatctataaaaagaattatgatcattaccatgacatattaatatttgtatttttattaatgtaattaattaagtatcgagtattttcctcagtatcaaattattattagtgtaattaagtatcgaatcaaaaaaaattaaaaaacataatttttaaaaaatattattaatttatcataggttgccacttataaaaagtgttaagcaccatgcactttttttttaataaatagtaacattgttaaaaagtcttttggcatcctttatttatttatttttttttttcacattttacactctacatatattaataatatttaaggttatatcattaatttttggcatcctttatttatttattttcttcaatactatttttttggtttgtgaattgattaaaaataatacacatcaattaataatgcctttttgttatttatattacaaacactacaaagaaatgtcacttttagtaaattctattttactagtacaatattaaatttttgctaacataaaaatgtgttggcaaaaataatatttgttgtagtgaaataaatgtgtatcacccatcaattaaaaccttccatgttatatatataatctttcaaataactaatcaatatagtgaataattttgggtttttattttttgggtaaatgatatatataatatagatatttatacaatatatgattatattgatgagtacaattagtcaattaattaagtaggtgtgcagtggacaaggtcattgtctctctgaattaggtccccttttggatcgtattgaatgtgtcacctaattatttattttttatatatattatgttcaattcaatttaattcaggataaggagcaagtaattaatggagtattgatcatccctaacatttatacatgtagttgaaaagtgagctctatctatctctcaaatatatatatatatatatatatatatataagtattattaag

SEQ ID NO: 201536 - DNA, 2236 bp, Cannabis indica
aatcatatgcggtctttacatagctcatagtttactgcaataacaagtaataatcaaagcaatgtttaaaggtaattttcgaatctttattttatgtactttagttaatgtattatttatacattgaatgagattcgatcatagtttagattgtatcgaccacataacgtcattgcaatgacaagtgataatctgctcaatagaacttccagaatacagattgattaatttatacttatcgtccttggattgggatgaagtccacgggtggagccagctcaaaattattgatatgctaaagggttttgtcaaccacaaaaaacataatttaaatttagacaaacatcaaaataatttaatccaatttggtttgatgagtatcctacctagactataatatactattctgcattttgtttgtgttgtttccattataagaaaaatatgttggagaacaagggggtcatgttcttttgctaaggaatgagtttcaaattagaaataaaaggaaagggcctaataactttcgctaggggtactcggttgatggttctttctccggtaagaaggcctacttaactctcattaagagtaaaatcggtgagaaagataaagtttgggattgtctttggaggtttcaggtgtaagaaagagtaactttttctttagaaattgggaagcgacatcttattgttcaaatgtcttcagtgcattttcggtaatgttgtaaattgttctatatgcaacaatatggatgattctttttctcgtcctttccctgagtgccctcttgctagacaagtttggttctcaaattcttggggaattcattcgaatcagcttaggtttgatttctctctccagctgctcaagtggattatagatcctggttcaatggaggaaaaacttaagttctctttgtttactatctttagtgattctgtttaatgccatgattaagggttaccataaagccactcacagggtgcaatattgggtagtttatgtcatcaccaacaactcatcattgggcagcataagaacaatgtttgtgttacttgaaaggagcaccaaaaccaggtattatttataaggatcgtggacacactcagattaagagtttttctgatgcagattaggcaggttccaagatagatgaaaactccacttcaagttagtatctttgttgggggcaatttgatctcctagaagagtaagaagtaaattgttgtgtctagattcagtgtaggatcagaatatagagctatggcatagtctgtgtaagatagtgtggatttatcaacttttgagaaactttaacgagtgaatcaaagaactttatgaatataaataggagttcttgtatacttaagattcatactgatctactaatgatcatcgttgtgatataaataactctttcatgataaatgacatgttaatgaaagttgttatttcatattcaatccagtcatgtataatcaaattatacacagtacatttactacatgtctatccacatatgtgtttcgaatcaaaatcacacgcactagagtatagtgtatagcaaaccctacttggtaattccatattaaatattccatactttaatatcctaccgacttgtttcattcatattgtatgatctcaattctcttgtacaaccttacaagatcatactatttctatatgaatatcaaatttttagatatttattaattatacttctataattaaaatattcatttatcttataattgtatttcatatattctataatgtattatccattaaatacttatttttagggcataaatcctaacaaatgagcaactcaaatctttgagacacaccctctggagaaagaagacgaagaaaaaaacactcaggtagaaggataacaacaactctaacaaaataaaaaatagtgtgagaataaacaagatacgaccagagccacgtcgtaaggtcaagaaacggtcggtgagccctggtcaggcaaaaaaatcaagtgttggctaataacttttacagagaaaccctatagagaatatactttttatttattttactttttcatttaagaccttaatgtttttgaatttatcacttcatctatttcataataaaatttaaataattttttttcctaaggttaaattatattgtatgtttgtattaaaaatagaggctagtagtatgtttggaagaacttttttttaccaaaaatatattt

SEQ ID NO: 201537 - DNA, 1297 bp, Cannabis indica
aaaaaaataaataatcaaactgtcccgattcccatcccggaccaccccatttaacataatttttattattttatattttattatagtaaattctataatttttattaaacattgaagtccatataatgtatgaataagcattgtaattaagtattataattcttattagtacttactatgatgtgatacttactttataaatagttattgattttttatgatcattattgaaaataaaataagtagtatttcatattaaattgtatcaatagtttatgatactttatagaaagtggtaggcaccatatagatgacattagtatttcattataaaaattaataatcgctctacctaaattttatttctggtttcccctctaccggcccactccatttaaatttcggggaaaaaaaattatctctatcctggttcccgtcccatttctagtttaagcgaggaattccctccgcaatagagaagagtgtacctgtggggcacatcccagcccaatggtagaatttccataccaaagtaggatgtggaaaaaattgtgaaaaactctcataaactatatccacaccacagtttcaagaagatataaattttaaccacttgaggctagctcaagtggccataggtgggtgtgtgtcttggaggtcctaagttcgactcccaggtaaaacatgattgtaatatatcaacgcttaaatcaaaaaagaagatataaatttgaaatataatattacacactactacttctacttggtaaataataaatcaataagcttgataaagataaacaacccagattttgatccaacaaaaaaaaaaagtagtttcagtacgtagtagatcttaacctataacaataataaatatgggaagggacccttatactggctagctagctagtccaatttgaggaatggtggccattaatttctgtgttattatattatgtataaaaataggtggcagtagggtctatgttagtggtaatgggcaacgaagacacgtgagaatcacatgcaactctctgcatgtacccctccctaaacttttatcaacatggcccagctaagctccctcgacccacaccagtcaccatatggccatgagactatatatgtagtcagttctctcatggcccatatgggatgggaccatgcacctatatgtcatcaaaccttcccacaccaccactatagcgcccttcgtgaagaagcaccactaaatttattgtcctaatatcttgggcgtgttagctactaactataatatatattattatatacg

SEQ ID NO: 201538 - DNA, 1443 bp, Cannabis indica
ctaaatttaatgagattttacattaaattcattccaacaacgctctaaaacttattttatttataacatattgtctgactatagtgtctcactattattagtgtgacactatatataaactacactaaatctttttctattagtttttaatctttaaataatatatttatacttaaattttttgtatatttattattgggtttatttataatttaataaaataatatagtaataaagaatataattttagtatactttttagagttgtgattgaaacagaaaaaaaatttaatgccaaacttttattatttttgtgttgatttaacactaaatttaacatttatcattgtagttgtcctaagagatgttcatgtctaattactaaagctctatcaagtggtgttgccctaagatatactcttatcataagtctgctgttgactttcatgtgttttgatgctaatgtggttgctcataaattagcggtttaggttgaatcttacaatgttgctcgacgtcgatgcctgtactgaaagagaaatagcacctcttttgttgctactacaaactttttctggttttatgaagtctatcaaactatattagaagaatataaataaaaataaaaggttgtgaaagattttcataaatttagtcatatggaatatgttgtaaattgtgtggtaccaaaaagttaatgtttatactttatagttgagttgggatatgtaattagaaattgggtgtgatagcgtgtgaaacacattcattcatgaacaatttatgatttttttaaccttcccaatgagatgacacaccaaaccaaacactcattttcccctaatacacaacttcttcttcttcttcttgttatgggaaactagtaaattaccaccaccaaaaaaagtcaatcagttaaaaattgtgaaaagtaattactttctctgaaatttcgtccacaaataaaaaagaaactactcattaaattttcttaaaagtgaacttagaaaatgattctctctttgtaaatttcttctttttacaaaatcaaaccaaagtcagctttgttatcaccaaaaatagaatttaaagaaagttgaattttcttttcttttctccttacattccccaaaactccaccgaccttttatacaaattagattttacattttcccaagaaaaaattagaaagcgtggtctttgacattgttcattttaagtattaaataataattaacaaactaaccaataaaaaaaatactaatttttgcctcaaattttatcaattggtttctgtggtgctcaatactttctaaaatatagtaacttataattagctatttcatcaaattttttatattaaactatatagaaccgaatatttaattacattaatattattttttttgtactaaatcataacctttaatttttgaaacctct

SEQ ID NO: 201539 - DNA, 804 bp, Cannabis indica
gtgaatagtgatcgattaaatcaacaggtattatttatgtacagcttacagaagagttcatagattgttatgatgttttctgttgaaacattcataccagtttatcagttgggtattgattcatgttaatgttttcttaaaactgaaaaataatattcttcttcagaatgtcaaagctgtttttgatactgccattaaggttgttcttcaacctcaaagaaggaaggagatggttcggaagaaaagacatcgacggtctggttgctcgattgcgtgagtacttccattcataagctccttgatatgtttctttgttgcccaaaatgtattgctgtctgggattagatttagttagtatttgctcattatttatttatttatttatttttatagatttaatgacacaaagtattgtatttgctcattattgataagcttatttagaagctaaaatttcaacagaagatattagagagaagtaataaaagtaagtgatgataacattaaaattctaaacaccccatgtgaaattgaactagtgaatgttttgctgtttccttcaatttagtaccctaatcagatagaaataaagtacattgttagtaacatggggacttgggttgagagtatattgatgaaatttgaaattaaaaaataactttataaataaaatggcaaataaagatgcttctctgtttggtaatactgctttcttgtcttcttggcttgagccaagctctaaattaatataatggggggacctcaattgacctgaaaatagtcttgggagagtacttggaatgg

SEQ ID NO: 201540 - DNA, 770 bp, Cannabis indica
ctccacatagggagtgccataaacacagaacaaatgccacttcgccaaaccgtacatctctgggatgataacatggaaccccgactcaaaaatatgctgaacctcaatcaaacccgtctgtctccaagcaagacaaaagccccccccaattcccacagaaggaataccaatcacattaacaaaacccaaccgattcataaaagcatacatatcatcaagaccaacctttgtttcagcaagaaatacaacctctgcatccgtgtcatggattaaaccccgaagggttctctccgtcgtgggcctacgaatcccacgacaattccaggaaagacacctcatgatgatggtgggggcatgcttgaggccgcctcctcgcccttgccaaaattttggaccgaatgagtttcaccaacaatacttccttgtagcaccacctccaaattacccaaaaattgagccatttgagttcccccaccattaacctcagtgttctgattctcggccattccctgaattatcttgaacacccatactgaacttcttcggatccataggttcaacttgtgagaggctctctccatcgttcttctcctccgaaacaggacaagcaggtaattggaaactagtgacagcaggatagggatgataccatgtatggggctttcttttcttggttcccaataaatgaattatcatcattgataaatctggggggttgcaaataagagagggctgggccttatataaatcagtagcatccggtccataaa

SEQ ID NO: 201541 - DNA, 1458 bp, Cannabis indica
aagttccaaaaggttttccaccatttaataagggtagcattactagtagatgttggtaaggaattaatagagttggctagatgataagctgaactcatagtgagaaaaccagaggagtgatgctcccaaatgagagtatcctccacagaaacatcgctaataggcacagctagaatggcctgaatcacctcctcatcaaagtaggtagataatctatctttattccagcaaccatcagcgttgataaaaaagaaaacagtaggatcaagggggcaacattatttttaaaagatataaatttccatccagggatccaatatgaattaatagaggagatggatatgccatttccaaccttccacaaaagtcctcttttaagaagatcccgaccccaaagtaaactacaccaagtgaaagagggacaatgacccttaggagcttcaaggaaagagttctgtttaaagtacttggcttttaagaggcaagcaagaagagaatttggcatagaaaacacatgccaagcttgctttgcaagtaaagcctggttatgatgcacaaaagaccggaaacccaagccaccagaacatttagattgatagagtttttcccaagattaccaatggactttccccttattcccaatagaaccccaccaaaactgagccataagactctcaatctttttacaaatagaaatggggattctaaaacaagacatagcataagagggaatagcttgaactaccgctttaagaagcacttctttcccaaccttggagaagaaacgattagtccaataattcatcttagagctagccttctgaagaatgaaactaaagtggtctttttttgatctaccgaagcactgaggaatacctaaatacttactaatgaaaggcttattatccagacctagagttctgcgaaagaaatccgactcagaagcaatagtgtttggagaaaaagagcagatgacttagaaaaattaacgagttcaccagttgccctgtgatacagatcaagagcatttttaatagcaaggcgtgatcaggtagtagttgtggaaaaaagaagactatcattagcaaaaagaaggtgagaaatgacgggtgctaaacgacagatagaaatcccctggaaaagcctattatgttcctttaatctaatagcagcagataaagcttcagaaacaagaagaaagatatagggagacaaaggatctcccttcctaaggcctctagaagaagaaaatttattagtgagggagccattaataagaagacgaaaagaaacagaagaaatacggttaagagtaagaccaatgaacctaacaggaaaatggagatgctgcataatagccttcacaaaaccccactcaacacgatcaaaaatcttctccatatctaacttaagagctacccagccagacttacccgatttcctatgattaatagcatt

SEQ ID NO: 201542 - DNA, 780 bp, Cannabis indica
aaataccctaattattgagaaaaaacttaatcggggtcccaggaaaactctcaaaaaaagacggtccattttaaaaatggacccttaaattctgtctaaatcggactgtccaaactcaactacctgactttaaaactctcttaactcattcaattctaatccaaaccttacaaaatttttcagggtacctaaaaacttcataatgaacattgttcatgaaggaacctcaatcaaattcttaacagaaattaattaaatggccatcctaaaattgcctaaatcggacaatttgaaacctccctgttcgagtttgaaaatcccataactcatccaattctgagctaaaccttaccaaattttttgcagcacctagaaaaattatgcttaaaatttttcatgaagaaatcttaacccaattcgtaacgtaatttaaattatgacaaaactcaaacttgtataactttgctataaccacccaaaacacttaaaactacttgtaaatagtcctaaataaccttaagaatttttttaaacctccctaaacttactcaatgggtcctacaaaaaaaaagctaactgaaaactaatgaaaaccctaaaaaaccataaaaacgagctagggtttacattggattacatggagaagctaggggctgaatactttgatgaatttcagctatgaagagccttgaaaatggtggaaaacactgggtttttctctggttgtggcagccacaaagtagagggagaagagaaggtaaactttgactttttctttct

SEQ ID NO: 201543 - DNA, 1195 bp, Cannabis indica
ttttctctcttcctttcttccttccttgcttgtttgctttccttcacaccctcttaatctgcacccccctctttctctctctaactctcattctctttctctctctctatacatataattagtatatatatacatgtgtgtatgaggctgtacttttgcagtatcttttcttgaacaatacgtgtagcttcactatagaactgtaactgacacgcgccttggaaagttctccaaccatcacaagaaagaacatgctatacatataatacacaaatatatatgtatctttccttattattattttatttttattcctttcccttattctatggcgttggcgtttttcaactccttgtgttttaggaaaccctcttgtcaaaattattatttgcatatttatataataaataaataaaattactaggctagtggctggaaatatatttattaattataatgtgtatgtatggggtaatgatcagtaaattattatttaggagaatagtgaatattaatatataaaagtgattgtttagacaaaactagaatatattgacttcactatatattatcactcaactatttaattttaaataaaaagaatgacttaagacactaaaagtatttcgttaataccagtactaatttaaatataataatggttaatcataagtgtgtgaaagtactaatttaaatacaatattgatattttatggaattagtcagacaatataggtgacccatgtggaggctattttacaatttcagctacttaataccagtaccacacttaatcagacggcgctaaaattaatcacacacatatctatctgtatacctttatattccttaagcttacatcatatataatatgtatatacatacaataataataaaaagaagctcagataaatttcttgctaagaaagcaaagatgttgtgatgacatgtatgttgtttgtaataataaaataataatctaaaattagaaatgccgctagtgataataagtaagtaacaaaaagaggttttatttttttttattaacttatgaattaaattatgagaagggtaagtgaaagtgaaggtagcacgatgataacgtgtacccattaagctgtaattaaatttagagattattagattagattagattagattaaatgggtctgtgtgtgtggggtggggggggggg

SEQ ID NO: 201544 - DNA, 2660 bp, Cannabis indica
ttaataaaagacttcaagctttcttcctcgtggatgctaatcttgattctttagttgtcatgagctcgtaagattgaaaagaacttgatgtgcttcatgagaaggaagaaaaatatcaggctctcgaggcaagacgattggattaaattggggatcaaaattctgcttttttttcagaaatgtgcatcttggagatgtacaaaaaatttaatatccaaacttttgaatgaggtaagagaagaggtttgggtcaaaccaatattggtgaggtgtttgtgcattatttttccactttatttacctcagatgatccctctgaggaggcctttgtaaggttgttagatttcagttcctttaaagatttcttcataaatgaatcaacgtttgacttgtgaatattttggggatgatatcagagatgctctttgtcaaatggattcatctaaaagcctgggggtggacaggtctactacgagtttttattaaaagaattggcacaaagtgggttcggacattattgtcgcaactcttgctttccttaatgaggaatcaagtttgaaagttatcaataagattcttatttgtttgattcctaaagtttataaccctgttagaactattgatctcgctccattagtatttttaatgttttttacaagattattataaaggccatgactattcgtatgcgggaagtgcttagccatgtcatttctgatcactgataattccctcattggttttgagtgtattaatgctttcatgaagaaaaagaggggagatggcttttgcgcaattaaccttgatatgtctaaagtttatgatagggtgaaatggagatttttgaagagaatcactttgaagcttggttttcaagtggattgggttagaaaagtccttgattgcatctctttagtggagtactctattcttttgaatggggtaattcttgtttctattacctctcagtggggtcttagacaaggagaccccatgtttgcttacttgttcctactttgtgctgaggcattttctagtttggtaaatcgtaattgtgacaatagtcttttgttttgttttcttgtggaagaggtgagccagtggtctctcatgtcttttttactgacgatagcctctttttttaaggctttggaagtgtgttgtatgagatgcaaacaaattttgagttggtatggggaagcttcagggtaactggttaactttgctaaatctgcagtatgcttcatccccaacgttgtgagccttgatagagaaagattggtaaccttattgggagttgtcggagtagattgtcatgagacttacctgggtcttccttgttttactagacataacaaaagctggattgttaaactctattagggactgaatctagaaaaaacttgatagttgaaaatccaaattattctccatggcgggtagagaatttctgatcaaggttgttattcagtccatccctacctacactatgaacttgtttaaacttcctaaacgttttgttaagaatgtttataggacgtgtgctcattttttggtggggagggattgatgtgaaaaagaaaatacactggtgtatctgggacaaattgtgccttcatgaagaagatggtgtcatggggttcagagacttgtatttgtttatccaagctcttcttgcaaaacaagcagctaggatttacaatgttcccacttgtttggcttcacgagtgctaaaaggtatgtattttaggaaccagaaggttggtgatatagtttgatccaagcaaggctcctttgtgtggaaaaatattttatggggtaaaatgttttttgactctagagtagtttagagggttgacaatggtcataatatcgatatctattctaatttttgggttctctctacgtcttctactttggtgttgtctcctcattttcttgggaaaggtagcaaagtttctctattacatgaggctttttggttcgtggcctcgtctttcctagtaaaattgatgctatcttatctattccttagccctcctcaaataaggatgacaaactcatttaaaattttgaaaagtctatttaatactctgttaagagcggttactggctggctcttcgtgataagggattagggcgggcttctccctctaggggatactcggatattggtggaaaaaaatttggtccttaaatatccctcctaaggtgagactattttcttggcaagcatcttctaattggattcttacgaagattataatcaggctactcatggtcttttatcagatggtgtttgtcctctttgtgagctctacgaagaaactacttatcatgccttgtgagggtgtccttctttaatggcttgcaagaaaatttgtgatcttgatttgggaaaccctctttctaatcatacagaatttcttagctttattcacattttattgaccctttgccgaaggataaaattgaattagttatgatcattttatggtgtatctggtttaagagaaataaaaaggtgcataataacaataatttgtctcctgacttggtggtgaattgggctcgtgaagttctttggaatttttaacagccgggttcggactaggctttctctctttatgggacagacgacatctttgccttctaatgat

SEQ ID NO: 201545 - DNA, 1202 bp, Cannabis indica
taaatatgtcacactattttaacttttatcataataatttatttttaaaattctattataataatataataaatagtatttttccgtttaaaaaaataatatattttagtaaaaaaaaatctaaaattagaaaagtcaatactaaacttaacggtgattttatacgttaagacaattcaaaataaatatagccaatttttccgaactaaccaggaaatgaaataaaaccccaaaaaaccgccatttttcttgtttgtaactatttattttcccattttgcccctgactttctaaataattacaaaaatggtattgcttctttgtttagctaagcatccagtctcaaaccgcgtggtccttttttttttttgtggtttcccgctttcgtaaatttataatttttggccacgcgtcacgaggaatttaagtttacgcgctccttttcgaaatccgggctttcaaatctaaaaaaaaaatctaggggtgtggtagtggtggtcacggactcctatgagagtgtgtgaaaacgtaagtggaataaattatttttaaaaattatatttgaaagtaattagtgaaagtttttatgttttatcctaaaatgtcaaaagcgcgtattattacctcataatctcatagtaatatacagctggaattaatttatttagctgaaaatataattagtgtaattcctatttagactaattaatttttttttttaggcttttatgtttattctggaatctttttctttctcttattttaataccttttttgttttcggtggagtgtgaattgtgctgtatgaattattagtatggtaagaatattaaagtaaatttgttctagaagctttcttttttggcttaattttgaatcttttttggcaatcatcaattagagtcgttactaattgtgtaaagacattattatggtactgttactaatgataatgataaaataataataatcacctctacaataagttataattatttatatattcataatttttttttctctttttcccttaagaatgttaggaaagaactgccaaacgggttaaatacgataacgtaatttaaaatcatgacaaaattaacgagtttgagtttgtcttaaataaatttggatcatccctcttatccgtttactatacggatcatgtttgagttcaagtaccacgaaactaactcatatat

SEQ ID NO: 201546 - DNA, 1189 bp, Cannabis indica
taaagatgtcattaagaaggatagaatggaaagcatagtagtatttctttcatattgttttgcaagtttgaaaagatggaacaatagtttttatactttcatattattattttatctttaattattatcttttttaacttattttctaagttcttagtttatttataaaataaaatttgtaaaaatattttataaaatttagtgtgtaattaattaaaaatttggaaaaaaaaaaaaaacaactctctctattttagtgtataactaattaaaatttaaaaaaatttacataaaaaattcaaaaattactgttgagaaactcattgcttaaagttctaaagatccattaataggagtagagtagatgaccaaaaaaaggtaaagaaaaacaatctatggtgaaagataatgatttaatgaaaattttgtttaacagtcaacaaaacatgacaggcgtcttatgaagaagaaattgaagtgaaaacagtagaggtgttcatccgatccaatccgcatttttttagtaaaacaacacccaattcgcactaagtgcggatttcatattttggatccaattcgatccgcataacagtttaaatccaatccaatccgcaatagtgcagattggatcggttatttttttaataataaattatttaatatattatagaaaacaattaaaaaaaaaaactattgtttcttaatttctaataataattcatttccatctccatttacatataaatcaaaccaatatacatatatgttaatgaaagaggtttcaatggttacatcaaatatgtaaccatcatggttacatttatttttagtcattgaattaataatgaatggttttgattaatttagaaattaaaataaataaataaataaataacttgtaacttgatagtaacctaaaaatttatttccttataaaatcttaattaaaattaattatatttaaaattaaattattaataattattaattaattttttacaatttattactaaacaagaatcttttagaaattaacttttttagacttaaattattaaaatatttataataaatccattataatttaaaattattacacccataaccttaattcataaaaaattattgatcactattggttattgatcttgaatatatatcattgaaaggtttaaaagttactaactgt

SEQ ID NO: 201547 - DNA, 1018 bp, Cannabis indica
aataattattaaaattaaattatatgattggataattaaatatacacaggatatgatatttagaagtattgcaagcaatgtctaattaaataaagttaaagtaactgatagacgatgcaaacgtagttttgaaaaaagagaaaggaaaagagttaataataattgtgttcgttaagattatgatttgttcagttattttgagttggtgttgtaaagtaaagtttttcaaaatgacaaatcttactacaaatagtagcataatatatgtatgggcttttacataggaaaaagcccaattaggtattattaggtagtggattcagttgggttaggcaaacagtccctctctctcgccagtactcagaatttgggccacaccacaccagagatccaaaatatcaaccactaaggcagccaccaccaccagcttcgttttcacaaataagaacagaattctagtgaagtggacgcgaagaaacgaagctcccaaatatattataaccttattatataaatatatatatataataatgttctctctcttcactgtcagtaccactagtttcaatcaccaagtaactacaaataataccaaacactactactactatatacgtctttaattgtttgcttcctaattcttaatcctaacttctcatatttcaaatcccacatatatatatatatatcttactgtacattttctcatcaggaaaatcgatcgatggagagtgagagaagacgagttatgaggaatagagcagagattgatacaacggcaccgtttcggtctgtcaaagaggccgtttcgttgttcggagaaaggttttagcaggggagctctatagtaccaccaagctcaaagaggtaatataatagttattcttataatttatgttttattataattgatgacattgtcttcacatgattacaactacaattttgttttaaaggattacataaattctatttgttctgattcatttttcttttttcactttgtcttggtttgaag

SEQ ID NO: 201548 - DNA, 1156 bp, Cannabis indica
attctttaatattcaatgatatccttgtttgattatgattgtaactcaaaaagaaatataaaaaagttgtaacaatccttcactttgttggatccaattcttccaccttgttgaatcgccatctcgccttaattactaaattaatataatattatctgctttgatcttaaagtccttacgattttattttacacaccttttaaaaagatttcatactaatagtataggtagaatacttatatttaagacaactcttgtttattgttctgataatatttcaaaactaatgtgatttaggaaatgatattcactaaccaataattttgtcaacaaaaaaagaagaagaatatggaatatacatttgaaggtcctattgggaaggtaagatttttctatataataataattttttttttcacaattttggggcatgagcgattgcgggttcaaggagtacgtttggcttgcctacctttaggctcggccctagatttttcttttaatttttaaatagaatagttattttactaaaataatagaaaagttcaatactttcaaatataactaaataaataaattaagtaataagtggtttcctttcattagtcaaaatatctactcatcctaaataagatatgtatgagtaggtaatatcaatgaacttccaaatagttaaatattgagttttttattcattgacataaacggctagtagttttgtagtagctactcacgattttgagattaattttgtaaggattatttcactaaaacataaaaacaacaaaaaaaattataaaaatacggtttcacggaattttaaacatttttacgatttttttgattttatttacagaaaatacggtttttttatgttgtaatcttattaatttattgttgattttttgttatctgtgtgttattttttgttgttattttcatgttacttttatgtagttttttttgatgatttcatgttatttttgtgttatttttggaaaaccgtaaaaatataaaaaaaatattttttgaatgtaaaaatgtaattattttataaaaaataacgtcttatgtaattattcctaatttgtattatataatatctaatggtgtggttataatatccttatttagagatagagtttcatttttgcca

SEQ ID NO: 201549 - DNA, 916 bp, Cannabis indica
cttctctttctacctttttttttcactaatatttaggcttgtaaaggtatatttgtgacaccttttgctttccttatccttcacaaacttctaactaaagttatgctaacataaaagatttaacagagaaaaaagggttctcatgtgtgcatgaaagatataaagtggtccatagttctaaccatgtgattagttcctacattagctcttagctttgatatagtttctcccaaatactcatttataatgaaaaagaaatatgaaaaaagtaaatctttcagaatctcaaaatgatgtgagttgaacttagtggagcaatttagacatgagattttatggatgcagcgtatatagctcaagatattatattagaggaattagctaaaccaaaaacttggaaaaagaagagaaaataaagttagatattgaaaaagcatgcattataattgtttaattttattactaattaattaatatttatttttatatataagtaatggaagatttgaatgattgaattgggccagaagaattgcacatcaattcacaaatttaaatatgatgttgagttgttgacaagttggaagttcttaaaattagaataaaaaaaagtatgacatctaaactataataatggataggttatgtgagttttgttttttcaattattgtttcttgaataccacaagttttttgcttcattttttaggataaaaaacaaacatgacatagacttattcatcacaactaaatcaagaaaacaccaaagggaaaatacatatattttttaagtatatatttcttaatattatttttaaattgaaaaatacaatgttcatgcacccccacttgatatgcaattattatcactcctacatattttccattatgacagttgtgagaaactcatgaatag

SEQ ID NO: 201550 - DNA, 624 bp, Cannabis indica
atatatatatatatatttcattatcttttctctctattcaatccctaacacacaaactcaaaaagtagcagcagccacaatttctccaaaaaaagaaaaaatccagtgcccattgcccagcccagccatgagtgaaccactgaactccatacctagcgtcagttgtgcgcccacccaggcgccaccagtcgtgcggctagcccaggccgccaccaaccgtgcgcccagccttgtccgccaccagccgtgcgcccagaagttgtgcgcgaatctgaaggttagtttgattttttataacaatgaagaatggtgatgagtgtgattttagagaacaagatttttttttctgtgaatgtggtctaggtcatgtatgtatgtatgttcttctaaccgattgtgattatttctacgaacaagatttttttttctgctgtgaatgtctccaaatatatttttgttgtacaagagtcaatattttgcacaaaaaactctgatgaaacacccgagtgtgattttactacttgcgtgacctttctagttgcacatttcattaatatatagattttcaagccgctcgtgataatttaaggcttctgatgtatattttgtttttttcttaaaaaa

SEQ ID NO: 201551 - DNA, 682 bp, Cannabis indica
cattccgtgaaagtacaatcataagacaaaatcgtgtccttataaatttaatccatgataaatattatgttatatttgatacaacatttacattactataaatacattatttatttatttacttttatgttgtttttattatttatttatttattagtatattattttaataaaaaaattatttaaacattaaattttaggtcaaattttataattatacattgaattagaatgctaaaaattgaaacatcgcaaaaattacttttttactaaatataaacaattgatagcctaccaatgctatgctatgctaatatattagtagtatagtaattgaaaaagaagttccactaatattaataagcaatattaatattaattttcagtggccgacaacgtgtagtcgtagattaattaagttataaaaataaattgtagaaggttgagagaaataaattaaatgtggcttctagacttccaatataagttatcacatatatatatgcattcttcatagatatattactagcgtggtgggggtacgtgggtaagagtggattcaatctaacattttttttattattatttttaacatctaatttaatattggattgaattgattcgattcaatttgattggatgttacccacccgatatattcatcttaaatgttatatataaa

SEQ ID NO: 201552 - DNA, 984 bp, Cannabis indica
gaaatcttaataggaatttggtgttgtagagttgctaccatatttgtcattaccaaccgaatctggtgaaagcgggggaggcaagttcttcaaaagcccgatatcatcagatctaatgtccacaacttctgccctttgtattacaaacgcttcattcttgattgctttcagagcagccacaacttcatccatggatggcctcatatctttgtcctgctgcaaacaccgaaaggccaattctgccactgctgttgtcattttccttacggtgaagtctttgtcgaacccgagtgaaggatcaatcaactcattcactgcatgattttgaatccttgtaatagccatgctagccaaattgatatcatgcctgtgtcggttggtgtccactgcttgtaatgatgaaataagctcagccaacacaactccaaagctatagacatcactcttgtctgttagttggtagcattggtagtattcagggtcaacatagccaggagtaccttgtggagcagttgagacatgagtcacatcagtggggaacaatcttgagagaccaaaatcggccactttcactcggaattcgttgtcgaggagaatgttgttggttttaacatcgcggtgtataatgtctgagcgatggaggtaggctagagcatcggctgtctctatggctacgctaagccgaactggccaactcatcacactagatgttgattgtttcccatgaagatgatcagcaactgtaccatttgggataaattcgtaaaccaagaggagttctctgcttcgtcttgaggtgcatccgtacaacttcacaaggttcttgtgttctaaacgagtcaggatctcaacttcattcatgaactgctctacacgcttgaaattgttttcataaaggcgctttaccgcaacctcacggccatcaccgagctttcctgtaaaaattgaaaaactctacaagattaattaaaaaaaaaaaaaaaa

SEQ ID NO: 201553 - DNA, 1106 bp, Cannabis indica
ttaattaacttcctctcattttgtagcttggatggatttacttaagtatctctcattgttcttgacttgtcacaatgcaaaaattatgattttatatggttaaaatctactattttgttggaccacacaaaattgactatacaaacttccaacttcatatttcatcttccttatgatgatcagttgaagccaaaatcaagaggttttgtcaatgtcagtcatgggtcattgttggtttttaaccatgtgaaaaattacaaaggtagtttttgacttgaggcatatgcatgtattcaattatacatttaatgcaaggttgatatttttgtgtcttgtttatttgttcattccactatcacaaaatatttcaaaagtgaagagtgaaactctaaatagaaaaatagagagaatatatgttagagagagagaaaaagagagttcttacaaaattgtgagaaatattttataaaaatggtgaaactacaacactagtaagtgagggttttgagtgtattcctcaaataattgacaaaatttgagaatataatattatgtgcccattattatcatagtggaaaatttagggtggtttttatttttcacatgatcattttttagtgtgaaagatttaccgtggtttttattgtcacaggtttatctgtaatttttattgtgtttatctcttttctcaaattctcatggtatgctttgtattgttacgacagcatgtaacaaaaaactaaaactgagagggaagcaaaattatatatgctgaataaggaagattgttttattgcaggatattagaagaaaatttattacaagttatataaatacttagtagttaaatgagaagaagattatatcttaattaggatatatataaaaccaaatcattaactagtttttactgtcttggagcaaagaactgagtttaatttggttttatatatcacctaattaatatattatcttcttttatttcaagctataattgaaggtcttgtaccaaataaattaattggatttttttttatatgaaatcatttatgttttttaatatataatagtaaaaatcttaaatttagtattttgaaaatataatt

SEQ ID NO: 201554 - DNA, 1560 bp, Cannabis indica
aaatgttctatcaatgctcttctacattgcatgtttaattaaaatttacaaaatatcttgtgttatttggcaacttatgtgtctctagcatcttatttaccaccgattactgatgtttataactattatttaaactaaaatatgtaaaaattgcactaatagtaataatactggtttttaaaatctcagcaaaaaaaaaaatactagtttttaaaaaagaaaaatatttgtaaaaaataaaagaaagggaaagtggggacagaggggtaagtatgagatcacgtgatgacttgtcattttttttaacattttatttgtctttcaatagttggaaatggaatagacttttctaattgagctggtaaagaagtaggtaaatggaacatgggcattctggatctcgatagatatgaaaaaaaaaatcaattaaataacaaagtagctcaaatagtgtaatagtacttgttttctgattttttttgtttataaaaattcatcttaaactataaataattgcaagtataccccttcagtcatattctgattatttatttaaataatttattaattaaaacactcttgtgacactattctcacataatttaagaatacttaaaaaaaaattgtataattaacaatctatttataagttataagaatatatatatgcatatttatagaataatgtttataagtttaatgtcaataaaataaattataagtagcttaaaattgttatataaattcttgtactataattatatgtttttacctatgactcatagttatataaataaattatttcaaaaaaagaaaacaaagagaatataattggaggaaaatatttatatttatttttataatttaggagattttgttttttttttaaaaaaagggttcctatttcaaaaaaaaggtccaggaaaaaatttcttacttactctatattttttaattaattatttatgacggatgaaatctaccctttaaaaagatattgatataatattaagtgggcttttatccacaagaggtgtagttgtattcttctttctactattcctgtaaatctaatttataatgaccgcgaagtctaactatgatgctatctgatataattcacgatttatttcaaaaaaaatatatattttatggacgcatatcattatatcattgtttcatttgtttatcactattattattgaaataatttagcatcatacaaaataatataatatagttaattattatatttaatacacaaaataatgtatgataatattttatatgatttttttaacaaaagaagtatcaaaacttaacttacttttgcatttcagtaccaattataaaatttgatttttgacctgcgtgtcagtatatttttttttgaacaataagagaattctttattcaaacaaacaacaatagcaacaacaaaaacagtctagccaaggaactaagccgaagccccagccctcacggccaactagcaattacattgagaatatatctatcacgcttcctttttccccctactacaaccatttagacacctgg

SEQ ID NO: 201555 - DNA, 790 bp, Cannabis indica
ctctttctctgtctttcttacttgactcccacacaaaccaaaagaatcaacccaaccaaccttcaagttttctggtttttagcaaggaactaaggtatttccaaggggtggtaagccctagtattctaatccttagtaattcaagctttaggtttagttctagcatgcaattttgtgagttaggggctgttagtgttagaattgatggtggttttgtttttgggttcatttttagttaaaatgtattaattgtagcttgttttggtgatttgagtggtgaatgagcaagtttgagtttgaaaaactcaaagttgggtcattaatgccatttttggattctgtgtatttttcttgttgttattgctaggaaaatgttgtttgaggttggtaaatgtgatctggaaggtttgatttgatttggacgcgaattgggcaagttttggacttatttggattacttggtgcaaactggttagtcggatcaggggcaggattcccaaaaactccatttatcaatttgtgttatttttttcagacccttagtttgttgtttactcaataattaggttatggccaagttagttatcgatagtgaaacttattgttgtgagtttacgtatctggataggttttggcctgttatttacccatttacgtcattgtgacatagggcatccatcaagcacgtgatttttcgttcaggtcggccagcacacttaaattcagaaacgaggtaacactagaatagagcatattttatatgaatatgtgtatatgtgataaatgcatg

SEQ ID NO: 201556 - DNA, 695 bp, Cannabis indica
atctgaagaacgttggccttcttccttcacatattatcaattccttaaaatattatccatgggtctaggtaattaactaaattcattataatataccttcacatgatcttatattattttcgtataaaaatttattggtatttaatggtttcgtgttgtgagaattatattggtgcaattgatggaacacatgtgttcctaaagataagcaagtcagctacagagatcgtaaaggtgtagtaacacaaaatgtcttgtgtgcttttaatttttacatattttttactttgtatctgccaattgggaaggtaccgcaaataattcgatggtatttatagatgaaattactaaaactgaatataagttttcattgtccaaagaaggttttgaaagcttaatattgtttttttatattatgtgatgatgcatatactaattattatttttggcatattaggtgaatattatttatggattttggattctcatgtacaaaaagttttcttcaattatatcgtggcgaaagatatcacttgcaagaatatactaatagaggtaatccaccttgttgtaagaatgaactgttcaattttaggcattcttcactaagaaatgtaattgagcgatgttttagtgtgttgacagtacgttttgctatactaaagatgatgtcacgttacaaattgagtcgacaa

SEQ ID NO: 201557 - DNA, 943 bp, Cannabis indica
cacatcatgctcaaccacatacctccacagtaaattgcagttttctcctcatttagaaagagagccggcgattgagagaagagctcaaaaccttgcagcatgtagtagatagacttgaaatcaccattacaaaaaagaagtatatcatttaccaaacccaagtgatttagactcatctccacacatctatcatgatatttgaaattcttcatttgcgcaacctcttcataacacgagataaatattccatgcctagaacaaaaagaagcggtgaaattggatctttctgtctcaatcctctttgtgctttgaaaaaaccatgcatttctccattagacattaaagagaatcgaggtgttctaacacaattcatgatgagcttaataaagcactcagaaaaggaaagtgccttaagcatttttttccaggaaatctcattctaccgtatcataagctttcctaaggtcgagtttaatcatacaatttggtctacaattttccttccataatgcttaaccaagtcctgacaaatcataaagttgtatgctatgaatcttccatgtacaaattcatcctgattttgagcaattagatgaggaagaatcaatttgagccgagagcataccaacttggttatcactttatatactactttataacacgcaataggcatgtaatcactgacgactttaggatatttgttctttgacactagagttatcagtgttgagttaatttcctttaagatgttacccgaatgtagaaaagttagcactgattcacttaaacttgacccgacagtgtcttgacaatcttgatagaaaaaactaccgtaaccatctggcctcgacgctttatccctggaattgaaaacacaaccctcttcacatcatcaacggaatagggagctaataaagatgtcttagttatctaaaataattat

SEQ ID NO: 201558 - DNA, 1723 bp, Cannabis indica
tctgatcatttttgttatataaatagaatttattacaagaaaaccaacgacatcatggaatcagctttattatcacaaatacacaataatataatgtccaccgaagaatgctttccaactatatatgctactttaattatcactctaaaatttaaattaatgtcttattgttaatcacaacaccaacttatagtatcctattattttaaaagtgtgactactgaccttatttataattaacaccctatagaagcaactcatgatgaaaatgaaagttcaagaaagcgaatgttatatatagtgcaaattaatgacatttcttaattaattatgcagccagctaaaacagattaaaagactaatccactatcttctataaataataaattatggaagttaaagacatgaagttaatgtggaaaagtggtagataatatccgtaaacatacatcacactcaaactttcttggtcttcttgatagcattacaagaattaccagtaagcaaattaagagaggactgagactcttttacacacacagctttaccaagtgaagttacagaaataacacaattagttacaagtgtttttttggtaacagattgttcttagaaatttattgaggtcacaattgtatatataaaatgtgtgttgtcttcaaataaataagtcaaatttatgtggtctattttgaaataaagtttatgacttaaaggcatgattgttatgattttaatatgtggataccaattggataatttcttatttgatgagggattaaattagaattagttaataaatattactaactgttttggcagttggtaatataacgggtaatggtctccatttttgcatcgtatcgtttttagattcctgaatccccatcatcaggaaaataaggtttcagagaaattttgatgcaaaaattagaagatcataccattcaaaatcgattctacggactctagtagatttacgctaatctataattctattgttggattctcatgaattaattagggctgaattcaaaagtacagtatcattacaatttctgccaagaaacatacaaaaatgtaattagttgatcttttttagtcatttcgagttttgtagccaaatctgcatctggaaaaacttccaaagattaagacagaagccgattcgaaaagcaaactagcttatgcggctttgacagattcagaagcctgcaacaccagagttatagctattaatttgaaaggcattgacaagtaggagtagagatcaatcaaacaagcatgaggacatttgcgacctcatacaacctttcccacaatacatcttagacatgttatgaccagtaactataaatatatgttacataacagatagagtagagattaaccttgagatgaaataagcatgagtagggcactgccttccctactccactcatcttctcttaaattctctagttagtgaattacattacaattatattaatgaccaggaagtaacaataatgacacccttttatacacagcttaagtttcatcataagtgtttatttggtggtgactgagttgttgcattcttcaactcaatccaattagtcctcattcagaagcattaattccactactcaaccctgcaaaaacagagttatagcttttacatatttataatatatcttataacactgtcacagtacaaagtatcatatgtagtatatcttct

SEQ ID NO: 201559 - DNA, 892 bp, Cannabis indica
ttcatttatggttagttggagagaagagagtcccaataatatatattgaagtaaggaccttttttcttctagtgtgaataaaaggataagcttttttgtattcatattggattttgttacggaagtttgcacatggctctagtaaatgcagtgtctccttgtctcccttttagagagagagagagagagagaaggttaggtggggtggtgaatggttatggatttaggcaagacattattcaagtcaagttgttaaaaatataagccttgtcaatctttgatggttttcatgcatgtatattatttttgtattatgaaaatctcactgtccaaagtaatcaaaacacattgaaaagtgcaagatttttttaaattaaaatgagaaaacgagtcataattttttattgattttatgatacttgctaagatagtgtgttgaaacatgtctaaaaaattagtttataccatataatatatgctccttaattttagaatatctttcctattttcctatttttattttatttgtttctttaactttcatctggaaaaaaaaaatccaagtttcttaacatgtttccttattttaaggagaagataatggaagtaaattgatgattatggaaaatatttataaaataatattattactaattttgtgaaaataataccaatactagactatatacttaactagtgaaaatgcttgttgtcataaatttatttaacaagaaattctcaaccaacatataacttgttttttcttgctttttaaaaaaataaataaacatcttgttttctcttagtagaatatacaatgacttatgaaatataaatcataccaaccaatttggattacaagagcaagaatcaataaaacaaaacaaaaaaa

SEQ ID NO: 201560 - DNA, 886 bp, Cannabis indica
cgatgttattactaggacttaaattatgtgctcacaatttttgtatgagtttcaccaattgataattcagaaaaatgctcatgacaccaatcaaaacaccatgtaatccaatgtgtcctatataatttaagaatttttgcttcctaaacttattatgcttcatcaactttttttgctgttaaaaaatttccctaaactattgagatggttagatttaaggatttttgtccaatttcatttaattttacaaattgagtgattgtttatgtactaaattctttctagactttgatatctatcaaattatacctcttgaactttgatttgtaccaaattgtgcttcctgaactttcatttatgttagactcaaaaattcttaaatcttacaatctctatagttctcaatagttcacgggagatttttaacgaccttaaaagttcaggatatgatttgttacatttcaaagttcgagaagtaaaaatctttaactagctataatttaatgtaagaatttttgtggagtatcactaatcaatcacaatgcgccatatctagcaccactagtgcctaataacaatattctaacattccaaagtagaaagaaaaataggaaataagttttcccagttgagcaatgttgtccaaaaacatagtttgaattcctaaaagtaggatagcaaaaacaaaattaatgttctaataggaaaacagcaataccttatggtagaaatgaaatctacttgatcttcttctttggcctcaaacagtcatagtgtaaacagtcatttgcatttcatatacccccaattcagatgcaaacatgaattgtttcaaagcaggattacataacactattgtgctattattactaggacttaaaatata

SEQ ID NO: 201561 - DNA, 1766 bp, Cannabis indica
cacaagagaaatagttcattcaataactcaattcaggttctcaagttttttatagctataacattaatcatcacaaagtatcaacccaatagcacacaagaccatttcacataataataattacaacaacaacacacacacaatatagttcattcaaaattcattgtgagaattcatggaaaaattgtgaagaaacaaaatatatacatacataatctttattttactttattttttaataaatatcagatatgaatcaattctctcattcaatatagcttgagagaataaacccactagcagaatcaattaataattagaacccaattctatttcatatcatagaacaagattgactaaaaaagacacataaaaaaaatctgagtattgaacaaaataaagaagaaataaagcttaacaataacaaacctatggacccaatttttggtccattttcacttcatttcattttggcctcagtgaacagaacatgacgattcactcgagggtcaaatttcctaaactcaagcttttccaccattctcgatggcttcttcttcacatagaaaaacccagttccagcagctgaaacaagtcgaatgaagatcgtagctttcttcttcttgtcacccatttttttcaatctgaaaacccacccccaaaataaaaattaaatcaaaatcttagtacaagaatttgagaaaaagaatagaatcctatagtactgatcttggtctgaaagagttgtttgagtttgggatttagggtttagagtttactactgggttttttagccctattaggcaaacaaaaattgacaatgagctaaattaacgacaaatacattaaaaaacgacaattcgggtcaaaacgacacaattgaataatgagggcaatattgttaagccaaaatgggcagtttgatcacaaaccaaaaagagatgcctactatttgttgtgattaaatatatcacgaaaaaaatactaaacagaggaaaaaatgtgaaagaagaaaactaataatagtcataaattttggactaatgaataagatttttacatctgaataataatacttatagaattttactccttaaattatttatttttaagaaatttttctcaaaataactaaaaatttatccattacataaaaaaaaataaaactacacccttcttcacttacatttttgatatttttgtaaatggttttctaagattgatttaagacaaatctactataattcaagagcccataagagaattatttttatagacagtactctattaataaaatttagaactaagtattcataattgggatgtttcactaatacacgaaaacaaaaaaaaaaattacaaaaatacagtttcgcagaattacatttttactattttttgattttatttacaaaaaatacggtctttttatgttgtactcttgttaagttattgttaattttttgttatttgcaagttactttttattgttattttcatgttacttttatgtaattttcttgttattttcgtgttatttttatgaagtaaaaatgtaaaaaaaaatctttaagcgtaaaactgtttttttttggtgtcttatccaattatcccttcataattttgaagttaataatgaatattaaagcttattacatttagtttaatttaattaaataagattgtaattatatatgtggtttgttgccataataataaattatctcaaaaaattccaattattttgacgaggaaaattttgtaca

SEQ ID NO: 201562 - DNA, 966 bp, Cannabis indica
gggtttcttcctaacgacgtatcgggcataggtaggcgtcagtgacatatgatgagtaccgagcgtaggtacgagctcacctgattaggtgatgcgattttcctggcaacgtatcgagcataggtacgggtgtcagtgatatgaaaatgcatgattatggcataaatcaaacagtctgttgcacacgatacttttattttattctcgtgtgaaatagcctgtttaaactctattttttaaaaaaattcaaaattttacagcatgttttaaataataacaatttaaataattatgaaaagaattttaaacaaataaagatatattactaaaacttttttaaaagagtagtgcattataaaaatttttctatattaattaatttgcttttcaaaacttgacaacattcaacataatttcgtaaaagtagtaagatatattggctataataatgaaaatgtttccttaatttggattgtgttgaaagtaactattcccttattctaatgactaatcttccaaacatttacctactccaaagcttttagtaattaaacccatcagcggacccatagaggcggccaggggagcagtggctcctgaaaaataataaaaataaaagttagaaaatatataggatttttttcataaatatataaaatttttaattattagaacatatatttataattaaatatgatatttattaataaaatactaatttttctttaatagttaagctaacttacacataaaataaaggtcaagattaaaattattgaataaattaatactaattttggtggtgattaaatttttaaaaagaaaataaaaaacaaagaagtcaaggttaaaatagcttttctttacaaaaaaaaaaaaaaaatagctttttaatttttaaatatttaaagtttatttttaaaaaggatagttctagaatttgaatcctactaataaaatttatat

SEQ ID NO: 201563 - DNA, 954 bp, Cannabis indica
aaaaaaaaaaaaaatatattattgatgtggatgagattttttctgggctataattaaagagcaagaaaaatatttataagccagtgcactttatgaaaattaatataaacatttataaaatttaatgatactgcgatctattgacacgtacaaaatattgcctgttacaaataaaatttactagttctttaggattggtttggtacggtagtattatattaaataataaataacagattaagttatgtattgtattaattattataattaaaatttttaatacaatagatgttgtattatttaatttataataaattgtgtataatatttacaaataattcgtggtcaacaccaatattcgatctggacctgagacttgaacccgaacctaaatctaagatttggacccgaaccggaacccaaacctaggacctggacccaggacctaggacccagaccacagacccagacatgggactcagacccagaccccagactaatacccgagacccagactcagacctggacccaaactcggactcgagacccaaacctagacccatactcgggacctaggacccagactcgggacttgtactcacacttggacccgggacccgaacccggaatcgggacccaaacctaaacctggacccgggacccagacccagacccgggacttaaacccagacctaggatccaaatctagacccggactcgtgacccgaacctggacccagacccgcgacctgaaccctagacccgagacccagacccgtagttgatgttgggatcgagtgtattaaaagtataatataactttacacaatctattaaatacaagtcaatatcaaatatagcattgtattaaataatacaacacaatctaatacaatacggcgtaccaaactagctctaaaataatgtatttagccacgtgtttattctccattt

SEQ ID NO: 201564 - DNA, 671 bp, Cannabis indica
ggcttagactctacaccatggatgttttcaacataaccaaaatctacgcaaccattagcacctcccccaaaaatgggagaccaaattctttcgtctaaaaagaatcctagatgaagaagaacaacttaaaagaaaaagaaacaagaaaatcaaggccaatgcaatactcaactcatggtcaaaaggagaaatgacattacaaacatcaccatcagcactgtctaaataatctcccatatatcaatctcaacaaagatatagaaaattcagatgatgacgatctgtcatcatcgtccagccaatctaatgactgagaaactgatgaccaaagcagaagtgatgatgaagcaattctgccacaattcatgaaaactaaccaaacaacaacaaccaattgaaactaatgggtataaaatcacatgactgttatgtgttaatgcaacatctacttacgatttccattagatcagtcttgccaaaaaatattcaagattatttgacacatgcttgcattttcttttttaaattatgctggaaagaattagaaattgataaattatatgcattacatgaacatgtagtcaaaacattgtgcaacctcaaaaagttttttctgccatcttttttcaatatcatgatacttttaaaggttcatctaatgagagaagcaa

SEQ ID NO: 201565 - DNA, 1751 bp, Cannabis indica
aggaaagaatggagaagaagcagcgaagacgatagaaatggagaatgagaatgtgaagaaggccatagtgattttggtagggagtcctacacctagggacattaactgtgagagggtttggatttgggttaatgaaaatggcattgttgttgaaattccaagacttggttaattcatttcattaatattattacattatgtaatatttgcaaaataataattatatctaataataagttgttctaacaacaataaataattaataaaaatggaacttgattctgttattaattaaatattatcatcaataaaattattgttattattattaataattgcaaacgattgtgaccttgtcatcatgtatatgaacaaccttttcaagttaagcattaaacaagaactagtaaattggaaaactttacaattagggttaagtttatttaaccctaataatcttatattataaattttgtataattattgttttactataaaatatattaattatatgagcattgttagtgggcagcagtagtacttaacaccatttacaagtatcgtcttatgattgattatagcgatattttataaaagttattaaatcaattatatataatttcatatgtaattatatcagtaatatgacacctaagaaagtgtcatcaggtcgaccctagatatataggcgggttaggcctgtgcttaaggtccatccaacctagcggccgcaaaaaaattatccccttttaaaaatacatgaggcaacagtttgtatgtctttatctcgcataagacattatagtcattgagttacaagtatattgtcctctactgaaatggtagccgaattttgggtataacagacataatacaatttgtattttttaaaagttattgattagatcttctattttgataaatgacagattggacattgtatattttaaaatagtactaaatagtaccttgaactaattttctatcaaaataaaacttaataataactcgatttagaggtattattataaaactagttacgtttactgtgttaggaattgtcttcaagttgattatatattaaaaaaaattgtcaaaaattgaactcaatatcctatttatactattttagaaaaatacatgttaattttatcatttaataaaatagaaaatttaatttataacttttgcaaaacacagtatacaaaataatattaatcttatttataattttacaagcttttcaaaatagaggcttgattgacacgacgcacatgtattaagccatgagatgatctaatagatagctttatatttttccaaaaataacatgaaagtcatcaacgttgaagtttgagaaattgataataaagttatagtacattacgtacaagtaatctgtatattgttcgatttacacaatttctagaaatattttaaacttaaatatgaattatatataaatataaatgcaaaggtcaacattaataataaagatagaataatctaaaattaatagcatttattaaattttttgaaaattaaattaaaaaaaaagcttaagagactaaataagtaattaagtagatggagattttatataggttgggtgttaacaaaccttactctacgaatcaatatatgagctaaacggtttgatgtattacaagtgggtcttataagttgaagaactctaatctttgatttttctaacttaaaagaagaaaaaattaggggtgttcaacaaaatt

SEQ ID NO: 201566 - DNA, 1356 bp, Cannabis indica
cttgtatgagtcaagtattgcaaaccaccaattaaactcctatactctgtcgggttttggagaaaatttccatctgtaatggacaaggttttaccaagagacataggagtaggacatggcttcaagtgtatcatgttaatcttctttagtaactctgttatgtacttggcttgagatagagacatccctgtgtcatccctgtatacttcaatgccaaggatataattaagtgatcccagatccttcaaggcaaaagccatattcaatttgttgatgaactgctgcaatttttctgagttattaccagtgatgattatatcatctacgtagataagcacaagcaaaacttcactcactgtcttgtagaaaaacaatgatgaatcagccttagagttaacaaaattccaacttagcagtgtctgttttagcttatcgaaccaagctctcggtgcctgtctcagcccgtataaactcttagtgagtttacgcacataatcaggatgaactttgtcttcgaaaccaggttgcgggttcatgtaaacatcctcattcagagtgccattcaagaacgcgttgtttatatcgagttgcctaacctcccaagattttgctacagcaatggtgagcacaattcgaatggtgcaagccttcacaactggactaaacgtttcaccatagtcgacatcaggcctttgattaaagccttttgcgactaacctcgctttaaatctctaaaaactgccatcagcattcaattttactctataaacccatttgttatcaacaatatacacaccaggcagccttggaactaatatcctagttttgttcttcagcagtgctttgttttcagcactcatggcaccattgcatccttcgtgttttaaggcttccttgagagagatgggttcagcataatagtcactaaactgagctttactcaagtaagttttgggcttaaaaatcccagctttcgctcttgttatcatcggatgagttggaataatttgagttgactgttggctgtcaggtgctgcactagaccgagcttcagtggcttgagcattaactgcaaacggttcttcatatggttcaatagcagcatttatttcaccttgatcaaagttgtgttcagaattctgatctgtagaagaagttacagactgagatgatgctccaggttcttttaaatcgggatctttatcagtttgagggctgatgttttgctgcggctgatcatgagaaaaattagatgaggcatttatgaatgctgaccatgggggaatttggacactaaaactttgttttgctcagtgtttagaaaacaaatttcgaagggaaactcagcttcattaa

SEQ ID NO: 201567 - DNA, 1707 bp, Cannabis indica
aaacttctgtctatctcataaactgactacctacacctgttctcaagaacaaatctcccatagaggttttgttcaacaagaaaccagactataaattcttaaaaagctttggctgtagctgctacccgtgcctaagaccataccaaactcacaaatttcaatatcattcaacaaaatgtgtcaacttagggtatagtgagagctacaaaggttacaaatgcttgagtagcacagggagactctacatctccaggaatgtaatcttcaatgaagatgaattccctttcaaaaccggttttctcaacactcatcaatctgaacaacctgttcaagtctcagttcctagctggagtacagttctcccactggccattaattctcaagaaaaatcctccaacacctcagaccatcttgaagcaactgctggagaaccaccatctgctcattttcctttacctgacagcaatcaggatgtaaactcaccaaactctctggtttatgatgatactgctcatatgcaaggggacacacatgaagctgagactccagaacctgccactacaacaccagaaatacatgctgctgtcattgatgttcctgtcaacccgattatgcctacacatcctatgacaacaagagggaaggcaggaatttttaaactgaaagtgtatttaggtgctgctaaacaggtttattcttttgcagaaccaactagtgtctctgaagctctagctcatccaaggtggaaaaatgcatggatgaagaaattatagcacttgtcaagaataaaacctggaaagtcgtcccttatctttctggtatgaacgtaattgataacaaatgggtgtataaagaaaagagaaatgccgatggaagttttcagagactcaaagctcgtcttgtggcaaaaggtttcacccaaagaccgggcatcgactttggggaaaccttcagccctgttgtcaaagcctccacagttcgaatcattctcactatagcagtttccaagggatggaatatcagacaactcgatataaataacgcctttttgaatggacagttagaagagcaagtttttatgaaacaaccagagggttttgtcgatccatccaagccaaatcatgtctgtctactcactaaatctctctatgggctaaggcaagcgcctcgtgcatggttcgagaagctgaaaacaacacttgtcagttggaaattcatgaattctcgagcagattcttccctgtattggtattcaaatgctgttgatatcatcctcgtcctaatctatgtcgatgatattatcatcacagggaacaactttcccaaactcaagcagtttgccaccaaacttaatcaaagatttgccctgaaagatcttggagagttgaactatttccttggaattgaagtatatcgagacgacacaggtatttatctcagccagtcaaagtatattcgtgagctgttggagaaaactaatatgctgcatctcaaaccttgttcaactccaatgactgtgggaaaaactttttctatttctgatggtgaattgcttgataatccaaccgagtatagaagtcttattggagccttgcaatatctaacaaacactagacctgatctgagtttctctgttaataaactcagtccatttcttaaggcacctacaactgcacattggtgcgctgcaaaaaggatacttaggta

SEQ ID NO: 201568 - DNA, 734 bp, Cannabis indica
gcaatgaaagaagataagctcttgttggtttctctacctctggtctgttcttctctcaccacctctactcaaataaattaatctattgaatttgattagtaaaaaatttctggggtttctattaaatgccttttatattttttatttttcaaatttttgatctaaaaaaaatcatcagcccttccatatctcatacctaacatttcccactaactttcaagtttcaatattttttctttttaaaaaaaaatacagtacaccattattttggggttggtagaaatattaaaaagattaaaaatggttttaattaaaaactaaagaaaattgtagtttaagctgaaagttatttttctttttgttttatatatttatgagattaattataatttatagtttttctttcttacaaaattataatttataggttgagtacttgtaaattttatttttaatcaaccgtatttagtataaatcttttggtggatttatgagagcattttgatatctttcataggataagattatagtaggaattttaatttgttcatacaattagagacatttatgctttggtatttaaagtaattataattaatttttgttatatgagggtatatattttatctgttttttaaaacgtttagaagaatttgtgaagttgaaaacagagtcagttttgcttgtttctttttacatgagaagtaaagctaaatgttttttttttaaaaaaa

SEQ ID NO: 201569 - DNA, 2163 bp, Cannabis indica
tggtcagcctggagggacttgagggaatcctcaagctccttaattttcttttggtcggccagatgctgcttttcagcctcttcctttgcacgagagacctcgccatcagagtcattccactttttggataaagtgtccatatgctccttggtctagcaaagctaagtctctagcatttcatcccactaagatgaccgatgatgggtagcaaaggagagaagagaggcctggaagaaagaggaaaatcatagttagtaaaggtgataaatgaggaaaagtgagaacaagaagaaaaggaaactaacctgatgcaagagttcgtaactcatttttgcaagatcctcagcgctgcctcgtgagaagctcccagttgttagacccgtgggtcaaggagttatgccacccattagtagaatgcaacaagcaaagttgcaggcccttcagtttcgacctcgaggggtaatggacaggagggctcgagaagaaccatctctggatgagagctagagaacttcacctggtgcagtaatccagtgggttgttcattggcatttttttccgcagagaccttattctatggagacttggcaagctcgatggtaagctggcctgatgatttcttcttgttggcagtggttttggtccttttaggttctttcgtagaactcgaggcctcaccaacttgggcaactctcttctgggggagaactctttaacatgttctcgaaatcctgatccatatctacgaggcgagagaagtacattagcacttaaacaaaataaataagtgaaaatggggaataaactcccacttgataaggttaccgtaatcctaagaagatgaccacggaggactaaaatattcactaaactccctagattttgtgatcataaatatatcctaagggtttagtggatctaaatcctagcttgaatctataggacctgatctatccaacatagtcccatacggctcggcaatcccatagtatgaactagtatagctaatttgaacgtggaattctgggtaccaactatcgaatctatgtgttatgcgatctatgagaaagggattccaagtgtaaaaattgtatcgactatcttggaaagacactaaggtgttacattcggccataagcactgtgggtgaccacccacattgattacctcgggatgctccttcttcccaaggggcggttctgtcgagatgatgcacgtgaggcacctagtccacgctctcttcgtcggttgggactgggaccttttgccatgaagcatacttgggtactttgtagtcgtaagtaaattcatccgaggaaagaaggccaacggtccttagattaatctcgttgcataagaagtctttcaatctcaaactgaacggaagatttagtaagatcttgtgacgctcggctatcttaggagtaggaactggtcttcgaggaaccactgtaaacagacaaaagtttaataagcaaactcaaaaatacaaattaatatagttcaaggttaagtttctgagaaagagaacttacgtataatgcgaaaggcggttgtatatattggagagaggcccgtcgtccagaagaactcttttttaaactctgtcttattcggcagcctaactatgatcctgcaatcattcgtgtaggtgtcgagatagtaaaagcctactgcagctcgcttccttgcaggaactgccttgactgagtaaaaataggctatctccaaaggagtagggcactcccatcctaaaatatgatatatgacattcaagctcgaaaggatcctatacgagatggggttcagctggaatggggcaatcctgaggtagttgtagaactccttaaagtaattcctaaggggaagaacaaccccaaccttgatgtgctcgaggctccaggcaccaatgcccgaggaattacttgtgctaggtccctttcactcctcgcgtattaccctttcttggaggaaaacagctaaattcccctggagccacgaaccttatgactttctctgcttgatactgtaggactttaagatgccgccaatgtaggccccaatcgacctaaccttggattcgatgagttcagcctcgaaagtgacactggcatcctgtgggatctttgattggtaagggttaagagacataatgtcaaactc

SEQ ID NO: 201570 - DNA, 1479 bp, Cannabis indica
tatgagtttataaatataaattaagtttaattttttaggaactgtcccttatgtagccctagctgctgcaaattctctctcaaactcagcgttttgtcaatatgatccagccaagcgttgtcgaagttgcatgttctctaattctaccaatggtacatatctagtttgatcatcattagcattgaaattaccctcgttccttcctgaacgtggtttttcagatgtgttaggtctttgagatcccatagattctatgccacgaggatgggttttttcctcaagacgattaccattgtgttgatcgttatcagccgtttttttgtgagtttgtttttgtgtttatgaggtgggacttttttgagtttttatcaccaaggctctcaatgaaagcaccaaactgttacgtagatttttgttaactaaactaatacccttttttgcaataaatatactacagaattaaatgataataaataacaccagatattttacgtggttttgtagttaaaatctacatattctacgagtccttattattagggatatttctgagatacagaatacaaatcttaatatttgaaaataataagattttctatctattttttgccgtccattttctcatggattctgcccctatttataggaatatagattggtagtattctttttgagactgattcatctacaactgctaatgaaatgtgaatattccctacgtttcatttattcgcacatggaataatatctaataactacccaactgctccttatctttatcttttagacagatatgctgactaggaaggttgcatctcgtcaaacatgagttctcctttttatctattttaatagtaaaactgctaagtgttagagcacttcatctgttggaacctatatttgattagtgatgcaagatgatctttatgttatgagtaacgcgaggcaattgagtgtccttgaatatcttgtcttgaacattttattactctgtccatccccgaagacaaacatatgtctcgtcaactcttagtttagtaattattattcttgtctcgcataaaactaaacagtcagcgagtttgaacaactctattacatatatttaattgaaataagttattttaattgcatttaatgttacaatgtcattattatattcattgagttgattcacattctttttatatgacacatgtcagtttctagtacatagccgaatttcgagtatgacagggctcaaatctatgctctatatttttgcatttttctatttaaaatgtatgagctaatttctaaaatatatgcgtatttatagttttaattacttttacatcttttctcaacaatagttacacacaatcatataaaaaaataattataattattagaatttgaatattactagtattttaattgataaataaatatttattattgttattattatcaaattatcaagcttttaatgtatcgtac

SEQ ID NO: 201571 - DNA, 818 bp, Cannabis indica
ctttaattagacaacaatgacccaagaactaaaaagacactttgtataattttccaaattgtaggattaagctttctcaatcttggcaatcatctatttgatgtccaaatacaaaatatgattagctttctaactactattgctaagaaataattagctagagtaatttatcattagagtctaaattacttatcctgttttgtctttaggctcaactgattggctaatgcttatttctcacaactgtattattcaatttcaccattttctgttgtttgatttttgttatgattgattctttttgttgttctagaaggtgtgaccccattaggacaactgtagtgattctagaggatatttctctctgctgtaattatttgataattttagaattcttatagttcagtctcattaggctaagcttcacctttcattgtcgatttgcatattttcttcacttggtagtacatgaagaaggtagagaccttctgaaagagaggaaaatacaaagagagagagagagagacagaaacagagtaacacaaaaatgaatgaaaagcattactcaatcaagtaacttagccctttatttatacacagaggttgatatacaaacaatttcaaagcaaaacagaattgtagacagaagtagttaagtaacctaacaaacttaaccactaactaatacaccatagttatgtaacagagtctaaaacatgcttaacatctcccctcaaacgaaaaagtatctcatacatcttgagtttggatcaaaggtacaagaatctctctgttgacaagggctttgtgagccatct

SEQ ID NO: 201572 - DNA, 711 bp, Cannabis indica
aaattaagtcaataatttttttttttaatttttctttattattttattatttaataaaaatataataattttaatattttttaaaactaatatttatagtttaaaattatttagtaaccaatcaataatcaatgtgtaatgccccttgaaaaatatttctcatatatattatatttacaagcatctttctctttgttgatgtgtagtagctagttttatacatttttcataattttggggacaaaactaatatgatcatgtgcagtagtgttactgttagtgctacatatctcttgtgtctccattgtatgggtgtgaaaatctttgagcttatcttgggagataagaggcaacaaatttatgtcaatgggaagcatgtatttcaagaaaaaaactattttgttttaggacttcatttctttggtttttccatttcctctttgtaattaataatttccttttttagctttcaattttgggagtgcaattaaaagttttgttgtctattttctaaacatgttaaactttagagtgtgtgaaagtgaaatagcattatgggttcctatgaaaccgacattatgaaaggtatgaatttatatataaatgtcgtattgtaaatttagtataagatatttttgatagaataatttaataatctaaatgcaccaagaattctaatactgaataaaatagaagtgtttaaataaaaga

SEQ ID NO: 201573 - DNA, 564 bp, Cannabis indica
ctagtgacgatttgcaagtgtggggggggggggagaagtgatataggggagtgtcaatgtggtttatcgagacgagcgagggtgaagggttatgtgcattgtgctctggttaaggaggttggtgccgttgctgctgttttctttgatgatgcagggaacttagtttgttttggggcaaaaaaagtgcaggtgctcttggcttttcagggggaactggaagctctagcttttggggtggctcttgcaaaggatcttcaacttggtggcgtggatttctctacggattttctgcagctggtgcaagccttgaatgtgggttcttctccagtatggtttcttatgctttcttttaacgaatttcaccatgctcttgttgcgaatgatagtaatgttgtttggatttctcgtgttttcaataaggctgctcactcccttgagaggtggggtctgtcccatccttgcaatggtttgctgagattttgggaggtgagtccccatgtgctcaccaatcttttcgtttctggaagttttgttttcgtagcaaaaaataataatgttactttc

SEQ ID NO: 201574 - DNA, 746 bp, Cannabis indica
ataatgtgtacatataataatcgtatgtaattttaactctttctgcaaggtccatgatatttctagattttactttagtgaaagatatatgagtgtgatatataagagagagagctttccaaaattttggatattaaagatgagaaatgagaggatgtggatgaggattgtgatgatcagatgaacaagttgtatatatataggtcaatgactcaatacttaacatcatattaaaaaattaaagtcaaacaaatattaattcacatgacccacataaaaaccaatcagtgtttacaacaaagaaacggctgggaaaggaattaaaaatatcctcacacttaattgactttcctgagttagataagttgttgtgtttccaaaaaaataattaattatacaaaaaatacaaaacttgcaaaatgattgataatataagttataataataataataataaaaaataaaatttaccgttactatatatgtactcaattttctttgtctcatcctcccaaactttccattttctcatctgcaattcaataaaatcaatcattagaccatattaattttatagaatatgtgttaaactaaagtgataaacttaaaaactactcactttggttctgccaatagccaaggtggtaatgcaatatataatatggaaaagagccaagacaaatataaaaatatgaagctggtgaatcccatatttagacactaaagcaactttaccctgcacctca

SEQ ID NO: 201575 - DNA, 505 bp, Cannabis indica
aaaaaaaaaaaaaatattatttagtacaaaaataattttaaaaagaattaaataaacatcaaaacacgtcaattaatatgaacattaaaaaaaaaaaatcttaaacgaaataacaatatagaagaagatgaatgtttagaatccacggtttcaaaagcacaacgacatcaatagatttatgctaaaataaaataattttaaaaatctgagaataaaatagtaaattaatttatctcattgagtggtgggatgggcacacattcctccgtcgactacacctgtcaatcatataactcaatttgcccatttgtttgtcgcactaaagtgtactaaaataataactatataccagtttgtccaagttcatgaatagtgggagccatttttaggatcaggcttcggaattgaggagaaagttcttggaggttggatctgtgtatttgagaggaagaagaagctctctagtgagcatgcgtctttgtattaagaagaaaaaaaaaaaaaa

SEQ ID NO: 201576 - DNA, 2516 bp, Cannabis indica
gttataatatatttaagcattaaatcccacataattattataaaaaatcactaaccattctcaatatcgagcaccataacacctaataacaataatgtgtaaccattgtgtcttgtagtgaaaaggaatttccaccaatctagattccatcataatattttttatatataataataaatttatatatataaacaatacatgctccaaaaaccgcccttataaatacacacacatctttcattcattcattcatatctcgattaattatatcttcactatatattttctctcaaaaaggaaataatataattagcttcaaactcctcctctacacttctcaatatatatatatatatatatatattaattagtctctaatgacttccttaatctcatcttcagcagctatgataaactctaattattattattataataataatataacaataagagaccatcataaacttcatcatcataagatttcaaagaaggctattattactattaataatagtaaaataatgaacgtggcaactcctccaattatgccaaaaacttcgccggtcccaccacctctacagccgccggagaagaagagccttcgccgtgaatggagcggctccgatcatcatgttgcgtggaccagtgttcgccaagaaagatgggaaggagagcttcttgttgatggagatataccactatggctggtacatatataatattcactactatatattatttatattataatagttaatttaaatttaaaaaaaaaaaaaattgaataatttatataaatatatttgtactttagattttaatatacataaattataatgacaaaaaattaaatacaccactcagttaaaaattcttgaaatattaattatgtaaatattccaattttgacattttaaaaaagaaaatagagttcctatatatataaatatatatatatatatttgtataatttttttttatattttagttatatgaagtaaggcatgcaatattcgagtttttcatagcatatttagcttaattaaaattcataagggttgtcggttttgtccctacatacatatatgaatatatatatatatatatataagtataattaattaagagagtgtgttagtgactaacaactattaatatgtcatgttataattaaaatacatttgattaatcacctgaatactatagtatcgtcatatgtgtccaaatcaaagatactaacaaagcatattctttggtttaataattaaaaataaataaatacatatatttaaatattgctcaatattaatctcaaactatatatgctttattatgtcttgcactacattttgtctaaattatattttaaataattattaccttctaaaccaatacttatgttttgtcccaacacttactacactacttcaaattattatatatttttttccactaaatatttttataaatcccacaaaagttattcaaaaaataattattatttattttattttattaattattttttttattctttcatgcagaatgggacgtacctaaggaatggtcctggcttgtggcacataggaaattacgatttccgccacttattcgacggctacgccactctcgtcaagctcaactttcgagacggccaccttatcgcgggccaccgccaagtagaatcggatgcctacaaggcagctaagaagaataacaagctttgttatcgcgagttctctgaaacacccaaaactgataattttttggcgtatataggagaactcgcgaacctcttgtcaggctcgtcgctcactgacaacgctaatactggcgttgtcaagttgggcgacggcagagttgtctgtttgacagaaactcaaaaaggttcgataattatcgaccctgaaacccttgagactgttgggaagtttgagtatagcgactctttgggtggtttgatccattcggcgcaccctattgtgacggagacggagttcttgactttgttgccggacttgattagccccggttacttggtggtgaggatggagcccgggagcaatgagagaaaggtatcttcaaataataataaattttatttaattaaaatttatctagaattgtgtctattttgataagtagtttatatatattttttgataaaaagattttttttatgaataataattgcaaatgaattttaatcctttatttttatttataattttaataaataatcatacaatttcttttaagtttgatgttattaattatactgggatttactgttttcataattatttgtaatattaatatttaggaatttttactgtaaggcttatataattactagggagacttgaaatagttatagtttatatatataaaattttgtatttaattatctaaaataatttaagacatttaattaatgatatttattagataaaaaaattgattgtagcatttttttttctgtttgagtacaggtgattggtagagtgaactgc

SEQ ID NO: 201577 - DNA, 1261 bp, Cannabis indica
tttttttttcaatattttaattattccatatttctaattaacttatgttattaattatcaatttttttcaatgttatttatttacctaggtgtggagggagggatatattatttgaacccttaaccttctttaaaaggagtaaataacataagaccgtagtatatatatatatatttaatataacacgtacgtaccctctaattaaataaaaaactattattaaaaaaattgccagtgcatgtatttttggttttccactaccatattaataagtgagaatgatatcgtgattgtttcgattaaaaacaaggaaaaacaaaaaccataacatgcatgcatatgaggttataagttttggataaaagaaagaagaaaacctcgtttatagaaaaggaaggggcaaaggcacaagccacaacgtgggatagtatagaagagagagatggctaatgagcacgtgatcagatctagcagctctctacacgtggcccctttgagttggttgggcccacgtcatcgaccttaccctgtccgttaatcatgtgacatgcattctcactcacgtgccaactgcataagtggggcctaaaccaccattatcactcacacgcgtcattatttggttcgcttgcacttattttgacgttgcttttaccctataggaaacccaataaattttaaattttcagtttatttttttatttaagtgtttatatattatacaatctataatttcagattccaatacaaaactttcaacacacactctcttaaattttcagttggtaggtacttgttgtgacccattacacaatatattcttcaggattactataaggcatcaatagtacttagcacatttagatatgtcaatttatgattattaacgatattctttaaaagttatgacattaaattatatgagacctgatacttaattgaattaataaaaatattgacaataaaaaaattactaattatactgattttctttgggaaatttgattttctatacttaaaaaaccttaatattttattcttaaaccaatacatttcaaactaaaaaatatatgacacttttatctaaaacccaaaaatacccctcataactcagccccattttttctcaacccacatatgcatcggacccccatcggaccagtcggaccctgcatcggacccgtcggaccccccagctttcaagcatcggaccccccatcggtcccgttggaccctccccatcggacccccccatcggac

SEQ ID NO: 201578 - DNA, 762 bp, Cannabis indica
taattttattataattataatataatattattgattgtttattataattattattatattcatacttttagtatttttgattttttttaagtttattttttaaataaaaggttttacaatatatattctgtgtattcttagatagtaaggttctaatatatatttttttttttgagcaaaaatcttaaccaccaagcaccaagagcaacaagtactctaaaaaggtgggggcgagaattcatttaaggatagcatcagctaccaaaagattattgatacaactaggattacctttgccaccaaataatactactactagcaaataaagcgagtttggccaaggaatgagcaacgatattacaagatctataacaatggataaaactaacaactttgaacctattccaaaaaccaagaagttcatctaagacaaggcccaacgaagtaataatagacaacttactttgaatttttataacgacactcaagcaatctaattcaagaacaattttgtcatacccaaaaatacacatggataaccgcattgcgaatagccaaagcttctgcaacttcaggttcaaaacaaccttccaatctccaactcgccaaagctcgaacaaccccccattcattttggataaccatcctcaggccactgcatttcccaatcgaatcaattgctgcatctgtgttcaatttgagatagcctaaaggaggaagtttccatttgtcaaccaccagaatgttgggttttgtgcccta

SEQ ID NO: 201579 - DNA, 683 bp, Cannabis indica
cataaatcaataataaaatatataataaattctaaaatataaaaatgtgagggggctaaaatttcttatatgggttggccaatgcttatgtcttttttcctattaataatatatatgaatagagcatattttaaaataaatattttagtaaaataattaaatattatatgaatacttaaaaattaaaaatagataaataaatagattaatataattattattaaaaattttaaaaaataaattatttaaatttaacacaaaaaaaaataaagtaagtaaaataaataaaaactaataaaaatattaatatctaagagtgaggaattaacgttgctaatatataaaataaaagtttgtggaccaatttattaaaaataaaatttgagaataaacttgccaaaacgtatatagtttgagaactaatttgtcaaacaataaagtttaagaattgtcaaaatttatatagtttagaaactcacggtacaaatatgtcttattaatattggtacatatataatagatcagtctcacattattacattttataactattattaaatatcacttaaaaaaaataagtatttatgaagattactagtgcttaatagcaatagcaatgccttaaatatatgatgcataatatattgatttacactaatcgttttataatgtcttggaccccc

SEQ ID NO: 201580 - DNA, 1010 bp, Cannabis indica
acctacttttaaaatataaaaattaaaaaaatcctaaattttaataaagtcaaattttaaaaaataaaaattaaaaaaaaaaaaactaataagaaaagaacatactaatataaataaataaaaaaaaaaattcaacaaacataatattgtattcttctctttatttagagatttcagttgcctaatatatatttttatatatatatattgcccaaaccatgaaaggttctaaaaaaaacaaattacatgaatgtatgatcaaaaaaactagagtcccaatctcaacaagtactacaacataatattactacataagtatattttgggtacaaaacttattattattattattaatattattatatattgaaaaacacaaaatattattattatatatatatatatattatggccatgaaaaatcttttttccaattaatttcatcatcactaaaaaagaagccattttcagtaaccaaccaagaacacttccttaacagactacaacgacgaacatctctggaaaccttaaaagcatcgaacttcttcctcttccgatcccatttcatcgtacaaacaaagtgaggattaccccacatgtcagttctcactctccagctgaaatcatctctctcctgcaacgcgcgtccaccgagatcgctctgttccgaggcacaccagatcactagaggcaaagatgagttgtcgctaaaaccgtttatgattcttatgtcgtattctaacaaacccaccggaccagaaaacgacacgaaaattatcaaaacggcaactgagactattacgcttattattaagcttctcagttggttttgctttaggatcttcattatcaaacgacaccgttttcttctcaatataatatatattattatgacgatagtagtactactagtttgaacatctatggttttgtgtatatataaagagaaatatagtgcacacacttaattttttgcacaccttttttgtacacataaggattttatattt

SEQ ID NO: 201581 - DNA, 1070 bp, Cannabis indica
tacttagtttgacttaagtacattcttgatttgtccctgtaaatttcgactcctaagaaatagtggacaggaccaaggtcttttagagagaagctcttgttgagatccgaaacaagctttgtaatcaagttggcattaggtcccgttaccaatatgtcatccacatagactaggaaaattaccaaacggttgcctgaaccataaacaaaaagcgaactatctgaccgtgactgagtgaaaccccagctgagaagagtttgtctcaacatgtcattccacgcacggggtgcctgtttgagaccgtagagtgctttgtgtaatttgcacacataggtggggtagttcttgtcttcaaaaccaggcggttgttgcatataaacaacttcagttaatggaccatttagaaaggcatttgcaacatcgagttgagatacttgccagttgtttgagacggctaaagacagaacagtgcgcacagttgtgggctttactacgggactgaacgtctcgtcaaagtctatgccagcctcttgaagatacccttttgctaccaaacgcgatttgtatcgatcaagagatccatctttgttcaatttgaccctatgaacccacttacatcctatgacatgcatagaaggactgtatggaactaaagtccaagttcttgctttgtgtaaggctcccatttctgtactcattgcattattccaaagtggattactcaaagcctctttcagtgttttcggttcagatggtagcattgattctggtaaaggatgccgtgtagacaagtaggatttcggtttagaaataccattttgagaccgagtgcgcatatgatgagttcgagtaccagtgacagcaacctgtgggacattggatgaaggagtggcatttgggagtgaaagtgcagtatcctggggtaatggttgagatgctgtgtttgtattgggtgatatttcaggagcaggcatgtttgtgggagatgtagggcctgggatattatttatgttggtagcagggaaggccagttggcttgttgctgaggtagaaggcatgacagtaggtga

SEQ ID NO: 201582 - DNA, 1701 bp, Cannabis indica
atgggaaacacaagaaaaaacctttttcctttttttcttgtttatttggcttgttctctcatcatcttcaacttcaaacccctcctaagaaaaataccataaataccaatatccattgctaccactactcatttgcatgttcttatatatagatatattatatatatgtatgttattgtgtaataataaagttcaaaactttacctaaattaccataaacccaataacaaagatctcatttttagtttattagttatatcacaatgagtagtaatagtactattactactactgagtttcaactgagttcagagaccgagtctagctctaactcgttctcttctacatcaccgccactatcgccgtcatctcccgggtcaacccacccgacccagatggggattgacccgaaaaagtcggttaaacgggtccgtgactctagcaaacacccagtttatagaggggtccgaatgagaaattggggcaaatgggtatccgaaatccgtgagccgagaaagaaatctcgcatttggctcggaacttttccgacgccggaaatggccgccagagcacacgacgtcgccgccttaagcattaaagggaaactcagccattctcaactttcccgaactcgctcactctcttccacgcccagtttctctctcggcgcgtgacgttcaagccgccgccgctaaagccgctcaaatgcataatttcgaccaccacgcgccgccgtcttcaaccgtcgccgtaacagaatcgtcagccgcggcattggctcttcttcttcaacctcttccctttcttctctcgtttcagggatggaaatctccggcaccgagtaccagtccgacgaactcggagaaattgttgagttgcctcgactcggaacgagttatgactcggccgagttggggaacgagttcgtgtttgttgactcggaagagggttgggtttatccaccgccgtggcttcagaacgtggagaattttgggtattttcaacggccggaaaatgattacttcggcggtggatatggtggcgccgccgtgccggaaaatagttgtatggtttcaacttcaagcaatggctttgagggtttgttatgggattattaattaattaattaattacttcttaattaatagttttcacttctaattttgggtttgagtgagtgactgaatattttttttttttttaattttgtgatttaagccttttacatttttctttgaagggcttaaattttttttttcttcttcttctgtaactttcttttgggtaatgtttataactgtacagtgttgtaattactatgaaaaaaaaagagagaaattttacccaataaaaatcgaaatctcttttgctttaattattaatatcatcacatggtattttttttttgtaaagaactactagttcattaattaagaaagtgaacgggaatcacagggggacttccctccccttgatacaaaatggccgagttgctagtaattctagcatttttggcaacaccatccgcaaaagcgtttaaagtacgactaataaaatgaaaattacagactagaaactgtttagagacattaataatagagaaaaaaacgtttagaaatacctccaatcaggactaactcttgcagaattcaaagcatgaacacgctaatttcgagtcagaaaggatgattacctcttccc

SEQ ID NO: 201583 - DNA, 1175 bp, Cannabis indica
ttattattattattagaattttgtttcatttttctttctaaaaaaagttgaatagaattttacttctgataataaaatatttataaatccatttatattttttaaaaaatatatctcattccattatcgtttttgttttacaagttactttacttttagagtgaaaaaaatatttatttgcttacatttctctaatcaagtatgtgtgtatcaaattaattatttataaaattaatgtttaaaaattctaacacttaatacacaaaaggtattgacaactttaaatatcaaaatattgaagaaaattaatatttattcaaccattgcattgatatccaataaaatgtagggttttcattaaaaaatttaaattttatgcttcaaattatagcccaaagtttctctattactaattattctaacttttaaatcccctctctctttaatccttttgcctctattattgtcaaaccaccacccagccaactcgcacactcaaatcacaacacggccaaatcttgcaaaccctttgtgacctttccatctatttcacacacccagacccaaccagctccgttgttctcccatagtcctccctcgcgtgaacgcaaaccgtgatagactgtcgaatatttgtgctcttcgcacgtcaaagcctcccctgagattagagctgatcacttaaacctttatttcctcaacttttgtattttatatatttttatagtaaatatactttcatataccttttcacaaattaataaaaagtaaaaaatttggataatttttaaataaataaattaattttttagctaatcactctcactttgttgtatttatttttattaaataatataaattattcgtgataggtttcatgatttttttatctttctaaatatttttggaacttctttttaagaaggtaattttatataacctgaactgttttagtttatggagaaggtaatattttcttttctatttatgattttttttttaataattttaacttaatatatgaaaggactttgataagattagctaaatagattcaagaatataacatagttggaccatagcagagcaagtactatcttcaatgcatgcgcactatttattcatttgttaactttcaaggatgagtaaaaatttagttgaaacaaaacttggtt

SEQ ID NO: 201584 - DNA, 821 bp, Cannabis indica
tcactcaccgctcgacttattagctcatagaatttttctgggtttctcatattcatcactggtaggtccttaacttttagaggtggaaattctaccacgggctcttctagtctggaaactaaattaatgtaacaggaagatcaaagttaattaccatgtcaaaaaaaattaatttgaaggattgtcaaagtcaattttgcttatatacacacagtaatagagctaccttccttttgtgttctataaattaattaaaaaaaagttaagatttgaagaaaaatatagtaaaaggctacctttttaaacaaattatatcaacaaagatatgtatgctagtaaataaacatggttccttctagagtatgtttgtaacagctaaaaaaaaaaaaatataggagttttttttattttatatttttaaatagttttttttatatatatatatatatatttacgaattctacctaaaaatctctattataattaacaataacctaaatcgcaaccaaaaatcgtatagcaacccacaaattaccggataaaaccttttagaaacctaaactataaacttgaaaaaaaaaattaaaataaatagtatatgggacaattgctggacaagatagtagttgttctatctgaacatgacaatggagaggctgcctagtttgtgctactttagtaaaaattaaattgagcatttttggcgaaatttaactagttttcttgtatttgattatacggaagaaaaaaaatggttttctatcttaataaattttttaaattgccaaattcaatgtctaaaaaattaaaataagataaat

SEQ ID NO: 201585 - DNA, 2282 bp, Cannabis indica
tttctgtgtttcatgtgtccatgttttatgcattatccattattacattataaatatgcataaaaagttacaaaattatatgttgcacaaaatttgagatatttttacagtttttaaaaataaatgcatgttatttaaattgttgtattttttttattttattatttttatattaattgtttttttttctttaacaaatatttttatattttgatattgttatttttatatagttttttgttatttttgtgttcttttttatataataccgtaaaaatatataaatatatattaatgcaaactgtaaaaaaaattttaaaaaaaaaattataatttatgtaaatttcccatttctctttaataacaagtgaggaatctcaattaataaaaaaattatgtctcaaaatgacactattgtccacaggtggagctcaagtcaatgctccaagagttgctttacaacatcttaatgaggatggtggccggaaaacgatgcgacaacaatgacatggtgaataaagaagaagcacggcgatatagagataccttgagagttgcattagggcttgccggagcagggaactcggcggactttttaccgtttttgaattggatcccaaatagttttgagaagaaggtgaagaaggttgggaaaaagttggactctcttgtagagggtttaatcaaagagcatcggagtagcagagataagaatcgaaacaccattattgaacatttactctctttacaggagtctcaaccagaatattacactgaccaaattatcaaaggctttgttttggtatgctaattatgtgtatttccttttaagttattattactatatgttatactatattaatgtggatatatttaattatacatataacttaatttctatacaataacttatcataaatctacacatatatgttcaagttttagtaaatgtataacataaatctaaatatcatatgaataacttacatgtttatgtaacaattttatcattttataaatattgttcattttatattctgtatcatttatacatattatatgtaaaacttattttatattaattttctattattataactatttattaaccaacataataaattatttaattttttagtgtaattcgaaaataaatgatcaaaagtaattagatttttttctcttgaaattaatttgatttatttaattattcaaataaattatgttgtaggtaatatttgcagcaggaatggatacatcagcagcaacattagaatgggtgatggccaatttactaaattaccctcatgttctaaaaaaagtcaaagatgagatagactctcaaatcggtcaacaacaattaatcaacgaatcagatctctccaaactaccttatctccagtgtgttatttttgagactttacgattatacccagcaggtccactccttgtacctcactactcctccaatgattgtaccatcagtggatacgatgttccacgtggcactattttattggttaatgcatgggcaatacatagagattctatgttatggaaagatgctgatagtttcatccccgaaaggtttgataatatcaatagtgaaaataatgaaggatacaagctaatgccatttgggcttggaagacgggcttgtcctagaaaaagtttggcccaacgcatgatgggcttgacattggggtctttgatccagtgctttgattggaaaagaattgatgataatgaaattgacatggttgaaggtaaaggacttactatgcctaaagctataccattagaagccatgtgtaaaccacgtcccattatggaatttcttctttgacattcccataatatgttttttaaatttgttgaacgcttgaagcttttgtttataataaggtttttattattaagttaataagtacgtatgtattgttattattgtgttgctgaatttataacttttatggttattgtagagtttatttcaatatttgtaatatattgtgtttgcattaataaaaaacttatattggaaaattctgtacacacttaatagtatagatgtcacacacttaattggagtgcttgatatgaataattataaaatataaatcttatacctaagccaaataattaaggtggcatttattttctaaccttctatgtcacgaactatttatacattttatataaggtggcaataagttcaagtttcttggcatatacatacagttttagattaatcaaaaaggctttttattgtaaaaaaaatt

SEQ ID NO: 201586 - DNA, 531 bp, Cannabis indica
ttttttttctatggcacactaaatttcaagtcgtaatttatcatcaatacataaaaaaaaaaaaaaaatacaatggcactgaggagacttgttaatcaagtatgcagttgttgtcagaggttcattttagaattttctttctaatctaacaccagcaagcatgcacttactctttcaagtagagttttgttcattctctctgtaacctcattctgttgggatgtgtctctgactatattgtgtctagctatcccttttttcatgtagtatttattaaaagtcattagagcatgcattgtctgttatgagcttcttgaccttctttctaagctagttctcaactagctttctccatgtgatgaagctttccaaggcttgatcattagattttagcaaaatgatcgagacctttcttgaaaaaccatcaactatactcataaaatagtttgattcacctagagttggtattccagatggcctccacaaatctgaatgtacatatgctattgccatggccggccagagggtggg

SEQ ID NO: 201587 - DNA, 1042 bp, Cannabis indica
acccttcttatatcaacctcctttactaagctactggggtcgtccctgtcttctagaatcccagccacatcggtcaacaaaatcagcttctcagcacccaatgcggccgccaattctccagcaaccgtgtcagcattgatgttgtactgctgcccgaattcatcagaagccactgaagcaatcacgggaatgtggccgtcgttgattatggaccagagtatggtcggatcaacccgggcaacctctcccacaaaccccaatttagcagcgttggcagctggcctagccgtgacgacccgtccgtcagtgccacagagcccaatggctttggccccagcttggttgatcagagacactaagcctttgttcacttttccggccaagaccatagagacaatctccattgtcttgtcgtcggttactcggaggccatcgtggaagttaacctcgatgttaagccgtttgagccagagattgatctcgggtccgcctccgtggaccaggacaggccggagtccgacgcaggagagtaaaacgaggtcgttgacgaccgaggcctggagcgactccgatttcatggcggcgccgccgtacttgacgacaatagtctttcccctaaacttctggatgaaggggagggactcggagagaacatctacacgaagctgacctggggtggtggctgtgttggcgacggagagagtggcggagattggttttcgacgaagggaagaaagattagggcttttgaagtttgggaatttggggtattttgaatctgatgatgaaagaaacgagagatttgggggtactttcactagcgttttagcagctaacatttttcttctttttctcgggaaagtgatggaaagatgtatgagaaaagtgagctgagtgagcggaaagatgtgtgaaactgaactgaagagtagtgaagagcatcagttcgtacttgtgaataaactctaactattgaaaacacagctgtcctaaatgaaatgactcaaataccctctatttagcccatcctaaatgaaatttt

SEQ ID NO: 201588 - DNA, 2601 bp, Cannabis indica
ttttctcttcctatcatttccagttcagatgactgtaaacacagaagaagaaaccgccaaaaaccatgaccaagatcaacaacctaattacaacgaagaagaatcagcaaaacacaaacccagaattatctcagactctgaatcaagtctctcactttcacccctctctaaccgttcctacaaaacaccatccccttcggccgatcactccgcctacttcgatcaagcccacgaagcccatgagtattcttggatcgagaacatgcccactaagcccgcttcgcctctggcccagcccaaccgctcctttccggctgaacctctggttgtgaccgaagcactcgacccagaagctcatgacggcgttgtagtttcccctgttgaagaagaaaattcagaacgagatgtcagtaacggtaacggtaacggagagggaaaaggaggtgggcttggtagttttaatcggcggaagctgaggccggacttgccacccgttaagaagaggatgaaacatgggttgatgaagagggttttgttggggtttagggtttgtgggtttgtgttctgtttggtctcattttctgttatggctgctaataggaatcaaggttgggcttttgattctttctatcgatacaaggagttaaggttagtaaatttaattgcagttgtcagactgaacaacaaccttcaaagacagaaaaaagttatcttctttgttgtacttttgaaatttaactagtaaaaaatctctcttgggtttgaatttttcaggtactgcttaggagttaatatattgggatttgcatattcagggctgcaattgtttgatctgatttatttcataagcactgagaaaaacttggtccaacacagattccgatgttactttgatttcttcatggatcaggcaagtcaataaatgagcaaaaaaacaaaggtttttttcctcttattttttaatggtttattagtaaattattgttgctgttattgtacctaaccctggctctttgcttatgctttggtccacaaacaatccccactctttgttggggtctgaccactctttatggtgagtcttatcatgggggccatgtccttaaaaacatggttttcattcaagctcctgtagggtttcttttaaattgagcttaagaagtattacataaccaatggcttctataagtcttagcctttttgatgaacttttctccaactttttccataaaaaattccaccttatccattatgtactttgcgtgggaaaatttgattcttgaagaaaaagatttaacttttatcctaaataacttatgatcactttaatctttagtttagctttgttatgcagtactagttactatactaaagagactacctttaattataccactttagtgcatattcaaaaggctgaaactcctaattgacgatcccaacagaacctttttctttagttccaaaagccaaagaacacaattctttttacccacttatagattcttacaaacaagcttaagcaatatgcaactttggtgtgtctcattggactttgtggacaattctcttatgtcctgttgtacttagattccaagcaccagaagaggcttgtcttttccttttgttatatagtttatggttaaaatgtcacccatgtggctatcatgacataaaaatcgactacaaattgattatccttaagggctgaactaatttcttatttgtttatgctgtttgaaagttgaaactgtatgtggacattgtttatacctttttatcccttctttctttaaacaatgggcttgtgtttgggaaatggcagatgctcgcttatcttctaatgtcggcatcttcatcggcttctactcgagtagatgactggcagtccaactgggggaaggataagttccccgatatggcccgtgccgctgttggagcttcttttgctgcttttgtttctcttgcttggagctctgttatctctggctacattctctgtactaaagctttgtagtcaccactccctgtgttatcgattacaataactatacagttttcctcttagctatctatacagattacagtacattagatttgaatgtgacggattctcagaattgatctactccttaaaggataatcttttcttgtatagaaataaggtttctctagttgaactctgagttaatggactttgtaaaaataccattgctatagatatttttgatatcctctatcgacgaaaatttatgaatgtaaatttgaataattataataatatacaagttgataataaatagaagttacacttacataacttgaggttcatttcagttagttttcattaaaattaaaatctctaaaagatctgaagaagttactattcatggctctaaatatatttttgaaatgaataaaatatattaaaatttgaaaaagaaaaaatagaatttttgtgttgtattatgtgtaatgtaaaaatttgtgataaaatagagaaaataaaattttaatgatgtattttaaatgataaagtagataaactaattagagtgctataagataactcttctgtatcaatttttttcttttcttttt

SEQ ID NO: 201589 - DNA, 781 bp, Cannabis indica
acaaaaaaaaaaaacataaatttgaaacaatttttatgcacaaagtgttaggatgtgtgtgaagtcatgagattgaatctcacatatgtaattcaaaaaatataatacaaaaacgcttcaataaaaaaaactttcatagcattcattattatttgttattttagtttttttttgttgtaacaccaaaaaaaaaaaattaaagaaaatattcccacatatattattaagtgcaaatgttgtacaaaaaatataatagaagattgtaggactcttcacaatttatagtttctgtactcaattatttatattttattttttttttattttacctcacacatttatactatactatatatttatattattttttttaatatttttctatattatttaaaaattattttctttcttttaaaaaatattataatattacacatattttaaaatgattttaaaaaataatataatattaggtgattctgcaatgcactatctaaaaaaggtgtactgatacaccttcacccattttgacatctaaaaaaaaatttagtactaattttttttatattcgtttacgttataattatttaagatattttataaaactttgtagaaagtcaaaataatttataatataaaaagtagtgttcaaacaatctattttacacgcgtataaaataaaaatagtcacgtgtgtaacacattttttgaaccctatttttgtcgtgttaaatttttctaaatttttaaaaaattttactaggatgtcttaaataactat

SEQ ID NO: 201590 - DNA, 1540 bp, Cannabis indica
tagaatattaaatattatacctattgaaattgatacactataatgataattgtattatatactacttttaattctctttcctattttttttttaaaaatacttttgtattttacctcttaatgacgaagattgaagcaaagataataaacagtcaaccacaacattgatgaatgttagataattatctcttttctgtacaacctaattatatttattgttttttttatactttacaaataacacattattctgtcactttgactattttatatctttatctattaaaagtgcctatctaacgacaattcttgtttaacgtttcttggttttttgattccgctaaagttaacgtcggctaacctataaataaaataataaataaatatatttaataaacaaaattacccatcggatctcatcttcctttgaaacccctaaaacttctcctagagaaactctaacaaccagtccatctaaaaatatcttcatgaaacgaaccccaatcgaatgctttatcattggaatcgtcgaaggaagttaacgattatcatgttgtcgatggtaaagtaagccttcttattatccaacgcccgacgaaccaacagataatcgatgtatccacctccggtcagagatcgttgaaaccaacagcccgacgtctcactttccctctctctcgcgtgtctccctcttcccctttcgaccaaggccacatcgtcatctttagcaaatataggtactatatatgtatatgtattaatgttggtttatctatgatttgttaccctgttttgtatttctattctattgttattttatttattgattttatttgttaccttgttgatttttcaatggttcgctaggttttgtctattttgtggtttgtttgcttataacagttgttggttgacatcgttcttattcaccaatttgtgcaaatactttctggggttttaaaataaagaagcagcttagctattttggatagtgattttgtaaaaatgattcaactttcatgaatttgtactttactaaaagtgggccacactcacctttattgccaacttatacaaattctgaagctcatcacgtcgaataacatgagacccaattgaagtttttgaattggactgtttaatttgatggtatgtttcaaggaaactgttcgtgggtctcttgaaaacaaataacatttcatcactagcttaatttcagtttgatagcttaatattcatttgctttataacttaaatcttaaaaacgataacaaaaatcatacctttatttaattatgttgttttcctattatgattgtctatttgggctcaatgaaggaagaaaaatatggaaaagcttgtgatcgatgtgaaggaatcgacaatggtgaagcctgctgcagagacgacttaaggaatatatggagctcaaattggttatttcttatattttattttctttatgtgaatcctattatcttacaggataacatttttcgtgaagcagagactatgacactggtggaaaatcctaatgtac

SEQ ID NO: 201591 - DNA, 868 bp, Cannabis indica
gtgttggggtcgagtgtattaaaaatatattataactttacacaatctattaataccagtcaatgctaaacatagtattgtattaaataatactaatacaatacaatacaatacgacataccaaacgagatctcagtatatgattagattgaatttgaataggtctaaaaataatatgtggtgtaatgaataattctagtttttactatgctaccaccaccgatgatttaaattattttatggtcctaactcctaaggccatctccaacgtagcatctaatttgagaatatagtccaatttctactccaacccaacactattcgtccaatatatgcagtggactacatttatgtagtggcacttatcccttttcttttttatttatctaattatattatttatatatgtatataaagtttaagaatagtacaaactaatataacaataattttttttagtgttgtgatttgaatgagtacaagagtctataacaatatatttttgtgttggtgcctggagatggcctaaaacctacatcactattttatttttcaaaatgattccttaagatatagagaaagatatgaatgcaaaatacttattcttccatgccaataatccaatcttatataaatatatacattggggtgtgataaccaatgctgtcaaattgttactactaattctaatatggacagataatagtgttagaaagttgagtagcaaagctatatcatgatgatgaaaagtgagaagaagtggagaacaaaacgttgatgcatgcatgcatgcctatcaaagcccaccaaagctatcataatagaaaatttggtaaaactgtcacacgcctaaaaagaaaaagccaaa

SEQ ID NO: 201592 - DNA, 2005 bp, Cannabis indica
ccttaccattcctttaagttattgtccaagtaatgatcgcttgatttggcaacacaacaacaatggatcctatactgtgcaatcaggctaccatttggctgtttctctagctgaacaatctcattcatctagctccacttcagattcagcttggtggaaatctttttggtcgttacagctaccggagaaaatcaagatttttgcttggcgagtcatccataatgccctccccgtggcaacttcccttgtcaaacgaaaaatcatcactgatgctacttgctcagtttgtagataagcgtgggaatctattggacatatttttttcggctgtccctatgctaaagctctatggcgttcttcacaacacacttttgactggcataaagcaatttcaatgtataaaggtgattatttaaagcatctatccttcatacactctaaacatgagatggagcaaattatatgcaatctgtggtgcatatggactgagcgaaaccaggtacttcacggcgaaaaggcaaaatctgcaacatcccttgctgctttctctctacaatatctggaccattatcgagttgctcaagttaaataccggcctactgctataatttcatagcaacctccttcatcagctcctaaccacacttcttggcaaccgcctcctacaagttcctttaagctaaatattgatgctgctcttaataagagtagcttcaaaattggggtaggtgctgtcataggagattctttgggatatgtcgttgcagtttttttctatgcctcttgttggtaattttttcctcacatgaaatggaagccaaagccatgtttcacagcctcaactgggctcttcaacaacagctacaagtctctatagttgaaacggatgctttatgggtttcaaatgctttacagtcaagagcagtgggcatttcagcttttcatgatttagttaatgatgtttcttgcctcctttcctttttccctaatatatttgtaacacatgttaaacgtgatgctaattcaattgcagatagtttggcaaagtttgccttagggttggatgaggcttgttcttggtgggagaattttcctcttactatttactgtgttattgtaaatgactatctttaatttataataacaaagttttatcttcaaaaaaaaataataactaatttttaataaataattattttattattgtatgcacagtaaagtttatattgtttttctcaatcctattcttttattctcattcttctccaataaacccaacttgtaagtaaataataaaccaactagtttataataatagtgtaatttatttatgataaagagttgattgttgattttctgattatgcaacatatatatggttgactcaaatttatatcaataatgaaaaaggaaaagcatgtataacattaatggagtattttatataatcccctaattaaaatatattaaatggtattaagatatctaagtgtatgcaaaatatgcataattgttatatatgttttttcaaaggtttggagcaacgaaagatatgagagtccagagcacagagcgatagtgaattctgaaagggataggttttccatacccttcttcctcgatccagcacactacacaatggtcaagcctttggaggagatgactgaccacaagaatcctccaaaatataaaccatataactggggaaagttcttcgtcacaagaaaaggcagtaattttaaaaaaattgatgttgaaaacattcaaatttatagtttcaaaatatctaagtgagcagtcatagagtaataataataataataagagatgatatgcactcatagagctattctataattgattagcgatgtctataatatttattaaagtaaaacaagtgagacatattgagttatattaatagtaatatattatatcttaaaagcgtgttagacactataagtgctcttggcataattatgacttgtacaaacatcttacatat

SEQ ID NO: 201593 - DNA, 621 bp, Cannabis indica
tatatatatattgatctaaattaattaatactctcattaatatcttatctgttgcttgttgtaccaaacaaaacaactaataatagtaaagagatcaatgaatcgatcataatttaaataagtaataaattgtcaataagttcctttgcccaaagattttgacttttttttttgttgagaatatatgctaaaatatatcattaatacttagtatttttttaatatcagaataaataattatcgattttatatagcttaagaaaatttaaaaaatatagtaatgctcaataataatatatttttttattgtatatatttttttatttatttatctacttaattacttaatatgtccgtacaatgagttaaacgtacggcacaccctcttaaaaccctagctaataaccctgcacgtatcatgttttgaaaaaaagcatatatataattaaatacagtgtattaaatgtatatgtatatagatattggtttacatatgagtgggaatagttttggaaatttttgcattacaccatttaaattaatgagtgttatggtagacttcaatttcaactctttacatagaatttaaattcttaattttgccccacttttatggattgg

SEQ ID NO: 201594 - DNA, 651 bp, Cannabis indica
agtctgttagtgtctgattaaccttcagtgttttgctgattcttatgttatctgattcggcagttttgaacaattctgtatcaatttgacaaatgaaaaactacagcaacatttcaatcaggtttcagaagatttatctcttctttttggttttgtgaatcagctaaacttttttagcttacttaaattactattcaacagcatgttttcaagatggagcaagaagaatataccaaagaagaaattgactggagttatatagagtttatagataatcaagatgttcttgatctcattgaaaaggtaggtttctgtcttccattttttccccatactttacgaaacatgtttctaggcatacttgtgataaaatctattacgatctttccaaatttgctcttttgagcattagattttaatatgcaagtacttttaatgattctaagacatgtaatttctatgctgttttaggcatatggttcataatattacattatttaatataatgcattataatatgggaactttcttaggtagctatttgtttattcaacgcgaaagagttttaagtgtttttatttactgagttagagattgcatttttttataatttttcttcaatcttattttctattagattttttttttttt

SEQ ID NO: 201595 - DNA, 1391 bp, Cannabis indica
tcgaaacccaacaaaaagaagagcttgaaactcactgattatgataaaggagagaacatgagccatgaacacccaacccatcagcgtcaagctgagagaagagagagagagacttcgaggctgagatcgagatcaacaaaggggacgaaggctttgagaccgttggatttgtcgtggcctttgagatcaaaagcgaattaggcgtagccagtcattttgagcaaagaagatcggtgtggtttggatggtccagcttatgcagttgttgtagtcgtggaccatgaatattagggcacaaagagggttaggatttctggtgctgcacaatgagggtgatagagaggttcgggggagagagtgagaaaggaagagatagctagattatggtgttttggtgtagagttccatactattccttttatacccttttttaattgcttattttttttttattattttctttattttcttttactaaatcattttcaacactcttttagtgtcggttcataaccgagacttaagactcttttagtctcagtttataaccaacactaaaagatcttttagtcacgattataaatcgactactcaatctctatgttatatatttctttaaaattcttttggtctcagatattttcttagtgtcagtttactaatcgacacttaaagtcattataggtgccaattatgaacagataccttagaattggggtggctttagtccgttttttaaaaaagcggtccctcgaaccgacaccaaaagtttattttgtaatagtactgtactagcacatttgattctttggctgagttttgttcttgaagggttgtgttttacaacaattcttacgagcatagacagtttttattttatatatagacgtcttatttatatttgcagtatgattgttcaataaatagcactacttttatttaattcttgtcgacataactacatcattagtccaccacatggacatgatgaactatatatatcaacgtaagtccgtaattattgttcataattatttaaaaagatcatgatatgatgattacgaacaagccccaaaccgcttctgaagatactgaaccacattcttctccaacatgaaagccttagcaagaacatcagggttgattggtgggttggatccaaacacggcattagcaatggtaatcactcccggattctggcttcccaatccagcaaaggctaaggctggagtctttcctatattgaactggaagtgaatcattccaatggggaacacaaacacgtctcccttgttcagaaccttcgtgaacagtctgttcccgtcttggttcgacgaaacgaaacctacgtacagtgttccctccgccacgaaaagtatttccgaggcgcg

SEQ ID NO: 201596 - DNA, 919 bp, Cannabis indica
agatattgcattttttccaaaacttcatcactcaaagactcagcaaactcaacaaagtttgtaacccctttggcatttgtcacttccctcagttcattcacaaccttttcctgtacagaaggatgtttgcaaagcatgtatatgaaccaggcaagtgtggttgcggttgtgtcttttccagctatgataacgttaagaattacatccctcaagtaaataggatcattctcagttacttgaagaaacctggatagaatatcttctctcttcatctgtgtgccagtaaacaatatcactaattatgatttcatggcattgttgaaacttgtaagactaaaatcagaaaataaagaaactcattagctagtttcactcacaagagacttgtccttggagctctccattaactcaatttttttgcggattatcttgaacacaaaatcattaatgattttgattgttttcttcatggaagcttctgctccaatgtttaaaaacttcttgatcttccagaagatgtcaacataacgaaagagggttatcgcacttgcatcatcgaatgctacgctgaaattctttccttcttcgcttgatccgcacatggtgtctaattcaagtccaaatgcaacttggaatattgaatcaaggatcgctttcatagacatatcctgtgttatgtttcctcacttagatattaatctcaagtaaacattttgttacgcaaactaggttgacttacttgaatatcaattgtctggttggttgttgcaacttcagacaaaattttggcaagcttcgatgcatttttcttaaagattacactgctgaaatccctcaaaacttttgttgagaactcatggcttgaaatttttctctgctgccgccacttttcaccatctacagagaaaattccatcacc

SEQ ID NO: 201597 - DNA, 556 bp, Cannabis indica
aaatgagtattcttatttgatatgcaatcacacaaaagaatagaatagagattatttcctttccactcaaataccatattttttaataaatagtaaaatataaaaatacattaaaataccatattttttaataaataaaattataaaaatcgtaaaaatatttaaaatttcgtacaaccgtatttttatttatttttatgtatttatgaaataatctttttttttaacaccaatgggatgaaagaatatacaacattttttttaaaaaaaaaaattgcatgttagggttttattttagttactctgcatgctgtggttaaaatgcgaataaacactttgaaaaagacggtttattaaaacttggttgttggttaatttgaaatgattttttttttttcaaaatgtacatgtgtcattgttattcatcaatttaattagtactgattttaatttaaaattaaagtttttatttttatgaaattatcgaagtgtatcaaatttatcttccaaaatcaaattttcacataaaccaccaattttgcttcaaatttgttta

SEQ ID NO: 201598 - DNA, 1172 bp, Cannabis indica
actggagctgaacaatctctcagatctgataacctagggcttttgcttctggtatatttctcctctcttctcttctgttccttttatagttgtagttctagggttgatcacagaactaggagttagttacaacttcggttgtaactaacaactagttcttgatccactagaggcgaagccacctaggatctgatttctgttgtattcagtttgtattttatttgtaattttcacttcatctgtaaaactgtaataataaaggttacagtgaggtctaattttaacactttcttatctctctctcttttactcataagttgggaagcaaaacgtgataaaaagagaagttaaaaaagaagaacctggtattctcggcgacatattgcctcagttatgaagtgaattttatttttacacatgggcaaatgcaagaactaaaaaatcttgaaaatattaatttgacactacttaaaacattagattaagctacttaatttgtgcattaatagtcatataatgaactatggaaatatattaatttgtgcattcatcaagccaatatgtgtaatattaataaactaaaattcgggtatcttaaattgttaaataaaccttcctattgcatgtatacttataatcgatacacataagtaagttggtacaaataatgagtaaaaatatagctaaaaaaaatatttgcaatatttgtatagttcaaacagaatatatgtaacaaaaataaattcagagggtaagattctacaagaactattgttcacaagcaaatattaatttatcgccttttcaaaaaaaaaaaatattaatttatcgtttcaaacttgatggctaaccgtaaatcataaaatcgagatttgttgttattaattgcattttaagtcccaacaattttttttttccttaacttagtcctaacaaatttattattatatttaatatactaaaattagattcgtggactaaatataaccttttaatctaagccatttttttatatatttaaatcacatttacttataaaaaatcttatattgtggttaaaaatgtattaactgaaaaaaaaaaagacaattaaaaatacaaaaataaataaaataattacaaaaatatagtttgtagagatgttttaacatttttacaattttatagatttt

SEQ ID NO: 201599 - DNA, 922 bp, Cannabis indica
aagttgaaattcacactagggaaacacactacaaaagaaaaactagactatattcactctgatttacgggggacttctagaatgaaaaatctagaacgtgcaagttactttatgagtatagtagatgactatattaggaaggtctgggttttcctgctcaaaacaaagaatgaggcctttagcacttttatcacttggaaaagactgattgaaataagacatggaagaaaataaagaaacttagaactgataatggcttagagttctgttgtgatgagttcattaggttctgtcaacttgagggaattgatagacacaagacagttgtaaaaaattcagaacaaaatggacttgcttaaaaatgaataggattctattggaaagagtgagatgcatgctcaagggtgctggccttgacaagaaattctggggtgaagcattgaagactgcttgctatttgataaacaggtatcctttaaacagctgtcaaattcaaaacaccacaagaattctggacaggacatgacccaaatgttgatcatctcaaagtgtttgggtgcacagcctttgcacacaccagacaagacaaactagatccaagagctctcaaatgtttgtttcatggttaccctgaaggggtaaaaggatacaaactatggtctttggaagagggacatagaaaatgcataatcggcagagatgttgtattcaaagaacatgaaatggctatgaagacagatgcaatgaatagcaggccaactaacaaggagatgacaggtctagaaattaaaaatagcagagaagaagagcatggttcagatcagatggatactcaagagtacatacattcagagacagatgaacaagcaacagaagatgaaagttcaccagtagattcataagactaccagcttgttagaga

SEQ ID NO: 201600 - DNA, 1224 bp, Cannabis indica
ctacccgatcatcctctttaagtgcgagtactatagagatttcctatattattaatttcagtattctgtattacttctagagctttactttaagttttactggttcctaacactatttaaaggtaatattatgcaaataattaattattttaataaatttgatatatttaaatacactaataatattatcacattttttagatagtactagttaccacttatgtattttaacatttctcttttttatttttattgagggacatgccaagttaagagtatatgggggttgtagcccctactgaaaaaataaaattcatttgaaaaatattaaatatttttattataatttaataattatacaccaaaataattttttataataattaagtgccacattaaatacatatatatatacattaaataaagaaaagatactattagtatttaccattcttcaacatgtcatattaatattaatacaattaagtattgaatctcgtataatttaatataataattttttaaaatactgtctttaaatagtactaaatactaatgatatattatagcaatgttgttaaataaaacaagatattaattagcatttactaattagaataacaaataaagtgggcaagcgtgcggacgtgcgtgggagttatgaggattaaagattctatttggttgaccaaaagaacatcaacacacacaaacacatccttatagactatttggctctttttgttaagccataaaagaaagaagagaaaaaaatggtaagaaatggcaactatatatagtactattttattatgactatatagttggtttcaaataacttgttgattaatttttatttgggatttatacttagaaacataccccactttgagttttagattccttaattgagtttagtggcaagagcatataaatgcatccattatctacttaaataattgaaaattattaggtaaggtatcacttttcctcatgttgtagccttgtaggtgttttttatttttatattgtaatttatgaataattagcaattttaatttttttaaaaaaaatttacatttataaaaatttagttcttttgttaggttctgtctcattattccgtttaaatattaatgtgtttttgtaaattattaacttttctcttaaacattgacaactattaaaacataccttctctaaataaaaatgaaaaagattaac

SEQ ID NO: 201601 - DNA, 2095 bp, Cannabis indica
gttcagtttttctgcatcagtatatgtttttctaacatcttttctggggttagttgcatctgatctcgctaaatccagtttagtgccatgtcagctttctcgtgtttgttagtttgtgccagttgtacttagctggttggttagttagtcagtttttattatcttcaagatatatattctgttgtgtctgttttgctaactaactctcttcggttagaatcatcttcttggttcttgctctgctagggcaacatattcctttgtttgtttcgtatttttgcagatagaaattcctgcggtcttcctgaggttgaagatggagattgaatctgcctgatctaaagagagttcagattactgtgctgaaggtggttcagctgtgtgaatgctaagtgttcttgtgtactgagatctaaatgagtttagatctcaaaacttgagtgtgttcaagtgttacgtaataatgtataaaagtcaatttagattacattgtttgatttgaagaatcagaactggaatttgtaattgaattgattttatagtggatgttacattacctgattcaagggaacccaagcactactcggttggaatgcgtttccaatacagaggaagcttgtaaattctgtgttactttctgtttagatcttaggaaaaatctgttgagattaatcaatttgaatttgtagtaattaggactttcaaacacaattgtgccaaactgatcctaattaatgagaaacttttgtcaaaaaactactagttagttcctaattaataagctaggtagtgcaacttgctaaaaacaatgaaaattaagggacaactgttcgatataatgtttaacaggcagtgagcacttaggccacttatatggtacccttaaattattaatgtaatatacatttttaatatctttatagaagttgagaaaaagcaggattaaaaagatgtcaaaacatattcatatttagaaagagaaaaatttattatttcattgtgctttttatccaagaccgaactacttaagtaatctcaatatatatatataggacaacttgttgagaactttaccttgatttaattatcatcataatctttatttagcaaactattgattatatattgcttagtccttctaccaaacaggatctgttttacaatatcaacaatatatttttttgtaccttattaaatgttttacaggagcatttgaattggagacattcttttatttaggaaaagatgtagtaacttatgttagtataatttcaaataaagtagtgagtgcgaataattataattataaattaaaattgattctgaagatatgtatctatagcttataagactttctttatagtagcatgttgagatcagatcgtggcttacatgttggtaaaaattgacatgatggtacttgttggtatagtggtatgcctttagtaacttttatttatatataaatatatatatatatatatttatatatttatatataccaatccatacatctagtagtaatttactcttctagatatataagagagataatatttttttttaaagtaaatcgataaagggtaacaacgttacacaagagtgaaattttttttatctataaaaatctattattgtctatcctaaaggtatgtagagatatgacagaaaatctagataataaaatcttaaataaaaaaataaaaaaaaaaaaaccttctaaactaagagttgtaactttcgatctaccaataaaatacttacaaaataaatatcaaatattgaataaaatattaaattttatataatattgtcactcatatttctctgatgtaaaaattaaaacttatctgctcaaggctacaatacatctgatgtgtttatattagaccatactgaccttacaaaaattaaaactaaatataatgactttacaaaatcaaaattagtcatactcgctttaaaatattaaaaactaattatactggccttacaaaatcaaaaattaattatactgattttacaaaactaaaactatcatactggtcacgacatactaaataaaccaggttagtagagaaaatattggttatat

SEQ ID NO: 201602 - DNA, 899 bp, Cannabis indica
ttgattttcgatcacaaacaaagagcattcaaaatttagaaattttttctaattatatcctaggactccaaattccatgataattcatcatattcatctcatttaacatatttattctcatttttaattcatattataagttttactatttaagtgtataaaaattataacataagagagtttcgccgtcaattactctaaaaattataacataagagagtttcgaaaccaattattctaaaaattattacgataaattatatgagactcaatatttaattataccaatagaaatataacacgtaagaaggtaatactttttagtacttctcaaagtagatttcacacaagaataaaaatatctcttctcaacttactcactttgcatcttcgaatataggtgatcaatatggttttgaaagagaatatatactcctccttttacagccatatatacatatatgatcctcatctacaaccatatattttccatcttaattaaattaataaaaataaacaaagctactctaccataacagatatatatttctgttcccagttagtactgtaaataaatattagattttttgacacgccataaaatcagtacgagcactacctgccagcataatatatatatatatacaaaaaaaaaaaaaagaatttagacgcaataaatacagaaaatatgagtttaagcacaacaagtctaaaagcacgacatataaacacaaatagattagctcaaaagcataacatattaaaaagcctaataatttgataataataatattagtaaatatttatttacaaattaaaataataatattcaaattctaataattataattacttttatatgtatatgtgctaattttgttaaaaaattacataaaaat

SEQ ID NO: 201603 - DNA, 1098 bp, Cannabis indica
gtccaccaaaccctcacaaaaatatttccctatacaatgccagaaatgcttaaagaacaaggtggacataccatctggactcggggctttaaaatttcccatagagaaaaaaggttgtctactttcctcatgatctaggatcgaaatcaaatttgcctgctccataggggataagtgatctgatatcaagtgattcaaactctccataggggcctgagttggattagtaaagatgtcccctaggaaaatcaaaaattccttaccaatatcatttatgcttgttagccagatcccatctctgtttaagatatgctccagggtattttatcaatttcataatagtggtcgtaatgaaaaaaaaacttagagcatttatctccatcttttatccaagatatctgagatctctgctgctagtaaagagctttcttttataaagcctcattaagggctctcctcacatccacctctctggcctagcttcttgagccagtcggcaacttcttgatatccctaagttggtgttccaaccgacctatacaagtgtccagttttccatattgctccttattccacttgctcaacgccaacctagtagcatcaacctttttaaagactctagcaggagcccatgcataggagaaagaatttcaggcatggtcaaccataagagagcttcaggggtctctagtccacctgcttcaaaccaaaattgatgattagaaaaagcttcaggatcattagtacgaagatacatgggtttatggtctaagttacaagtatggagcgattggatcacaactttagcaaagatgtgtaatcattcctcattgaccagagctttatcgaggaccaattttacatgatctggaccattccaatggttgtcccaagtcaagtagtccccttttatgggcatataaatccaaacattgtaattaaccagatcaagaatgaatgggagaaatcgctctttctccttggatccaagacggtcagagtttctcaaaacaaaattcacatcccctaaaattaatcaaggccctccaaccttgatactgatttccataatgtctaaccaaaatttcttcttctcat

SEQ ID NO: 201604 - DNA, 2414 bp, Cannabis indica
tatattgggccttttatttttttgggtcttgtgcagtagcccattttgcactccatcatggccggccatgtataatataagcagatatattgatctcatttatgattatgaacatttttttttaaaaaaaaaaaacgataaaggttaaattaaaataataaatgtaataaagttacgcaattagtgaataattttatttcattcacagtctttcctaaggacatgcagagatatctagaaaaactagataataaaaccttaataaaaaaaaaaatcaaaattaaaagttgtgacttctgacccaccaataaaataactacaaaataaagaaaaaaaaataatatataacaaatgttgatggtgaaaattcgtcaactaaattatagccgaaaaatcaaaacttggatgtaagacctaagactaagatgaagatttggaaatatggaaacttaaaaaagaaatgtaaaataactatggagaaagatagaagtgtatatttctctaggtcaagtgttataataattttacaactccctctcacatctgagaatagggtatttataggctctaatggcctggaatacacttgttgttctcaagggacaagttaggcttatgtggctgtgagttgcacgtgcaggacaccttgtactattgttgggtgtcggctggtcccaaattttggagtagtggtcgtagggtacttgttgtcgggagataaggggctacagaggaagtgcctccactacttgtaccccctcgtctccaagtcacgttgaaggtgtgaccgtactccatttcgtatccttccgcttacatgcctcgtctttggattcctctcctaatggttttctctccaacacttagccaaattctcacacactcatcactcccacgtctcgcacgccccacagctcccacggacatctcgcaccattgctcgcacgcaccaccgcttgtagggaaatttcacaccacgactcgtgcagatgtctcgcatgcaccacgactcacgtggacgcctaacaccacggcttgtgcagacgtctcgcacgcaccacaactcgcaaggacatctcgccccatgactcacacaaatgctccacgactagcaaaaatactccacgacttgcacaaatgctccatgactcgcacaaatgctccacgactcgcacaaaggcaccacaactagcacactttacttgtcttagtgttttggccataactttctcgatatatgtaggaattggatgattcaaaatgctttagaaagataggaaagagatctatggatttgatgttcatgacatgatctaattctaaatgcatccttatgaaaatcctctaagagcttccacttattaaattggccttactaactctacttgcgcccacctacctccattgaaaataccacaaacaatcacaaatgcacgatggacctttcaaaatcttcatagagtgatattttctcctttgtgctttcccaacttatctaacactctgcttgcgggcgaccatgaggtcgattttcaaaatgcttggacaagtctctgtggatcgtaaatatcgattcttggagttaacataaggttaatccctgactaatctcgaagattagatttgataatttttagggttaacaacaaatatttaatacaatataaaattttatataaatagtcacatataattctctcatgtaaagactagaccttatttattctcatctccattgttgaaagcgactacaatacatcttatgtgttattattagaccaaaataaccttacaaaatcaaaactagtaatataatggctttacaaaactaaaactaatcatactagcctataaaactaaaactagccataatgaccttacaaaaccaaaactagccatactgatcttacaaaaattaaaactagctacatttgtcattcaaaaaaaatactagccacattttccatacaaaataaagctagccacattggccttactaaataaaaagcaagtcatttacaaaactagacatattgccttacaaaacaaaaaagccacattagccataaaaacaataaagctcatctgattatggaacttttttgattcaccattatgcttataattaaataattaccatttatgaaaatatattcaccattttttttagagaaaatggaaacatctattaataggtaaatcggacaaaattcattacatgaaaatatagctcaaagagcaaaattatgaaaattagacatacaagtcgtttacaataatatgaaagaaaaccctaacaacaacctcaactagggatccaataagccactagcgatcaagcattgaagatgtgtaaaactaaatgaacatctgatggaattcacctatcaatgactatcagccaatgatcttct

SEQ ID NO: 201605 - DNA, 704 bp, Cannabis indica
aaaaaaaaaaaaaccctctcagcttaggtcaggcgagcctcgcctcagcagccgtgtgcccaggccaccaattgtgttctcccactgtgccgcatcagccaccactaccacactccacctttcaggtctccaccagccaccactccaaccgcgtcgttctcctaatccttaccactaatttttactttcaagtattcttttgtgattttattttcctatttattatcattgatttatttttttaaaaaaaaattatattttttgtcttggtttggaagataattagaaacataatatttattgtggaagaaatagaaattaaaaagagtatattattgtatctatgtgattatttttttttttaggttaataaaaaatgtttttaatgagtgaacaatgattagaattcaaattgtaaatataaaaataaagtataaatgtataagaaaaaaattataaaaaatgaagaaagtgtaaatataaaagaaaatattaaaattttagggtgggtatatgctacccctagtcctatattgggtacgccactaggcatccacattaatttttacagtcccatactaggtggcatccagatagaactagtaaactatttgaatttgaaggcgaattcccagccgagtaagggccactggaacccttgtttaatctctaggtaattatgaataaaatcacaacctcaaaaa

SEQ ID NO: 201606 - DNA, 688 bp, Cannabis indica
ttttttttttttggtaattaaaagcatttatagagttataagatgatgttagatcttgctgtcattacaaaaaaaaagttagaggatacatccaaagtgggtaaatgctattagctacaaaatttcaagtccttaaaatattagaaaacaaacaatcaacaaaaaagaaggaagttcttttagattgactagtatatataattgttatcaatctccattctagagctcactgcattgagagttttaatgaccttactagaatcgtttttcaaatggtaattcaaaagttacaaaacctactgatcaaggcaggaatatatacatgaatacataatgaaaatttaatatgtactagatatcatgcatcaaacaaagaatataccacccatttaatcaaagacaaattaactgtttcatgtaaatcaattgagactcggaataattcttcgctctgtagaaatattattatgccttgtgctaattttcagttctaagaattaattttaaaaaacaaaaaaacatacgaacatgtatcttgaatagagacgatcaccaataagaagcttgaaaggccatacaattattttgttggccgaaatcgaaattaaaagtttgattgggttggtttaaccaatttcattgtttggttaattctgtacaacacacactactaccactactaaaaaaa

SEQ ID NO: 201607 - DNA, 1123 bp, Cannabis indica
ttgggagaaggttaaagtctggattgcaacatgggtctaaaagacaaaagcttttagggtgtaccttttcaagacttgactagggaatggggttctatttcgtattagtgccttggtatgaggatatagacataggcctaaatgtatcgggttttgagcttattctgtattttatgcttttaatttttcatgtttatcatgttactacggctttcctccgccataagtgaggctcctgaaaggcctccagttacatgtgtattcccttaggcccaaacaaggaaaggttactagtgccttgagtggatagcgtttttggtgggctggcatttagtttgttatgtgagctatgttaggttgtggctggtttcagtgcattcagttggatataataaaataaatatagtgagtcttttgtgggtgtggggaaattggtttaagcttgtaatagctagggagagaacaaggctcttgaagtccctgatattaatataccagtaccattttcagcattgtctcttctatttttctctattttatgctactgtaactttaatttggcagcatttcctgtcagctccctaataaacttgggagaatctcagtctaagacaagtgacctttgtctctttttcgaaaaaagataaataaataataaaatatagtttgtactgtattatttattgacttatttatgtatttaatatcttagtttactattattttattgttttgtttgaacactttttagttatgagttttgtctatgaattatatgatgaaattttattacaatgtttaattgttaaattagtcggcaattagtgcaaaccgccactgcattcttgtgatgcagtttgtgtggttttgaggtctatgcagtgaggttcaaaaaattagctaaaaaccacaccacaaacactgacttgtggcggctttttgttgttaagagagatatttctagtaaagaatattggggattttgttggtcaattaaactagctgtttatcttccttttttttttttaagagggaagggggaagctttatgatacattggtgttatgccatttgaaatgaacaattgtcaagatgtggcatttgctacaatctagttgatgaa

SEQ ID NO: 201608 - DNA, 535 bp, Cannabis indica
aggtgtttgcaattaagcagccagcagtcacaaaaatccagtataagcaactactataataaaaataaaagttacgaactatagaaggtatgactagattggagtggctaatttaaatatattgccaaatatttatagtttcactgcagttgtgagtatatactatggtagcagcatgtccatcaaactttctaacttcctttcccttggatttgctgaagaagagtggctgcaagttgtaaagttgcttgtaagcgtttttgcggatccgagtctgcttcctgtgtactactactactctgctggtgttgattttcctgaggcctagcttgattatccctctgaaccaagtgaggcacagctgatgatacatttggtacttgctgcatctgttgaaattgaccatgctgagatgttgacaacatagaattcatctgattattatgtaaaacatgattctgggatcttgagctatcctgccttgaatcgttttcagttaatgtgtttggtagactccctaactgcttctgcccaa

SEQ ID NO: 201609 - DNA, 1307 bp, Cannabis indica
tattattgtatattccaggcccatggcccaagtcaaagcccaaacgaactaatacccattttccttcctttctctctctctctctcaaagcagtcgccaccacagccaccgttctcttctgttactcactctcaccagctttttaaagctgttattgtcgtttccttggatttcattctcgtttcgtgttattcccatttcaatttcccaatgttgaagttcctatcgaaagtgagaatcgaattcaatgctttggaccctcgcactgcctcctgcttggagtttcttgctcagtgcaatgcccgcaaggccaaggaatcaaaccctgcttgtcaactcctcgtcaagcgccgcaccgacgacgagccacccaagatcgccgtaacgttcgtgaatggtgtggaggaggtgtttgatgccacttccacgcctgcccagaacatcaggaacatgattcttgaaaagggtcagcatctcgagactgagcagatgttccgggaagcaggggagtcttggcctgttatcattcctgaggaagagatcaatcagtacttcccgggaacaaaggtaaattctctcttttccccttttttctcgttggagcatttcatcgaacagttggtgtggtttgggatccaactatttttccataataaagattggattttttttctggtgaaaacttagatgttaaagtatgctttatgttcaagtgctatagtgtgtttttctttgattgagagatcatcatatatgacatgctcaaatcaaattaagaaattatggtggcttatgcagtcaagccatgatgttcgtttatagttagttagaacaaatttatggtgtctttgcattaagtattgaactgtttgatgactaggttgggtcttatgtatggtaatgattagtacatgttgttgtcattttaagtgaatatctgtggaataggactatacattggtgtcactttgttatgccaatttctacaaacacttcatatgacattgactgtgttaagtgttactaaatttctcagctttagcttgtttgaagccacaacaataaacatgctggttgttgttttttcattggtttttttgtgtttatgtacctatggcagccaaggaaagcagaagaaaagaagcaataattgtagttttgggatgatgagaattgagaagagacaggtctggtctggtatgatattagtcaatgagattggattatattatgtttcattcttgtattgttgtttgacttcaatgccaaagcaaccttgttcccttttcaagttatagacaaataaa

SEQ ID NO: 201610 - DNA, 1031 bp, Cannabis indica
actttttttttcgagtatatctcgaaggtggtttattatgtgtttcattggatgcggttcaaaactttggactttaattgttggattgtttggtttactatgaggagaacatggtttattgccaccatttcttatgatttgctgggagtttgtgtccatggtctttggctgaactggaatagttgttcgtttgatggttatatgagaagtgaagattgtttagttaaagatatcaaaatagtgattttataaaaattatacattgtaaaaaaaatagaaaacattctatacaggaaagaagatttgttgagaagctaataagtaattagtgttgttgggtgggggtattgtttgagcccttcgagttgtataagttgtttgtatctttgcttgtgattaataaagttagggatggtaattatactcgcgggttcaaatacctgcgtcgagtttaagtattcacacccaaattgaggtcggggttggggtattgatacccaccctaaaactgtcccgatatgactctaacatatatattatcttaaatttaaataataaatgttgttattaatttacttcacgctaaaatttttttattgattacatattaaggagatgatttttcattgttcaagaaaatgcatgtatttactatttatttaaattaattttttttactattaccaattaatgtacacactatttaattatatatctttactcatcatcattatcatctctatgaagagttattcactgttttaaaaaaataaaaacaaaattgcaaaagtaaaaaaaagaaaaaaacttttacacttttatagtattttcttctctgttaaagttggaaggaagtcaaacaaaactaataaaaaacttagcatcatcgaaagtgtttttgacgttggtgacgaagttaaccacccttatattacgtatcactatatttgaggtatttatattaaatcgtatgtatatgtatatatttgttagatatatgtacagtatattggtatatattagtgttttag

SEQ ID NO: 201611 - DNA, 1248 bp, Cannabis indica
aacgcctttttgaatggagatttggaagaggaggtttatatgcaaatcccaccaggcctcaaaattccttcatctatcacggggaccaaccttgtttgcaagctccataaatccatttatgggcttcgccaatcatcgcgacaatggtataagaaactcactgacgccctcttgcatgaaggattcactcaatcccaagcggactacacacttttcacaaaaggatccaatgatacatttgtggctcttctggtctatgttgacgatatcatcttagccggtcccaacctacacatacttcatgctctacaagactcactacagtccagatctcgcctcaaaactttgggttctcttaagtattttctcggctttgagattgctcgagccaaaacaggccttttttaatctcaacgaaagtataccctccaacttctccatgatacagggtacactagcagcaaaccggctaaagctccaatggatccaagacaaaggttcgatgatattgaaggagaagttcttgacaatccttctcaatatcgacaactcattggccgtcttctatacctcactctctcacggccagatattacattcgctgtcaacaccctcagccagttcatgtctcgccctcggaccacacatttgacagcccttcatcacttacttcgatacttaaaaggatcaccgggccaaggcattttttactccactacatcttcactacatctctgtggcttctccgattcagactgggctacttgtcccaccactcgtcgatccatcaccggcttctgcatcttcataggtgactgccttatctcatggaagacaaagaagcaagccacggtatccaaaagttctgcttaggccgaatatcgtgcactagcctccaccacaagtgagatgacttggattcaatatctccacaccgatcttcatattgcccaacccacacctgcctttatctattgtgacaaccaatccgcaatccacatagctaacaacccaacttttcacgaacgaactaaacacattgaactcgactgccatttcattcgtgaaaaaattgccaaatccaccattcgcctcatccctgttagcagcaacctacaactagctgatgcctttacaaaacatcttccttccaccactcttaactgccatttatctaagatggccatacataacatctatgatccatcttgagggggagagggggtaacaagattacataactaattg

SEQ ID NO: 201612 - DNA, 851 bp, Cannabis indica
tattgagtttgattgtattttgtcaaattatctttttgttctagttgctcatattttagctaagtatgttttattataaataattaagtgtttggtaaccgagttatcttattggtatttagaactttttttatcgttgatatcaataatcaatgaattcatgtgctcctacatgttaatttgtcacttttcaaaaaaataaaataaataaaaaccctaaatataaatataattttggattttttttaaatgaatattaattatttttgtatatgtattgcaaaagttactaatcaattttttttatttgttaaataataatttaaaatttatattatacaaaataaaatataataatattctgagcagtcgaatctgattttaattagaaaaaaaatcctaaaacttgctctttcgcatatgtttaaaagtaaaacctatcttcatcaccctaattctatttcaaatataatcatagtcttaaaattgtttgaccaaaattgtgaacataaagtattattatgttatatattatttttttttctttgttaacattttaccctctattagagttacacccttttacccaatatgctactttctccatagagaagtaataataaggtattctttagtttttatggggtccaaggggtcaaacgttttttatataaaaaaaattatttgagaaataaaatgaaatttagataatttaaaccctttttttagcaaacccaaaaatgttgggagcttatgagttaatgttagaaaaggaaaaaaaaaaatcttgaatgaaaaagaatctggaaggcttcttggactgatgggcctttgacaatggcccaaccatc

SEQ ID NO: 201613 - DNA, 1122 bp, Cannabis indica
ttagagcttcccgctatttgttatttggtggtgtttcctaatataattttctcaatagaaaaaaaaaaatgtgaggttaagagcctatgattggtgtgtgaacaagagctttgagtttgacatcatgtaagttatttttcatattgtatgattattataagctcaagataattcaaacttctcaaagatacagataacaaaaatatttaagagaattttcacttaagtcttttcactccattttctacttctaaagtaaaagatgttgacaatggcattttctttataatatttgaatttgggactttctatttataagaagtataacacaaattacacaatgactatggtggttgattattaataatcatgattcatgatcactctccactaattatttggtaatttattcttcttttatttttaaaacaaatcatgacatgtatcacataagaagaaggttgaaatttaaaatttgcataaatcaatctaattcaattatagtcgttaaatattgaatatttaattatatgattataattaaagtgtaaaattaaatcaactcaaaattaatcaacaaacaattagtaatgacaagattaataattcacgcacaataatcatagattaaaacaagaatgaacagagtattaaaaaacaaaaacaataaaacaataaaattaacatcaagatatatatattggttcaagtcttatagactgatgtgatcattgtaatatcctgagatcactacaaggactagtagctctaattaaattgattaaatataaatgagagattatattattatgtaatcaattatgtgaaaatgattaaactgcccttatatgtgaaatatgataatttatggccttagaggcaaaatagtcatttgaacacaaaattagcaaaatgggatatttagtttatttttgaaaaaaatgaggaatcaaatttttttctggtttcttgaagcttgaccccttctctctctacataattttgttgcttgaaccttgaattctagagaacttggtggaattgaagaggaaaataagtgtggatttgtgtttgggcttggaaggattatttgaggtagttttattttattttttttccttt

SEQ ID NO: 201614 - DNA, 533 bp, Cannabis indica
ataaacatcacaacgagatcatgattggcaaggtacttttagtttgtttgtttttatttgaagggaatttcattatttaaatatcatcagtgttttgacagtgatacttagcttaacataatttcaggctctaaagcagctcccaagagagaaaatccagttagcaactaaatttggtatcattgtatcagagaattttcaatttggggtaaagggtacccctgaatatgtgagggaatgctgtgaagctagtctaaagagactagaagttgactacattgatctgtattatcagcatcgtgtggatacttcagtgccaatagaagatacagtaaggaattagtacaaaaaacaagacttttgatttttgtaaataatattatcccttttggcttaacttctatgagctcttttttaacttttagaattaaaagaatctttctaaaagtgtttgtagcttctccaaacacacacctttcattaaaaaaaaatctgcatatgatagttattaaatggtaaaaataagtcaaaat

SEQ ID NO: 201615 - DNA, 687 bp, Cannabis indica
gctgcaacattttgcaggttgatttgaagattggaggacaaatcactttcgggttgcatctgccaggtagaagaaattatctcagcacactcagcatccgaaagccacattttttcaaaccaaaaacgagaccgtcttggttggatagaatcagttggggctgaggaaaaaagattgaccaagagagcgcgatgatccgaaccaaaataatcaaggtgagtaagctttggaagagaaaaagcattagtccattttttattaatgagacaccaatccaaccgttcctttagaactgttggatttttccggttcttagcccatgtgaattcatccccatcaaatggaaaatcttgcaaaaaaacatctgtccaaggttgttcgaaaggcattcatttggttatcatgccgcaaagggccaccattcttatgagagtgagagaatatttcatttaagtcacctataagtaaccatggatccaatggggaaacatcagcaagcctatttagaagttctcatgtatattttttgttaacggattcagggaagccatatacagcagagaaatgccattttggaccatcatcataagacacaaagcaattaaaatgatttgtattcattgaaagcggtgatacatcaatattttccttccataataacatgatccccccttttaaaccaacacg

SEQ ID NO: 201616 - DNA, 1202 bp, Cannabis indica
ctgtgtaagaacctcatttattttgcttgatttgtaatcaaatcctacaatttttgggataattcttgtaaatgaattttgtccaactttgtaattaactgtcactatgcaattataaatagtggcagacaggatcaaagagggggggatgaaaaacactcctatgtgagaggccctaaaaaaaccacgtaaaaaatgctagtgttcattttttatttttctataactttatttattttgtgtttaattatcgtcgtgaggctaaaatttggttaacgaaaatttgccttaacagtttggtgctctccttgagagcctctgtgaaaaagctcagaaaagaagcctcctgacataaaagtgatggatgacaccagaggtaatagtcctcaagaaggaatgaatcatcgtcctgggaaagaaccattgagtccctagggatctgctaaataattgcatgaaccatatgcaagccccaggaagacccagtattggggcccctggcttgacagaacttggaagtgcaacaatcggtcactccctaatcaagtttatgaggatggcgcttacgacacaaccagatacatactgatcgtggaattagaaaattgtcatcttaggccttgattgaaggaagcaaaccgacgtaataccgagtttgagagtgaaatagctgccgtagaggcagcactgggagatggtacccaaaaacaatctgaccttgggaaaagagatttacgaggaaaaccttgtggctcagaagtcaaggggcaggatttgacccagagatatgctcagaactctcaagagatgtagcctgaggaaactgaggagagtctaggtgtacaacttgggatacaaggagcatcgaacgaaaatcgttaaccccctattcaggctcatgagaatgaaattgatgcaaacccttttatgaagtaaaatgtgagtcgaaccctgagaagaagggcaaggcccgaccacaatcatgacaagagtgatctacgagagcatctgaacctgaaaagcctggcctccattagcgactcagttcaagacaaaaggattcattccatttgcgaatgagcgagtttgagaataagtttagagtacataaaatcacgaaacctaggagaaaactagggcatgatactgttggaaaatttgattggaggcctcgggataaaagaaaaagatgattccaaaag

SEQ ID NO: 201617 - DNA, 1180 bp, Cannabis indica
aaaaccataatgataacttcaccgccgatgcagaggggaaagatttgcacccaagattcatcatcattaccttctgatatttctttttgttgcccaaagaaaccctagaaggagaaaaataaattaatttgaaaagaatccctagaaattaatcatggaaatatatttatgtaaagccatttgtgtgggtctttttttatcatcccttttttgaaagattttggtggtgaatgatacaaattttcacttgtatatgatatgccactttgccttaaaaagattttcttttctattattgtgcattgataccattttgttcacttttatccttgcaaccaggagagtcacattcctaatctagagtgaccggcggtcacatagacatttcatgctacatatatatttgaagaaaactttatggtaacttatacatgtatatgtaccatcttttgcaaaaaccgttatatgctaccttgttttttattcacaatctgtaatctaccttctttggtatctagctcctacatatttatacatttagtatttataaataaaatacaatgaatgagtatttataatcattcttttttgaggggataagaatgttagtttagtaggtaaaccaagtcaatgtctacaatgttaatttctacaacattttgaaatgttaatttccttaaaaaaatattctacaacatttgaaataaacaattgataattgaacaaagagtaaaaaagatatagtacatttatttgaaaaaaaaaaattgaagatagagggaacgagaaaaattgttcgtattgttaggaagaaaataaaattgaaaaaaaataataaaatgaaaaataattaattatgagaaatgctaatttaatattagatttggggtgttattaggggatttgagtaataagtaaagagcattgctgttaggtactagtggtgcctagcatctcgacatgtcgcgttgcgattagctagcgatattctctaaaagttattatattaaactatatgggacctaatacttagttggaccaatagtaatactgacacatacaccattggtgccctttagcatttctagatgtaaaattaaatgtatgtttagtttttttttatcaaataaatctatgtttagttatatcttaagtgcctcaagagtctcaagagtcaaga

SEQ ID NO: 201618 - DNA, 1093 bp, Cannabis indica
cgaagcgcggcctatttcctagtttatgaatattgctattgtttcactacataaataaacaaaatacattttgtacgactttaaaagaaaaatatatatttcctacgaaaccgtaatatgtaaatatctaatcagatttttaaataaataattttattattactttcaattttaattttaaaaataactcaattaaaattgataaataatgctttttttttcagagaaataaataaatgatttgaaatattatatgttaatcaaaaattaaattaaataatttttaatttttaataaatttggtggatttttcaccctcaagagaaacagtcttgttatctgcttcataagtggtggaattttcttgggaacttaaatattcctcttgaagtgacagtgttcttatggaaaatttatttgtcacaatatcatttcagcaattaaagctgaatttgaagttacatcatctttatcttgctattggctcatgccttgtttgtaagtttcctttttgttccatttctcatagcccattaattgttttatggggagaaattgttaatcatgttgtgtgtgaagaactaatttacaataagttagtactaagataattagtccagttcaattcaatcttaactaataatgtaattaatctaatatggtgatagtattgttggataactgatatggtcaatagtatttcagaatagtagaatagatcttcaaccttagtacaattgacttgactaatgccgataatggatgctcatcatcattgctggaagatcgccactgggttaggtttgaattgatgttcatgtaggcttgtatcgtaagcaatgtagtgtgctcttgtaggcatagttattagggatcgttgtggcaatattcataggcttttactttgtggttaaaaattgtagttttttttttttttttttttattttttttaaaccctctcaattattcattctacttgcacttaactctctctaagaacatctccaaggaaacaccaaatttggtgtcaacaatatttctactccaactacaacactaaaaaactattccttattattatttaatttttaa

SEQ ID NO: 201619 - DNA, 539 bp, Cannabis indica
gcggagaaagaaaatccacgatacccataggggagttcctcggttaaacagcaagccacgattcactatataaactataaagttcgaaacaaattttatttgtcttccccatctcaaaataagccaaacaaaccaactcaacggagaatatcttttatttgagtctgaaatggggagtttgagaagagcattggtttcggccgaccgtcttctccaatcatcggccgcaatccaccgcagagtctcgatcgccgcggccaactctctcgttcgagcgcctgaatccttgtgtaggtcggttatttccatatttattcgtttgttctgtgatttgaagttgttgaattcgtaattgtgataacaagttcgtttgtgcatttcgacgaacacttggcaggcctcgttcaagcgttgcttattctggggtttaccgtttttattcgaacaattacaccaatttacagtctttggatatcgatctctccaatgaagagaacaagaaacgcctttataacaggtttctttcttttttttttctt

SEQ ID NO: 201620 - DNA, 661 bp, Cannabis indica
aatacccattaagagtgcaccttttaaaaaacaatggaacataatacaaaaaaaataaaaacaatggaacgaagttaagcataaaaatgtatgatctacttactcaattcttgttgatctgcatttcaaagagctgaaactgtctgaggagtagactgaaacagttataagtgaatcattgtttttattgtaaaacaagcttcggatgacttcaccaggactaacattcataaaacaaagtctctcatttgtctctgtaataagaataggcaacaaaagatatataacatagtttccttaacagaaacaaatttgaagcaatatggatgattccaaaaaaacacattaaacgttaataattccagcacaattcaactgaagatgcaattaaaaacggttaatcatgttgagaggagaaaaaacggcagtcttccgggattaatggtgatgtagttcatcactataattccgctctacatttaacaaaatttacattgatgtatcatttttttttaattgtaatttacattgatgtatcattaatatgtactgatatcatcagcaacggccaaataaaactagttattagatagatcttcaaggaggcatttcttgtttattatttggtgtagtagttccaaaataacttcttttttttttt

SEQ ID NO: 201621 - DNA, 658 bp, Cannabis indica
tatacaatatacaaacatacaacacaacacaactcttgtttttttttttggctaagatagaaagcatattttaactaggtatacaaaaaaattagtccagccagccgcgttcgattgagtagcctattattttaccaaatgaacggaggaggaagatagtcattacatgataagttgaatactgaagaatatacaaatattaatagaatacacttagaaatgattcccagtattaatattaaaatgttataagctgactttggcaacatgcatgctattagacactgatctcgtcttttaaaacaactgccaaaccagaaagcaacagtaaacattgtcaaccttcaactattttagaatctcaattaaaaacctgaaagtatatggttataaagtggacgattcattcctgggaatcagataccaagatcaacttatcagttagttaagctgggcaagaggcaaagcatatataatggataaatatgataccttggggtgtttggaaaattactatgtaattgattgtaaatcagactaattacaagcagtaaaaacatttaccataacactgaaaaagtgtaatgaaatgtattttataatattttaacaatggctaagacaactcatataatgaaaggtattgatctttgattac

SEQ ID NO: 201622 - DNA, 1983 bp, Cannabis indica
aaatatttggagaaggttcagaaaacttaaaaaagtttgattacgttaaattgagaaaatcccaagagaacataactcaaatgtcgatgcattggcaaaactggcctcgcaaaattaacttgacaacttaaatttggtaccggtagaagtgttaagcgagtcaagtatatgtgaaaaggaagaagttgagatgatttatgcctcgcctacattgatgacgcccatagttaactatctactcaatggacaacttctagtagacaaaaatgagacacaaaaactcttatattaatacctcgctacacgatagtagcaggccaattgtatcggaggggttattgaatgcctctcctacagtatgtacacctctcagaagcaagcaagataatcaaagagatccattaaggcttttgtggagaccatgcaagttggcaaagcttgtcaaagaagataatccaacaaggatactattggccaacaataattaaagacacataagaatttgtcaaaaggtgtgataaatatcagagcttttcacatatacctcgcgtaccaccaacagaactaagaatgatgacctcaccatacccatttgcaatatggagaatcaatttgattagggcattgcccacagggcaaggaggagcaaagtacgtagtagtggcagacgaaaggaaatagcacttattcaaggtgtaagtaaactagattatagattatcctatcagttaaaccctatgtattgataaatcataggaatacatttaatcatacaatcttgattactttaaactgtgttgacaacacaataaacaagaatatcaatgttataaggattttgatgaatttataaattaaataagtgatcaaatgaaccaaataacacattaaataagtaataaaataaatctatttctttattgataaatgaatataaaatattacattgaaatagagttttatataaggcacaaagcccaacagttgacagaaggcactgggcccagtgcctaggtcgacatattgtcaacttgggccatttccaaccaatttcttgaagaagtgtttcaatttttttttatcatctgaaataatgaagatacaagtaaacttgtggagaaatccataaacttgagggcctaaaaattgagcacaacgtccaagttgaattttgattattcaaatgccaattctgttatgtgaattctctccagaatggtcaaaatgaaataagagacctcgttctcaagtttgggaaccttggaagtatcaaaatgacatatttaaagctctaaaataagcacatagcccctaaggttgacaaatggccttgtgtgctgggttctacttttccaattctgattttgtcttgaccgttcatctagtttttcaccataactgagagccataaagtcaaaaagtctaattcacaacttcatattttcacatttctgacatcgtgattcactcaacaaccaggtagtttcgagtctcctgtttccagtaaacaacaccatatccaagaactggtaccagcttcaccaaaacataaaaattaatgaattgatttcaaaatattacttaggcatcaaaaagttcatcctcgacacattttccaactcacccactgtccaagttgacatcacttgtcaacttaagtgctggaggtcaacttgggcatttggcccaaagtagacttcagtaaaatgaccataactcacttaatatagattcgattgagaagattcaactagcatttagaaactaattcaatgatctatcaagtcatgtctcaaactccaatcgcaattcctaggctattaactccaaatttaacccctatgggagctcttaatttaagttagagcttaccgagaactggtgtcgtcgttgcaaccaaaactccaaaaatagacgatcaacctcaaaagttaattttcaccgttcaaaaatatccaactttaattttttttaatatttttt

SEQ ID NO: 201623 - DNA, 1059 bp, Cannabis indica
agaattgtgtgtgtatgtggtagaatagtaataaataataaagatgtaagtaaaaagttggtttagccgtgtataggtattaatgtaataatttatctatttagtatttttagtagtaaaatttcttaatttaaagagataggtacgaaaactatacaaaaagaccaaatacacctaattaatttttatttatttcatctaacaaaaaaaaatatttatttatttttacgaaaaggaaaggaaatggaaagaaagaagaagaagtttattttgacctaaaatctcaacagaaggaaaataaataaatttcagttgtgaattgttgaagaagaaagtccaccattgctgagctttcgtaacctactgtcagatcgatttcttcctattcttacagtttcgtggaaaaactaattcgctttccagattagggctttcgattggggtgattcgatcatctagtgttactcttgcgattgatttcgagaattcttctggagtttctttctggagtgttggtgatttaattctgacatggatttggtatcaggatataaggtgatcgacattttaatataaattaattaattaattaaattcagcagctgaatttagattggataatggttaatcttaaagggtcattgtgctgtttgtagctacttggggttttgttattaagctattcattttcttgcagggtgttgttggtctggttttcggtaatgagaactctggttcaagtgaagataggtaaatcatttggttttgttatattacttttttatgtatatatatatatatatatatatatatatggtgcactacaaggttttctacctatttgtagttaatggagtttagtgggaatcagaaagtagaagacagagcgtgtttattatcttaaactaggaaaaatagtgttgtatgtcttgaaaaatagaaaacttatacttatgtatgtcaatattggtacttactattttatgtttgtcatcaaaagctatgttgaacgtattgcttgatcgtataagcaatggtaagctggcagaggataggagg

SEQ ID NO: 201624 - DNA, 1057 bp, Cannabis indica
gtaggcattgtaagactagtcaagaatattgtaaaactattgttcgaaagctttgcagcaattggtcatagtgccatgagatgtaatcaatcaagaggtagatcgtctcattactctttattttaataggtataagaactaaaaggaattattagtaccaaacttttgtaaatattttcattcttttgttagtaaattttgataagtaaagaaaataactattaacaaatttttgttggtagtgtcaaaaatgttaaaaaaaattaattttttataatcaaacaaagagtagataaaaataaaagcaaatatataagtttttagaacaatatattaaaagtattgatagcacttaaatctataatattctgtcggcctagtgagattgcaccagaaatggctgaggctatgggtgttagagaggctttaagctggataaagaagaaatcatggcaggggatcattattgaaactggcagtctcatagttgtgcaagcaattaggagtcctcttgcaatgttgtcttactttggaaatgttatatctgattgtagaactctgttagagggtttaattgatgtttctgttcttttcatcaaatggtctgcgaatagtactgttgctcattttttggctagagcatcctactctattgttgatcgtgttatcagaagtaatgatatttcttctgactttcacaatataatcttaaaggattgtagttaataaattgatgatttattttctaaaaaaaaaaaaatctataatattcttgatgatataaatataaatatataaggcacttttgtaatagttactacacacacctattattgaaaatattgataatatgacatgatttggtgacttattatcatttgataacattgacaacacttttattttttattgtttaaatcacaaaaaaaaaaagtctttaaaaaataaaaattcatagctaaatttattttttaattttaaaaataaaatataaaaggatgcactttttatggctatggtctttgtttatctatttgtaggatttttaccgttttaa

SEQ ID NO: 201625 - DNA, 740 bp, Cannabis indica
gctcaattcaacaagaatgcctccatctccaatcgaaacaacaattctggtaggggacaatcacagggccgtagtaacatgcaaaacagaggctctcaatcgaatgatcctggtgcatccaatggccatggacgtggttctcatcctgtccgccaaatttgtggcaagattggtcatcttgcatacacatattatcattgatatgaaactaactcacaaaccagctccaccacctctcaacctcaaggccacaatccacaagcactgatttctgattccaataccccaactaaggacaatggctagtatgtggatggagccacacaccacatgacttcagatgctcagaatctcaacacagcccatgactacaaaggcaaagccaaaataactgttggtaatggctctagactttcaatttctcatataggccaatatgaattctctacttttcatccaaacaaaaaattaattctcaatgatgtgttacttgcccctactatcaaaaaaaatctgttaagcatttctaaacttacaatagataataatattaccttaaattttgattctcatgcatgtatggtcaaggacaagacttcgggccaagtacttctgcagggtcatcttaagcatggcatatatcacttggatctccctcaaacaaatgtcaaccacactcaattcaataagaggccactctctacccctgctacttacagttgcattaaagataatactgg

SEQ ID NO: 201626 - DNA, 2191 bp, Cannabis indica
ctttctcaatcatttgacctacgatatgtaggttttaatcaatgttgggtaccaagagtacatcattgatgtaactcttgctttttttagtgtcaatggcaatggtgcctttgtcgactgcttccatgaagtcaccattactgattttgactttagtcttggatttatgaagactataaaagatgctttcatttttcgtcatgtgattactacaaccactataaagatatcaagtatcttttccttcttttaatgcagcttggcaggcataaaagaggttaatttcatcatttttctcttcaaaaaaattagcttgatgagatttctttaaacaacaagtttttttagtgtggtcaaattttttacaattttggcattgtggttttcctttacaccagtcgtcgttctccaaatgactttttttttttacaaataccacatagagaatacttgtcgttattttctttttgtgtctttttcccatcaacttttggtttttgagattacggattaattttagattgaaaggcattttcagtttcactttccttatgcctttctcgtctactttcatatgcttcaagagagcccattagttcagtcggtgatagagtttccaaatcttttgtttcttctatcatagaaactattgaatcatatttttctgtacaagaaattagtatctcttgtactatatttttctcagatattatttctccgtaggctcccatttgatttactatttctttaatttttagaatagcaatcttttgcggtcacattatttttcattttaaaattttcaaaatctcttctaagcttttgtcatctaacagtgcgtaccttaattgtttcttggaactcctcctgcagcgtgtcccatgcttcttttgccgttgctgtgcccataattcgtggaaaaagattatctactgtagcttgctacaagtagtataatgcatgagaatccttttattgattatcctcccgtgccttcttttgatcttccgaaagagatgtaatatcttctggaatattgattcattcttcaacaattttccataaattttgtgataaaaaataggtcttcattttgatggaccaaaaatcatagttttctccatagaaaattagaagaagtagagaaaagcagttactcatgttgaagagcggaaaagattatgcccaatgatatgatcgaacggagctttgataccaatgatggtttgagaataaatttgtattgattttgtttaattaaggtggatatgttgttaatggtttgttgtggtaatgtagtgaagtagtgatgttgatgagtaattgttgatttagtatatgaaattaatttggcttagaagagagaattgtatgtaaagtagtaagcttttggaactttggtttttgggtattggttaccatttggaacctttgatgggatatttatagttgctcaccccttacactttattgttagaattatttcttctagatctttcttttactagaaggaattatatccaaacaaatctaaatatttctagagttaacataactagtatattttagacttaatctaatctagaaatctctttcttagataatattttctacaagtgtatagaatttttcagactaaattgtgtagaaatgtgtagtaaattctaatactactaaagtcagtctcgcccatataagcagcgattatgctgtaattttttcttttttttttttatctgataactcaattaggtttttatttcttttttcgggaatttgacaaaggtattgtgtgaatcagatttttttcagtcaatctttgtgactatggtggattttgattctttgaataattttgtggattttatttgtgtatttatttattatttttttttctctaagcataggatttggatgttaaatattttttatgccgagattttgatagccacttctgcaattcatctgcatgcttatgttgcttattgtattcatgcattttccaaaagagtgaccaaaactgtttattaatagtcctcttcgagacaggacaaatctcttaaaatacactcttcgagtcagtgccaaactctatttgaaccaaagttctatatactcattccatatctcacaataactacacaattacatatttatactcattcacaacctttttcaaattactaataag

SEQ ID NO: 201627 - DNA, 712 bp, Cannabis indica
atatctccctctttgctatacttttttaaccgcaaagatagtttaaactttaccctggccacgaggggcttttagtagtgtaatagggtcttccttttttgctgttcctttcttggagacttgttgtgataggcttcttaggggctagttgtgtttactgaagcacttggttccaacagccagtgtttcaatctttttccctttattcttgattgcctcctggttgattcaagaattgctttttactttgactctttctttcttggggccgcgatacttttcggcttgattcccgaattactgtatttttgaaaaaatagttagattttttatttttatttatttttccacctgaagataaaaaggtaaattttaaacaaagaaaaaatgccctatttttttttttaaaagttaaaaaaatcttataagtaaaaaaagaaaaatattatttttatttagttttaattttaaaataattcatatatataaaaaagagatatgaggcggtgactgatacactaagaattctccaattaacattattagttctccacttaattctctcatttttataattttttattaattttataaataataactccaaaactcatatttaaaaaaatatgtaattactattattgaatatttaaaaaaaataatataaaaatcacctaaaatctatatcacgtttctttctttctttcttttt

SEQ ID NO: 201628 - DNA, 1781 bp, Cannabis indica
ttgggtaaattctattgtataattgagtataaaataacttaattggacttgagcaatgttaagtgttttgctgttttgggtttgttagtaacaaagaggtttttattttctgatcaataatgtacagagaacagggccagtgaaagctcagacaacccccaccacaaccccatcagtgacaaagtcatcctcagaaggaaagaaaactctaagaaaggggagtgtcatagtcacaggggcctcctctggattgggtctagcaacagccaaggctctggctgagagtggaaaatggcatgtgatcatggcctgcagggactttctgaagactgaaagagcagctaaaggtgctggcattagcaaagaaaactacaccatcatgcatttggacctggcctccttagacagcgttcgccaattcgtgaacaactttcgccagtccgagaggccactggatgtccttgtgtgcaatgctgctgtttatcagccaacagctaaggagccttcgtttactgctgaagggtttgaactgagtgttgggactaaccatcttggccactttctcctctcaaggttgcttattgatgacttgaacaaatccgattacccttcgaagcgtctcatcattgttggctccataacaggtacaacaaagtcctcaaaagaattataatttcttcaaatggtactgtttatgcttcttaaaattaatattgaagatgtgattgatgtctcctaatgtttagctgcattgcaatagtaaataatttcaaggaaaattagttagagcaaagggtgctgatgctctcaattggctggctataaactatttcagggaacacaaacactttggctggaaatgtacctcccaaggcaaacttaggtgacttgagggggcttgctgggggactaaacgggctaaactcgtcatccatgatcgatggtggagactttgacggtgccaaggcgtacaaagacagcaaagtctgcaacatgctgaccatgcaggaattccatagacgctttcatgaggaaacagggatcacatttgcttccctttatcctggctgcattgccacaactggcttgttcagagagcacattcccttgttcaagcttctcttccctccattccaaaagtacatcaccaagggatatgtgtcagaagaggatgctggcaaaaaacttgctcaggtaattgttgagtggtgattttatcatgaaattgaaatataaaagaaacatggatggtacttaaaaaacatatctgttttgtgaaacaggttgtgagcgacccgagcttgacaaagtcaggggtttactggagctggaacaaggcttcagcttccttcgagaaccaattgtcacaggaagctagtgatgttgagaaggctcgtaaagtgtgggagataagtgaaaagcttgtgggtttggcctaataaattaccaacttgagtttctcaactaatctcttctgttaccaaatatgtgagagttctttttacagtgtttgggtatggagaatttaggaagctttgttttgctgtagagaaaattctcttgtagatgatttagaggtgagtgtttgcaaccactttcaataataaagaaaaacacagcattgttggaaagtacatctcaattaacaatacttctgaagaggataatagaatacaaaagctctgcaaaaatcaaatttgtatcaagatttcacatcaattagtgagactaagatatagtttcaaagaaaattcttacaaaaaataaaattagaaccgctt

SEQ ID NO: 201629 - DNA, 805 bp, Cannabis indica
catggagtgtctcttttgtatacatagcaactttattcattctattttttttttaattaatgctattaggagaatgaatatgaaatgtctcttgcacaatcaaaagttattatagaattgttaattaacgataaaaatagattaactcatttaattaatatagaataataacaggcttttatattattattaatattttaattttattatatattgtattgtttgataatactagatcattaattatagtaatagtaaatttataaaattaaattaaattacatcatatacattgtaattaaattgtgagtggtggtgtcctttcattttatggaatgtcattttaattttttttttctttttcatgaaatatttaatccttctattttaacattaactcataaaattgagcatttataaaaagtaacaataattaaagaaaataatataataatcatttacaattgatatatctaataatatcatgtagaagactatattttaccttccactctagggtcaaatataaatgtttgtttttattaattatttatatatttgtttttaaaaaataaataataaatatgttaggtaatgtttaaaattgaaaatgtataatatttttaaggcaaaatatataaatttaaattatcataaaattatattttaattatttaaaattatattatttttaatatttggagaaaattatgtcattatcagattatataaacttttgatttaattcaataagttgacaaaaaatagttcatttggttgcttgataattagtttcatacaatta

SEQ ID NO: 201630 - DNA, 1819 bp, Cannabis indica
taaatcgtaattaaaatttatataagaattcacataaaaactactaaagcaatctgaagcaattcaaaccgtaaattaaaaaaatatatatatgtaaagtaattctcctaaaaccccaaaatttacaaacttataggtaatgataggcactaatgctcttttttagcatttcactaaaaactatttgaaataagtttgagtcccttgctccaatataaataaataaaacctataggaaacaaaacacaattaagcaagaagaagtcaaccatccaaagtagtagcattacatctcatactcccacaatctaaagaaaaacaacaataaagcctaaaacaccggcatacaaactagtaaataatcctctttcaaaaaataaacattagtaatagtagttaggactcaaactaggaatagcaaacgggatgggtctgccccgacccgacaagtaattgcgccgccccgccccgccccgccccgccccgattaactcagaaatttaattgggtttgacctgaccttgggtcgggtttgaccggactttggaaaacacgaaaactaattatacaaaatagagagcattaattgaaaatttggtcactaaatcttatgttgccttcttctaagcaaaatcccaaaacattgaaaattaaccttaaccatttttcagttttttgtatgtttatcattatcatattggatcaaactaaataaattacttacctctagcataagtgggaggtttcatttccttaatagcaatatgatccaacaatggaccacaagtggggtcctcttgaataccaggattatgaaatgtgaccttaacaaccttattatcagctttgaaagcccaagcataagagtccccaccatcactgctgtacagtgtttgaatgggcagctcagctgactgaccagccactgtgatcctcaacgcctcgtcttgtgcacaagtccttgtggtcccaaaagtgagtgagtatatcacacctgctttaacggcgacgttttgagaaacagatgcctcgttacctaacctcactgcgtgttcgccacgtggcactgcaaagtaaaagccacctggctggggtccaccagagatgtactctaccaaacccttgatttcccacttgggtagtgagtatttgcctattataactgttttcttcatgtttgaggccttgggtgcttcttcaaagtccccatttggtaaaagagctataaaacaaattaacaaatcatgttagttagtttaagagtgttgttatgggataatatcttttagatgtgtcgccttataattggttaacaatactccttaaaaatttttacattaaactatatgaaattcgatacttagttaaattaagagcgatattaacacgtaaggaaatgttacactactagtgctttttatcaacctgtagctgttgcccaaggttttttagccaaggaaaatctcctaatttttatttttttttacaataaattcataaacaggccgacgagacaaaaaagactactgtcttagtccccccaccactcaagttcccatagagttagttacaaactaaaaaataatactcgtaatatcatatatatgttgcagtggtaatttattagagtaataactaaaaggttcaaaaatagctaaactttttcacccataaactctctaaaaaataaatagaaaaactacttaaaaatttattttgaaggcgcatcttttaaattttaccccaaatcctataaaagcttgagacaaccttgatttcaagtgataaataaatagaagttatgtatatatatatatat

SEQ ID NO: 201631 - DNA, 566 bp, Cannabis indica
taatagattaagtcaaattaacttgttgtatattcaaaaactaatatttacaaataattcaattatatacctaaattattatttccataaaaaaatacaacatacaaatttcttatttaaaattaaaaataatcaattaattcataaattcacaaatcttatatacttgaataatcttaaatttgtacacaaatatgcatatcgaagccttagggtggtgggattgttggaacttattttaccatgattttaatttactaacatgtatgtttgattatgcatctataatttaacatcttaaatatgaaaatcctaaaatgataaataaacatgtaaagttcaagaaatcttacattagttgcagcgaaaaaaaatatgacttgttctattcagtactctaacccttgttcctttctattgcatggtagtaataagtattgaacttaaatgctcctttgaattgacaaacaccttctacacagtcttccacagtgatctaagtattgccttgaattatgtgggcaatactttaatcactaaacacatgaatttgagaatgagagaga

SEQ ID NO: 201632 - DNA, 1047 bp, Cannabis indica
actagcaatctccactactcttaatggagctttaacatcagaatccagatctggaacaatggtcctcttattctaaaaactaagaataccaaagaaaatttgaagtaaaatagaataagcctttatggtattcttgtctgccacattcatctttgcattcctcaatgcattatagagaaagataaggccctcattcacatccagacaaccaaaaactcagtgaataactttttcaaaatttctctggattgccttgttaaacctccctcaacaaaaggctgtgaacaacttggggatgaaatttgtactcaaggacatccaagaaatgacctaattgagtatcacgaaatattttcatcacattccttgaattttttttcttgatgttcttaataacaccacaagtacaataattgacacatttagacctgtaataatcaaaaggatggaatttgaattcccaatcctacatagatatatagaaacacaaaaatagaaaattaaatttataacatacaaagtttcaaaattgtattaaaactataaataaacttaagaaaagaatggaacaactaaaaaatcaagaaagccagaatacatagtacattggaacagtctataaatatcatcacgaatatcaaccaaaacaataatgaatcacaaacgaaacctaaaaaaattataaaaaaaaaaaaaaatcacactacaataagcatttaacctacataaatttaaaactacaaaaatcaaaatcggcaagtaccataaactattagaaagagaaacatggttcgaagtggagaagcagaaatgaaaccctaaacccaactaatacgaaatagaaataaaactcaaatgaactaagcaacataataaacctaaaataacctaagaaataataatttttcaaaacctagaaccatacgtaaaagcaataaaccctaaaatatagtcaaaaattaaaaaaaaaaaaacgcaaatagaaatctcaatcaaattaggagcatgattcttccctttaaccacatctataggactgactctcga

SEQ ID NO: 201633 - DNA, 2622 bp, Cannabis indica
actttttttttgacaattatataaatataatttttacaaaaatactttttttaaaaggtcaaaaatatgattttaatgtttacaaaatttacaaaaactattttttactcaagacaaaaaaactaaaattataagaaaacaactaaaaaaataacaaaatattataaactatggtgccgtttggtaactacttttgtttttaatttttaatcacaaaatgaaagttaaaatttttgtttttaaaaaattgtttttagaaaacaaaaatgcgttctgtaactacttttgtttttcaattttaaaacagaaaacaaaagtgtgttctgtaaagtttatttttatttttattttttgattttatttaagtcgggtctaggtccggggtcggattcgggttcaagtcaaaagtcgggtttagcgccagggccgtagggaggggatttgggtccgggtctggtcgtaatctaaaagattgattaagaaaaaaaaactgtttaaaaaaatattgaaagtgatttttttttgtttttaaaattttgatttctaattataaaattgaaaagtaaaaacagttttatagaacatgtttttgaaaaatattttcacttttctacttttaaaaacagaaaactgattaaaaaagtgttaccaaacgccacctataaaaacaaaaaaaagacaaggaacaaattaatcatgataaatataaattaattatagtgtattatgtaaaaaatatcccccaaaaaataatactacaaaaataattggatgagaaagttaaaatgaagagaaatgatgtagtaaataatggagcatcttgcagatgagttctcaggacctcgattgggggtggtgacttgaatgaaattcttcatcaatatgagaagagtggtgggccagctcgagctcaagggtgtgtcgatggttggtggggcgcgaggactccatccatatccgtgatgattcttgaatccttaaggaacatgtgggtcgatcctactctttttgagggaaggttgatgttgagtgagtttgtgatcttaaacttgcctcgggtgattggaatgtcccactcatcgtggaactttttgatgatgcagagactaaatccattttgtctattcctcattctagctttgatcgacaagatagactaatttggaatttttctgataatgactgattttttgttaaggcttgttattggagctcagtttctaggcttggttggggtaaacattcttcttcttcagggccatcgaagtggtggaattttcttcggaagttttctcttccccctaagatcaagaattttatctagaaagtaagtcttaattttgttccatcctatgccaacttgaataggcatggcataaaggcttctatggtatgtcctatttgtcttcaaagtaatgaaacagcattacaggcgttatggttatgtccttctcttaaatccattcggttcggttggagtttgaaaggtttggataatttaaagatggcttccagtttaaatgaacttttggttggggttatggatattttattcaaggtaaaagttgaagaatttcttgtcctctgttggagaatatgacatcgtcgtaatacatttgtacatgataataagcttctttctgatgatatggccagtagctgggctcttaactatctgtggtgatactaggaagctcaaactcaaattgctccactagttccattgagcttttcactaatttctcttggtcatattgggggtgcggtttctaagttgattttggaagagtacaatctatttgttgatgttgatacttgctatgaaaggtggcaaattagtttaagggcgatggtgtgtctcagtatgatggtggcatattatgttcagttgctacccctatcttgggtttgcttgaacctcatgtggcggagacttctgcccttcttcataagcttctcctttgtgtgcaattgagatatactcgtatcaatatattctctgattgtttgcgcttggtaaattctttttcaaacaagagaaatgcttgcaatgagtatgacattgttcttacttatatccttcacgttcaaaagtccttttcccatatctctatttctcattgtaaccaattgctcattttctagctaaatttactctttcatttgaaacttctcaagtgtagtctggggtggcaaaacgggtttcgacacggcacacgaacacgaacacgacacgaattttacgggttagggttaggaaaattagtaaaaataaaaatattttattttttttaaaataacaaactatatatgcataaatgtatataagttttttaattgagcttaaatttattatttttctctacaattttagctttaataatagcaaaatgggtcacagtgggtcgatacgaacacgacatgattttttacgggtagggttagggttaagataattagacacgagtaaaaaaacaggtcgacacgcatgacaaaaaatataaaatgagtcacataaaatatgacacgaacacgacaggatgacacgttttgccactgttcaacttactttaaatagtttatgcttgtattgatttcacaatctctttgactttgtgcctt

SEQ ID NO: 201634 - DNA, 816 bp, Cannabis indica
tgctcttctggtttggactattgtctgtgtttccacttgttcctcttatggagaagaaaacagctatgataattgctcctatagaaattggcggggttgtggaagtttctatggcaggggagataataatagaggagtgaatcgtgctaatcaagggtatggtggtggcggcggagaaggtgggggtgttgggtctggtcacggtgaaggttatggagctggtggcggcgtgggtggtaatggcggaggcggtgggggaggtggtggagaaggtggaggaagcggagctaatggtgggtcgggtcacgggagtgggtttggtgctggagttggaatggggacctctgggaccggtggtggtggtggaggtggaggaggagagggtggcggaagtggcggtactgcaggtgggtccggttccgggtcgggtcatggcagcggttctggtgaaggaggagccggtggtggcagtggcggcggaggtggtggtggtgaaggaggtgggaatggtgaaaatggtggttctggtcatggtaatggttttggtgctggggctggtgttggtggcagtgaaggaggtgcaggtggaggtggcggtggcggtggaggtggtggggaaggaggtggttcaaatggtggtgggtctggtcacggtagtggttttggtgccggtggtggtactggaggagcaggaggcggaggaggtggtggtggaggaggaggaggaggtggtagtggttctggttctggtcatggtagtggctttggagcaggttttggttttggaagtggcggaggaggtggcggtggaggtgg

SEQ ID NO: 201635 - DNA, 1032 bp, Cannabis indica
actctgcatctggttcttgttttctcataattagagagggccctccaaagaaaattcttaacatttggaggaagttttaaataccaaaactttttccaaaaaccaaattaacttgtgaatttcatctcccgttaagcacttgcaacgcacagtaggcacttttaactgaatagcttccataatcttcaaacgcccaataccatgagtccatagtcggagttaaaggcaaaggaatgttgcgaatgagatcaatatctctcaattcaaacagatcctccaatacttcttcatcccaacacatatttctgtcttgtagaaggttgaaaatagaacaatgacgaagagcctcatgagaagaagtcacatacgaattgtcctttgaaggaagccacggttgattaagaactgaaatggaagtacccgaacctatcctccatctagctcccatttttacaacttcctgaccctcaaaaacacttctccaggcgtagttcggatttgaacccaactcagcatcaaaaaacgacccttgaggataatatcttgcttgaaacacacgagcggcaagagacaatggatttgttaataacctcaaaccttgcttcccaagcattgccaaaatgaaatcccgcaagttccggaagcccatgccacctttgtgcttatggaggcataacttatcctaacttttccaatgaataccaccaccttgggaagatttaaaatgccaccagaatcgccccataagacgatcaatatccttacaaatatcaacagggatcaaaaaaacactcatagtgtaggatggtaaagattgaataaccgactttagaagcacctccttacccgctcttaaaagtaacttgctatcccaactctgaatccgctttctaactttctccttcaagaaaccgaaagccacattcttgttcctaccaatcacacttggcaaaccaagataaaagctcttctcatcagcagagcgcatgtgaagattgaaaaaaagtctaagacggatcccatcacccgtgt

SEQ ID NO: 201636 - DNA, 1273 bp, Cannabis indica
agcctattgtaacttttgttacttcttgaggaattctactgttgtttattgtgagaaataatagatgatagaatattttgctctaagatcatttatgaatgatcaaacagattcaacttaggtaatattttttatgtaaatattggactagttggacttgaatgttaggtctttgactaaagctataatatgtgtatattcttaggtctttggtcagagtcatagttgtttaaaataaaaataccctcacaaaaaaatatacatctaattataagtataatctcagtcttaacacataaaccaaaaaaatgactcaaccccgtttaattaaaagcaaaacccaataatttcgtgtgaatttcgagtcgtgttattgtcttttacttgatttgccgcctttattcaggaccgaaaaatgatcacaaataaactatatcctactataaaattgaagccaaaacaaaacatttgagcataaccgaaattggggtatgcaacccttattctccttctaatttcatgtggatttcgagtcgtgttattgtgtttgacttgattttttaccttaaatcaggaccgaaaaaatggtcacaaataaagaaagcatatgatcattctcattgaatatcaagtgtaagtttttattttacatataggcctcaatcaattgaagctgttttatcaaatcttaatgttctaatacagaggaattaggcataaaattgaagctaaaacaaaagatttgaccataacaaaagttggtatggaacccttatctcttctaatgaaaagagcattgtaaattggcaaattaacaacaatgattatcccacaaagcaaaacctgcataatcatctgttctatagccttggaatcgaaatcgaacacaagctttttgacccaaccaactaaacagaacaagttaagcaatgccaatgttgataatatgttgaacattaagtttgagcttccaaactccattacctcttcatcatacctatttaagatatcttcagtcacaactttgtctgttaaaacaaatgtggtttcggatagaccaagttttctcttgataatgtctactaaggcaatgaagaaagcactagttcttcgaaacaaccacatcttctgtatgttccaccaagcttttagagtacttccgtggattattgcttccgataaactgtaaacgctcttcgctatgaaacaataagcgaaagggaggaaccatggacttgaaacctgaaaaattagaagcaaatggagttgtttt

SEQ ID NO: 201637 - DNA, 1584 bp, Cannabis indica
ttttgtcggtattattagtttttttttagttttttatatagtactattaaaaaatacatatcaatttatatttgagaaataaataatttaaataatatttacactttattaaaaaaaaatatatatattacccttaagtgcacgtgacggtgatgatgagtatatattgagttgtgtacgtagtagaccccatgcatgcatatatgttaaatattagtgtatttgtggtgttttcagtccacgtgcatgtcacgtgctcttaacttgtagctaatgttaagtgattatcgtatttattagtatggtcggatcggatatatgatgagtttgcttagcttgaattgaaaagactattaaatatatatcatatcatgaagaacacataatatatataagataagaaataataataatatggatattaattatgagtaatcaccatcacgtacaggtgggaaaatcaatattagtatagtgcatgttattttcatcaagatacgatccatccatgatatatatatttattaatatacatatgtactttcctttattattgctaattaatcaaattaattacgtacgtacgtgtatatatataattacatatttatatatgtaatgtattgtcatcatcataaatatatatatatatatgctgccactcccttaattatgaactttatgcatggtcattaattgtgacaaatatttcgtgatataaatatagttgatgtaatatacgtatatatatattagacatatattcacataacaaaaataaaatatgcttcctaaactaatattcgttatatatcagcaagtgtatatatatatagatatatatttataacaagagttccttcactaaatatgagtcatcatgtacgtttttttgtttttaataaaatcatactaattatagtaaatttttttttaattattaaaattttaacatgagattatagcttatatattgtgtataaattcaagagggagaatttattttgaataattatatgcatataatatttatagagttccttttatatgtatagtaatgagattatatatatatatatatatatatatgtctttttgtaatgagtggacgaatgaatgcgcttatgaattcagtataatatatataagtgctattatattcttatataatatagtactactattatatagtccattacatgcatatatatatggtagtctatttttatagatattatttatatatggacacctgtcaagattttcatttgaacatttcaaacaaagcaaagccaatatttctttgaacttatcgacactttcaatacaccacttttctatatataacattaagtggtccattaattcttctttctgtacgtacagctcttttctatttcaaatattggaccataaccataaccatatatacaggggcggacccacattgtagggagggggggcaatcgccccccctgaaaaaaaatcgagaaaaaaatgtatatgtattttacttagttacaacatatatttgtattaaaagatgatatttataggcataatagtaaccttggtgtaatggtt

SEQ ID NO: 201638 - DNA, 1455 bp, Cannabis indica
acatattaataatatataactaattctaatacactctcttcacgtttgggcttgaaaaatatagataagaaacaaccttcaagagactataggatcgaacataatatttgaaataatttcacaagacaaagtcgacaaatttgtgggtgtatatatcgaaaaatttataaattttgaaacaagtcaaatattccaatactgaaaatagacacacattgatggatactaaaggagaagcggaagattttgttttgctcgtctttttggattgatggcactttaaataacagatcacaatcaactcttttatagctcgcctttttgaatcgatgatactcagctcacaacaaatcacaagcagctctaatactatttaagaataaaaatgtaattaaggtttatgagttctatcttctattactaatttatattcttgcatcagtaacatgactaattctaataatatgttgggtgttcttccataattcattataggaagtatattgtaacctttttcttttctttgttttgaaattttaaaatatatatacatatatttttttttcatttatccgtaacatttaatggagctaggaggaggaggaagctatgtatatgattgatgataataaatctggtttttaaagattgaaatgattagttatgcaacgtggaataatggagtttgtgtttttgatatgatattttcaatatctatcgaaaaaaagattaaggcccacgcttgtctggcaggtcagatcactaaatatgaaatttccaatacacttttggccttttacactttaaagttaaacatcaatttttctttttctttctttccatattatcctaaacaattcagtgctacttacttgtcttaaaactccattcttttattgtaaaaaaattaaatctcaatattttacgatttttttattattattattattaatacctctaatctttattaagatataattaggtaattttttaattcacctatctaaattgagtacttgtcactaaatcattaaatgtgtgtcatgtttcatgtgatttatgtgtatatttttactcttttaaatttagtgaatgcttaactaaaagataagtaataagatagtggtggagtcccacaatgtagttattatttaaattatttaaatttcgttagatataatttttttttaggttccgtattttagaatgcaaataattttttttgatttgaataatatttttttgatttttatcaaacaatatgctaattatgttgctcaataattgactagaaattcgtgattcaatacgggttgtacccatttgaattctataattctgaataattaaccggatataatttttgaataatttgagttaattaatgaatttgcatttttctattaaaaaatgaaagaaagaagatgagtacgaagagaaagaaaaaaaaaagtg

SEQ ID NO: 201639 - DNA, 799 bp, Cannabis indica
gctccccagactttgatatctatcaaatcacgcccctcaaactttgatacttactaaattacgccccatgaactttcatccatgttacaatttttttactaaaattagataaaagtccttaaatttaacaatctcaatagttcgaggggaatttttaacggccaaaaaagttcagggggcacgatttagtacatgtcaaagttcggggggaaaaattactaattagcctaaaagttattctaccctttagaagtaaaattgcaataaaagttatttttctaattttttacgtaaatttttctaaaaaataataatttttgtatgttctcaataaaatattaaataattgtcaatataattaatattttttttcttattatattggagcacaattataaataataaatcaaatatagcataaacttattattatttttttttgctaaatttaacaaaaaatttagatcataaagggaaaatggtctaataattagcaatgctctattaataaatattgatccacgcctgcttcaagaatcaaagtgagaatttgtgttttttcacttagctactaataaagtattttgagttaaaagagaaaaaatggataaaaatactaatataagataataaattaaagacatataaaggacaaacaaaatggacggcttaagagaacaagcagaaacctccaacacctaaactaacaaagcattacaagtatcattagcaacaaaccaacaacattagtcttattccccagcctcaccaacaactaatttgatacttatatatttac

SEQ ID NO: 201640 - DNA, 861 bp, Cannabis indica
acacatatatcaatgatcaatcatattttttcttcaatttggttgtttcattcattgttcatataagaattataagaatcacgtgtctttacaatattaaattttttctatatttaatcttttacttatctctacaatcacgaggacataaggaatagtttgagttattgattaatttctaatggttttacttatatagattacatagagaccttttattgaaaggtgctacaggatgtaccaattatttgttgaagtaatgaattctctaatattaaaaaatatttataaaaaaatagtattagaataaaattatttaaagagattttattttaagttgttgactattggctcactgtcactactacaaaaagaaatattttttgtcggtttttaggtgagatttaaagaatttgtgttggtttacaaaacttacatatatgcgatgtcccaaatagttttttattagcgtcgttttttaaatgacgcaaaaacaattctcttcacttgaaaaccgtcacaatatatacaatgttcttttttatcttctgcgttagtttaaaaatgacgcaaaattgttcgtgccattttaaaaccgacattaaaaacttataccgtcggttgtaaaatgacacgtaagttgttgaaataatttttttttatacttattgcgtcgattataaaatgaaacataaatgtaggtaagagaaaattacaaatttttatgtaattttccctacctgtatttttaaattttaaaataattttatataagaataaatacataggcacaatgtatgactaaaagagagaaattcaaattagtcaaacctataccaagatttcaatgtgattgtatca

SEQ ID NO: 201641 - DNA, 1020 bp, Cannabis indica
ggaggagtaggtagcatttactattgccattgaatagaaaaataagggaaagcagccacaacagaataacaccacacaaagacaaccacgaaaaaacactaccaacacagagacaatccccacgtgatgcccaaacctttacaacacacaaccccacaaacaaaagaccccaccctgaaacaaacacaactgaaatcaagaagttttgaaaccaagaagaccaaaccaaacccaaccacaaaaagagaaaaggatagctcaaagacacagccacacacccacagacatgaacactaaacacctaaaagaaaatgagatgaaatagggcaagaaaggaaatgaaatgaaatgggaacaaagactctgaagaaaggagagagtggtagatgaccattctctctcttattgattttcatataagttattacattgacatagaatagaatagactattaattcattatatatataaaacaaattgtaaacattatgatatgatgaaatatttgttgacacacaacaacgtatgtaagaatataaagctaaggtgacgtgagaacaataaaacataagaattgaaaatgcaaaataacaattttttctaatataattattacgtataagaagatcctggtcgatagtaagtgtccgttaaattagttttgcatgatacaagctcgagaaagagaaaaatagtttaggataagttgaaaaatactttttttttatatctattaatcaaaaatacctttatgttgtttttttattaaaatatagccacttttttgagtagattgcctaatatacctttactctctaattaggtttagcctaaagggtctaatgaggacatcatccataaaagtaggtatatttaaaaatatatgaaaatagaggtaaaaataaaaacaagttaaataaagtaggtatacaatgtaatttcatcaaatagttttgtatcatacaacctgtctatatcgtttgttacattaaataaatttacatatcatttattcaaga

SEQ ID NO: 201642 - DNA, 1364 bp, Cannabis indica
atagatacgtgagattttctatgataatcttttagtttgtaccagttttggtgtgactgatgtagattccagtgagtagtgaaatgtaactactgctattggacacttattagttgtgtattttggttagtgtaatgcttgattgagagcttcattcttcttaatttcgtttttctttaatcttggattttttttttctattattatttatgtagtttttttagtggattttagctagaaattatgttaattcatgataatttagactgatttttgcacatttaacttggatacatatgagtaatgatgatgtaatattatttaaattttaaaaaaatactttatcacctattgatatgttaagagaatatataattataaattttaattaaaaagtagtatgggaactgtgggtgatttttaaagttttctactacgagggtaatttttataaaaaaaatgtatcaaatctaaagtgaatgaaaaagaaaatacaaaattaaatttttaaaatcttgtgtttattttagcaactcacaattatgggtgttatccaccacattggatagtcacttaagtggccactgtcttataaagcacgcaccacgtttttattattattatattatattatattagattgattaacagaaaaaagtagtcatttcttgaaatttctctaagaatacgacaataggtgaagaggacattaatatcaaagtcccgaccagtattttatgaaaaaaaaaacaaggaaaaattgaaggcaatatgaggttgtccaactccaagtggtggtagatgtgatatgatatggcatcttattttcaattatttatttatttatcagtggacaagacaagaattgaattgacatctatgttgtttttgagtccattacacaactatgattttgagattcatattaaactattgtttgtgtccttcctcatacataatacccattatgagatagagacacaacctcatacctcatttctagattaacttattatatttttcttataataaaaaattattattatataacatttaatataaaagattataataaaaaagaccatataatataccagaaactcaataaagaaatatttttttggtttttgagtttgagattaatttaataatgatattggctaacgcaaaattaatggaatttgatttttttttttttataattatcaaataaaattaataaataatttaattaatacatgatagaatttatatgtgttctattagaaattgaacttagatggatcagaatgaaaatgcaaaaataaaattacaaaaactaaaataaactagagctattcatcaaactgctcaaatcatcacac

SEQ ID NO: 201643 - DNA, 1300 bp, Cannabis indica
ttgaataccataaaacaactaacctatttcaaatgcatgtagattgttttaaagaaaaattctacagaaaagtataaagtagttaacatggttgagatcaagcactacctacataaactaaccagcatttcatttgtggacataaacactaattgagttggcaaaaaattaaataaaatcaaattttctcttgaaattttctatttgacagtctacatctgtaacattctacttctcctacagatgttggacaatgtgttttggcttatttaagatattaagatatatatatgtttatacatataagtaatctatgtctacaagggaaagaactcttatagtgtaagcaaagttgtcagtcaaatacaagtgtgttcatgcagatgacaaaataaacacaaagaaatatttacccgtagaagagaaggaacaatttctcttgctgaaagaatggatgacatctcttcctcctttctgggaaaattaaaataaacaaaagagttacatttattacaaccactcatccaaacctcaataatgtaaattagaagagaacactattgctagtatagccacaggagccatacatttgaatgaccagacatatttttgaacctagtttttatgattcaacgacagtctagaattcatatcaagaaatacatttcttgagggtcactaattgaattgtcatacacaaagctgtccagagcctttttcaaaagctatgtaacaagcaatatccatcatctacattgaatacattctacaattatttgcaaaagcttgcagagagaatagaaaaagaaaggcacctgcacaaaatttgattccctatttgggaaatgttaaaacattttccttaagaaaattctcaaaaaaattcaagtatcactccatcaacttttcaaactcaccctcttttgaaaatggatatttctatatgctgaactaataaaaaattcagagaaataaaacccaacagtaattttccagtttttattttttgaaaagaaacaaacttgtattaatgaagaatcaatataaagggagtatgataaaacaaagtaagtaattgcagatgtaagtgaactctttcaaccaaaatatctaatattcttccataaaactaccaatgattttgcacacataagtttagacctttcctatgaacccatgtaaagctacttcacaaaagaaccatctccttcagtagcagaaagtacaaatatgcaattttcaaattaacaactaaacactgaatatcacagatttaacacttcatgggccatgaactttt

SEQ ID NO: 201644 - DNA, 879 bp, Cannabis indica
ttcaatggtgatagaaaatctacctatcatccattggaagacaaagtccatgtagtccattcggtatagatgatctccagatagaattagaacatcctcaatatccttacttctagcatcctaaagcaaacagaatcaaatatgttagctaatacagtacgagaaaaaaaatcgtgtaaattttaaaaaaataaataaaaaataatcaaaatttgggaatatacggtttgtgagagatatatgtggctgattttttttaatttaaaaaagattgtttaatttttgagtttaattattgggtttatttgttaaatttgcgtttattgagtgatgttagtacattcactacctgcttctgattgtttgttgtatagatgtgtagagtcttcaaagcaagtcgagtcacaaagattcagtacacttgtgaaagcgatgaataatcttgatcgacaggaagttgatatctccttaagccctcgagtaaattctttaaaaccttcaaagactgttgctatatcagacttggctacaagtcttgctcaagctggtgttcctgttatcaaattagcagttggagaacccgactttgatactccaactgtaatagtagaggtacctcatccatcccacgcctacaattattttagcagttttttattttgaaattttagatttctttttaaatgttggaaactgtaaacttaggctgggataaatgcaattcgtgaagggcacacgaagtatactccgaatgctggaactttagaagttcaagaagcaatatcataagcttaaaggttagcaattgcaattgtggcgaaacaaatatttagtattttcactaaaggtttaataattgatcaactttgcagaggaaaa

SEQ ID NO: 201645 - DNA, 1555 bp, Cannabis indica
atgctattttccaaataagtattgaccatcgaaaggataagaataacaagcagttatgcagttatcaagtgttatccaacatgtgatcaaaatgaaatgtgggaattaaccacgtttcattaaacggttataatttgaatttaaatgtaaataactggcgacctatattcttataaatatgggcagatcccacaaaaaaatggacagagaattttgagagagaaaaatagatacaatcaattgtatattttattttgtaattctaaaaatatcttaaataagatagactcgtggagtatgcagatttaactgtaaaaccacgtaaaaatatctggtattacttatatactatttatactttatttatttcttattatttctatgttaaacttattacgaaaaggctaattattggttaacaaaaatttgtgttaacagtttggtgctttcattgagtgcctacgtgataaaactcagaaaaatccctccttacaaacaaaaaatttatccatggctgatagcaatcaaaacgatggaagttgtcctgagaaaactacacatcgttctgggaaaaaaccaatgggttctcaaagaccccatacttctggaacaacacgttcaagaagaaactatggtggtgataatcaaaacccagaaggaagaaatgaagaaaccaatgcttttgcgggacatgtacctaaaagtgaggatgcttatgatccaactaggtatgtaccattagttgaattagaaaattgacagctccgacaacgcttagctgaatttaattgacaaaatgctgagttagaaagagaggttgcagcggcaggggcgactcaaagccgaatttaacctgatcttggactaagaaggccacgaggtagacctcagggttcaagaaccaggaggcaagaaacaaatcaagaaaattcacaaaacacccaggaggatcaacctaggggttctagggatgttccagtggatgaacatcaaaatagtcaagaacaacgtcgagaatttcctcaaagatcccaaggatttatgaatcaggggaattaacataatgacgtaccagggccctctcgctggaatgaggacatgagacagctccaaactagggaacaagaaatccctcgtaataacgaaagaaatcgtgggactcaacctaggataagtgggctaccaccgaggcacccctaatgtccttctcgatccgagagggaaggtgcatacacatacctaaatataggacgtgtatctaacctattctgaaggagaaggacgatacaagacgaggcgagttctagctcgggacattcgaggtcccgagggcatagtcgatcaggaagacaaacacgagaaggaagtaggccttggcgttatgctgatcaagaaagcatgagcaatacgagaagttatcaatatgagagttgctcagatatgagatctgtgagagattatgaacggagacaaattaatcataatgcacctgacttatgctatcaacttaatgcgaaccaatagcaaggggattcctattgggttttgtgcccta

SEQ ID NO: 201646 - DNA, 1624 bp, Cannabis indica
aaaaaaatcagctgatgttcatcacaccaaatctggtagaccctcccacaagcctaaacatttagagcaatacatgtgcgatttcctacaagttcctgcttcaacttctcatccactcaccaacaccctggcctataccaggttttccaacaatttcagagctgctatacttgctgcccataaattggttgaacccaagtcttattcccaagcttgtaaatacaaaatctggaacaatgcaatgggaattgaaatcaaagcacttgaggacaaccacacctggataattgtcaccttacccgatggccatcatgccatcgacaacaaatgggtttataaaataaaatataacccagatggcagtgtagaacgatgcaaggcacgtctcgttgctaaagggtatacacaacagccaggtattgattacttcgatacctatgctcctgttgcaaaattcaataccctcaaaatccttttttctcttgctgccatcaataattggcatttacatcacatggacattaacaatgctttcctccatggtgatctacatgaggatgtttatatgaaactacctcaaggatacactcccaaaggagtgattccaccaaatgcagtttgcaaattacaaaaaagcttgtatggtttaaaacaagcatcaagacaatggtatgcaaaactcagcagtcatcttattcagcaaggattccaccattccaaatctgaccattctctatttttgagacatacaccaggtgttttctttgccttactcatttatgttgacgatattgttgttgctactaacaatcttgatgaactaaacaaatttaaaaactgccttgatgcacagtttaagttaaaagaccttggcagccttcgttttttccttggtctggaaatagctcgatgttccaaaggcatctccgtctcacacagacctttcaccctgcaacttcttgaagaaacaggctgcctaggctcaaaaccagcatctacacccatggaaccgaacataaaactaaataacgactcaggaactttgctgcagaatccatctcaatatagaagcctcattgggaaattgacttacttcaccatctctcggccagatattacatttgctgtcaacaaactcagccaatacactcaatcacctcgacaacctcacttagacgctgcctacagaatacttcactatctgaagaactcccctggtcaaggtctttttttccctgcttcatcaccatcaaaactcactcttcaagcctttgcagacgctgactggggtgcctgtctcgacaccagacgttccatatctggttattgtgttttcctaggcaattctctcatatcatggaagtcaaaaaagcagcaaacaatatcccgttcctctgctgaagcggaatatcgatctatggccaatgtcacttgtgaattgcaatggataatatcactgctcaaagatttcagagtcgacatatcacttcctgctcttcttttttgtgacaacaacgcagcaatccacatctccgagaatcctgtgtttcatgaacgcacaaaacatgtggaaattgattgccacatcatccgagagaaaatcaccaatggcatcctcaaactc

SEQ ID NO: 201647 - DNA, 810 bp, Cannabis indica
tttttaatctatttttaactttattggtttaaataaaataaaaaaaaaattatatagatattttatataaagaaattttaataaatacacataactcttatttctctcatatgagacatatacattctcatacactacaaaaaactattgtttttagtgacaaatttttagtcacaatataaattttttgtaactaaatgtgacgttttatcacaataaaaaattacttgtgactaaaactaaagcatttagttacaagttgttactaatttagttttagtcacaacaaattataatttttgtggctaatacttttagccatggaccttttagtcacaatacaataatgataatttataattagccacaatttttttttatctctagtcacaaatttcgttgcgactaaaagtaagaatttttgtagtgatagtgattagaatcactcgttaatttacaaagtatatatctccaatcagcgcaagaccctcctcgaattagaatagctcatcgtctaaccgaaaaatatactttatcaaactatgggctgctaaaatcttgacgcgaaccgcatgggataaaattacttctgaaaatttaaacaataaaaccataacgtgttcaaatagcacatccagcacattgaaataaacgtttctattattaatagctatcgccaaaaatactaacatatgacatgcactctgatttttcatatattggaatatgtcatttggattttgtatatatatataattacatctgaaagacacacgaatgtggctataatagtaaaaaaaaaaatcttaa

SEQ ID NO: 201648 - DNA, 650 bp, Cannabis indica
gttttttcttagagagagagagaagaggtttggagaagaagaagggaaaaaaggataatgaaaatgaaagcttttttatattcaaaaaatttagaaaaattttataattcacctgcaataaaatttaagggaattacctcatatacttatttttttaattttttttttcaaatttacggtgtgggtttctaaagtggttgcagctctagttgcaatagggtttctgtacgattttttgttgcaatttaggtttcagcgctagttccaataggagtttccatataaaatttcgtaaaaatgacaaaaaaaacaaaaaaaaaatattttaaagtgtaacaatgaaaaaacccctaaaatttaacacgctaaaaataagatttcaaatattgattattttattttctacgcctgtgaaatggactatttgtacagacaaatatgaacaaaaaaatagactaaaaaatttttttccacgacgaaataggtaaagagtggatcattgcatttcgagatacattatagaagcaccatttttatattcaaaattaatagtaattaatttaggaaaattctacaatctacatttatggatgtgaagcactcctatatgttttggtatccgagataactttttaatcaatttttttcct

SEQ ID NO: 201649 - DNA, 1861 bp, Cannabis indica
tctaactgctaatagtaatatgtttttttagctatcaaggtcatgtctcagcagctttggtcctcggcggtgttgatgtcactgggcctcatttacataccgtaagttatagttttcagactcttaaacagattgttatagttgtgcttcacacactatgaagttatgaaaatgtttgcatactttggcagatctatcctcacggttctaccgatacattgccatttgctacaatgggctctggttcacttgcagcaatgtcagtatttgagactaaatacaaagaagggctcactgtaagttagtcttttatatttgaaaccttgtgtgtgtatattgctggtattcccttgatactgttagaacataaaattttattaacagcagtgattatcaatggaaatctattaatctaatatacttacagatgctttagtgagtttaacatatctttgttcttgttggtatgtgaaataacttctatgggggtaggcataaatggtgtaaaccttttattttattttattttatttttaacctgcttgctctaatggtgcagagggatgaaggagtgaagatcgtgactgaggcaatatgctctggtatttttaacgacttgggcagtggaagcaatgtcgatgtttgtgtaataaccaaggtttgttgttttcatcagtctatcatcatttaaaacgaagtattatcacgatgctataagcttgacttcttgtcacatgttcagggacacaaggagtatttgaggaaccatttgacgcccaatcctcgcacctttgtcagtgaaaaggaatataaattctccgagaagactggttagtgacacaaacttgaattggtgtgtttatgacctaaagtccctgttagctaatattcaacaattgattgaattttgcagaggttcttttaacaaagattactccattaaaagagaaggttgaaataattgaagtaggggattcaatggaagagtgaaaggtgtggagaagcaaatgagcatttcttgcaaattctaaagatggaatatatgaactcgtatttctttccttttgtgttcctcatcattttatttagcatttacatggtcttttcttaatctggatctctcagtacttgtgggcaaagaaactgttgaattggttaatggtactttgttttgtagtgtcaaaactcaaaatcaatagaatgccacctataatctgcctattttttttttttattgatgcttaaattggcttacatttgaaatgttttaggtaaaaagtttgcttgcttttgtttttgttgttgtagtgaaaaaattagaagttgaagccttgttctcactgagaattgtttcacatggttggttgtagaaatggaccattgattgcttgtgttttgtctattgcttccaatggctttttaaagaaacttgaaaaagctaaaatggtaattgcaacgtttaattttcttctccaccatcacactgatttttttttctttccttattactatttcttaattatatatcattaagtttcctatatttggataaattatacatgaaaaaagagaaaaggtaataagttctataaaattaagtgaaatgtgtttttatgatattttattttctttgctgttttatgtatcctttggtttgttttttaatttgttaaaaaagaaactttataatttttaattttgtcttcattaaaaataaatatcaattttactgttttgaccaatcaattattcttcaagtaaatcgggtttattgatatgttcattataaaaaaaataaaataaaaggtaaatttttaggccaattcaatttcacttaattttcaatgctctatgtcactac

SEQ ID NO: 201650 - DNA, 1034 bp, Cannabis indica
cgaacaaagcatattgaaattgacgtttactttataagagataaagtcttacaacatcaacttcaagttcaccatgtccatgcttaagattagcttgccgactctcttacaaaggcgatttccaacactaggttcccattttttagagacaaacttagtgtgatttttctatccacactaagtttgaggggatttattgagaataagatttgttaatattgttaaaattaattaatgttgttagttgtttcggttactactgtttagttgctagttgttattataactaactttgtaactaatctttatctctaactaatcctactttatctgtatatacacactgatctatttattagtaaattgtaatctcattcatacaatcaatactacagtacactattattcaactttgttttgctctgtctttcgctctctccaaatcaacatgcacacttttattgtattatcatcataaattatattttcttttatacacgtatatagtgttaaaattttaatttatttccatgtttatagtagttaccagagcaagtcttttttacattatcaccaaatttaaataattttaattaccgaaaaataaagctcccaattcagtttaaaaaaattgaataaagctccagcttaccaatattagcatgtgtgtaatactatgttcgaatataattattttttaaaaaaaatcacactaaatttaatatttatcttattactaaaatcttatgctattgcgatcgcaatcatctggtttctttgctcttgcaattgatcagggccgaccataagatagtgcaactgaggcctagcccaagcctcacaattttggaggtccaaaaaattaaaattttatattttatatatatatttatgaaaatgaaatataacatataaattttagtttaataaatttcataaaagtattgtaacacaagtgcttagttggaacttgggttttatattaatgttgaggtcttggatttgatccttaccattgtcacttttagttttta

SEQ ID NO: 201651 - DNA, 2394 bp, Cannabis indica
taaggtaaaaaacgttaaactaactaatttttgttaattagatagttataatttaataataaaaaagatacattgatgatgtatgtattgattagtattgtgtttacaagaaaatgtattgtatttgttttttactttttaaaataagtatagattagtatttgcctatttggtattagtgaaaaaaaaataattaattaatgaagaataaaaacataataatttactttctattatttatttatttattattatgttttttttttaaaaaagatcaacattctattttttaaagaggataaaatttctatatttttatggataaacttacaaagatctcaacctacttaattaggctagattatgtcaaagtgtgaaccaatactaatttaaataaaagtatacgattttctcaattaagagaaaaaaagacaaaaaatatattgactttgtaattataaatacaatgtggataaatgaataataaataaataaaaaggtgatgagaatattatgtggaaccctaattatttaaggttttggcaaattagaacagactgtcaatcaccaagcaatcgatatatactacacaatgcatgtgtgtaatacccatttgtaatgtgctctatcatttatatttatatataaatatttatatttatattgtcaaataatttggtattatggaattattctaaagattccttcaaagaatcacaagagaccataatataatcatttgtaaactatttttttctaaaacaaaaaaggtccacatatgatattgccaagtgtattttctttctttttttttaaaaaaaaaacactctaacaatgtttaattatctagtaaattactaataatattgaatattaacgataataatgataatggagaccacttattattatttattggattctccactgaatttttgacctcatatgtttccaactaattcctagtaaaatttacatatacaatatacaaacctttggatgtactcttaccaataataataataaaagcttgttattaccaatgctaacaaggaaacaaaagatgacaactatatagttagtttgcatgattcaatgcatataaataataataataacgatcacttatgtggcttaaaaaatattgcacacaatggatgatgttcttttaggagaattttataatttaaaagtcatttttagttgaagttagaattcatagtttctcctaaaagaatttttttaaaattattttctaaattcaatatttataatttattcataaaatatcttctcttaacttatatcaaaatatttttaaaataacttttattagaaaaaatctttaaataattgctaaaagaaaaaaaaataagctacaacttatacttattttatgcttttagctagtttattagctaaatagagctattgacatgatttttcgttaactgatctaagaagatcgtaaacgagcaagacgaacacaagtattcgtcaatcaaagtaaacaggtttattaaaaaaaatttaacaaagatgaacatgaggattttttagtggttcaccacctttcatcggtaataagctaatccacttaggttgttattggtttcaatacttaggaagagttctccagtgttatgttctttaagagttcattcctcaagtatttttttttggaatgaaagagtgaaagtttgtgagaataagttgtaaggatcaaaattgggatctctttacaagacacttcactccttttatataagttttcatataggtctctcttagagtttaaaatctcttaactcaagatacaccttcccctaactatagtcaagtgaagtttaaaatacaaaataaaatatttcaaaataaatatctaaaaaaaatgataattgctgaagatagcttcaatccacacgtgctagcttattttcgtcacgaggagcatatgcatattgatgaagagcacatgccgagatcataatgctaatgagtcgtaagaagcatgtgttgaggtaaggagcatcttggctacgaccaggatgatgactttgtgttgtgattttggctaaggcccgagatgatgacttgaagtggtgatctcggctaggaccgagatgaggtactaatggtgtgtatctcggctagggccgaaatgataagctttggtacgaagtgatgaactttggtacgagttgatgagctttggtacgaggtgatgaactttggtacgaggtgatggtgtttgagccaaggaggtggtgttttcaaccttggtcggatgtgatgatcttggcctttgtctgaggtgatgatccctgccttggtctgaggtgatgatctcggccttggtctaagatgatgatctcagccttggtctaaggtgat

SEQ ID NO: 201652 - DNA, 591 bp, Cannabis indica
tcttcttcttcttctttggtttgtggccaattcagtcaagaaacaaaggaaaagaaatgaagaaggttaagaatggaatctaaactcagaatgggcccaacagagacttaaaactcttggtgggtattcaaaatggcccaattaacagattagattaatatctcattctccaatccttattttacacgtggcatctctacttggataagggatagatattatctattttatttcctgattctcctctccacgtggcatctattaatatataatatttttcaggtaatcttgatgataattaatcttaatttttataattggagtgtagtgtattgtatggatttattgtatgatttggtgaaaaaatttagaatattgcaaaatctggaatggttataataaggtttctttcatgcattgtatgcagtaaaatttaattcactgtgcatgatttaattgatttttctttgattcactgtgttccaacattgatcatagccaggatttagccccaaacaatattacagcatggtttttgatgacatgatcatatattatatgtataggaacagtgacgaagctagaaattta

SEQ ID NO: 201653 - DNA, 1525 bp, Cannabis indica
tataaatatataataaactaatcaaagagtctaggtgacgagtcacttgcttagtaagtaatacctgattaaataggaacgatgtcatgaaaataccataccttcatcatttttattgccaacatagatagaccaagtacatcagtgcatcttcttttctttatcatcaataccactcctattagaatctagcacgcatgcgatgtatttttttattcacaattccaactggcaagcggaataaattcttacataagtagaaatggtttgaataaagatttcaagagaacttcccttcctcgaaaaagaaaagcttaaacttaagagtttgttctaaattctatctttgatagattgaaagagattattcatacttttactcacaaaacaaggaagattgaggtacttatcatgacaaagaactagagggatcccaagaatatgcgccaaaaaacacaaaatttgtaagcatactaagaaaaacagaccacaaatttatgtaaattaacaagttaatctggagaatattcatacaacaaaaatatttctttgaaacgagaataattggctgaagtttcaagaaaagaaaaagttatcatcagcaaacaagagatgagaaatcattggaccggtcttccacaagagagcccaaaccaatctcatgcttaataagaaattatttaaatcaacttctaattactataagtacattaactttatcattaaatttttttttttgagatgatgttgggatagatgcgacaagtataattaaattgtgataaaattacactaatactcatatttctttagcatcattctaactgtaggtacttaagtgcaacttttagcaaattattttatcacatcggcatctaacaacaaaatttatgacatgtaacttggatacttttgttgttaaaaaataaatagggttattcacaaagtatccaattccattcaattcgcacgattcaatccaattcaatctgtaaaatacaaatatccacatttgtgtggattatactagaacggaaaatttaaaatctgcacttgtacaaattgaatgttgtctaatctcaaaaaacaaccgatccaatctaatccccacttaattatatataaatatatacatttaaaaattataatatatataatattatttaatttctctatgtttagccatttatcattgtatcacttaagtataatcaagcatatatataggactattattgcctatcaagcatatattagctaaaatatgaaatgtgacagattggatgttgtttttgaccaaaatagtattaattcgatcgaataagcaaccctttaagtgcaatttttagtgttagtagaactttctttcacttttttttttcatctcttctaccaataacttctttctattgttctactctccaattttctcttcataaaaactaaagtaatatcttaacaattaacaccattacattatcatctgtaaacactaataacatcatttttttcgaatattatgtgt

SEQ ID NO: 201654 - DNA, 1577 bp, Cannabis indica
aaatagcccatctgttttctgattctactcatttgtgaaattactccgaaataaaaaaaaaagtcaaactgtttaaccataaatattttagtgtaacaattactttacaaatgataattaatggaacggcatctaaacaataacaaagtagaaaatggcaaaaaaaaaatgttacatctgacatctaatggttacattatgtacagtacttgctactgaaatacaacgtacttgattccgagctcaggtgggaatctaaaggatcttcgtatcagcttcggctccggctcgtggtcattaaaaaaaatgttctagttggtctcctctatactaaacatggaatggtttccgaggtgttggtgttcggttctccatggattgcaatctttgtttgagatgaaatacttcaacctgcatggtaacacacaagacaattatagtaaaaatgagcatcaaattttagttacaatacttgattataactagacgtgatacctgtaattgaaaagccctagctcgttctccagcaagaactcctcttgttgattgcagttcctaaagagtattcaccagcattttgttcatcagagacaagtatataagataatcaatgtagagtagttagtcaatgctaagaatgacttaccttctgggtatcatccaacactgccttgaggaaagctacgtcgtgctctagccttacattgtccgagtggactatattggagaggctgttagcttcttcttgtgcaagttccacaccagctagcttctccttcagtaactccatccttttcatcatgtcagccaactttttctccatatcttgtttgctcttaagagccgatgatgaattcttttccgcagcttctcggcctgccaatgcagcagccaactgtccttctaaaattgcattctttctaatcagtgcagacacttttgtttcataaaattgggatatacttgaaggagtcgataatgctcccagtttactatcattttcagggagaactgaatcacaattatcaacctgcagactcccacttccttggttatgggggtttgaactttcagtgtcatatgcagcaagcatatcttccacatggaacttacctccagtcaaactagatcgaattcctgtatcagtttgacttattttatgttctactgcctgcaataaacatgtttacaatgtcaaaaaaaaatatgcatgaatctttctgatcataatgacaagccatgctcacttacaatcttgcatgacatcccaaaaagtgaaatcaagagcaactaacggaaagcagacatcgagacttactatgtgtaaattattgggcaaagcagggtaagatacagattaaagaaatagtatcttagaatgtatggaggaaaaagttgagaaattgaacagaaaatttcatctctataataataataatgagtcctactttaaatagatatgattggttaacaaatttgttgtgtccctgggtagaaaatttggttgtatattttaggttcacatatcactcaataacaatattgataggaatattctctattaattgataaaagaa

SEQ ID NO: 201655 - DNA, 1269 bp, Cannabis indica
aatttataattttattttattatgcttttttgtgttttttctttcttctttattatggatagaccatagtaagtactaagtagagtgttatagctacttcacaactaggtaaggcagctttttttacccacttgtggggtgacatgacttttatcttttttattttattttattttattttatttaaaaaaaaaaaacaattcgttgagtattttataaaaataatttttacaaaattttttattaataaaataattttaaaaaaaaattattagcaaaataatcttgtatagtaaacaaatataaattacactatatgactataaattatacactatggctataaacaactattatgatcgcataaaataaattaagtaatattattttataaattttaatattttacattgttaatttagcaattttctcctttatgtttggttttttattttttttttttggttggatcctttatgtttagttgggaggtgaaaaatgatggatgtggaggaggtaagagtaggagaaactatagatcacttaaatatgaagattgttaataaatatgaagattctttgtatggtcattttattagtaaatttttaatttttttcaaaaataatttaatttattttttatgttcttgttgtaattatttatgatcacttgtaaatgtaaaaaaaaagtcttaataatttacattatctaaacttaggtttaaacatttacttgcaacttgtataagaaaaaataattgtgtatgcaatgaaatatgtaaatcttatttttgacattgtaaattacttaaaaatttacaagtggttttaaataactataacgtacacaattataaaaataatttgactaaaaagcttttttgtatgccaaaataaataaagaatttactaaaacaactctttaagggtgccttgcaaacttacatatattccccaatgttatatattagtacgaagagtgctaccgtcaactttctattatcacttttgtcaacatttgcgcccgaaaatacaagttagaattttttttttcatggcggtattctttatgcttacaacatcattcctgtaaattttttaaataatttaccgtactgaaaataagtttgaagttttttgaatgcacgtaataaactgaaatatcagaaactctactttcaatattataaattatccaaaactttttaaaaatttacagaaatgataatgtaattataataaatactatgataatttatttttttttag

SEQ ID NO: 201656 - DNA, 1676 bp, Cannabis indica
gtccattttaatttaatactatgtttactaaaatagagtagttgatgccacgtggtaagttgactaaaataaaattatttttagtgctaattttttattcaatataaattttttgtgattaaattatcactaaaatataaaatttagatataaatttattactaatttaattttagtcacaataaaaatacatttaatcataataaattgtaattttcgtgactaatacttttagccacagacgttttagtgacaacataagaatgatgatttataattagtcacaactatttcatttctaatcacaagttttgttgtgactaacagtaaaaaaatttatagtgagagaaaagaattcttaaaaataataataattaaaaaataattcagtctcatttagaaggaaagaaaagtgtcaaagagattaggatcttcatctaattcaatccgtactattttactcatagtgtattcgattcgtactaactgcagcttcatattttaaatccaatctaatctgcataataattcaaatttttaatcccatccaatctacaaaagtacaaattaaatatgtgattttagattagtcactatttaatatttattaagaaaatatttctttcccataactaacaacaaaataaaataaattattattgtttcatatctttaaaaataaataaaacaaaaaaaaaaattcaaaaggaaaagaaaaatatatacatgtgtataaaaaaagtttaaatttgttttagattatatcttccatgtaaataagaataagttatacatttaatttactaaatttttagaatacattttgtatcatgtttattagatttttaaattattattttttatattaaaatattttttttgaataatttatattaaaatattaattctttatatatatataaatatgttttaattaaattaaatcggttaattaatatttaattaaaagaagtgcaaaaattttaaattttttaatccaacccaactttaagaattagattgtgtgttttataagcacctaacatcattcagggatggaatctgtcattaaaattatagaaatacaatgaaggtaactagactcttatatgcatggtgtacgaactaatatggctaatgaatgagtgacaccattagccaacctaacacgacgaataaattgacaattaaaaaaccaatataaacatattctattccatacatgttataacaaaacattattgaagattttattaaatatataaatattttataaattacattcatgagtgctaaaattataaataaaataaagtaatatttattatagtgtaaatttaaaacatattatattttgtacagaatctaatacaatttttaatatatattaaatttagttcatattatatttaataagtcttctctatttttcatctggctaaacaaatcagaaatgctcaaaggtgcttaacactaaagaaattagaaaggctatttaggatttttgtccctcgaactataatttatgtattattatgttccctgaacctttcagcccgttaaaaatagtccatgaactattgtttacagcaagagtagtcctgatgatgtggacataaaagtttgacatgtgataagaaagataacatcttcgagttgagtagtcccgaatcata

SEQ ID NO: 201657 - DNA, 1031 bp, Cannabis indica
tttttatatctaattaaaaattaattaaatccaattgattagattgaattttttaagtttaattggctcgaatcagctaatgaatttctaaatctaattattaattgaatggtatgagataaagaaaaaaaaaattagaattgaatcatatgagaaaaaaaaataagattggatgacaaaagaaaaatgtcttatttatgtttaatatgacttatttatgtttgaatgaggatgacaaaagaaaaatgtgttcataatttttttctttgttttctaatatataaaaagaaaagttttttcttgctcaagaaacacaaattttttacttctcaaaaaaaaaaatattaccttttacttcttgttgacatttgtaataaatgtcaaataaagttcctatttcctctcacacaaattgaacaattttagaccattatttcctctatttctaagaaataaaaattaaatctttacaaattattttggtgtctaaagacccttttttttttcttctttcttttctttttttttttaattttttagggttgtgatgaggtggcataaaatggtcaaaatctaagggataaaaaaagtaacaccaaaagaccaaacaaacgctataagaccgcaccaaagacgctgtcttgtccagttgtttccatctaatctccgactctaactctcccttgtctttatcttacacttcaccgattttaatgttaaataaaaatcaaaactttttctattttttcaactaaaaaaagcaaagtaaattctgggttttgattattattgaattaagaaacagtagtaaaaaaaaaaggaaaagctcaaaaattttcttgtacgtttctttctcactttctctctctaaaaactcagactgtcggtggagtagtgaagagagagagagagtttgagaccgtagttactctgtctctttgtccccttgaagctatttttctcttttttctattttataatattttccttttctatatatctacagctatcaaaagagagaagcgtttttt

SEQ ID NO: 201658 - DNA, 651 bp, Cannabis indica
attagtttcttcgaagcctatatcgataaagtcatatatttagaaagtagaaaccaccacatgttataatgattattatgcttggaaaataaggttatgaaataaccacgtatatatagatgaaataaaaaatactttttaatcataaattttcataccaaccgagtaataaatctcatcataaataaaactatatatattttaaacttcataataatcattaatagtcgattggacttaattttatgaaggttccaacttccagctaatattatacaacttacaagaaataagagtaaaatgttataattatagtaaactaattttatatatgttttttatttggagaaattataataaaattttattttatataatagtctattatagttatagtaaactttttatttattattatatagaaaattttgaataattaattttacaaaatataattcaatcatttcattggcatcattgcaaacgtaaaaaaaaaaaaaaaatcacgtttgtaaccttgaatgtttaaattttattttttaactataataaattattttaattttttaaaaaatatatatgcaatatctgctaataatagctacaataatatacagaatcttataataaaatttaagttataattttaaa

SEQ ID NO: 201659 - DNA, 820 bp, Cannabis indica
ttttcgtttttttttttttaggagatcttcaatcttttagttgctttgtttgttattatcaggtcttttaattataaatttaataaagtatttgatttaaaaaaaagtcaataaaactaagggtttaaaaacgatgttgaatttatataatataagtaacttgtacacttgtttattttcatatttattatctgattctgcttagtaaatttttgttattaaataatgtaagaaagaaaagtagtaaggcatagaaattagaattgtgatagaatttttttcaaaaattagagctctttagctttgatcaatttttagagcatcttcttccatgttataataatattaacaaaaagaaaagaactaaaggggcaggaaagacaattaataatagaagcaatttatttatttatttatttatttttgttttggacaagattgaatagagttagaaataaaagaaaaagaactgtggagacgatttgcatggatgacatgccaagttcatgtccttaatttgtgtaggagttaaagtacaaaggaagagaattgcagtacaactaagaaagattttagcggagaaaacgacaagtcttggcaaggcatcaaacatgtgtagtacatcaatcaagaaaccacttattcacacatataatcatattacgttactctcttcatcttatcctttcaactatttctctttctataaaattttattgaaccaaaggaggaaagaaatcgtcaccttttgttgttatttcttaatgttaaaaaaaacaatgggaagaatggtagattttcaatttaaataaatatgtga

SEQ ID NO: 201660 - DNA, 733 bp, Cannabis indica
tatatttatataaaatgtgtataatatcctactcattattctcttacgtatccaaaaaaaaattctcttacaccatacatatgtacacttacatgtaatccttgcatatataatcttaagactatatataatgaagattgtaccagtataattttattttattcattattgttttagtttcttctgataatgctgatttgttgtataagctaattaaaaagttattataaatcacacataatatgtgtttgttgtgcatacaattaaatatgacgtattctccgcttaaaaatattcaagtgcagattaatagttttaattatatcgcatgtaatttgaatgtataaaattgagtgttatcattacatcataattaaccaaaaaaaaaaaggaacaaattaagctatatttggaagtcatatatgcacaggaatataattaagattaatattaatacagtaaatattattaattaaattagaataattaacgagttattaatgataattagagttataattatttaaatatgtgtcagctttgtattgaactaaattatataattatttttggggatgaccgacaacatgtgggcgatgttactaggcaatggcactatgcatgtgtctatcacaattcacaaatagcacttcatatgagattgagatcaaagatattatcactctactttagtcctccctactactaaccacttctactccacttcacttca

SEQ ID NO: 201661 - DNA, 2333 bp, Cannabis indica
ctgggacccttggcaaatgcattgggttgtgaatggaaggcaaggaaggtggacccattgccatgcccaaccgcgacatgtagtgctgtactcctggaaacatcattggtgccatgccacttcccatccacattaccttaggaaatcaacacaaaaaagaaagtgttattgattttgagtgttacaaaaaagtttaataaggtcagttagtgttgtaagaacttatgtgattttttttcttacttggagttgtaattgaagtgacttcaagtattcaatagcttcatccaacattgatgctttatctgtctgcaaaagaagaaccatatttcattcattgaaacagtaagtacatgataaatatgatattatgaatacaaaaacaactattattgggaaaaaatgaatggtttaaaaaagcttatttgatttgatttgatttctgtttaatcatacagcaatgatgtaaatcattttgttggcaattgagaaatcatatttgtctgtaactggtttggcccattacatgaattagcctagaaatttctttgatatccctttctaatatcagcatcagaacttttgtaatcattggtgtttaactgtacagataggttgacttaaaagaatatcatcttaatcatgtttaccatttagcactatcaatacttctcttgttcaaatccctttatgaggtatgagctcttattatgtatttaaactcaagaacaaaacttactaagaaaaattcgaaagcaatgtatattaatttaatgaagtaagaattagacatagtaagtaataaaccttgttactatgaggtatgagctcttgtagcgccttcatcttctcatttattcgatctctacggaaaaataataaaaaaaaatataaatagtttaaatacacaattaaatgaatcaaaaccccctaaaaacgttggaattatgttaaaatcctaccctttctgaaagattatgaacttcagcagctctgctctttcgagatgaaccagatcgttgggaagacttatttgcagcagcagattcatgttcagcagcctaaaaaacccatgtcaccaacacatttattatccacgatcataacataaaaacagacaataatacataagtgaaagaagaagataaattttgtattacatcactttggcactctatttcctctgcatctctattctttcttttgttattgttattgttattggcactggttgtagcagtagattgcttgcaagttcttccaaaactgcttccagatccaccagaagatgaagtaagagttggctcaagagtctcagccttcccactctcactagtcctagtcctaggcaagattttctgaacatcatccttaaaagctcctgcagataaaccattgttcccatcaccattgttgcttgaaacccaactcacatcaaggtcagctgcagcaagttggttgcttccacagtgacttaacccaactgtcattgctgaacactctctgacctctcctcggtttccgggttctttcactgcctgttgttgttgttgtggcctcatatcacacttgcccatagctgagaattgagagaaattgaccacttttcctaaggaccccagattttgtttttgatgaactgatgagttgctgtaattgtgccttggtggaggcatgttatgattttcaggacaaggcaccacaccattagaggaaggcttgagtttttggtggttttggtgttgggagtttgagggaacatgagttgtatcagaaccaccaaactttgacaataacctctcttcatcaacatgtctgattggtttatcaatttcaattggatcacatgaagatagttcagagaaaaaatttgaacaaaaatctttctcaaatgcatcttcaagagggtaatgaatccatggcactgcatcatcatcttgaaccatattcattgaattcccatatggcccaccattccttatagcttgttggtcatgtttttgaacttgtcttgattcattagctccaacacttgcttttctgtgtgtctggctttgtaaaactacttgcccatttctccatagaagctctactaagtcatggtcagccctgcaattttaagcaatgtttcatttcagagattcacaaattcaacgtatgagtaattttggagaagaaaagagtacaaactacagacccattaggattcttttggccattcacagggagatcacaatcaaaattccaatcaggaatgttattcatgactgaccagaaaacaaagtgtctgcaaaagaaatattaaagtaactcaatataataataaaaaaaaa

SEQ ID NO: 201662 - DNA, 988 bp, Cannabis indica
taagtggagatttaatccaacagataagttataatcaactattaaaatttatttatttttttaaaataatttattgcgctaaaaaaatattcaaaacaacatgtttttagacatggttgttttttctttttctttttcatacgtgtgagtcaagtttgattttttgcttttattttatttttgaataatctcaaactcttcaaacacttatatttgaaattcatctcaacatttctcaattaaagttcacctaactaaaacttttaagccaaacaccactttaaagtttattataactacaatatagactatcttattaaattttttggagttataacttaagtgtcctaatcaagaaaacacttaagagcaaccctaaactatattagttgctttttatattctcaaaataattcgttggaaagaataatttagaaaaatatttaaatggctgagatattaagtggataattatttattacaagactgttaactttttagttgatctttgtatctaaaaacacatgttagaatatttttttaaattttttttataacgttgttcatgaatatacatcatttacaacattattcttacaaatttttgaaaaattttaaaaaatttaccataccaaaaataggtttgaagtttactgtttttgatattttcagtactaatttcaggcgtgaaagttaattaaaaaattataataaaagattgtaattaatactttcaattttattataagtagtgtaagtagtaagcttgagtcggttatataaatctattatatatatataatatttatattattaaaagaatttataatgcactctttaaaaggaatgcacagatgtacctctattgttttggtatttaagaaaaaattttagtctaattttgttatggtggtctatgttgtagttatttaagatattaaattcaaaaaaattttaacacattaaaaataggattcaaactaatcta

SEQ ID NO: 201663 - DNA, 780 bp, Cannabis indica
gataaagttatagagtgattttgacagtatttatgttttcgaaatctgggatatatttacaagttataattgatcatatttatagacaacgatatatgggctagattaactaggccgagtaaggagttaatcctcattaatctcactaatacagggaatatattgctaacaccatttattttcctaagggcctaatggtttggcttagagaaagggcgtaacttgtttctgactggtcttgtctagttgtgatgtgataggcactggttacttttttatatacaagcatttagaaaatgtgtgtgcatcttttgttagagtaatgtgtatccaaatttctatgtttaacttgctttgtaagaaatctattttaccaagtttatagaggggaagggatagcatacagtatgtgccctttatatcaggagccacatgtggcctatgcagatatgaccagagacttttggaagcataactctaaaagtggatttatggatcccctcactcgaggaacggagtggatttatggatcccctcacactgttagctcaagcatcactttcttttaaattttggaataaagcatatagggctatagtttttctaagtaatagaacgcctaacccacaactcaaatatctatttcctcttgaagtgttgctctgctcaccacaagattactctgttcttaaagtgtttggttgtctatgctatccaaatgtcagaccttacaattgatcaagctgtagtttaggtctcaaccatcgtcctttagtaggt

SEQ ID NO: 201664 - DNA, 532 bp, Cannabis indica
tgtttaattagagtatggatttcctaaagcggttcttttcagccaatagttgtaacactcatcttggtattcttcctgagaatcagtcggttgtcaaatggatcaaaccaccttctgaggtgatgaaaatcaagtgtgatgttggtttaagttttgagttgcgtaaattcagggcaggggaggtgtttcgtgattattcaggtatcgtaatagcttctggtacttggatttggaatagttgtttctctcttgatgttgctgaggcattgggtatctactctggggtcctatttgcttgtcgttttggatatcaaagagtgattttggagtttggttgtcttactgttatcaatgtcattcatcatagtaaagttgaccagtcttatctaggttgtattattagaaatatcatagcttattgtaaatattttggtgatatttcttttatgtattgtcctaagattgctaacagtgtggcttacactttggcaaagttagctttatttctgactgatcattatgtttggtggtt

SEQ ID NO: 201665 - DNA, 956 bp, Cannabis indica
tccaaatctgaccattctctatttttgagacatacaccaggtgttttctttgccttactcatttatgttgacgatattgttgttgctactaacaatcttgatgaactaaacaaatttaaaaactgccttgatgcacagtttaagttaaaagaccttggcagccttcgttttttccttggtctggaaatagctcgatgttccaaaggcatctccgtctcacacagacccttcaccctgcaacttcttgaagaaaccggctgcctaggctcaaaaccagcatccacccccatggaaccaaacaccaaactgaacaaagactcaggaaacttgctgcagaacccgtctcaatatcgaagcctcattggaaaattgacttacctcaccatcactcggcccgacattacatttgctgtaaacaaactcagtcaatacactcaatcacctcgacaacctcatttagatgccgcctacagaatacttcactacttgaagaactcccctggtcaaggtctttttttccatgcatcatcagcttcaaaactcacccttcaggcctttgcagacgctgactggggcgcctgtctcgacaccagacgttctatatcgggctactgtgttttcctaggcgactctctcatctcatggaagtcaaagaagcagcaaaccatatcccgttcctctgctgaagcagaatatcggtctatggccaatgtcacttgtgaaatacaatggataatctccctgctcaaagatttcagacttgacatatctcttcctgctcttctcttttgtgataacaatgcagcaatccatatctcagagaatcctgtgttccatgaacgcaccaaacatgtggaaattgattgccacatcgtccgagagaaactcaccaatggcatcctcaaactcaatcatgtcccttcaaaaatgaacctagctgatatctttactaaacc

SEQ ID NO: 201666 - DNA, 1047 bp, Cannabis indica
ccaaaggggaaggcctatcataggaacaatcggccaccaaagaagaaatctcttgctgaattttagacaccaccggactaagccattcatggaaggaagagtttctaaccctccacatcacaaaacaaagagatataacatagattgtgaaccgaaccatgtcattctcacccaaaggagtaccgttcagatgcaaaatccacttgaccaactccaaattatcaccaaagaccatagaatctgaacagaagccccacggacccgatctccacacttggacagcaacatcgcattgaaagaacaaatggccagccgaatcctcccccaaattgcaaagcacgcattgagaactattaccaaagatacgttgaagtctactaccgaacgggagaatatctctagccagcctccaaaggaaaattttcatccgctcaggacccgagaccttccaaagagacctccaaaggggctcgagacaaccccgatctcgaattcgagccaagaaggcccttttaaccgagaaccgaccatccggagctgattcccaaaacagctcatctttcgccgccatcgaaagcctagggaccttaagggcatcatgaaccatactagggaaaaaccaagactcaagagcctcccggttccaatcaccacttcccgagatgaataaggagctaattcgcacccctttttcacaaattcttggattgaaggaagctacatatctctcccacctatagccgggtatccacggagaatgccaaatgtccaccaaagcaccattcccaataacgaaacaagactcatcccggatgaaatctctagtggacatgatacttctagctccatacgaccataagatagatttggggacgctccagaaggaactagatcttctaaaatacttatccttgaacaattgacaccacaaggcattactctcagcagccaagttccacccgagtttagccacaagagcgaagttaaggtcctcaaacttcttaaaaccaagaccaccccatcgtttagggacacagatcgaatccc

SEQ ID NO: 201667 - DNA, 962 bp, Cannabis indica
acacaattactacatcagtcaaaaaagggagccttgaattagaacaaaatagagacttttttcattaccttttcagtcttttaagacaaatttgagtgagctcctcagatgtaacttgctttgtcttaatcagctcccctagttcaagaatctgaaaatcatcaaatgggtttacttattatcacagcagcacacacaagtagataagaaaaatatcaaagaatcttatcttaattacactcatgaaggcaatatcatcttcgttgtttggtctttgtgtgccaaccaaacaaggataattaaatctcttttttgtgttgttagcttcttcagttgcccattcagggttgaagaccaaaggagaatgatgataaagacctccattaacagaaccaacaagctttctatttgctctaatagtagggacgttgagctcttttgcacccttagtaatttccaccatctataaatagccaaagatatagaatgagaagcaatgacttgctagtttattattaaccatataattgattaaatttgtgacctttttactactgaaaaagttggcatcaaataactcaaatgcggttttgagtggcaaagcttcttgatcaaagctttccccatagctacctttgttctcactgtcctgatcacacaacagaaaagtaatacaacgctgttaaagaaaagggaaagagaagagtttgagttagaaagaaattgcttttacctgaaaataaaggcatgaaaatgagcttttactttctggcacaaaattttccaattgttttttagagttatcatctgtgtttttaacatcatgttcgttttaaggttggggaactctaaaagagaaaagtaatggtatattatgtatgtatatatatatatatatgagaaatctgtgtcttgttaaggaaaaaatatgtgtggccttgcaaagatatctcttcaactcc

SEQ ID NO: 201668 - DNA, 1464 bp, Cannabis indica
atggtatcagagcagttttcctccttttggggcgtgaacatggcgaccgtggggtaatgctggtgcaaaactctggtgtgaccaatcaaccgaatcctgcaagcgcgaatggagctactgtgagaaatcgaacacatcaagaacctgtgattttcaatcacaatatctcgatcagattaaatgatcacaacttcctgctatggaagcaacaagttcttgcggctatcagaggcaatcgattgctgaaatacatcaaagaacctccaccagctgagttcttgacagaggcagatcgtgaagctgacaggtccaatccagtgtatttagaatgggaggttcaagaccagcttctggtatcgtggttgttatcgtccatgacagaaggtttattaactcgaatggttgggtgcaatacctctcttcagatctggaatgctctagaaaaacatttcacacttcagatttcttccaagattcttgagtttagaactaaactccagaacttgaagaaaggatcgatgagtctcaatgaatatctgcttaaggtcaagcaaacagtggatcttttagcctcagttggtgaagtccttagtgatcgagatcatgttgctgccattttcaaggggctgccaagtgagtatgatacctttgtcatttcatcaaacacaagggttgagaattacactgtgggagaaatagaagcattacttcttgcttctgagtcgagaattgaaaagtccagcaaagaaattgatctcagtgccaacttggtcaccaatgatctggactccacggctgaagctaatcttgcatttcgaagattcaagcaatttggtcgtggaaattctcaactcagcaatgcttctgctcaattttaacaggattcctaatcctaatgtcaggttcaacaatttttctcccaatcccaatcagagtagcatgagcagaggtaatttcaactttaatcctctcagaaataacaggtttggatttaactttcctaaccggcctcagtgccaactctgcttgcgatttggtcatgttgtgcaagattgtccttttcgttttgacaaatctttctcaggaccacctttagctaatggcagtagcagtggcaactctcaaccctctactcagctgcaatcacaggctcaagctaatcttgctaccaacagttcctacaatgatgcaaattggtatcccgattcaggagctacgaatcattgtaccaatcaagctcaaaaccttggcagtagtgttgaatatggtggtcaagatcagctatacatgggagatggatcaggtttgcatattaaacatgttggtcattctcatattctttcacaaaattcttctacaccccttgttcttaacaatttattgcatgttcctgaaattacaaaaaacctcattagtgtctctaaatttgctcgtgacaatgatgtattttttgaatttcatgct

SEQ ID NO: 201669 - DNA, 1056 bp, Cannabis indica
ttcactatcactcttgcattcatagacctcaactaaactatgttgttaagagaaaatatcaacacttgtctaatgttgctagagcacttttgtttcaatcctatattcctctaacctattgggatgaatgtgtatctactgctgcctacctaattaatagaacacctacacccaatttgaaaaatgtctctcctttagaggttctaaaatcaaaagctcccaattatgatcatttaagggcttttggatgtcttccttatgcatccactttatccatgtcaagaactaagttttctcctagagttgcaccttgcatttttttaggatatccccatggcatgaaagcatacaaattattagatctcaattccggcaaaaattttgttctcgggatgttcaatttcatgaaattatttttccctttcatagcactcgcattttgcctaaagaatatcatgatttcttctctacttttgatattacccccactggtctaactcctactgttgttcttcctggtgatagtgtttctgatcttgttgatgatcttcaacagcaaaataaaccagcttctaatgatgttcctcataccaggcctgctagaaccttaaataagccatcttatttacaagattatcattgttttcttgctaattctaattcttctatgttgtctcaggattctaaagttgttactccttatccagtttctcaaattcttcattacaacaggttacaacctcatttttgtgctactatcttggctatttctagtcacttcgaaccaaattttttttagccaagctaagggtataccagaatgtgatcatgctatggatagtgaaagtgatgccctttagaagaataacgctcggacagtggttactttacctgatggctgctatgttattggttgtaagtggttctataagatcaaatttaatggagacggttctgtggagagattcaaggctaggcttgtggccaaagggtataatcaggaagaggagattgattacacagacacttttgctcttgtgacaaagttagttactg

SEQ ID NO: 201670 - DNA, 1482 bp, Cannabis indica
taaaaaaattatatttttacattcaaatttctttttaataaatatttttaccgtattttataaaaacacaataaaataataagatcacataaaacaataagaaaacaataacaaaataacaacaaagtaacacaattaataaaaaaaattaataacaaaataacaagaatacaacataaaaaaagattatattttatgtaaataaaattttaaaatcataaaattattaaaaattctgtacaaactacaaacggtattttttttgttttgaaattatcccaaatttcaagatataacagctttagtttgaaattggaccatataagaagccaaacaatgctatcaaaaggtcgattaagcaaagtatgacccaggaaggaagcattcgacactccttaagtaaccacggttgagtaaattcttcatattggccatggccaccacagatggtggagagacctatcgatttcctagtgcgccttacctcctcaaatgaatggccttagtgtactcttcagtaatgtagtcttcaccagcctccagaagttcttatggacaataatttacattttcacaaatttttttctttatttaaattttaacgaaaaaataacataaaaaacaacataatatagtagcaacataaaaacaatgcacaaatttgctaaaataacatcaaaataattattcatatttaaaaaaatctttaaattcggaaaaatattaaaaatactgtagaaacgttattttattttattttacttttatcttttttgggtaattataaggaaaaaaaaagtccatgattttttctttggaaaaagaaaataatttttttttctttttgagagaagaaaacttttaaaactaccacaatattttgtggcaaataaaagaggaaattacacttaatatagttttttaaaactttaatacaaaaatatgatacttttagatttgactactttttatggtatattttagtttttaaattattttatggtattttctatgtcatgtatgtgtaaactgaatttttaaagtccatatttgatgtttagataaatttcaaaaaaataaaaaatctaaaagctattttttctcttccattcaagtaccttacctgcctcaatcctcaacagtctacctacctaacttcgttcatcagcgacaaattcgaggactgacaactcaaacgaactctggatatgagatctctaccaccaaaacttcaaatgctcaaatgaattctgttgcaattggagatttagaaactagttttctaaattgaaaaatcgttttcataataaataaatcttatatgagttttgatattcgtaactggtttctttattaagaaactaattttaattatatgaaagtaactagtttcttaatttattaccttaacaaaattacttttaaccagtttttttatggtgaaattggttcttttatgaggaaactgattttgattatata

SEQ ID NO: 201671 - DNA, 875 bp, Cannabis indica
attttattaagttatataggactcgatagtcgatacttaattacatcaaataaacaatatgacacataagaaaatattaagtactaatatatcttttaataattttcttctaaaatgatgctacgtacatgagaatatgtggacagtcataaattcatagtgatgtgtggttgtataagagcaactttaaatttatattcttaagttatatgacactcgataattaattacaccaacaatagtaggacaccgaaaaaaatacttgacactaataatacctttaacaattctcgctgtataaataataagtttcttaatttaattcttgattaaatttaaatgcttgaaagttattttagtattttaaagaagcccttttgagattcaataaagtcgttcattccaaggatttcgaagagccgatccatgtggcagatgtatgttggtcgacaagtctgactatagacctgccgactaacctgcatttaccacgtggatcggagtagtcgggatcctcggaatgaatagcaaggttcttttggaattaggatctttgttccttatctgagtttgaacaaactgatcctctcaaattgtgtttactatcagtatcagtgtattctgcatagtatgccacataggtcactccaagtgagcctctctctgactgagatagttacacgtgtcctactccaaatatatggacaacagttcacatgaaaaaatctaaaagattatggttcactttgttaatttggtgtttaattcagatgaaatcacacataattatttcccaaataaatgttaaggtacaaagtgattttccaatttttcaagtaaaagtagttaaatagattagaatgtcaagtatttct

SEQ ID NO: 201672 - DNA, 1169 bp, Cannabis indica
atgaatccacaccaaaattagcttccttaattggtgggatttagataagcttgaatctttgacgttgtttctctataccctgactatatgcctcacaggcttaccccttgggggttgttgcacacctcctaggtgtatactcaggaaggggaaacttcatgttgctaaaacacatagttgatttcccgtgtttgatcttctttcggagggtttcaaaattgtgggggtgcgaaagataagctgatatcgaaaaattgcaccccaaaattcttggggaagaacaatagaccgcccaggtgaaggaggtatatgtctgttcgacatagtgtatgctgcccatgtgtgctccaaactggggcactccgaatcgcaattttttctcctatgtgacatatcaaattgccctttctttgaaagacgacttaaaatgacaaatttcaccctaaaagcctcaaggaaaacatccccatgccacccaagtgataagcaagatatatgggcgacacagtgtatgctgcccaagtgtgtgcttggactttaccttttcttcgtgtggggttggcatatcagaccacttgcttagagaggcaactcgagattgatgaattacagctcaaggactacctaggcggcatgcatttacacatgccgcccaagtgtatcacttggggccttctggacctcgttcttttcttttcttgcagagcgtaccttgcagacttttatcaacgatgatgtgtcttcttattaattgcatgtcacgtcacttagctaaaaaataggtaacgaaaagtaaacaaaaaagtatgtgtgcaaattttgcatcgtagacaatattatatcaaattgaacataatatttgctatgtgctaaatttacataatattttaacatactattagaataaattattattagataagtcatattttagtttaagccactaagactagtttagtggtgagggagggatgggaaaaagagggagtttatgagttcgaactcaagacttttaagttatattaaactattaattgattgtaaaatatactattaggctacacttgaaaaaaaaataatactttaattttatatcacttatttgtatttttattggagatgtcctaaacccttttgaatcacgagtctttcaagattcacagaccaca

SEQ ID NO: 201673 - DNA, 867 bp, Cannabis indica
ctaattttgcattagcatagaatatatgttgattattccaattgacacaatatatatgggtatatgttagttcaaaactgaggcatgattaataaggaactttttaatgttgtgcacgttttcttgcaaagattaagagatcgagaaccagctgaacttcgtatcttggtgcatgttatttttgagtacttttctgagggatttatttggtgtgtgcgtgtgagatcgtgcatatatatatttatattttggtatatgtaacagatttcttaatttattactagctctaaatttgatgtatatctagttatccattgatcgataataaaatattataacttatttttgaatctgaatttgatgaggcagagtatttggaactaaaaaaaaagaaaaacaattgaaaacgtctcaaaattccccatatattataatcgtacgtgttgatttttctgggcttaattatattgtgtttgatttcttatgttgagtctaaatccttcctttctttcaatactccatttcaatggtacatatgatatcatataatatcactatatatatatatgtatataaaaaaatgagaaatatatatattattaattaagcttctattggatcgttttattttggaatgatataatccaaaaggtatttatttatgtatataaaaatataaaacacaagagagcatatatattcttcaactggctgtgccagcaaacatatacttatcatcaattatatacatatatatatatgatattgatactcatggaaaaacgccatttgtttactttctaaatataataattatggtttattaatttgaatcaacaaacttcataaccctcaagtatatatgcg

SEQ ID NO: 201674 - DNA, 1062 bp, Cannabis indica
atttatatatgtactctctctagtcggcgcacgtcatcatcatcatcatcatcatcatcatgggatatataagcttacatttacatttacaatttctctaatattttatatataacattgagcacaaagatcgatatatttaccactatatatataatttcatagtgaattttttatagtttaattttgaggtaaacaatgattgattattttaatgtgagatgttgatgattgcacgagtatgtatggaatctctcctgtgttgggagagcaattttaataaatttcgtgcttgttgcaaatcaatacatatatatattggccacaagttatgatatatataatccctaaattaaaagtagtaaggagtaaggcttttattttattattagaacttataaagattaaaagaagccaaaagggaaggtttgttaaagagaaaaaactgttgaaatttgggtatttctatgaaaaaaaatgtacaaaagtgatatttatatttttcaaaaaaaaaataaagaaagcccattttggttggcctagtccaactcgaacttggcccttagcccatctgaacctgtcccacccgacccttacccacttagaactcgaaacctgaaaacatgaagcgaaaatgggtagtgggaagagtatggacttctctggtacccgaaatccaaaaacccgaaaacatgttttgtgtgcagtcttagaaaaatgtaactagtcttatcataatacatctagatcagattatagttaagtttattttcacaaaaattaaccaagggtactaatttatactattttagaaaatacactctaatttgtcatttaataaaatagaaatccaatcaaaaaaaacttttacaaaatacaaaatctaaaataattataattataatttcttgtaatacatcaattatagacacatatatggaccatggtgaaaagaaaagatatatgataagtgatttggtattaccattagagagatatacataattataggctttaattgtaatttaatggttatatatatattgtagtagaactcacctc

SEQ ID NO: 201675 - DNA, 969 bp, Cannabis indica
gcatcattcttcattcttttcatgttaacgaatccccgaaatcctcccccgcaagccccgaggagactcctttagagaaaaacactgttgacttatggtagttaaccgcttgtcccgaccaagagcaataatcttcaagacaccgaaggaaacttgttgcttccttaaccgaagctttcccgaataatattacatcgtcagcgaacatcagatgtgtaactgccgggccatctctggataccttgaaacctgggccttttatacacttaattatatttaatcatcgcttagaataaatttataataaattattaaagtagataaaaatgcaaaacaataacttaaaaagaaaaaaaccattttgccaattattcctttaattaataatacttaattatatcaaatcggtaataagagtgtaaagcttgctcccattccagcatatcttacaattaagatcttatatgttttctacaaatttatgtataatattacctacgctatgattaagtatatataccaagaaatttaaaaaaaaataaaataaataaataaataaggaataatattcgatgtgggaacatgatttgaatgaaagaatgatcacaaagttaattaatatatatatatatataccgataatataggagagttgaaaattaaattcacgctttatgcattgaaaacgagtcaaagaacatgggaaacgtacgtgacatacaaattcaatctatgatgactttaagaatatatatatgtaaaggattgatgctgaggttaacaaattataataaaatacatgtgagtgaatcagttgtactggctaccaccacacttgctttgatgctccattagttaaaaccctgctctttggaccaattttcactaataataataacttattcgaatatataaaatctctaataatttgcatattaattgacaagtgataagctaccacgatttttc

SEQ ID NO: 201676 - DNA, 708 bp, Cannabis indica
aaaaaaaaaaaaaagtttgtaacgaagttatttatatgttgacaaaacaactacgaatgaagttttgagtgtaactataacatccatcctttcaaaattgaatgaatttctttagaacaaagaacattaggaatgataaataaattcaaacaaagctagtaagagaagcaatgataaaagttgtggaatttttcaatatttttttttcttttttttattcatttatttactttattttattaaattagccttttttttttattcttttactatgtttgcaatttttcctaaattgaaaaataacatcaaagagggtatttaggtatttttaattttttttattaaaactagagaaattttatttgcaccttataaatttataagtattctccaatattaaaaaataacttaactaatttaaaagtcactttaatatatattttgttaaaattctttcttacattattttctcttaatattaataattattataatttaattttacattttttaaaaaaaaaatatgtacaattttataaataaaatttcatatattttttattaatattaaaaaatatatttttttttatagatatatttttaagaatattagaaagaagaaaaaataaaaaatagtataaattaaatatattttttaatataacataaaaattattaaaatgaaaagggaaatttgactttttatag

SEQ ID NO: 201677 - DNA, 530 bp, Cannabis indica
atttttttttatatattaatgataataaattttatatatagtacttatttgcaatgaaagtatgaagcaaaacctcttattgtctcatgaatttagttatatttaactgtacaatcaaaaaaataccagctgccaaactttattattcctttcgcaaatttacggtgccattaatttttgttgttaaatgtcagcgaggaccattcacatgtacacatgtggcacattttagtctagataatataagaaaattatttttttaatagcataaatgacttgcaattaaaaacaagataaataaatagtaaatatcattttggactctggattttatagaagttattcattaaattctttgttttgttatgacaattcaaaccatgttttttaaaatggtaaaataaaatagatctattataaaatataaatattaataaaatgataactaatatgcaaaatacttaagtgacgtttggatagaactaggagtaatgaaatagaattgagtggaaaggaaacaatctctattc

SEQ ID NO: 201678 - DNA, 836 bp, Cannabis indica
gtgcacctatgctgtcggttatttcttaataaccgacagcatagggtatatcaaaaatcctaaaaattttctaaccctcaaccgactgtaaagggtatattaaatatctatacctacggtttttaccaagaaactgcctctaaatgtcaatttcgaatcaggcgagtatttcacaccctttagcttccctttttataaaatgggttgaaaaaaggaaagctaaaggcccatattattgttgtgtgagataaatgctactataatgtaattaaaatctaaaattaaaaaaaaagtaaatcaaaaacgaaaaaatcaataaaacaaaatagtcatagtctcgcgcacatatatataccaaataacataatataatcttataataaaataatctgtagacccttaaaataagtaaataatttaattaattaaagtaacatttggtaacaattttatttttaaattttataatcacaaaaatgaaagaattttttttttcaattttctttttcaaaaacaaaaatatgttctataaccacttttatttttcaattttaacaacagaaaagtgttttaggtaaatttatttaattttattttttgattttatttaagtcggttctgaggtgggtccagggctagggtcaggatgcggggtgtggtgatggggccaaagtcgaggtccggcttcgggtccattggattcgaccgaattatcctggctttttgcccgacattcatttaaatagaacagcccgcaaacccaagaattagcctggtctgatcgcggtcaagaataaattactatttaccgcctacttaagaaattaaaacatgtg

SEQ ID NO: 201679 - DNA, 1152 bp, Cannabis indica
taaaataattctaacaaagataagctcatttgaaaaaaaaaaattccatttggtttctttgtccaaaccaagtgatccctcccttgctttgatgactttcctccttccaaaatgactcctactgtgttatgatacaacctattcagtttataaaaatcccactctccattttctaataataaatccatggtcatagtgcctagagtaggaaatctatttggagttgggcaaaagatattaccatgggccacccataaatctttccaaatattaatatttttcctattagctaccacatagtaagcattttttctaacatcctttaccttaaccacattcttccaaaataattgtattgaagaaaaagagtacacttaaagtatttgacagctagcacttggcaatataagaattgatcattattaatgagtttccaccccatttaggtagaaaggctcaactatacacaataatattacgccataatgcatagtgtggaagttattttcaaatggagttctaatattagaaattattgaatttttattaatttactgttcgaactttttataaaattatgtaaaaatagaaaagtaaagtgtgtgagtaagagtcccacatgtgatagaaacactttatttgaagtgtataattagtgtaagtttgagatatgggattgggccccaaggggtaccaagttttgtgcgcatgggtgatgacttacacactggaccaccacacacacgtgccgccgtccgaccgatccaagctagtttgggttggcgggtaaggtgtcacttaattttttaaagaaaaattatttaattaaataaaaatctattttttatttatttattaattaattttaacacgtgatcaaaagtggtaaaacgcgtttttactctcacgattcaacttctccactaacgataacattatcgttttttcttgaatcgacttctatataagtcgtatcagaacaacgtaagaacacatcttttccaacattaaaaattcttttctttcttccttacgatttttctcagagcaaattttagggtgttatagagcgatacagttcggtggaacgtatcgtacttatacagaggctgctttattctgggaacgccgtggttgctggattgtcgtgca

SEQ ID NO: 201680 - DNA, 755 bp, Cannabis indica
ataatcaaggttcatctattgaagatttgatagaggaactagcgagtaacaccattcagtttcagcagcaagctcacatatatactcaaaattatttaccttattctcaacaacctactcctcttgtgccatatagtgaaaagctaataactgttgagtaaattgaaatagcaattaataacttgcaaattcaacaaagtactttttatttttagcaaagttttcatgaaactacgcagaactctcaacaatctctttaaaagatagagaatcttgcagacgaccaagtggaaacatctatgagtgggtgtgaaattcaaagttcaaatactttacttgcacaaatagagagtaacccaatggagaatgtcaagactataacaaatcaaagtgggtcacaacttgaatcaccaccacgccaaaaagtttatgatttgattccaaatcgtggagtcaacaattcatcccttgaaagatcatctccactagaggttgaatctcctattttaattggtccaccaccattgaaaaagacatacaaaccaattgtaccaacttatgtcactcctccactatttcaaagtagattgaaaaaaaaattgagaaagagaagcccatcaacaagatccctaaaactcatcccaaaattgaggtaaaaataaatttcttgtcttataatggaattaaagaagagcctcattgtgccaaatttcttaaggacttatgtctgagtaagaaaaaaactgaaaaggtga

SEQ ID NO: 201681 - DNA, 806 bp, Cannabis indica
ttttttttttttttgacaataaagatttaagatgttcttcatagtttaatgtaatagcaaagcaaccattttgaagagcattccaaacagttgtttattttattttttgaaatacctcattaaaccatgtaaataatatatttataatatacataaataataaaatattatatatacataatatttatttatttttacacttacaaacatatatatataaaaataataaacatttataacactaatactaaaactcttagtattttttgagttattttaacttatctatttttaacttttgtaattattttatattagctatggtataagttcttttaagttgcaaaaaaggccaacgcgcgcctagtaggattttacggacaacaatcatttctaatccatatatatacatgtgtgtaatgtgtaaattgtcagattttcaagtactgggactacataaatcccattattatatatatacttgatttttgtctatggagaagaatataagtaatgatattttactaataacaaacaagcaagcacagcttcaaaattatgcataaaacctcagtaccatagcagtagtagtgcaccgaattaaacaagaagtgaaattgaggattgatataattttgcttaaagaaattggacaaaaaaagatggaaattagtttgaattttgtaattatatatatagatgtatacaaatagattgtgattcaaatggtgttaggttgtaaacagttttggaaatgaatataaaagagctgattttctcaatataaaaaaaaaacataaaataaa

SEQ ID NO: 201682 - DNA, 1727 bp, Cannabis indica
tatttacatcaatctagaattaggtattcataagaaacaactaacaactctagacacaattaagcgctatttgttaataaaaaaaagacctaatttgtcatactaaaaaaatattggtccttttgattggagtgtatactaaactttttttcaataataataataatttctaagtaaaataaatgatcaaacaaaatacatctaataaattgtacaccaaataaatccaataataatttttaagtacaaaaaatgattaaacacatccaataaaatgtataaaaaaattgctccgctttggctatatgccttataatatttcatgaaattcctttcagaaaaatataaaatgaaatgcaatttttatgctttctcattgtgtattctatttaattgaaatagtgctcagccaatgatataaaattctttattttgtcaaagcattgaaaacaacatgtggtctataatctacaaatgtacattccgtctattattttgatacacaaaattagtagcaaaaacaaaagagacaacacttcacaaatttgccaaaagactcttataaacagaaaactcatatcttctcaagctaaatatatactacaaaatacacaactaaaccacttctcacacactactcaaaaagcaaagcaaagttttcaatcaatcttatcaacctcttgaggagcttggagagtatctgggtagagaaagttcttagcaccactcacatccaagatcttcttgcttggagtttctgaggcctcagttcctggtttgttcagataaaacaatctatatccccactcaagaatctcaggacaaaacactttccatatataagtgaccttaaaccaagatggttcagtcaagtatctttgaccctttaaagcacttttcactattccttttgcacaaccttgacatgtcccaactggaatagcacttacttgaacctaaaataaaccccaaaacttacattattattaagatataaagagtaataaaatcgaccacataaagagaaaaaaaaaaaaaagaaaattcttacatccctcaaatcaggatcaaagatcattttgccttctttgtctaggaatttgccttgtgtgagttctgactctatgaaaccaggagtgacaagggttattttaatgtcttgtcctagctcaactctcaatgtctcaaacaatgcaaacaatgcagctttgcttgcctaattcaaaaccaatgtgattaaatattaagtaaagaaaaaactgaaatgggaaagtaataaaaaaccataatttattgtatctatatatatacattatataagctcattcttggaattggtaaccaagaagcagaggaagaaagtactactatcttccctttgctttgtttaaggtgtggaattgcaaaatgagttgtataagctgaaccccagaaatttgtatcctgcaaaaaacacaacaaagcaataacacataatatattatgtaatctttacctaattacttcaaggaagtcacttatatatattattttaagtaccataacatttctgagagaagttatatttgttatctcatcaaacaaggaaactgaattgatcccagcattgttcacaagatgatccactgcaattaacaacaaattttttgttttaacaccagacactacattgcatacaattctatattgtatataagaaaaaaaaaaaccagtataagtaactgaat

SEQ ID NO: 201683 - DNA, 1241 bp, Cannabis indica
caagccaagaccatttactgaaacatttacaatgtgtgaataaatacaggatgtatgtatgtgccatataagggaaacaaaaaaaaaggtatcgcttttgaatttggacggcattaatacacattacagtctttgtgcttctggcttctggagcctataatccatttcttgtttctaaaccatcttccgacaatctttttcctctctagatttacacttttacagtcactaataattatgataagcatcttctgccactatcgcagtaccattattaatataagagttcactagtggcatgtcacaatcattaaaacaggtgagacagtcaatataatacaataaaagaccttagaaagtgacaaagaaaagtacagttgaacaccgttgaacaaactttcatagcattattgaatgagataagaaatagcaaaatcccttaaaataaattttcacaacaattgagatacaaaacacaaacctggcccattctcctcactggactcaaaaagtagctgaagtccaaggcaaatgccaaggaatggccggtcattctcaatataagtacgaagtgcttcacccatcctacaatgattttgaaatgctataacttcccactcttgtttagctaaacaagcaacctgtgctagcaaaaccacacacataaaagaaaaatcaattacccatttttgttcagcacatccatagccggagagaaagctcccacaccaggaaatatcaggcgatcagcattgagtatgtcttctggagatttaacctgcatcacaaacataataaaagcaaaccactaaaaaagactaacacaatatcaatggctacaccaaacgtaaatttcgagtatagacactaacaatacagcgccaatttatctattcaaaattgttcaaatgaattataaaagaagacaacagataaattttacatagttaagtgtaataaatggagtttagctaagcctgtcatctcattcaaaactatcttaggaatttcgaccaaaatcaaaacagaatagatagaatgtcaaacgaaagatgatagttacaacactaaaaaaattacatctttaatgtcgaacccaaggtagcgaatagcattcctaacactccgaacattgccagctccatagtcgagaagagtcacaactgaatattaaaaaccaattaatacgaataaagagttgaatatagcttagtaagttacatatatgagagagagagaga

SEQ ID NO: 201684 - DNA, 1014 bp, Cannabis indica
aaaaagtcaaataagtttgtctttcttttctcaaataaaagtctgaaaaaacagttttattggagcattatctgccacgtggaaggttcttgtgcgttatattatgttttctaccttagtagttagtagtctgctatagatatttttgttctttttcataaaggtaaaatatatttgttttaagtcgtttagtaatgggtgattttacaatgcactctttaaaagtatttcggcatttagaaaaaaaatttaatctaattttttttcatattcatgtacgttataactatttaagatatccaacaaaattttgagaaattcgaaataatttacaaacagtctattttacacgcgtataaaataaaatagtcacgcgtgcaacacactatttcaatttgaacatagttttcggcgtgttaaacttttccaaattttttaaaattttgcaggatttcttaaataactataacgtacatgaccttgagaaaaaaattaactaaaaaattatttcgaatgctaaaatagataggagtgcatcaatatatccattttaaggaggtgtattgtagaatttttctaaaatataataattttcgcgaaaattgaagctatatataaactaaaaggttgtttggttgaacttataaaaataaaattttagagttaaaaattaaaacttactaattacacaattaataagaaaaatatttttagaacttgaaagtttaaaaataatttttaaaaactcaaccaacaagaacctaagtgagacaatcaccccacttgaaattaataaaatcggtttaaaactatatattttaaatacaaagttaaaattactattgaggcaacattatatatctatcattttattttattttataatatttgatcactagctaacagttatagaacaaaataaaatttgttctttaaattaattttaaaccacaaagaaaaccttgggtttgccactagtactgtatataatttaaatagaataatattaaatat

SEQ ID NO: 201685 - DNA, 843 bp, Cannabis indica
gtagttaattgtgtcaattgttttttttttgaaacccctggccaattgttagtcacggcaacaaggcccttctccattttaaataaagtgtcattccatcttcaaaataacaattcaaaccccattcactttccaaccaaactctcaaagagaaccaattctttcatctcgacaaagaatccctacacgcccaatcaaggtaatttttttttctcttcattctttttcattccttcttctcatcaatccattgcacttgaaattcacaaaatcttaaaaaaaaaatcccttgtagccatggccttctattggtgaggagagaaggaattttcaaaaattcttcaaaaaatttttggagttggaaacattcttgaggtaatttctagctcttttcactttcttggtaatttgtaattggtttttgtacaaattgcatgaatgaaattattgtggaaatagaaattaggtttgaatgtgtttggctatgtgatgtatgaataaaatttagataggttttgaattaattttgaattggttttgatattggaattggaatttgaataattgagagttgaatttgtaaatttgggcaagagttacaaacttttggtataggtttggatgatgataaattagtccatatctagatatgcggtcattacaagaaaaatcggacaaaatccattcaatgatctttaaataaaaattgagacataacaactccattatttaaattataaataagagaaataataagaccaatcatgttgtaatgctcaatcacaaaaaaattgaagcttaaaaaaaagggctaatagagagatctgaaaaacaccgtgagaa

SEQ ID NO: 201686 - DNA, 914 bp, Cannabis indica
ttcttttttttttttccctaatttatatgttgttaacaataaaaatgagtggcttattgaataatctcacatagtgattaaatgtaaaattattaaactatatataaaaatctaaactatttcacacatcactaattaattgagatgagatcttaatttttcttatgatatatgtcaaagtcacacattgtgtgataaattgattaaagattgataagtaaaaaataatcattaacttaagggccaggtcaatattagataacatagtcatcctaattaataaggaatttttacaaaattactagatttttaatgaaaatttacaattttactgtcacacaaaattttttatacagaaatactatctttttataaaacaaccgtaaaacaacaaaatagaacaattaaaacaacagtgaaacaactaaaaaacaaccgtgaaaacttaacacagtacacagtattaattttaataaaaatttctcctcataataaaaaagtaaaaaaattaaaaatttcagtatgtagtgtaaaaattgtgcaaattaaaacaaaggttttatcttaatgaaagtcatgtaacacattgacatgcattcatatattatatatagtgatatacgtacatgtgtacgcagggcccgccctaaaatttagtgggttataggaaaaaaattatttttggacctttatttagaaaaaatggtatttttcaaaatcaacaaaaaaaaattatataattttaaaagggtaaaagtttttttgggcctctggactaggtgggcccttggcctatgcctaatccgcctatgcccagggccggcccgaccctgtgtacgtatatttacgtaaaatatatattcaagtttgtcaaatactatacactacacgattgcttatagtatttcactgtt

SEQ ID NO: 201687 - DNA, 815 bp, Cannabis indica
gatttgtatataatatttttaagagatttaatttggtacgagtttgtatgtcttttagcatttaatatgatgtaatatataattagaaaaattcatagttgactaagaataagataaatacatagtataagaaagatatgatatagaaaaaaagataacataatttattagtaaactaataaagtacatattataagaaagctatatgtaagaaaaaaagataacataatttataagtaaaccaaaagtacttatgaaatgtcattcaattcaatcaaataaggttggacatcaaatccaaatcaattttttttttttcattcgatcaaatttaattaataattaaatttagagaattattattcgatctaatttaattaaactttaaaatccaattaaatctaatgtaatacaattactaatttgattggatcgattctttaatttgatatccaattacatatttaattttaatattaacttcaaaagataaaaaaaaaaaagagatatatatgtaaaattttttatcatttacttaaattcaatactctataaattttgtcctacagcggtaatgttggagtcggattgtcttgtgttggttaatgctattaatagcaagagccatattctgtctcctcttggtcttattgtttcggattgtatttctcttatacgatccttttctagttttgatatttcagttcagtttgttaaacgatctgggaaccaagcggctaactggttagctcgttcttctagttcatgtcctggtcgtatttccagtagggggtctgtctcttctggtttggaag

SEQ ID NO: 201688 - DNA, 679 bp, Cannabis indica
cgctatggacattttaatgatcatatcaaaaacaattaggaagaatcattaaaaaaattcattcagatcgggaaggagaatattattatcgttatatagaatttggacaacccatgggaccttttgctgagtattattacaagaaaataggatagtttctcaatacactatgtctgattcacctgagtaaaatgacattgttaaaaggagaaattgcactctaatggacatggttagaagcaagatgagtagatcaaatctaccagagttcttatgaggtgaaacactcatgattgctacttgtattttgaattgaattctaagtaaatatgttctaaaaatttctttttgagttgtggactggaagaaaacctagtttaaatcatcttcgtgtatgggttgttcagttaaagtaaggatttatgatcctaatttgcaagagttagatccgagaacagtttgatattttttttattgattatccaatgcacacaaaatgctatcgcttttactatcctttgaatctcagactgctaaatttctaaaatttgatgttactaaaaatattctttcaacatctcttgaaacaggagagtcattctacgagatttttttattcatatgtcgttagataataatagcggtcttattcctactccggttgataatgctctcattg

SEQ ID NO: 201689 - DNA, 1524 bp, Cannabis indica
atttcaaaattttttttaaaaaatgatcattaaaaataaaattaaatattttttaaaaattattctaaatcaagttgatttgaaattgaaaaattttctaactaaatataattcttaatttaattaaatgtattaaaatagaagtaaataattaagtatcttgaataaaatcaacttaattattcaaatttaatatctaagaaaaatattttaatttaagtttgtctaaaattaattttcagcttaaatatatttttctacttaattaaatattagaaaaatataaattagttactagaaatagcttatctataatttatttcattaaactaagtgtatttttataaattaattaactctcacacaaggtccaaacgagcggaattaacaaccttattaaaattattattaattgaataagctcaatactaattgggcttaaataaaactattagagtgattattttattttagtaacctagtccatttaaatatccaagataaatgagcttggtatatgcatctaagtccaatagcaaatacataggctcacataatcaattgatttgaatggacccgatcatgtttctaagtttatcacagatgaaagaaattacaaaattatctgttttaccaattatttatttgatctattgataattaaactataattaatttaaattattaggcctatcaacaaattaatcatgacaatttaaatcaaataaacattaggcttattaaaaaaaaaaacaagttttgaattacataattaaacaaataaacaaacatgtaacataacaaggaaagttagttgacaaaaagaggcaattatccaagaattttaaataatgctaatttcgaaaatttaaggatttatattaatcctaaaaaaaaaactttttagaatttaaaacattaattaactaacaaatatctatgttattttaataatattttattaatttaaaatattaaataagataaaataattcaatatctaatttttcaaaattaaagatattattatttgtctaatcttatcatttaacataaaataaaataacaaatctaaaagttaaatatatatggttattattttaagaaaaatatctaaattaattatcatattttattattaattaaatctctaataaaataatttaatataacattttaattttaattaaaatataactaatatctaatttctgatcttataatttacaataaataataaattaataattaatcaaaccataataataatttatgtgaaaagattaatttttaaatttttaaaccttttaatatctaaaactaatttttatgaataataaaataaataaaattaattttattttgatattgaaattttaaatttaaaaaatagattctacataaaaatccatgcaaatttgtcttttattttgcaaaaaaaaaaaaacaacaaatttttgaaccaaaaatatcaaaatttcatgttttggatcataggctgcacgcagcctccccccccccccc

SEQ ID NO: 201690 - DNA, 1124 bp, Cannabis indica
taaatataaaaatattaaactatgtataaaattatcggcaattctactcatataaaaattaattatatggctatatttaacaatattttataattggaattcttaagccaaaaatttaaaagttgtgcaaaattggattttcctctcattgcaaagttatgagatattatgtaatattagagttcgtttggtatgacgtataaatgttgtattgtattaaataataaataacactatatttggataaaataatgtattgtattaattattacgaccaaaatttttaatacaatacatgttgtattatttaatacataacaaatggtctgtattaacttgtattataatatttacgaaggtaccgtttggtaacacttttgttttctaatttcttaatcacaaaatgaaagaaaaatttttggttttaaaaattttatttttgaaaaacaaaaacatgttctgcaaccacttttgttttttaattttaaaaatagaaaataaaagtatattatgtaaaattcatttttatttttatttttttattttatttaaatggggtctaggttcggggtcagatttgggtttagatcagaggtcgggtttggcgctagggccatggggggtatttgggtccatggtcagagtccaaaatattgattaaaaaaaactgtttaaaaaaatattgaaagtaattttttttgttttcaaaatattaattctcaatcaaaaaattgaaaaagtgaaaatagttttatagaacatgtttttaaaaaatattttcacttttctaattttaaaaacagaaaactaattagaaaagtattaccaaacgataccaaagattcggagtcaacaccaatatccaatccggacccgaactcggacacgaacccaaacccaagacctgaatccggacctagacccagacccgcgacccaagacccgaacccaaacctgggacccagatccgtacccaggactcgggacctgaacttgctactcgaacccgagacccacgacttgagacccaagacccggactggaactaggaccaggacccagactaagactcggacccgggatctagacccagacccagattcgggacccggacccagactcgg

SEQ ID NO: 201691 - DNA, 1533 bp, Cannabis indica
tataacttgtaattatttaatttacaaaccctttcaaaaatattatacatgtttcgggatcccataaaaaatttgcaaaacattacaagttacttttacatgccgacctagacggtaaaatctggaaatacaaaagacatccactagtagacccaaccctcgtggtctagtatggcctaaacatgtacaatccacggccaagccctcaaactcatagctgaccaaaaatagatttaccctttcctgcacaatagagcacctatcagccaagccaagcaagacaatgtaaataacaatatacacaataatcaaatgtcacataattattgacgccactgcacttattgcctattttacatagacctacgtgttacgatcacacgcctaattatgtatttgtagcatagactcacgtgttacgctcacatgtctatttaaataaggccttagaatggtttatctaggttctgattactgattctaacctaatcatgccttgaatgcataattctttacttcaacatataaagcatggcattatattcaaagctatttaatcactagggtaataaccctaggctatataaccgctcactttagggtaataaccttaatcccgattcctcatttaattacaatcataatatcaaacatgagtgccaccgcacttaactctacctgctaactactgtcttacttgatattccaagtatgtggagattccaaacctcaggctgttcttgagcaagcactgataattctagtcactattcccagaatttcacaaatagggttaatttcaaataatcatataatttgcatttcatttatagataagtatatagagctcggaacgagctttccaacgatataaggaacgtcccaaacgaagtcctgagtcaaatgttatggcgaaaacaaaaacccaaaaattcttgggggaaatagggcctcatcgcggcgagcagggccacgccatggcaagcccagccatggccgcggcgacgggccctgtaacccaaaaatttaccatttttataacttcgaatttcaacccaaaattcaaaactaactcaaccaaaacatgcataaactcaaattcaaagctagtacaacctataatcaatataaacatcaattccaagccaaacaaaaagctcaaaatatcaatttcaagctcttacacaaaagcttgtcacaaaatcaacataacttcccaattcacatgcttgaacacaaagcatttaaaccaacaagaaatgcctagaaaaatcaaagtcaaaacccagaattcaagcaaccattctcaaccgtaaaattcttcataacatgctaaatacaatctacatgctcccataagcttaaacacacaagaagcaccaagatatcacctcaaatcatcaataatccacaagaggtacatccacatacatttaatccaaagaacttcaaaaacacttaacaattcctcaaataatttagaaattaacaattcaaaaaggttaagaattcttaccacaagtcctcttaagc

SEQ ID NO: 201692 - DNA, 771 bp, Cannabis indica
tttaacatttcttaattttttgataggtactatttcacaaataacaagacctaaatacataatgactaattaaaaaaaatacctattcattaattattcctaaaactttaacataattcagtgggagtatataatgttaataggaatcatttgtacgaagcaccttttaaagtgttaaattactattgatgtaattaactatgaaatcttatataaattgatattacattttatggaatatcactaactaatcgcaaaacaccacctctaggtggtgttgaacactactactagtgtctaataacaatgctcataccatattttgatccttttgtgtcttatagcaatacctgtattatgttttgattcttttgtatctaataacaatactcgtactatgtttctttacataaggataagttttccttttttttaaaaaatatatttttaataatggtctaccctatcctaaagtttgggtacaggattcccataagaggaaaaaataataaagaaaaaagtagatgaccctttttagagaaaattcccaacaatatacaagggtctagtgttccattttcattcattattaagccctaaaaagaatgtattaagttaaatttcaagattaaaatatgtctaattaagaagattttaaaaaaattaacttcagcacccatagcatgaacaaccctttactaatcaaagggttattgtaattttttttagactaaataaaaacaacatcacaatcttaaccaatttttattt

SEQ ID NO: 201693 - DNA, 1172 bp, Cannabis indica
caaaatcaaagtagaaagcggaagcgggttttataaaaaaaagtttttaacataaaactgatctgaaccataatctcaagatctcaacataattagaacatttacctcttgattactatcaaaggatcctcaaatattttttttatttttaattttatttttttatattttcgatcatccaatccaatagcaatatgaactcgatgaagactttacaccatagctttctagatcaatgcttaacactcaagataagagtgggcttataagattaatacatgggatgaattttctaacacaatgtgtactcaactcataagatactgtgttctgagattgagagattaagcgaaccaatccctagagaaagagaggcatgagattggagaaagagagagagagagagagagtgaaagtgggggcgtgaactagggttgatagatatataaatatattatacaatgtgatgtatatataaatatattatacgtatatatcacatatatatataaatataactaaaaatttataaagtaatccatttaacataaagatgtattattctttatttataatttaaacaataaaaatatctgtaactgaataatcatattcagttatacctttatttaattagtcctcctaattataaatattttatccaacaaaatatttaatttgataattaatagataaattatttatttatttttattaatcttatttaataaaataatcaaaacaaatacgatgagcttttatatgtcaccctacacgtgtgggccatagtcccacacctgtgaactatattttaaagcccaaaattattttatcagttttgtcttaaataactttactatttattttacaataaataagatgattaattctcattaatcttttattaattattttttgaaattctatattttaatattaccaatttattttttaattaaatacagaacattaaatatggtactaaaacagttattctataactacaaaatataattttgtaattgtagaataaaaaaccagcaaagaataaaagtgcagaaaaaataaaaatacacaatgttttcatatatggaatcaacaattctggcagattgttagtattccacggagccacgtccagagataaatttcattagatagatctaaaaaat

SEQ ID NO: 201694 - DNA, 1002 bp, Cannabis indica
actaatttaccttgacaaaattttaatctaagagataacggttagggagaaccttgacgggttttcatgtattattgttttatattctttaatctttgtcttgtcttataatatgtgtaaaaaacaaagggttggttttgaatttcttaggagagactaggacagtacagtatttctataattataatatacaatatattattttaataatattatgttttttcctttgattattattgcattgcatagtacatatatataatccaatgtcatgatataaatattttcagcatatttatctaaaagaaaattatcatctaagaaaatgcattagcaaaattaatactcctctcaaatcgggattcaatgtttcacatttataacatgttttacgatattggatagtgtaattagtaaaacaaaatgtactttcctaataatatattttaaaattttgggggaaaaaactacaaaagggtaaaacaaaatcatggtcaaaaagttcaaaataaaattaaatataaatagaaaaagaccaccttgggaataaccttctgccataacttaaaagagtgatacattcaatgagacccttcttgagactcacaatctcagttcccaaactcttgaaaaacagaagaaaataattaagcaattagcaacaaaattcagaaaacataataattgttttctttttcattaaaaagaaaaagaaaaacttggatggaatgagaatttactaattacattagactacctaatagctaatagctaaataatttagttaaaacataaaaattgaaaaaaaaaaattactctatcaaatgagttactttaattaaaaaattaattacatgtagaaaaatactatttattggtagaaaaaatattaatataaattaaaaatatatattttatatgaaataaaatatatttataatttattttatgaggtgtaaataaaactttctaaagaagaagagttctatttgcaccccataa

SEQ ID NO: 201695 - DNA, 571 bp, Cannabis indica
gaaaaggaaatttccaaatatgcctctgttgtcatcagccaagtgagtgatgcttaaggaccaagaagtcattttagagtgattgcacaactgtggatagaaagaaacctaagttaggtaaatgtgagagtttgccagtcatgccagtcatgtttttgaataccccaacccccaacccaagtttagtcttatgtgtatatgattatttttaagtatcagttccaacaatgtacaagtttttcctcttaaaatatttatctatatacataagtacatgtctctggctatgctttggccaaatatcttgagctttggaatgatacatcacgttaatttgggtacattattattatgatggtgatatttaggcttaaagatggtaacataaattcatttatgaggcacaatgcgtgtagaatttattcattaatggggtggcaataatgaaagaaataaagaaaagaaaataaaagagaattcattagttatttaaccatatttgtctagactccagtggataaaaatttagtaggctaaaatcagtgagaaattactcttacaaatattggat

SEQ ID NO: 201696 - DNA, 1407 bp, Cannabis indica
ttgtataacaataacatataatagaataagttaagctactagaaaacaaaattataagaaagtgacaacaccattacaaaaacaaaaaagcaacaaaaaaggtggggaattcttccaaaagataataatcaataattatcacgtgttctttgatgagtgatttattgtgtcttttggtacgtgtggtggatatggcttcacacaaagtgcaaaccaagttaatattgggatacttttagggttaggcaacttggcttacaacactcaagtttgacacgaaaatgatacaaaattttacataagttatgttggtatttggtttgtcttttattagttttttatgtcacaagtcgtatttgtatcagttatttaaaataaatataagaactttacatgtaaaaaaagctttttcgttggttttgaagtggcataaatttttttgcgtcaattaatgtaatcgatagaataattgtagatgcaaatactgttatttgttgctccacttatagtcgacgcaaaaatcagttttgcctaattaattaataactgacgcaaatagttttgtattagtttttaagtgaagcaaaaaactttatgtcaaactggaattggcgcaaatttgttatttgcgttagttacaatttggcgcatacaagtacgtaaaaataattatttttttttatctttttgttgtgcaagaccactgctcaaacaacaataaacacacaataacagaacaaaaaaaggatcaaatgatcaagaataatgaactgaattgaattgagtatgaaatcaatttcaccaagaaaacatatataagactaaattatgaacatgaagaagaatctttattgctgaaatagctttgattacaatcagtgggagagagagaaaaccagcaagatgaatcaattacaatacagagacagttacataaaatcctcacacgagggaagccatttcatgaatggacactccctttatcatccctccacaaacactctcacaatctctggttttcagtttctcaaactctctaagcaaataacgaaattattaaaccaagtcctatctcaaacaagtgagcaagttaacctatttatagttgttggctgtgattgtttagaggctaactgaattagttggttaggacaattggtgatgatgtggaaaactaacagttcacatgtgtcttaattataacataattttttttttctatctagctttttgtattggttataaaatgacgcatagttgtaggtaagtaaaattgcgaatttctttacaattttttgcacctgcattttaaaattttagaatcgttttgtataccaatatttttatgcactaacattaataatatttgtaacataataatgataatatttttcatgtaactaaaaa

SEQ ID NO: 201697 - DNA, 1034 bp, Cannabis indica
gtaaaaaggttaattaaacgagtagcagtagtttcatattaccttgtcattgttctcttcatctgaaccatcctcagaatcataagtcaaagcagaggtctgaacttctactggtaaagctttgttaagttttttctttttgtcttcttctttcaactgtttgaatctgttgagcaccatctttccacgtaagaaacttttgcaggagttataaattttagcatgcattgtggcaagatacaaacctatcacccgaccggtctggctgagagccagaccgttttgcacgacctgctgttataattccacttgcattttcactcacaacaggctttgcacctcctaatttgcgcagccatacctgttgcgcggtgctcagaacattgtttgtaaacctaacaaatgatggttaaattttataaatcatcataaaaagagaattgcttcatgtaaataattataatggtatttgtgtttatctaattcaaggttcacaatatattgcttccacggagatttaatttggcattcttggaaaaatgccatacaataactgcagaaattaaagtttacaacaaatggaaggtaaagtaacgtgataattttagtcatataaatattgtcgtgctactacttaaaatctaactttactaactaaattcttagagtgtcttctgtaacacttttttaatcaattttttatttttctaattaaacaagtgaaaatattttcagaatacatattttataaaactgtttttactttttaatttgaaaaatgagaatcaaaaacttgaaatttcagaacaaaaatatgtcacattcaaaaattttttaaacaatttttttaattgtaatctatatgtattttctttaatcaatattttacaccccgaacccagccgccacagccccggatccagaccccagcaatggccccgaacccagacctcgacccggcccgaaccaagagccggaccccaacccagcccgaacgcgatctgacctgaacccgaacctggactcatagcccg

SEQ ID NO: 201698 - DNA, 538 bp, Cannabis indica
gaaggaattcatcaataaggtaaatttagtagtcataaaaacgaaatgttgacgagagttgtttcacaaaactaggaaatagtactttaatagtaaaaacaaaaataagtaaatcatgataaaaacaaacaaaaaatagtgtaaccggcaacattgttgcttctttcatataatcaatttcttgtaatcttaaatatgaagaaatggaagtcttagcaattgtccacagcctacaatggctccttcgttgtaacgtggatgtccactttgttaaaacggactctctcattgtagtttaaggacggcaacaaatggatgaataccgttctgctttttatgacatcttaaatgatatcccacttcttgtatccgatttttcacgactacttatctcacatgattatcgatttgtaaatactgaagctcgtgtgttagctaaatttgttcttataatggatacagattcttcttggttggaagaatattattattattattatgtaatttaatgtttcatttatataatggtcttttctaa

SEQ ID NO: 201699 - DNA, 3121 bp, Cannabis indica
gtgaaggcaaaatttttttatgggagatatggtccttagaagagtatttctgaacacaaaagacagcacatctggtgtgctcagaccaaattgggaaggaccatgtcaggtggtcgaagttgtagaatcatgagcatacaaacttgggcggtaagatgaaaacatggaactcgttttagtgccaaggtattggaatgaagaacatttaagaaagtattatcagtaaatgtaccaggtcagatgacctactttaagtacaaaaccaaagaacatttacttttaagtaaatggccttctaggcggaccccgcccaagggtgatgatgaaaggattaagtactcaggtcggatgacaacctttgaaagtacaaccttctttttataagttacaactattttatgtttgaatttagccaaagatcggattagatcatataatggctttcatgaatgtaagttgctacggtaacaagaatattataaccaatgaatgaataaagatgtctatttaaattctgattgtgtcgattctattagcaagttataaatataccattaaatgtgtacaaaggtctgctcgaatccaaagaaccaaacagacgaaaatcatacttgtgaaatgcaattgactaagagtcataagcttgctcggttacttggggggcaactatacccgtacaaagtattagtaaagataaataacaagctaaaaaaacaaatatatataacagttagcacgaacaagtatcaaaacaagggaaagtattcattgaaaaagataacaaagcacgataaacccgggattaaaggctgcctggttagctagttatctttatatgaaaaaacataaccccaaagtttaaaaactgcttggtctgtcatttttgtctctaacaaaggcccatgggccgaaccgacatattaaaaaaaagaacgaaaaatgtttcagacggaaggggtcccaggctccttgttacagatcagtttggtttatgggggtcagaggttcaacattttgggtagcaggaatttcactgctctggtcggtcggaactatagaagtggttgcctcggggttttctttggccgcctgacccacacagtattcaatatatacctctttggaatcactgaggtaatcaaaattgcctttggggttggccttccaaaacttgtagaaaacctttagggcagctgtttccagactgtccacctctttcacgagctcttcttccatggtctgcctggtctcgacatcctcttccagctttgtaagaagagtgcggagactctccctcttgtcttcaagagcattgacatccttggacaaagcctcgttgtctgcctcaagctaggcggtagaaggcatctcttgcatctcctttgttagctcctcgacccgggcgttggcaccaaggagctttttgtccacctccccgagctcgttcctcacgtcctgaaccccctttctggtcgtatccacctccctatgcagtgtgttggtggtagcaaggttcttagctgccgtggacttagcccgggaataggcgtaagccaccttcagattgacctgcatgggaaaatgttaaaatcccagctacaaaaaagagaataaaaacaaataaggaaatacgtacccatgcagcctcctttaggactcctccaatgaccgattctaaggacagctcattgtccgccccggacagctaatcactcacttcaggaagtgaccaatccagataatactggagcatgtccttgcccttttttgcctctgtgctcagcaccacagccgttgaagaggtgtaactctgaccagacccattcgagctcccccctttggaactatttgattttgagacctccaggactggagggtccacgacgaaccgtttcttagaggggtctattacttctcgaccgaccctttctccttggacagagcctcattgcctttagatctcttgggcgggggagtctagcccgagctgtcaccaaccctcttcttcagagcctggagtactttctgggacatgactgcacaaacaaaacaacatagttagaagcaagtgtaatataaagtatgtcatgaaagaaataaatgcaagtccaaaataccctacacgtgggaaggagcatttgcccgaacaagcaaagacggagcataatcatccgaggagtcttcatcctgctccataaggacaaattttccttttccctccgctggggtggacggccggacaggcatatcaggctctctaatcctgatagcacgctccactggtgcttggtcattgaggagagccttcttcttcttcttcttgctcagcttctcctgctcggtcaccctgacctgcctaagttttgccttcttcttctccttcacgggcctcagcataaaatcctctgggaagagtttgtacttaatgtaattggcctcagtggctagtagggtggacaaagtgtactcgtccacaaaatgtccatggttcccgtcagccacttctccttgacttgagaaaaatagaaataccccgacctgctctggttgggagttgactttagatcaaggagccagttggtgtcgtgtgggggatggctcaccccatccttgtgaatcataaagaaagaatagggcgaatagatatttgatgccctttggagtgaattgggtcgggcaaagatggtagtaatctgttattctcctaaagtacggaagcaagggtagcattgcaccctgcttagtatgagtgcccgactaggcacaacacccctcgcttgtactagttgcccagtggtttggagagggaaggaagcatttgacatcccctaagtgtagctgtgcttctccaaattcttcatttttgcctgggttactatagattgaggagaaacccaccgagctcctactgcactttgtattctctgagaaacagcctcggtgtattcttcagtaacatagtcctcatcggcctcagacacgggttctccatcttcgttgaacccaccaaaaggcagcctccgagctgttccctcctccccggcttcagatggagtatcaggatgtacctcaccctaatcctccacctcttagacttcaccgtccccctcgatgtcttcct

SEQ ID NO: 201700 - DNA, 848 bp, Cannabis indica
atatatatatatttatatagaatcttatttttacgaaaacttatataacgtaatgaattaaagtacatgataatattatatagttatgcatatttaattatatttttaaattttataaattaaaaggaaattacttattattattatttttttttaaaaataatatttaaaattttaaagaaaataaatataaagtttaaaaacattaaaagtaattgttaaaaaataataatttattaatatttataaatatttaaataaatttaaaattaatataagttcaattaactttaaataaataatattaatatttatatatatttaaattaattaaaaataaataatgttaatatttatatatatttataaaactaatcttactaaaccgtgaaatttaacagaatatttttatatttttaaaatattctgttaaaccaacaaaaatagataaatagccacattttatatataaagatttaagataaataatattaatatttatatatatatttataaaactaattttactaacatttaacggaatattcttatattattaaaatattttgttaaatcaaccaaaatcgttaaataaccacattatttatatatatacatataagaaaaggaagagaaacaaattatcaagaaaattgtgaataaaaaaatagttaccatctctctaaaaaacaaaaatggttacaacaatttatctgaaaaaagaaaaagaaataaataaatatcatttcactttgttccttttaactaattttaaattaatctaaattaatttaaatattaaatcaatttagatgataatgcataacatacaaatttaattatttttt

SEQ ID NO: 201701 - DNA, 514 bp, Cannabis indica
atattcatgtaaggacacgattaatattagtttaatcgtatactgattatgcttgaggtgacaaacttacaaacagaaccaacgaaattgtataaaattacactttagtaatattggcttgtttcagtgctaaaaaaatcaatagattattgttgttactagagtttggtatgggagttatagacttgctgggaaaagaaatgttcactcaacacatgtttcgtaaattaaatttcaatggtaatgttagcccttcctccaacacaaatttgtattttttttttcaaatctaaatactctctaactctaagtagttacgtagcaaatctcacttattacttttgtcaagaaaaggagaagaattttttatcgttaggggtataaaaacataataaaagcataccctaccacggtagaattttcaatataaaaaagttgatatatattattggtataaaaaagaaaaatgaaaacgacagaaactgtaaaagtaaataaaaaaataaagaaagaa

SEQ ID NO: 201702 - DNA, 1422 bp, Cannabis indica
ccaaatgcattatatttatttttttgttttaaaacttaatattctaacttcaaattgtaaatattatgagagaaagcttaatggcttagtaagtatctctgtggcttgaactctatgaattgggaattctgtgttgtttttgatagagaacaacaacatgttgagttgcttgatagggaaaaaaatgataacattcatgataaatacaatgcagagatgattctgaagcaactaaaaaaccttagccctaaaaatatattgaactataatactaaattcaatctaacacagtcttgtcctctgacatgtctttgtaagtccggtgaaggtgttctgtccttgtaactctgaagttgtctgttctggtttttgttttgtgatcgtgctatggcgtcaagtagtcatagtgctagtatattagctgatcaatatgaccaaattaatattgaagatgaggaggaaggagtattgattgaaggggatacggaaggtgaggaaattatttttgatgatagatggtgtcttgttgggaagtttttgactggaagatctgtagattttgatgccatgagacatttaatggcctccttgtggcagccggggaagggagtgtatgtcaaagaattagagactgatctatacctctttcaattttatcacgaacttgatactcagagtgttatagatggtagtccatggacgtttaataaggctccattgatctttcataggctgaagagtggggagaacccgagaacggttcatctacacaaaatagacatgtggattcaaatacatgatcttagaaccgggtttatgatggagaaatttgtgcgtagtgcaggagggtatgtgggtgcctatgtgaaatcggatccgaagaacttcaacgggatttggcgtgattacttgcgggttcgagctactattgatattgaaaaaccattgaagcgtcgtatgaagctatgcaaagaaaatggagaatggatctgggcgaatttcaaatacgaacatttgcctacattttgcttcatttgtgggatcattggtcactctgagcgcttctgtcctaaacgttttgaccacgattttgatcaacttgggaagccatatggcttaggaatgaaggcacaaatgcgaaggaagaattatctgatcggagcacaatggttgaagactggaaatgaagattcttcaccggcaactggaggctctgttcgacggtcagaagctgcaaattcggctgaaactttggctgatactgctacgaaaatcatggaaattgattccatgaaatcaggccatacggattacaatgcaccagctggagaaaatggctgtgataataatggaaaggagagagttttgggaaagtctggggagaatattgatagcaataaagtggaagaattagtcaacctt

SEQ ID NO: 201703 - DNA, 2141 bp, Cannabis indica
gtatccagtttagtagatcaagaatatactagctttagactgataaaggcacatactgttacaagatcatgcattttagattaaaaaatgttagagtcatatatcaagaacatagaggtatatgttgaaaagaacatataccagatgtcttgatcttggtaatgtcttgataagaacatgaaggtatatgttgataacatgttggttaagtcaaaaatttttatgaaacatagtgaagatttagaaaaaagctttttcatcatttggaagtacaaaatgaagttgaatctaaagaaacgcacctttagagttttctcaggaaaatttctcggcaatttggttttggagctatttttcacaatcctaatggtgaacttttagcagcaattttaatggcttttaaaggatgttacaaaccaaaaataacttgaagttatgtagatcttctacagtcttcggtggttgaatgcagtttccagtgcattatattaaaactaattcccttgtggtggcgaaaggattggaatcttctaaagatgtagtttctttcattgtattctaattaatatttagaatcttgtgactaatttctcaagagtgtagatttctcatgtttttagatctactaatactgatgcttataagttggctaagtatattttttccatggacagatattgtatttggttagaaaatactccccctccactattaactttatattttaactttaaatatttaatatataacaggttttattctcaacctaaaacaaaacttaatttaagacttttaactaagtttagtatatttattttatttcatacatatataacctaaattgtttaattatttgtatgttgttttaaacaattataatatcacttatagaaaatcaaaattatctatacaccaaaaacatgaaatgatacatccatccacccattttgttgggtgtacatctctcctattcacttcaacatcattattcaaatcactaaaatttcatcttacacaaaagaatactaaatttgagtttcatttttttttttaattcgagtataaaaaacttattaccacctcactctagacactaacaattaacgactttgaaatcagaaccaaacattttattatttctcaactaaaaaaataataaaaaatataaaaatgacttggtgcaatggccatatatttatgtctaaaaattagagcgtgatttacacggcttaaaaccaaaaatgacagccgtttaacttaaatcgcaagctccgtttcttcagattagcctgtccccaaaatcactttagaaaattgagaaaaaataaattatacatagtttttttttttttgaaaaggaaaataaattgaattttatataaataaatgaggaatgttaattacaatctcttagtcaatttctacgtctgaaattacatgtcgaaattttttttttcaaatttttttttcatagcggtattatttatgattacagtattatctttataaatttttagaaattccgaataatttatagtactgaaaacagaattcctaatataaagatgatgttgtaagcaataagcatgacgataacccgtaaaagaaaattgaataaaatattctgacatacattttcagacgtaaaaattaattaagagattgtaaaaaaaaaaaaattaacaataacgtttatctaaataaatatctgtgagattgagaaggtgggacccataccataagccaaaaattagagacctctaaacaaaatgggacccaaaaaccacgaaaacgacgcaaagcaatcaaaaaaagtcacacgtgaagacgcgtcacattgtcaataaaccgcgtgaaaccgtcctacacatatatatattataataataaataatattatgtgacctataaacacattcaactgtttttcaaaataatttcttccttgctagaaaaataaaagaaaatcttcctttactttttctttttctttttattttaccaacacccaacaacacaacacaacccgccaaaatgccatccagccaattaaattaaaaagaaaaataaattatataataaccaaaaaacaaaatggaactatattacctatttatcgtcgtcattaatatttttattta

SEQ ID NO: 201704 - DNA, 1443 bp, Cannabis indica
gtgacacccacttgattgtttatccaagtgcccttttgatctttaattgaataaattgtgttttgttgtcttctatactttaaacttacatgaaacaatttggtattttcatcactattttttaaccaagctagtttagatttttgactaaggagctggatataattcttgtgggctagaatgtaatcttttcaagcttttttcttaattaagtcacaaatcctttgatctgagtttttttttttcacaaaaaaaatcttgttaagacaatctttctcttgaataataagatcacctttaccttgcctaatcaaaattttcaaacccgttttgagaagcttcaagtgagtaacaagctgatacattggctacctaaaaactttttccttccaaataacttttacaacatcaatcaatttttttttttcaaattctcccaaaaattaaagtatattaatatttatatatcaataacatataaattaaaataattaaaataattgaagatattaaaattttaatcattctaattataattattttttattgtgtgtaataattggtaaaaaaattatataagaataattgaatttataaaatataatagttagctcattaaattgtaatacaaatgtaaaaacatggagcacaagttttaacccgtataagaaaacagactagcctatttaagaaaaaagggttagtccaagaagcacaactaaaaaatattagaaaaacaagttgtgctagatgtaccctataaaattgtgggcacaatacaacctatatttatttagggctcgttcggtacaccgtgatgtattgtattgtgttcaattttattgtattatattaatattatttaatacaatattatgtttggtattgacttgtactaataggttatgtaaaattataaattctttataataaactcgaccccaaccctaaccatggcctggactcaaacccaaacccacatcttggacccaaaacatgcctaagacccaaacccaaagccggacttggaccttagagctgaactcaaacccggacttgaaccctgaaccttggacccagacccaaacacggacctcagacccaaactacggacaaggacccgaaccttaaccttcacctcggacctggatccagactcgagaccgtggacccagaccccaaaccaagaccttgactctaggcctgaacccaaaccggacacatgcttgaactccaaacccaaactagatcttggaccttgaaaccgaacctgggtttggggctgggttctgaacctcggacccaaacccaaacccagacttggactaggaccctggacttgatgctggtcttgatttgggtctgggtccgggttcgaggtcggggtcgaggtcttggccgggtctggggtctaggtttgggtctgaggtccacgtcccagtc

SEQ ID NO: 201705 - DNA, 568 bp, Cannabis indica
tagggcctattaccacaatttttcgagattgagacttatttatatcaaagtgaacttttcaaagatttatactctaatttaatatcaacacgtggtatttttaggagcaactaatgaatttattaaaatgaagacaacaacttacaagaatctcaaacttagaaactattactactattttttgaaattagagatttatatacatcaaataaaaaatttaggaaatttggccacaattattccatacatatatcatcaagtaattttatgatgtgcactcccaaaaaaaaggtatagcaggcttaaacacctatttgtttttggtgtatgaataataatcctaatccaatatatataacaatttatattttaattatttaaatatatattatttttatgtgtataatttaactatcaatttatattattacatgtatatacaagtataaatatttatttgattttatttttggtatagtgaattattcaaattttttaaaaatattatatttaagtacactataaacagtcaaaaaaagaaaagaattatatctacattatctgtgga

SEQ ID NO: 201706 - DNA, 692 bp, Cannabis indica
tgaggcgactgtcttattttggttttaagtagcttcgccattggttaaactatctaagtcatgtttagagaaatttaattcatttattattgtgagacttttagttaagtttttattttgaccgtaatagtaaagtgtgttaggtgagctttcaaagtaaccgttttgtaacttattcatgttctttgaaatattaaatttgcaaagagaaattaaatttaatttctcctataattgtgaaacttttagctagatttttattttgacgttagtagaaagtctattaggtgagcttatgaacttgtaaaagctttgtaacctattcatcttccctcaaattttaaatatgcatattaatagtggtgtttttaacctcctagttttagtgctattcttttttttttttttttgtatgatcactttattgatcaaaaaagaattacatcaacaaaaaaagggtctctttcatctaaaaaagctcatcaatccatcatggtaattttgttaattatattgataaatttatttagggttagggtagctcacacaaattaattattaagaagttgttctgtcttgtttgtatgtatgtgcagatgaccttattgtaccattgtctatggcctaggaagattttgaattttgggttgtttttccttttctttggataatgcaatcaatccacttacaaa

SEQ ID NO: 201707 - DNA, 1214 bp, Cannabis indica
aaaaaaatcattaagtttatgttgtttagaaaattaatattttgtatacttacgtctttattattcttttttaatttcattaatatttaaaaatgttaagaaaaatatttttttatatcacattcacgcttcgatttgaataatattaagatatacacgaatgaaattcaaatttaaaattaataggcaataaaaaattgtatagtattatattcccacacattattaatgtaagactctctaatacaactagatgctaaactagaatgatatcatgtacatctgaaagttagttgagaaagtaaagaatatggtgagttgtatggtaaaagatgtatgtatatattctcaaaattaattggcatagcttatataaccacgtgttgtgtactgtagtaatacagatatttcactgatatcgttttttgtttggatcaagggttataccaccacagccactcaagggtttatatatgcttgattttttaggaggttaacttattgtaacggtactatttttattaaggtgggaactcttgggttatgtttaaaagttaaatttttggtgagagaagaaaaaattaaaaaaaaaataaaaagaaaaaagattattaaatagtatggaaagaaaaattatataagtgcattcaacaaaattttctattttaaacttaaaaaattgatttatatttttttattttccacaaaactatttgggcaatcaaaaaagtaggaaaaaaatcaacaccaagtgatttcctattaattcagcaaaattgacataggttatatgcattttatatatattattaagttcagggataatgtatgcaaaaatatatgtatatgtgtatatatttatatatgggcagaattaatatataagaaatgaaatttttctcatcgacagtagtggaactgtctttattactactggacttacttgtgggactaattatgagaagtgggtgtgtgtctgatattatatataataaatgtagctatacatatagagatgataagttggtatgaatggtagtagtcatatatggattcactatagttgaatgtggatcattactattactaacatctctatcatctctcttcaactttcattttcatgaatttagtaaccaattaactcaattccttactatcatttacttagggtttattttacactaatgatctacctatatatatacatagtc

SEQ ID NO: 201708 - DNA, 889 bp, Cannabis indica
actaacaataattacaaatacaactttaataattaattagcaatgtttactaacagcaaaatatatagccgactatactaagattctgttttgtacatcaaaaagaattaaagagctacaaattaattaaactaacagattcttattgggaacttaaattaattaaactcaaatctagatcgataagcatttttagtgtaccttagaagaaattatgtatctactgctagagcttggaaaaatacacagcagaacatcttgaaaccaccattaacttgtaagtatgggatcatattaatcttgattgattgtattttatgtttctgaaccagtcaaatcacacagcacaaacttcacaaggaaatctaagggaagaaaaagttgctttattaaaacaaataatggccagaaacaaatttgggtgatatgtattattcactatctttggtcttagctttggagggttagacagcgtacatgaatgaattgggggttattttttctgatattaaaatttgattgtctagctttcttggggcaactctctctcatgtgagccgcaactttaatgttgaggttcagaaattggctaagcatgtttttagaatagacaatgaacttttttggatggaaataacccccacctcttgtgtaacttttgttacttttgttattttaacctcggttacccaaagaaacaaaaggcctctagccttcaaatttgtaaattatgattagaaaagattgtaacaacaaaagcatagaagagaaaataaataaatcaatagagaaacctaagcagccaggtttgtaatatccaactccaagagtaattcataaaatttcttgtgaagtttaaagtttccatacaaagtgaactaatctagta

SEQ ID NO: 201709 - DNA, 799 bp, Cannabis indica
ttgtctccaagatgatgaccaaattaccatattgccctcccattatattatgataataattatatatttctagctagtctttctttctttcacatcattaattttgtacatctatatatctttgaattcaaaccattttcaggagttttctttgttggattttcgatctgtacatgcctacttttcttttattacattaatatatatgctagttaatctcatatatatattgctttgtataatataatatatatatgtgtgtatatatatattaataaagaaattaaaatcaataaaaatatataacacaacaagattggatatatatatgtatataatatgtctttgcatgaaaaccgaatcataatattaagctatatgactctcaatttatacaaaaccctaaaattattatataagaaaaatatgtttattaacaatcttttactcgtaacaaattttttttataattaaatatgataaaaaaactaaaatatatttagcgataataaattataatttttgtgattaatattttcagttacaaattttttaatcacaatatataaaaattattaattattaattagtcacaaatttttacagttttttattgattttattataattaattaaaaataaaacctttttgtattaataaatataactatggtgaaagttaactccatattataatcatttctcagcatccatatccactatacctatacttatggcgtaataatattagttattacatataaaaaataatagtaatatattaatatatatagtacgt

SEQ ID NO: 201710 - DNA, 892 bp, Cannabis indica
ccttactatcttgaattaaacttcgaatactattcttcataccatctctaatctatttcacatttacagttcgaaaagcttgtagctttcaagacaaatccactttcagttctgttaagtgaatccatattctgtcaggtagagtactctattttatttctttctttttctagacaactaagaattatatggctattatttggttctttgaccgactgatcaatcacttatttaattgtaagattaaatatgcttatttacttgttttgattggatgtttgttctccttttagggtgcttcgtctcagtggtctgctcataggataagggatgaattcagtagcaactttgatgcaatcagggctgcagaagaaggtcgctctgtattttttactggagaggttagcttattctaagctcagaaccttaataacaacaagaaccaattctcacataagtttcactttcacatttacttgaatagcgcctttttcattacttgtgttttgtatacttggtggacgagagcagtctgcttgtaccgcttaagaatatggaacatcacataagacttccataatatatccatatcctcatatgagtatctatttttggacatatcaacgatagcctataatgaatgtctttccaacgttcacttctcttttatcctttccctagttagttggtatgatataatgttctttgattctgtgatgtagaatagctactttccttcaccaaatttgtcttttaaaagcatgacttttttggaactttacaactatggttatgatttattgttgttcagagaagttatgggctacaagatagatgactgttttggaactttgaaagaaaatagctttaaaaataagatgtcaagcagaac

SEQ ID NO: 201711 - DNA, 1311 bp, Cannabis indica
tggtgtatcatgtctaatgctttgccagttcgagtgattctcaataagaagatcctattgaggataagatgtgccttatatgtggggttgaggaggtatccagagaacatcttttctctcttgtaacttggccttttattgtggagtcgttcttggggtatctttctcatttacgatactggtatttgcatgtgggattgggtgaaattttcaatgggaatttaaaaaaccaggcattaacactaaggaagtgtttctctacgcctcgactattgttgataccatttggcgggttcgtaacaacaataaggtacacaataatatgctggataatgtaaagcactgcattgactctattcgtatatcttatgcagattattgtgcttccattttcttttttctctccccgactctgttgaatgtttggcgccctcctcctcaggattggctcaaactgaattgtgatgttaaagttgggttggaaagcatgtgtattgcagtggtagcaaggaaccatcttggtgaggtagtttgggttcaaacgaaactcttggattttgatgatgctctgtctggggaagtggttggttgctgtctggcattgaaagtagctaaagagaaagggcacaagtttattattgtggaaagtgactctatggtggttatcaaaactctctctggaaaggatttgtgttggatgcttttgaattatgtttcgttttgtaatagcacccttcctttgtttgagggatgctttttatcttgtattaatagaatttgtaatttcgtagttaaaataagcatttacctactaatagtatggttgtttacatgtaatttccattcttacatttttttttttgtaatgatcaaaatgtttaatttttttatttatgcacgcttttctaaaaaaaaatatgtgtgtgattaacttgggattgaaaattgaaaaagattcaatttttttctttcttattaattaaaaaagaaaatttaacagcaaaatatacattattattattattattattatatataaaatatatattattattatgatattcattattattagaaatttatttatttttatattttaaaatagtttttttttaatatttatatgaaattctatatagaaaccgccataacaactaagagcagttccagttccaacgcacgttgctatgcatgaaaatgtcaggggactgtcaagagacaactactttgcagagttgctattgcattggagaagttttgatgagcatctcttgttgctacacaagagcaactattatttccatctttttt

SEQ ID NO: 201712 - DNA, 400 bp, Cannabis indica
gtatgttatatgtatatatatatatatatatgaatagtgtataactatttcatacatatattttcatacatatattttcttgtactgaattttttttttaccattgcaatttcctcaatatcccttcatacatatgcattagaagcagtacacatataatatatttactataattataagtgtgaataataggaatataccatgtagattccttagctctttgtcttttctacatctctatatttagttttctcttaatcaacacgtatctatcatctctccctataaaacgtatctcaactttaattttattaaaaatttaataagaaaaatcttaactttaactggatggtcaatgagtcaccacatcaagtttcttgagttttgaattttatcacat

SEQ ID NO: 201713 - DNA, 760 bp, Cannabis indica
tggggtgcatgtgtgggttgggatcctaactctatgtgccagcatccgcgctcggtaagaaaatgggcaagtgttctttagaatgattaggcgtaaagggcatgtaggtaaatcgggttaaaagtgaaagtcaccaaaaattggtggaatgctctcgaaacaaattcacttgagtgagaatataaaatctaatcctagaaatatagcattttttttttattactcatgattttgatgcgttttgaaatagagaaattcaaatttcaattttcacaataaatatatacgttcaaaaaaaaaatcagtcacataattttttttttaaaaaaaatggatatattgcatgaagtctaaaaagtcttaagatataaggactaaggaggatctcagaaaattaaataactaaatccataaagaagcttccaactactaaacacgagaatcatctaaaacaagcgtcctctttacaatgattgaataatataactaagatggtacttgtttttcaaaaaatataattaaataatataactaatacctaattattattaatttataaaatatataaaatttaatcaaacttatttatttatataaaaaatttatatctaactaattttattaaacaataaaataaataaataaatttagctactttaaataatataattaataaaattattataaaatataattaattaattgaattaatgtctaatttaaattaaaatttatacataaaaataattatttaattttg

SEQ ID NO: 201714 - DNA, 799 bp, Cannabis indica
ttgtggtggagggtgttagtgtggttttggacttgccccgaaaattctttgagactttctatcttagagttatctctcaagtcgacgcaaggttctccttcatatggctggcctgttctagctccagtttctctagtgtatcgccagctggtatttctgaattcctgcaacccaggagtgactacagggatctcagtagtgatgcctatcgtacccctaactcctatgaaaattgagtcttcagctctagtccctaccgaggtgttattgcgtggtggcaaacaagcgttggcgttatcattttcgacgtcaacaggtatctagacatttagattagtgcccatcaggtcacgtggtgtagtggatgaagccctccttatttgaactatttttatttgattgaagatgatctgttaaaggaaatgaagcacaaatattgtgtagagagcaatgaagtataagctctcaatgaaagccccaaaatattgatatcatttctagtcaacgtcccggagtcaatataacaacaattgaggtgtttgaatagtaacaaatatgaagaacaataaatgacgcaaagttgtatagaggttcgatcccgtatttggtaatagcttactcccttttttgttgtatttatctcagaaataccaggataataagaacctagtcaagtgagtttcttgatatctcatctgtaaagattacaagtattttgacaacgtaacgactctctcaagaaatcagatttccatcctttcatagtgataataatccattatttatagagatgaagatg

SEQ ID NO: 201715 - DNA, 741 bp, Cannabis indica
gtgttcttgttcgacgcaccagagaaaacgtcctggtatttcgagtctgtagacagccacggtccgaataaaggggaaggattaccttcaagattagccaccgtgaccggagtagacagattgcaacctctcctttgatgacccaaaagaccacaaaagtagcagaatatcccaatcttctcatatttaaactggagccaacgtttgactcctgaatccaaatcaaaataacaaccagagacaagaggtttttttagattgacctcaacaagaactctaagaaatgtgttccaagaactcggattgtcttcttctagctccaccctaatcactttcccaattaaaccccctagtcgagagccattatcctttgagaaaaattcatggggcaggttatgaatctgcacccacaaacagaaagcatccattgaaacagacccttcaaacctcggcatccaagcacggagagcaaatgtataacctcgaaacgaccagggggcattgtccagaacccattgtttatcttcttcacattgaaaccccagtttaaagcaattgagagtagaaccaacatctaaagcaaacacagccaccttcttattccagaccttagaaacaaaccccaaaatgtcattctcatcaacagccatgggagccacgatcattccatacaagcacagagaggacagtgcttttatggaagaagcactcggggacagagaaatggtagcatccaaacaa

SEQ ID NO: 201716 - DNA, 1120 bp, Cannabis indica
ttttaagtgaccagtaatgacttttttagtagtatttatagactaacaactaatccttaaccacgtcctacctaactgtacgtcccataaaataacatgaaaatatttctagatcattcctaagctatattcagttgaggattccttccaatttgactacacaagctcctatcattttaaaatttgaatcatacctcgacctatgtagaaaccacctgatcttactctatctcaatttttcaaaatatagtcaaactctccactcctattacttagatgctagacgtcaaaaggttcatttttccctaataaattccctaaatatcgtgccatataactttcattgaagagtcttaataactagttccaatatctatggcgtgagcacaactttgactacaactgttcttaaatttcgaaactaattaattatatatatacacgtgtatatatcatgtactcaatatgaacctgactaataatttaataaattacactatccataaatgtcatcaataaggttattggttcacacattaaccaccaatgcctatctcttcctccacttactccttagaagttgttattattattattattttctaagagccagatgctccaagtcatccacgtgtatgctattgttctaggattcattttaaattaatttgaatatacttgttgatgttctcatgcactcatgaccataacatatatataaacatacattgtattcatttcacttatatgtatttgccacaatgatcataataataatagcaataataacactattttgtaatctcgtaggaaaaatttgaaatgaatagtttctttagcccatattagtttcttggagcccaatcaagaaaaatgacatatttttattgtacttaagaaaatactataagcaaataacatattctaagcatttcactatctccacatcgagttaacaaaaaaaaatatatattaataacatagtagagaataataacaaaatacttttggttattacaatctaccctccttaaaagaatttcgtcctcgaaattaacttctacccacatatacacggggtatcacttcctcatatcttttcccaattcacaacttttct

SEQ ID NO: 201717 - DNA, 718 bp, Cannabis indica
aaccctaatagtgttatataagaggcagtataggataaaactttcgtaagcatacgcatatacgactgccatgaattcagctcgtgagtcagtggaagagagaaaaaagaaatgacaacatgatctgtcaacaatcgcaaaaaaacaaaacacaaaattcacgagccattctaagacaataaatccaattaatttacctcgttttttcttccaccactattcatgtcattgccaatattataatattccattctccatataattgagagcctaacctagcttctctcaccctttccacattgcaaaaatggtttatgaacaactatgccactcattaaaggcctaccttttcccattcttcttgttggtctcttctaattggtttcaatccgtcggtgccctcaacatcggcgtccaagccatcgatgcctccgtcagcgtggtttgctcccaatctccacttaattactttttcgactaatctagttattttctattggataaactgactcatttatcaaactattttcctattacctcatcatttatagtaattagtgttttctttctacatatatagagagatatagttatatatatatacatatatactttattcttggtttacttataattaaaagccctaagcaagtactgagatcgaatataacgctttacagagtaaaagctgtagtcgaacatgtgagtcggacttctg

SEQ ID NO: 201718 - DNA, 672 bp, Cannabis indica
aaaagacgattcccccactaattcttgtcaatgatatatatatgtgattttatacgattatatataattatattcatacttttacgacaacataagcaagttaaacttgtgtttaggatccaggttcaaaaaaaaaattctttttaaaattataaattttttattaattttaacgaatatcatttttttctctaaatatgtattttttttcctataacccactaaattttaaaacctccttctttaaccatatccattaaacaaaacagaaattataatatgaattgattttaaaaaatataaatgtatatatttttttaattaacctatatcatttttcttcctaagtacatttaagacaattattgagactgaataactttttggaaaaattaaaagaaaagaaaaaaaatgtctgcatgcatgatcatcggttatatattataatataaaaattgtatatatattaattaatcataattatcacctataattaatttgtcacttaccatataatatattcatataaaaatatttaagtatatatgtagtctttaaaattggattactacaaaatcgattattcttacaaaaaaatgaagaagttatttaacaaaaatttctcagctacgaaagtgactacaaatttaaacttcaatcactaactagaat

SEQ ID NO: 201719 - DNA, 911 bp, Cannabis indica
gagtgctcggttgaataacaacaacaattcaagttatgaggaaagcttaagaaatacctggatattgacaatgaggagtggaggtacttttccttctgctttcagatttgggagctcaatgtgttgagcaatatgattaatcttcttaggactaacaaacagatcaacacctattggtgtgtatggacaacaatttgaagcaggagatttcttcttatctctgcaaaagtaaatagatacattagcaaagacattactataatcctaattcaattataaatctaaaaatcaaaacaaacaagtgcattacttaaagaaattttctcctcgaagtttaaatgatgaaggtggaatctctgtccaatatcctgaactaggaggcttgttatctcctttgctacaacatggaataatatgtcctgctctaggatgatacaagtacctttttgattggcctgtatttagtatttacataatcataatttacattagtaatctgatttttacttaaaaaaaaaagaaacaaaataaaatattgttaatacaatgaccccctaaaaagagtgcaccgatgcacttctattggtatttgagagaattttttaatttaatttcttttcatggtcgtttatgttgtaattatttaagatatagtgtaaaattttaagagatttaaaaaaaaattataacacgccaaaaataagattcagacaatcttttgcaagcgagactcttttattttattacacaagtgaaataaattatttaaaccctcgtgttaaattttcctgaatttctcaaaatgttacaggatgtcataaatattggactaaaacctcttaaatgccaaaacagataaggagtgcatcggtagaccattttaagggtggatgcattgtagaatttttcaa

SEQ ID NO: 201720 - DNA, 1760 bp, Cannabis indica
tatgttcttaattgatttgtgtcaaattgttataatgaacaagagtagctaaacatttattagggtattgatggagattgtttgacatttatttagggttttaatatgatttgattcttcctcaattttctatgtattctatttcattcattcttaattctttttatttcttggccatcactttaatgtttataattttgatatgaaatctaagaagtgagtgtcgattattctatagtgaaataggaacatgtttcaatataggacgacagtacctctggggcttggataacaaatagggattctgtgtttaatgccttttacatgtttaaatttatcacgagagtagaaaattggcatgtaattgagatttatatatcttaaccgactataaattacttcagtaaacctgctattgcgtagaattggtcaataggaattaaattatattatgccataaaagatagatacaattaaaatcaataatgttaattctaactattgtcaattttcattctaatttacttattttatgcttttattacttttagttttaattgctctttaaaaatttattattgccaaatagaagtgaaagtttaattttttactatctaactacaatccctatgggttcgacctcacttgtgagtaattacttgcaatcgatacgttcacttgcatgttaaaaatcaccaacatgtttttattgccgttgtggggcattgtttagtaaatattaataaaaattaaattttgttctaatttggtttttctttttaattttcactaattctatttgtgtcaattttttctcttttctcaagaacaacttgtttatgagacatcaaggaccaactgccagattcttggtgatcctgaaatagagaagacttgtagacagaaaagaagaaggaagagattggagagagctgtggtgtgagcaagaagtagagatggataatgacgtaaataatggaggtgtcgtagacgaccaggctaatggtctcaatccacctgaccgtaacctgagggactatgcgctacctaacttgattggggctcgttcttgtatagggcaacctgccattgaagctaataactttgaattcaagctagccatactacagatggtttaatccatagtccaatttgggggactatcatcaaaagatcccaacatgcaagttgctaacctcaaagagttgtgccaaacatttaagatgaatggggttagcgatgatgcaatccggttaagactgttcctattctccttgagggatcgagcaaagagtaagttggtttctttgccacctaactctatcagcatttgggaggaattggccttaaaatttcttccaagttctttcctcctgctaaggctgtcaaactgaaatctaaaattaataactttatctagcaagacaatgaatctttttatgaagcctgggagagattcagggacctaatcagaaagtgccctcataacaggatagagaagtgaatgcatgttcacaaattctataatgggttgacagtaccaaccgtacactcattgatgctgcttctagtggagccttaatgaagaaaagtaataattaggcttatgatctactagatgagatggccatgaataatcaacagtggctaacagagagaatctaagctaagaaagtagctgttatgcatggaatggatgccattacaaagctaacaatctaagtgaaagcactaaccaagttgatgatagcataagtaaa

SEQ ID NO: 201721 - DNA, 985 bp, Cannabis indica
ataagagagtttaaggatatatcgagatttggaggtgagatatgtgaacataacaaagagggtaaccctaatggaccagtcaaagaaatatctaattcagatcaattcgagataactcccagcttagatcgttctaagaaagatacaaccttggaccaaaaagcatctatcccggttcagtccaggaccaatctcatgccgatctgagatatgtttaatcctttccaaaacaaagatagttgttatcgtagtctaagtaaaatcagtacaatataagtcagggataagttgagtaatccaaaagcaagatagatttttgatcaagctatgtcgaaagaacaaatgttttgagtataataaaattaataaaaagtaaaacctaaaacctaaaaccaatgaataaaaataaacaacacaaaacgatacatgtcaaacagagcattgaatagcttatagcacagtcatacatgcaaaaggaaattatactataaggaaagaactacaattcatgtaggggataaagttttttttaccaaagaaggaacattcattaagaacaatgaaaggaagaacccagaaagaaaaccttgtaactatattcatttgatcaaaggaggagtcagtaaaactttgcacaattttggtaaaataattttctcagctcaagcagattgagtacaacatattctatttatattctaaaaatggaatacaagctctaatagaaaagttccaattggccctaatgttggtaaagagtggaccaacactaacaaaaattacaatgctaaaaacaatataacaaactcattacagccacaaattaaatgattaacgcttattttcaattaggaagagttgattccttaacaccccccttaaatgagagggtgagatcttcacactaagtttggagaataagtactgaaatctagagtgagatagaccttttgtcatacagactgaaatttgatctgccaaagga

SEQ ID NO: 201722 - DNA, 1070 bp, Cannabis indica
ttttttttttttttgtatattattgtaaatttgtccgtacaattgttactcctggcggccacggctcaaaacaagtgcacctctttagtgtgttcttgctatgtaccctcaaaagggtttaacaacaatactaataataccaataataataataataataatgtcaatatcaaaaataccaagaagctatctcaggctgaaaagaaagatgggtttttggaagaacaaggttttgatgatattggtaaaaatggaagaagaagaagaagaagaagaagaaaaagaagtgggtctaatgtgtctcatcagaagattattagtcaacaacaacaacaacaacaagaaggaccctttaatctcaagagtaatttgaagaaaacagtggtgaataagaataatcaatcatcaaagttagaagaagaagaagaagaagcaaagatagaaaagaggaaagttacttggcctgatgctcatggagatgatattgctcatgttcaggaatttgagccaaggtaattaaatacttttttttttattttttttgtgtataactcaaaaaaaaaagttttttttttttttgttttgaataaaaaaggatgacgtggttcagattctttctctatccttttgatcattttaacattctcagagatcacgtgtcagctatagaaatcttatacttcccgtctcccttaattaggtcagggaattgctaaaaaatattattgatgtcttatactttctttggtgttatattggtactgatgtaatcaagtagcgtgtctcatataacctaaaaaataacttttagagaatatcactaaccaatcgtaaggtgtcacctataaaaggtgttggacactagtggtgtctaatagcaatgctcattaggccatcggtaatcacctcaaagttcccatcatacagataacaccacctacactaagctagctttcaaagggtccaatttttttttaaactcttcaagagggattgtgggttttgaacccttgacaaagtaggcaaaggaggatgatagtaaaggcaattcctaccactacaccatacaa

SEQ ID NO: 201723 - DNA, 924 bp, Cannabis indica
aattgaaaaaaacaaaaaaaaattattataaaaaaaaataagacacaaaattcgtaccatgtttagtggtgtttggtggtttttattgttgagaaaatgaaggtgaattaataaactgacaaaacaaaaacacatggcatttataaactgatagacgtgagccatgacgatatatattcatattcatttaatcaattgattatgatatatgaaaatgagaactagtaggatgaaaagaaaggaaccaaccatggattgctcaaaagatcaatgttcatataatgtgtttatattttcatcgctcattagaattgtctccttcaaaattttgacatgtattaaattatgccttcagaatttttaaggtcgttaaaaatgctcttgaactattgatattgttggatttaaagacttttgtctaattttatttaaatttacaatttcagtaattatttatgtactaaaccatgctccccagactttaatatctatcaaatcatacctctcgaatcgaattttgacatgtactgaccactgaactttcgtgcatacatttttactaaaattagaaaaaaatccttaaatccaacaatctcaataattcaaagtcattcttaacaatcttaaaaattcaaaaaattctaattaacttattttaaaacatcaagatcacaaaacgacaaaaaacatttgactgacttgttacggttttctctggtttgtgtaaccacttccaactctacctgtctctttcatgcatatatattatatattaatatatttatacaaggtcaatactcaacagagtatccaaatttgtttacaattcttttttatttaatttattaatttaattatactcatggatcaggatgatgctgtttactcggaatttatttactgtccatattgcggatcttcatc

SEQ ID NO: 201724 - DNA, 1674 bp, Cannabis indica
tttcgggctgcatcactcctgaacgacaacaactaaccgcctccaccaacgcaccagtttagtctctaattacccccgtgaagctatacgttccattctctgaaaaatggcagcatcgacattaatcttcaaggtattaacagctggtttgatccatttttcatctccatctacatctgtaaggaaagcagcagtgggaatcatagttgtatcttgagcccgagtccaatctgtgaggagggctttagctaaatgaacaacgctctcaaccgtgggaattttctcagaccaaactaactcattacgatgcctccatatcgcccaatacgtcattgcagctagccttcgattttcctcatctacctgttgtaggaccgaagcaaaccagttggtaaaagaaccaactgctgtcagattaacactagtatccaaccgttgccaacatgccttggcaaaggagcaatccaccaagctatggtagattgtttcatcaatttctttgcatacggggcatatggcatcaaccggcacatgtctagagcggagtcttatttttgtaagcaaacaagtagtagcagcatgtcataacaagtctttcacttttgggggaacacttagcttccaaagagtattccaaaacatggagttatcatcctgtgcccctaattctttgctcacttgcaagaacttataaactgatttgactgaaaaatagctcgagctttcccaactccaataccaagcatcacataaacgacttgaagacaagaaaatgctaagaatcaatactattttaaattatgtattttgtaaaaattattgaagagattttttgttttgttaaatgacaaaataaatcttatatttttcaaaaatgttcaaaatggtagtctgaacccaatttttaaaaaaatttctttaatataaccaacttaaacacgacaaatactcatacataaggatcacgtggatcatgttagctcatacaataaagtaatgataatattacacatattgaactatggatgccattgatggaccaccctatgtaaaaaccaaatagtaattaataatgtatacagtgttgtagtactcatagactcagcctcagcctcagtttaggagggaccacaccccttttcaactactaataataaatgatatttcttttctattttatacacttagttacacaccaattaaattctatatattatgtttttaatggagtaagtactatatgttgcagctattaatttcaatttccttaaatattattaaatctcattaaattaatatatgtcaattaaatcttaaaatatataatttattaatttttataaatatttaatttattaatgatcatgatactttaatttttgtcctaatttacattttaaaatgcttttgtgcattagaacatagcaaatatggtgcttgttttataaattatgagttgaaactgtggaagattgaagctcactctcaaaatcttcttcttcagttaattcccattcttctcattatatttctacttttttctaactggtttgaaacatatgagtataatattatgatatggttacttctcttctcccttccattctctttacatcttttcataagcttttcaaatccattattttcatgttcaaataaatatttgaatttaaa

SEQ ID NO: 201725 - DNA, 821 bp, Cannabis indica
ttattcgtcccattttcattcctaaaagccacttttcactctgagggtacgttttggagtgcgtactatagtgtaattaatataaattaaaggttttaattacacttacctatcttctagttctcatggagtaaaattatattgtataattattgaaaaagatttattttaaatatttattattaatttttattttatataattactaattattttatcaaataaaatataaaaaatttatatataattactttcttatatttaaatatattttatattaattaatgtgtcaaacaaactttataaatatacttttttgaatattagaaaatttcaattattgttgttgttaaatttggtactatatattagagaattttaatagtgttcaagaattagagtagagccatagattacattgatttatatgacttgaaccattatatatcttgatgttgtttttattattagactgctttatcgtttcagtttcaatattctattcactcttattttatcttcgattattgtttgtgatttgttaatcttgtcattgctaattgtttgttgattaaattttagataacttaattctgcacaatagttgtaatttttccacactaacaactgactctataacaaacttttagctaataatagttctgagcaatttgttaccaaatggcagttgcgttgaaattgtcatttgattgctaaatttggtagagcccaactttctaaacctaaataaaacaacattcaaaccctagaacatcgtagtcgtttcaaaatgtgaacgtttacaattttactgccacacg

SEQ ID NO: 201726 - DNA, 996 bp, Cannabis indica
attagagataaaaacagcaaattttaatcttttgaccacgatttggcctattactctctctgaaaattagagttttcaatttcaacagaacctaccctaaaccctatatgtatttgtatagctacaattcatgaaaattactgtatgagttgattttggcgtgaatctcctatcatatatgttgttgagaataataattatgatggctattcaaacacaacttccaatgtcacaaaatcatcaaccaatccattggacaatcaaatacactatttccattctcttacttaattacattatttttgactattttaattactaaatatttttttctttttggaaaaaatagaagtgtttgggtaaaaattaaccatgcagtattttacaaacgtataggaaaaaaaaagttaattatatttataatttatgatgccctaataatttgttccaacaagtcacgtaagataaagcaatatagtctatagtacttaacttgaaagaatcaaatacttgtgtttttattagtatgtttatagatatcatgattaataaataattagaaaggagagaaagaagaaagtggattctattcatgatgaatattatcaattatatataacattatctagggtttgatctttggatgtgaaaaaaagctatatgggaatattaataatattaatatatgtttgtacaaataattatatttttatatgttcattaaattggtatattatcacttatcagttaaataagaatatgtgagtttattatattgttatagttagagatcggaaggttaaatgttgttgtcgtttttcacttgttttattattctaaataaattatttttttaaaaaaaaataaaataaattatattggttgttcgtattgttttttactgtattattccttattatcatcattattattttaaaatttccttttgatatgtttttgtctcattccaaattattttgccattctgtatataaa

SEQ ID NO: 201727 - DNA, 986 bp, Cannabis indica
aaaaaaaaaaataatatgaaaattatactttagtgtttcatttataaaaatatactgtttaatatttttaaatttgaattacggacatttcaattgcaaactgacatttaaattaaattaaaggttgtataattcacatttttttttaaaaaaaaaatcaaataatttatttttaattagtctaattttttttaattgtagaaataatttattaatgtgcaatatgtactcaaagcaattagaacactcacattagcttttttaagtctatcttttaaaatatttcactaaaattaattttttctaatttaacctcaaacttttactacgtcgtacatcaacatttctatatttttttttttacattattttaatattatatctataaacagttttattaattaaaataatacaaaacataaaaaaatattaactatgcaaagagataggaggaaaaactaataaaacatatcaaaatattgttaaagcatcaaaataattttaaagctcctttaagcttgtacgtaactacattagtactcccaataatttctctactctctcattcaaaatacattatcaaaactatatatttttttttattattttacataatttttttatattacagtatatattattttctctatattttctctacatcattttaatattatacacttaaattattttcttaattaaaataaaaaataaagaagagataaacaaagaaaaaaaaataataaaatattcattttttggacagaaaagaataaaacaaaagaaaaaaaaataatttgaaatacttcataccatagctacatatagagcaagaatagagaagcggttgatgtatctcatggaagagttttatgtctcaattcttaaattttttaaggtattctctattttataaaactttttttggagttgcacttagaaactaggtaaagagcgacacccatagctcttttagataaaaatcc

SEQ ID NO: 201728 - DNA, 1239 bp, Cannabis indica
aaggtttagctcgagtgtcatctggttaccaagcaatccaagtctgagtcaaactcttcacctgcaaataattaagagtctgtaataactcctatttccatttcatctcaatgtaataagagtattggtaatacagtatctcaatcttgtattgatattcccattaataaaaatgatgtttgcacattgccacttgttaatgaatctgcactctttcttgctcaaaaatctgatataaatttatggcacttaaaacttagtcatcttgcccctaaggttttagccaagatcttagctactttgcatattccaagcaatctaagaaacttaaaattctgtgaggcatacaaaaaaagaaaaagccacaaactctcatattctctttctgagtctagggcctcccaacctttagaatcggtctacactaacttgtggggaccatctcatacaacatctaaagaagggcataggtactatattcatttcatagatgactttagtagatatacatgaatttttcctttattttcaaaatctcaagcctataacacatttctgcagtttaaaatacttgttgaaaaataagttgatctccctattaagtctgttcaatcagattggggaggtaagtataggtccctagcatcctttctagtccaacatggagtccatttccaacatccttacccccatgaccatgaacaaaatggtcttgttgaaagaaaacatcgccacattacagaaaatggccttactttattggcacaagctgcgttgtctctatcttactggtggcttgcatttcagcatgttgtatacctttaaaggtggcatttggttgggaggaatgaaaaatgtaggaataagaattgaaataggaatggaatggaataaaatttaaaatgcataaaaaattgataaaaaagttattaaattttttcaaatcttgtattagagtggtctttccttctattttaaaatggaatagtcattccaccaaattgatggaaaggccattctatcggaatagtattccaatggttttaaatgcaagcaaacaaaggaatggagtgaagattgtttcctttccattctattttattttattacctccaaccaaacgtcacctaagagtttctttaatgccaagagcttcagcaactttaagtgttacagttccttcaagacactaaattcgcatctgaacaatgctaccacaatgatttcgagctacacaaa

SEQ ID NO: 201729 - DNA, 753 bp, Cannabis indica
cgggttggatctgatccgactataatttgccctgatttagattatgtaaggatctgccccgtcctgtcccgctagttcagatactcgaatcagacccgacttgttttgtattagtattaattaatacaatactatgtttggtattgacttgtattaatagattgtgtaaagataatatatttttaataaactcgatcccaacaccaactacagatttggtctaggttggggcccaggtctaagacctgggttcgggtttggatctcgggtcctaagtctaggtccgagtcccaggtccaggtttgtcccaggtttaggtctgggtacgggtctcgcattcaggttcgggttcgcgttcgagtccttggtccgagtccggtttcgggtctcgggtccaattccgagtctcaggtccgggttcgaacttggtcctacgtcctgagtttgggttcgggttcggctcgggtcctgaattcgtgtcaggtcctgagtttgggtctgggtacgggtttcgagtcttgggtctgagtttaggtacgggtctcgagtttgggtcctggtacaggttggctacgagtttgagtccaagttcaggtttgggtctgggtccgggtcccgagtttgggtctctggttctaatcctgagtccgggtcccgggtcaagatttgggtcctgggtttgggctcaggtcctaggtacaagtctcgagatcatatccatgtcggaagtgttaaaattgttgatcatgtaag

SEQ ID NO: 201730 - DNA, 1269 bp, Cannabis indica
ttttttttttttttcataaattactctaaatataatatttaatttaattactaaaattttatcatatgattaagaggtagttattaaatgtaatataaatatcatacattattcaaatatgagtaatgtgagacaaacatgcacaattttttttaaatcacaccaaacataatatatattaataattattagagttggtctcatattgttaatgtgtagaaataaaatactatatataagaagaattgactactcccagtgtcattcactttattctaaattttaatatgatatcagagccgtttgtgatccgttgtaagcccaaagtgccaccggtccaaaaagacgagtcaaactaaaaacttctgttgtttcctcttgaacctctatttggaacttttcgactaatgtatgccagtttccaatgttaggatctttgacatgtttcaaaatccacaaatttctcgacgtgtacacttacaaatttctcgatatttgctattgtaggattcttacaaatatcacgttcagtcatgtggtctcttaaagtcgttcgttatacccacattttccagacctaaatgtgaggagggtatattagagttagtctcacattgctaatgtatgagaataaaatatcagatgaatggactcctctcactagcaattaattttgagatgtaacctcatttatccaatttcaaactctattaagttactaagtaccatttattatttttatttatttcttttatacatacatattaatattttaaatgtgcatctaaattattttaccaaaatattattttaaccaattacatttattccaaatatgatatactatattaaaaaaacaaagacaattatttaagtgttaatgttttggtacataatatacgtgtatacatcatcacactttctttttttaaaaaaatattagtaagtgaaagatggactaattatgagtatcatcactaaaacaaaatacaatatattataataataataataactacaaaatcaagattctcaaactttggaattcaaagggtaactataactaaactaacaaacaagggaacgcgttgttattataataataataataataggattgaaaactacccttaatcaaactataaaatccaaattgatgacctttttttcaaaaaaataaataagaaaaacaaggaatatacattatatactattgtaaaaatatgtgtacatgagtgtatatgtgtacgtggcacattttattttttt

SEQ ID NO: 201731 - DNA, 1007 bp, Cannabis indica
aagtccactctaatgatgcatcagcgtcggttctgagttgaaatgagtcataagtaaaaaaaagattgaactcttactataaatatggtatatttagaaactattaaaaaaatatgtatattttttaaatgtattttttttttttatttaggtccctaaaatgagtggactctaagtacgggcctaacctgcctatacttagggccggcctgtgatgcatgcactatatttattattattaatttaaataaaattaattaaaaaaaactataaaattttattttggaaactctctagctaattttcttgatatttttcattgagagtgttatatattttaaggtaaatagtgacataagtacttaaagttttaagtttgtaaatggtataattccaatatttatttttaacggcataagtacccaatatttattatacagaattttatctaaaaatactctatttaagagtaaactctaatttatatatctatatgtaaaagaaaataataaaaatttgatgtgacatactaagaaagcattgttccatattattttttttttcttattcttttttacaattttaatttattttatataattttggtgatttgcatattagtgactatttctaaaaaaaataccacatagtttaaaaactattgtgagtattacattatagattatatataaattacctaatgatcaatttaaattattacttgtgttgaatccaatttaattatattcgtccatatatataaaattcaacaaacactattcctcaaggaatcattcctctgggaatcattcttgaaataaattaatattatatacatggaaaatcacccacacctaaaccatccaaccacattagtaactgtagctatggcaaacaagtgtaattaaatcataacaacacatattaaaatacaaagaattattagttattaatttctatgctcacatcacaaagtaatttattataaactaggaaacaaaccgcgc

SEQ ID NO: 201732 - DNA, 1245 bp, Cannabis indica
tattattataattagatattaggatatttattgttttctttttatgaataatttttttagccttcaatctaatctaaggtgttatgtcattattgatagaattatatattagatttcacataatttattataataaaatattactaattcaataaaatggatttaaccaagatttttatgagataaataaaaatttatattattttttgacccaaaaaaaatcaaattcaattaattaataaaaagtgtcaaagtcataaacaagttgatgtataatgacaaaaataccctgataataaaatgcatgaaaattaatatacgtatttacttaattatttcccaatctaatttaatcttctattaatttcaaatcaataaatatcccacaaaataataataatggttaaaaatatataataataccaaatcctacgtctctgattatgccacgtgacacagcttgaatcaatgaccccacccacttttaatctacaacttattaattacatttattatctttaataaaatctaaaattggtttcaaataaataagtaaataaaataaaataaaatttaaaatgtacgtgtaatatgaattattatccaatacattcttctcaatttcttttcaaataactatatactaatcaatatagaattagaattccgaaattaatttaatttcatttattttaattaataaaaaccaaaaagtacgtgtggaatgaattatccaatacatttgataattttcttttcaaaagataaaatcttaattatcttttttttttttgtgagatttttggcttattacacttataaattcaaataattaatatactaatccatataaaattagaattcatcccatattatttaaattatatccacgcaaagaaattattagtataaaaagggtgaaaggtatagagagtttaattaataatcatagcattaataataagttgaaagagagagtgggagaggttaatttgggaataatatatatttataaaaatatatatatatttatataatctatggctgaaatgcttggaactaccgtgagagcgcctaaatactatatttctacttggtttagcattactaatcctaacccgaaccctaaccctaatactaccaataatcctgctccgtcttcagatgatgaggtgcaggatgagaatgtgttcttcacacatctcgataaaaatcaacaagatattgatcaagctcatacgtatt

SEQ ID NO: 201733 - DNA, 1589 bp, Cannabis indica
acacacacatatatataaaaatatattatggataaaaaggttgtggattaagctagcattaacaatattaatactataattaatttattatatacttagggaaactattattacaagtggttgctaattattcactttggtggtgatatttttttataatctctttcctttttcatattcattcaaaatgtttgtttcttctactaaaaagggaattaataatctttaataatttattcttgtctagctaattatagcttttttttttctttgttaaataaaaaattgaaagaatactttttaaaaaatatatacataattattaattacttcattataattccctaagcatctttatatagctagatcattatctaaagagcttgagtaagaacccacttattaattatatatttgctcttactttttaatttcgtaagagaattattacatgatatgaaaacaacatttagtctaaacccttttcccacttcatgtgattaatttttataattctattaattatcattagtcatggtgttttaacttttaacttaacataatatttctatattttagttaattattgtacttatattattaatttgaattttggctttggctttggcttggatcaagatctctttgtgtcgtaaattggtaaaaaaaaaaatgacgttttaattgaaaagcaatgatgaacttaagttgaactatgcatggaattgagtaaaaaaaaaatattttttttaatactattattttaatttgataattatacaccaaaaagtaattttacatcaattaagctcccaaaaaattaaatatatttactatatattaatttattccaatgaattggtgtacattagaattttatttgtaattatttaatattaagggtttatggtgctaatacaattggttggggattactatatatcaatatacatatatttgatgtttttataaattaagcactccattaaaaatatgtattgattcactttttatctgtttcggcatttaaattaatagtttagtctaatttattttatattcgtatacgttataattatttaagaaattcctcaagatttttaaaaattgagaataatttacaatataaaaaagtaatgtttaaacagtttatttcacacacgtataacagaaatagttataaactgtttgaattatatttttagagtgataaattttttcaaatttctcaacagactataacttatatttataaaaaatatatattaaaaaattctttcaaataccgaaacacatgttattgtattcgtacactcattttttttttatatatatacttatatataattaattaaaactagtaaataggaaaaaaaaagttaaatggtagtgatgagagaataacggatcttagaccttaattatagaacatcttccatgtgatttggtataatatgaagttagaagattcttcattgtcaccaaagatagtgctttacttaatttgttttatttatttatttttatagtaattatattctttcatttagcaccaaacaattaatcaaagttaatataaaattttgttt

SEQ ID NO: 201734 - DNA, 594 bp, Cannabis indica
taatttcaaatgaaggagctatgtaatttttcttttccaagcaatgataacttcattattaaaaaaatatatcccctaacataaaggatatattataacaaaacaagctaattattgtggagttggttacaagtaactaactactaaatttggtatatgccacaatgatggacactttagattggctcactatctattattctgttatgttagctgaggttggagttagacaaatctataaaggatcttgacttatcttgtatagtatagttagtcaattagagagcaaaacacttgtgaggaaagacttcagagatgttcttgtaagtactagattctgttcttgttaaactcaattactttctttgtaataattcttgcttgtgaagaccatcatcactagtattttatagtaatgctcaataaagatgaagagatattgttccccgagatgtagggcattaattgcactagactcaaactcgttaaattctgttttttatctttcaatttttctattttcttgaaactgttagagtgatttaattataactgttattttgtgtttcatttttattggagtatatagggtgg

SEQ ID NO: 201735 - DNA, 1204 bp, Cannabis indica
attaaaaatatttatatttatatttttaatttttttattattattattagagatttttcaactattttgttgtataataatttaattaaaaaaatatatttaatttttctaataattttttttactgggggctcacaccacaacaagtgtgtctgtgagttaattttatttgggtatgtattttattcacttttatatttataagattaatatataattatattaacataatttaattatcattatttgtttttttttttcaaaaaaggacaaatccattgcataatacatatgtatagtgtcataatagggtttgctaaaattaaattattaatattacattgaatatgtatatatatataggagtagtttatcaacaaagttttttttattagatatagttccaaaaagaaacaattaattaagtttatacctaagtccaaatgcatgcaaatatattaacattgcaaatgcaaatatatataaatataaattttttataaattgtgtaatagtacaagacacttaaaataaatttaaataattggtattattattaattagaaagattaataagtgatgtaaaacaaaacaaaagagagaatcatttgtacactatgaattccactttgatgtgtctgtttttcattttaatttttaacactccttttaatgttataattaattattattaatttttatttttattatatctttaagtacactttaatttttttctttctgtgtgctcttgaattaaaacagggattaatttagaagctagttaaagataaaagcagttggcatgaaataggaaacttcttaagataaaaaaaaaaaaggatgattctacaatgcacccccttaaaagggatgtattgatgcacccttaacttgtttcggcatccagaaaaattttttagtctaattttttttcatattcatgtacgttatagctatttaagatatcctacaaaattttgaaaaattcggaataatttacaatatagaaaacaatgttcaaacagtctattttacacgcgtataaaataaaatagtcacgcgtgcaacacactgtttgaacataatttttggcgtgttaaacttttccaaatttcttaaaattttgcaggatgtcttaaataactataacgtacatgaccatgagaaaaaaatttgactaaaaaattatttcggatgctaa

SEQ ID NO: 201736 - DNA, 555 bp, Cannabis indica
atatatataactatttttttttatctaaactgacgcaagtcttcaaacattgaccacaatacatgttaagatgaagactgaagaagacaattcacaccagtcaaacaattctattatacaaaaccatgctctgctactaccataatcaccatttaatgaccatgatttattattattagtacctaaaccctattgatttaagctgataatatttgtgggtttgtttggtatattgtaagtttaaagggtcctacaattaaaaatcgaagttgagaagacatggagatcataatttaatgagtatgtaatttacgaatacaattattgtaaaacttagtatactgaccaattgggaccagttgcataattagactgaaccccaaaaacttgaaaaacgaaaaaagaaattgaaaaagttatggacacacagtgtaccatattcaatgcttaattgctgatagccccatttgagttgtgtactgtttgcttggtagtcgaccaagcattggccatagctaccctcaactcaactcactcatgtagctcagatctggc

SEQ ID NO: 201737 - DNA, 591 bp, Cannabis indica
taacataatcacatcatataataaaaatttataaaatcttaatcctacttttccaaatgacctaccaacattgcacttgaatatgacttttattgtgtcaccaaattacaacaaatagtaaaataatttagtgcatataaagtatttttggaaatactactttaataaattaacaaattatataaatgaagccttatggtcatcactttgaagagttgacatttttgttatggttgctattctcatctccatgatactaatttaagaccttatgtaatcaattaacaagatcatatttataaaaatgcatatgtatatagataatatatatgtcaattactctctcaaaaaaaaaaaaaataatatgtcaattactatcaattaccaagaaacacaaacaattaatatactaattaatattaatcttattataatatgattcttttaaaatgattctctgtctaataacatcatcaccacaaagttattacttcaaaaacaactttcatttatatttatttatttaattaatgaatcttagagaaatactaaaaggtatcaatgatagcagtattttatactcttacatgt

SEQ ID NO: 201738 - DNA, 1051 bp, Cannabis indica
tcgatatgatatcgataatatgtcgacaattttgtcgagtgtctcaactgcctcaagtccttcgtcgtcttgtaaagaaaataaagacgaaccaaaatttttatcttgaacacaacatcattgatcaaaactacccttaaccaaagaaattacctctttagcagttttattcttaccattctacccattgtcattgcgcatagactacaacctccaactatgcataacaattttatgtttcattctaaaatcgcaacactgaaatctataaagccatcccaaaaaaatgttataaaattctcctaaaaaaattaaaaatattgttagctcaaaaaaaaaaaaatctcgcttcatacgaagattaattaagaaattttaatttcatttagaattataatgtttgtatttgctataattaattacaactcttcatatctatggtaaactcttaatttttgtgaagatacttaaattacatgagaccacacttgaaaacttatttttaatttaggatgacaatattctctacatagacttgcttatttataactttttgtaaagacaaataaattaacaaccaaatcaatttaaaatttttaaagggaagaacaataactaacattaattaatgaataaaaatctttggttgggaattattaaaggagaagttggtacttcattttaattttcatgatgaagtgttaccaaatgatgtggccaaatttgtggggtaataaaattacaagaaaatttgttctttcaatgccactagtttgggaaacaccccataaattatttatttgggaaggtgtgttatactcttcttcttcttttatttatttattttttttttcaaaataataataataacaatatatatatatatacagaaaattaaatatatatttcgtaacaagtgagttgccttgtctgtaattgaaatttaaatgggtcttttatgtgaatccgaccaaacccgggttaaccgccgagttggggaatttaatgcaatgattgactcggccttaaacacattcaacactattattta

SEQ ID NO: 201739 - DNA, 770 bp, Cannabis indica
caaactattactcaatgatttaactttgtccataaaatctcagatggaaagattacctttttggatgttacacagctgacctttgagttgtaaaagacgagcttttaactgactagataatcgttgctcgagagctttccataacgaataagaggtggtgtgggaagccagtgatgccaagactgcttccgtcattgaagatcacaaccatgaaagtaatatctcatctttacgtttccattgtttgaagatagggtttgagtcactggtaatcaagagttgaggaggttaatcatcgcggaacaaaggatcatcaagatcgtggcctttaatggtgggaactacttgagatttccatgataggaaattcgatcgatcaagcttgattgttaatgacgaatttagggaatttaagaaagggttccatggttgatttagaaaatcagaggtcactggagttggggcagattgtgtcattgtaggagcatcgtttacattaatatcgaattgagggtcatttgaagaattggccatggacccgagtcagatgactctgataccatgaaagagattttgctacaaaggaaaaagagagaagattttcaaagaagtgaaaatgggaaaaaccttagcaattgcttaggtggtcatcttatttatatctcaacaaaacaaaagggtttattacaactttacctaaagatgccaccctttgaatcacgtaatggaggatgtggtttgggaatggttgcccgtgattccaacggtga

SEQ ID NO: 201740 - DNA, 590 bp, Cannabis indica
ctatcttgaaaaagaaagtgttgaagaagttctaaatttgacaaaatatttcggtcatagtaaaaattagtttgaggaaaatcaggtccaatagcctattcattttttttttcacaaaagatatataaaaaataatttttaaatacagaattcaaacacttatttgtacagaatatagggtacaaatttgaaatttgtataaatccatatataatatattattattatttgctcaatattaagaacttatgtatgtaattcttttaaggaaagtaatgtgtattcccaacatggttttgtgttcattgccacatttatttactttgtaatttatatgtttgaaccttggacagtgaccttactgagctaaataaatgttagatgggaccacttccactcttatgaaatgataatattatttatttatttatttgaaagagaatgaaatagaaacaaaagacaaatcaaatattttttttttactttcttttataaaattcacatctaaaaaatctttttagcaaaatcacttccttttacttttaatctctcccagctatcctgatccaatgaagtgtctctaggcaacc

SEQ ID NO: 201741 - DNA, 1457 bp, Cannabis indica
gtccgttctacggtggtgatcgtgggtcgtcaaccacgcatcagagagaaccagagaaagagaaggtcgttggtcacacaatagagagaattagtattgaggagatctcttatcctctttgtggggcaggtgaggaatcgatggagtatctcttcctctattgtaacttcgcgtaccatctttggaggtcttccccttacggagttattccaatttttgaatctggagcccgtgtttgggattgggtaacatttctctggaacttgaagtcaaaaggagtggatactaacaagctgttcctatatgcattgattgtagtggatacgatttggaagacccgaaacaaaaaggtacataacaactccttgagtaacatgaagcactttattgattctatctctatttgttacacagattatgtggcttgcttgtttgcttcagcattgactgttctgtctcctgtttgatctcctcctccagaagattggactaatattaactatgatgttaagatcggtagatgttccatgtgcgtggcggttttcgtaagggatcatatagggaaagttttatgggtagcagctaacattctcgacttcacggatcctctaattggtgaagctgcgacgtgttggttagtgttggattcgactgtgttgaagaaatatctttttgttctaattgagagtgattcagggaaaggtatcaatgctctgaagggaacttattccagttggattattgataattatatttttatttgtaatcaactatctatttagtttttaagctgtaatttctcatatattttcagatgttgtaattttgcggcccataatgtggctaggtgggctttgctcagaatatttcgggtatgggttagatctcttctatacctaattatatcttttgtaatgaccaggaggtctaatattttctttattaatatatttcgacgctttattttcagagagagagagtcgtggatggtggtcacagatgttcgacggtagtttcagtagtggagtttggtaagaaccaaggagagaagaaaagagaatgagctggtgagaaaaagagaaggattgagaaaatttaggtggttttttgaaagaggaaagataatttatattatacaataaaatgtgcctatactactgagtaacttaagtttaactattatttttaacagttgtagaataaaaaacaaatttccctactaaaatgagaaatctagttcattgtatatatttttatgtatgcattcctttttttaatcttccatatattaagattttcttaaaggtggattccaatttagctgaactagatataattataatgaaaaggaaatcaatttggaacaactatagtcactttaacttttcttttctttctttctctcgcggtaccttttctcttttatctggctaaaatttcttaaaagaaaaatagaa

SEQ ID NO: 201742 - DNA, 2412 bp, Cannabis indica
gggttttcggcgcctgtgcttttcataagaccttttccatagtttcaatgcaacttctgtttatatttgattttttttataaattaaattcagttctgtcagcaatggattgggagttaagaggaccttttcccttctgtcagtaaatgtaagtttttcgagtcttcatttctgtcgtgtaagttttcctttaaaggctgttgaaaattatcacttctttcgaatgttccagctgcggtggaaggactttctgcagcggttctagtagttctatttctcttgcaaaagtttggtacatctcgagtgagtttccttttttcgcctattatggctgcatggaccttttgtacccccatggtaggtatctatagcatcataaggtattatccaggcatatttaaggctgtgtcaccacattacatcttccatttcttttcgagaaatggaaaggaaggctggttgttgcttgggggcactgtcctttgtatcacaggtaattgttcttcttgagccttttattgtgcaaccatagataatgtgaaaacatattaatttaacatgatcacatcaggttctgaagcactgtttgcagatcttggtcatttcaataggaaatcaattcaggtttacctgtaaatcatatatatttttcaaactttccatacattttaatacatagctttctgatacatgttttttctttcatttcctgcacaatagatggcctttttgttcacaatttacccatctctagttctgacatatgctgggcaaacagcatacttaatcaagttcccgaatgatcatgatgatgggttttacaagtttataccgaaaaagatatactggccaatctttgcgatttccacatcggctgcaatagttgctagtcagtcactgatatcagccactttttctgtaatcaagcaatctgtggtgcttgattatttccctcgggtaaaggtagtgcatacatcgcctagcaaagaaggcgaagtttactcccccgaagtgaattacatcctcatgattctttgtgttgctgtcatacttatatttggagatggaaaagacattggaaatgcctttggtatggtaaactaaccgaaagcttattactttaggctaaatgggaacttgtattaacacttgttgtgatgttattttcaggtgttgttgtcattctagtcatgctcatcacaaccatactactgacattagtcatgatcatcatttggagaacaccatcttatcttgttgttctgtacttctcagtgttttttgtcatggaaggagtttatgtgagtgcagtcttcactaagattcccgaaggtggttggattccattcgccatttctcttatcctcgccttcattatgtttggttggttttatggaagacaaagaaaggttgcatacgaattgacttacaaaataaccttggagagattaggacaactaatatcggatcccagtgtccaaagggtaccgggattatgcttcttttacaccaacattcaagatggcctcactcctattcttggacattacatcaagaacatgaaatcacttcacaaagttaccatattcactactcttcgatactcattggttcccaaggtagctccacacgagagaatcgttgtcaacaaacttgactataaaggcgtctatggatgtgtgattcagtatggctatgcagatcctctggaccttgagggagatgactttgttaggcaagttataattagcttacaagaacacatccgaaacaactcatgtcatctatcaaccgagacacttgaaattcaagaacaaatttctgatttggaagaagcgagcaaagcaggggtggttcatgttcgaggaaagactagatttcatgtcgggaataactgtggttggtttgacagaatcatgctcgcgttttatgaagtcttgcatagtaactgcaggtctgctctccctgctttgggagtgccattgacacagcgaatcgaagttggaatgctttacgaggcataagatgatacaacttagtcttgattcaatatagtaatagacaggtaaaacagttaggagggaaaaaaagaaagaaaatatactaaaataaagtgtttagcttgagataaaaagcttcaaagcaaacactcttattcaggttagtctatatattattacctcatatctttgtaaagattttgtctgaacaaagaaaagaaaactgagaaaaaaacacactcagaaatctccataatgaagttaaaaatatttatgaacatgttgtgtgtaaatgtgacagataatataacgcattactgtgctgattaccttaattaggatcaagaaactctttacacacaatacttgccaagacaatttaatgggggttcaatttatttatttatttatt

SEQ ID NO: 201743 - DNA, 1352 bp, Cannabis indica
tttcatacaattaagtgcattgatgattgagctttgagggtgtgtaatggtcaaaccatgtccacctaatataatggtttgggctgtttttctttttcttccctaactggggaatttacaaatacactattacaacttgtgatattaaaaccatattcactatttttatccaattcagacaaatttcttccacatctacacgtgatgtgttacattattaatttggtgagagagaaattattgtttgacttttcatattgagttattttttcttggaaaatattggaaacttctcaaaataactcataaatttaataaaactaattaaaattttagccttctaaattttgacatgtactaaatcatgttccttaaatttttttatcgttaaaaattctcctgaactgtagaaattgttatatttaaaaaattatatcatgttcctcagactttgatatctacaaaatcatactccctaatcttttatccatgttagacttttcttactgaaattggacaaaactctaaaatctaataatctcaataattaaggaggaaattttaacgatcttaaaaattcaagaaacataatttagtaaatatcaaaattcagagagcaaaaattctaattagcctaactataaatgtaaagaaataagaaatgaatgaaaaagtagctcaacccaaaatggctaatgaagctttagcattatatatataagatatctttaagcaacaatgatttgattagaaagattggtataaatacaattagaaccatcatggattatcggtataaaattacaacaactttggctttccctttcacatggttccttactagtctttttaacaaaaaataaattaaaatgagagagcgccggtattctttcgacgtgtgtatcgctattcgtaaatgccttctcaatttgaactctccttaaaaactgcattctgtgtctgcaattggccaaagaaagacaccacaaaatgaatgcattttaaaacaaggaactccaaacagctccatccccttcaccacacttatcatgaacaaatttgattttctccacagatttgcagatcccgctgcagctccaatcaaatgatgcaacgcagacgttgcctgcctgtgccttccactcacaatctgcatttaagtaaaaacgaatccaagccacaaccttttcaaattacttactgtacaagacttaggtgtgcactcgatttaatgttatttagaatatgatgctatagaatctttttaaatcttgaacattttcgtatgcacaagacatggatgattaccttttaaacttgcaaaatattaagtttttgttaggtatggttac

SEQ ID NO: 201744 - DNA, 728 bp, Cannabis indica
atatatatatataataattgtttttgttttttgatcagcttttaacaaatgataaattgaaaagtgttgagcatagagtattggctagtgatatgggtccaagagtatctattgcagccttcttctgcacaggtctattgtcaaactcaaaattgtatggaccaatcaaagaattgttatcacaaaataatcccccaaagtatagagaaacaactgtgaaggactatattgtttattccactaataatataggtcttgatgggaataaaccctcatatcattttaaggttgatccctaaatagaatgatgaacattattaattgttacttattattgttacaactgtgtcaccaaataaattataacatatatcaataataatatggtctttttttgttttgtcattattgccccttcattgcttattaattattattaaatatttattacagcagattcattaattatcaaatgatttatgttaatatgaaattttgagtaaacaaggtgtaatattgattgtttgtcacgtaattatacaatcattgtgtaattagagaaaattaagagaatttaattacataacaaaaataattttaattatcaatatgatttttaattgtctttttttatttaattttccaatttcactcaatcaaagttatttggaaatatcccaatatatatatatatgatatttgtatattatatgccacatgtagtacta

SEQ ID NO: 201745 - DNA, 743 bp, Cannabis indica
gaatgtacgttttttatttattaggtgaaacaggaaaattaggagtaaaacctagtaatacttaaatgactcctaatatacacattacgagagatggagaactatttgaaaatcccgagagaaatcaaaggttagttgggaagttgaattatcttacacttaggggtgtacataaatcaattcaattcaataataaccgaccgatccaactacaaccgaccgtcaaagattggatcatgttggatgttatttttgaatatccaattggatcggatcgaataataaatactggatctaaaatattaatactaggtctaaaatatttaataaacccgaattaatgcaacagatatatataaaatacatcaaatggacaaaactgatccaatccaacaactaatgaatactgaatcgatttgatagatcggatcagatggtaaaatgtaatatccaatatataattagattgaatttagataggcctaaaagcattaaaagtggtctaatgaacacccctacagacttacattgattgatttcgttctgatattgcatattaggttagtgcggtcaattagtttatgtcatcttcaacaattctgagcaacactaaagtaaaatttgtgttacttgaaagtggcacctaaagaggatattttctaaaaaaccatagtcgctcttatattgaatgtttcttagatgtagattaggcaggttttaatgtgtatagaagatccacttag

SEQ ID NO: 201746 - DNA, 1739 bp, Cannabis indica
caatctttatcttggactatttttgtagaatggtaaaaccaaagtaaaaaccagaaatggtaaacaccaggaacagaacaaaaacaaaacaattaaagcaaagaaaattgacaatgaaatcttgactcactaaaggagcctttcctttatttatagatactgaagtacaaaggaattagtaacagaaaataacaataaaacaaactaactaatccctgacagataactaacttcagcatataaccaataacaggttttattggttaacatcccccctcaaacgaaaaggggttgtagccatttgaagtttgccttttaagtaaagaaatcgatctgtggaaagagattttgtcagtgcaccaacgacttgatcaacagctggtacatatcgaacggaaagttcattggtaagaatttggtcccggacaaagtgtagatcgatttcaatatgtttggagcgagcatgaaataccggattcgcagctaaggctgttgcactctgattatcaacccatataatcggagagacagatagagggacttgaagctcctgtaaaaggtatgtcagccacttcagctcggcagcagtgttagccaaggaacgaaattcgctttccgtgcttgatcgagcaacaacatgctgctttttggctgaccaagagatcaagttgccaccaagaaagaccacataaccacccgtggacttcctatcatccacacaactcggccaagcggcatcagaataggcaatgagctccattgttgctgctggtctgatcagtaaactatctgaaatggtgccctttaggtaccgtaacaaccgtttgcaagcctcccaatgacttgtagtaggagcatgaataaattggctgagtttgttaatgataaaggcaacatcaggccgagtaagagtcaaatattacagagcaccaagagtgcttctgtataaagtaatatcctcaaaaggttcaccatcggctaaagaaagcttggtgctggaactagttggacaaggacagcttttggcaccatcaagttgtaaatttgtactagaagatcggctatatatttactttgggacaagtacattccaatggcagttctgcagatttcaacaccaagaaaaaagtgaacaggcccgagatccttcaaagagaaaaaggtgttaagatctgtgataagtttggaaattaagtgatgattgggaccagttatgaggatatcatccacataaactaagagaatgacaagcatagaacccgagccataaacaaatagggaagtgtcagaccgagatgccttaaagccccacctgcagtaatgtgtttctcaatttttcattccaagcacggggtgcttgttttaaaccatacaaggccttgtggagttgacaaacatgagtaggattgtcaacatcttcaaatcctttgggctgtttcataaagacaagctcttgcaattcaccattaagaaatgcattactaacatcaagttgttttacttcccaatttgaagtgacagccaaggagagaacaactcgaacagtagccggttttacaactggactaaaggtgtcagaatagtcaatacccggcgtttgtaaatagccttttgcaactaagcgagatttgaacctatccaaagagccatcagcattcaattttatcctatgaacccatttgttgtcaataacttgcatatggggttggtagggaaccaaggtccatgtatgagcttta

SEQ ID NO: 201747 - DNA, 1418 bp, Cannabis indica
caatcgctcattccatcgtcccaacgtattttcttcttctttttcttacgtttctccccgtctgaaaattcaattcactccttcccaatacaatacactaaaactccctacttgttcagattctttccgcactttctaccgattctctccttcgaacgaccacgatgaagaagatgccgagaattgcagcttcgacgaggcagtagagcttttcaacaatgcgccgtgggatttcatcatctgtttaatcaggtaatttcaacaactaataaccacaaactgtttttttactttactaccgtctctgatttatatatatataatttggttttaagaatcataaaggagcaatgatggagttgggagaaggacttagtaagctgagaaagatgaacttcaagaatggagcttttcatcagtttgaacaggaaatatctacagttcttgattttatataccagacccagattgaattagctgcttgtgagttatatgaattgtacttaaacatctttattaattgttatatgaagtattatgtaatttttgtgtgtttgtttgaagtacaggcagtgatgatatgtgtgttaggatggatcaatcggagaggtcgtaccaactgcttgggggatatggtgcaggacagcatctgtataaactgcaaagcgactcatcaaatgaacagactatgcatatagtgttttgtccaaacatgtcttatgttaatggccacccacagaaagtaaagcttcctactcttaatgctaccactcaattactccacgcttcttcttgacttcgaaattcacctctataatctttggtctgctgcaatgcaatatatgtacaagaatttatggtgcttagtagcacaatcaaatttagccctataaatttttatactatttattaaagtaaaataaataagatttaatactgatataacatttctcatatatatttatctgctaccatcataattattaatgattactatttttttatccattttgatggttactctaatattagtcattagatcatctaagtattaaaagatatcttattttggggtttttatctttttaattttttcctataaaaaatatcttgaataaagatgcagtttttattattaataatatttattcggtaatagtgataaaaaaaatagtaaatatcattttttcaatataaaattttggtgaaagtatgtaatttttttaaatactcaaattttcaatataaacaatatatgttataattatttaagatattatataaaattttaaaaaatttgaaataatttaaaatataaaaaagcaatattcaaatatcttatttcacatgtgtataatataaaatagtcatacgcgtaatacattgtttgaaacttgttttcagcgtattaaattttt

SEQ ID NO: 201748 - DNA, 789 bp, Cannabis indica
ccgttactaccttctgtgtattgcctatataatgcatcaaaactaatgggagaaatacatctttttcacacagaaaaatatacgattatattaaatatatattttgggcagtagtacgattattgggtgtggtattttaacaattttctattgtgcaatagaattccgatacagtattctcgattgggctatgatgacgagactgatcgtctacttgtgcaattctaggcagtgtcgtgaatgtcttaaagggaacgacctattctgcgactcaacccaaattttaattcggtaaatttgtttcttttattttttgcagcaactatttaaaacagtgatcaaagaaaaatggtgtcagaaataacattcatgtctaacttttattcattaaggctacttttctaagttagagaaaaaaagagtaaagaaaatattggaaaaaaatctattgaaaaaaaaaaaattcaagttttatgtttggtatgaagaatttattgaattattttttatctatacaatttttattgaattaattgcatcaatatactaaaatttaaaattaattgtcataatattgttggtcaattaattggcatatataccgttacatgcataccgttataaaaatgtttatttttcttacactgacattgacgcacacacttctctaattttttcttttttctttttcttctggcattttatattttctctctcaatgcattagtaataataactctcaccattctcacatatcatcataatagcatatatataattatactttta

SEQ ID NO: 201749 - DNA, 1096 bp, Cannabis indica
gccaaataaaataaaaaataaatgtagagaaacattggattctttgttaaacatacattgtccaattcaagccctgttcattcaactaaacaaaaaaaaaaaaaaggagagaccaatgtccctaacctcacacaaaaaaacagtaccaccagttaagtacaactttggcttttttcttttttttttctttctttctctgaacccagtaagatgaaaactcaatcacctgcattgcaaaacaaaaacaaaacaaaacaaaatgaatttgtagccatgattcccaactgggccatcaaaagaagattagtaataaagacaaaccaaataaaagtaagtgaaaattaaccaattaatgttttggtaaagaaacatattgagatgagttaccattatgagttctacaagtattgaagatgggaaagtcatatgaagaggtgggaatcgaaattgaaagctgggtagtggagacagatccactgtttgatgatttgtcatccaactctagccatgatgaatccttttcttttacaggccattcatcaatgaagtgaatggttttctgtgttgcttcttttctctccattttcacatcatttctcctcaaatcacaatgattagaactctgaagctgcaaataagaatgctcactttgtaaaccagagcaactcctctgtttagaagaagaagaagaacaactcattgttagtggtgtgagttgccaactctcatccatagataaatctcttacatgagttcttgaaggttcttctgaaaagaatgaatgctcatcaacgtcatctttaagcccataaacatacctgctttttctttccaacaaggaaagcaatcaatcacagtcacaacccaaaagaaactactttaaacaaaaaagttgagtttgttattattattatttttttgcatagacaaaccttaagtctgcattagagtaagacccagagtcgaatagcaatgatgtgttgctatcttgtgatgacaaaccaattccattaggccttgaagaagaagatgaactgtggttataaacactaaaaaggctgtgttgatgatcaagatgggggttatgataagggtg

SEQ ID NO: 201750 - DNA, 1328 bp, Cannabis indica
tagtaatgtgtctattaatttgaaattcatggtgcaaatggcttcaatgagtgttattatgactcaattaacttatcttcttcacaccactaacccaaccttaatattcatttttcattattattcttgaaattgacattttcattcctttaaaaccactagctagtatgatcctatgttaaatcagtatcatggataaacatgcatcaaaattatagaagaaaaggaccacaccacccactaatgagagagttgcacataattaaacaccgacttcttctatcaaacattattaattaattaataatattaatggtataatacaacactttaatttacaagtggtcaactcaactaactatatataataaaaacttgaatggggatgcactgatacatttctatttatatcggtattcgaaataattttttagtctattttttataattgtgtacgttatagttatttaaaatattttgtaaaattttgagatatttagagaaatttaatgtgctgaaaataagatttaaatagtcttttgtaaacgtaacctttatattttatatgggtttaaaataactatgtgaacactactttttatattataaattattttgaatttttaaaattttataaattattttaaataattataaaattgaaactatataaaaagtgtatcatttaagaatgtatattataaaagcactttataataatatatattataactaagtggatgtagaactaaactaagattaacattcattcatcatatgatatcatatgttgtaacccttttccatatattacactaatcatcactcactcaaaaagcctttctgaaaaatcattatcatttaaattttattcaaataacataataataataataatgaaatactttcaaaagattctttctttctcctcagctttcaaatttccaaccaaaacaggtaaaatattaataataataataattaaaaattgaattatttgatatatattattagggggtgatagttggactggtccaagctccaatttccaaggttaaatatttccaaactgtgtcagatataataacctgctacatattgcaatgctgatgataaaaattgaaaaaaattaattaaaatttacaaaatagaagaaaattaaatcttgttgtgaaatgtgaaccctttttatgtacttttattgagtttagtttaaggccattttatgaatgaaaatgaagttgaaaaacccaacaaattctgaaatctgaatcatgtttttaagtcccaatatcttttttttttctgacatgagagagaaaacccat

SEQ ID NO: 201751 - DNA, 851 bp, Cannabis indica
tttctgatttttacgctgggactttcatttgctgcctctacttcaagagctacagaagaaaaatcctcttctcacacaagagcatcaggtaataattatactttatctatgagtattatctattagatatgttacttagcttggctatctgaaatagcttcattcaaaagactgaggactaaaaaattcattgataacgggcatcagccacataatgttctgaagtagcatgcaaagcaaatttagcaaggtatcagctactacattgacaattcttagacaataaataaaaatcacaacagaaaaagtagagcataaatctctaatatcattaagaaagtaaacccaaagaagaatccaacatcgttaaactactgagcttgttgattaaactttgataatcggattcaacttgtggtattttttttccttattagtgcttgatacaggtgaagtttatgttgaaattaaaaaaaaaaaatacatacgcaatggagatcaatatcaatgttacacaaggtgcattgtatagaaaacaacactcaaatcacacaatggagacttgtgatcaaaccctttctgtactaggaacttttagtcctaaaacaatagagaagccacccttttatagtaactaacttaacagaatgatgacataaaacaagtcataaagtctaaagagtcacttataacttgtaactaaacaccacacaaaacaataatcttatctttttaacataatcacaaacacaatgggctagaagaagtttccatgattgatgatgatgatgatgtatgtacaagtgttaacatttgttgttttattttcaatttggcagtacagaatctac

SEQ ID NO: 201752 - DNA, 953 bp, Cannabis indica
cagaatatgcctcctttcgtttagatttctaatccttgattcctatttgtagcagagtattatcaagatctgaacctgaatcttctcctcctttaattgtgttcattacagtttttcacaaaggtttgagtatatcaacttaaatagggtggattgatactcaaatacctttggaacatattttgagggagaaaacatagtgaatttcgaaaattaaaagaagaggtagaagtgacattagcttttccaattctcttctcaatttttgtgtagacattcacacagggttaggtttggatgagatgagcttaaaataaagagttgagttgaatttttctcataggactgaatatatatatgggctttagagttcgattttgtcacttttttaaagagatttttgtcactttatttcaactaatgaaacttaagtgtcttttctaattttaccatttatcttatctaattattttaatatttatcaaataaaataatctaaatatatttattaattagacccacaaaagtgcactaattaacaaataaaccttatttctcttttttctcaaaattgctcaaactttggtgaaaattctcaaataacacatagtctatttttgaattctaattgacttgtaaaatcaattagttgagtctaacgagtaaattttctaatttattaattccttttgactccactatagattcaaaattacactgttgattacataaaacgctctatatactgaatattgatacactattaattattcattgctttaatcataacaatgattgatcttctatagaaaaattacattaagttaggacaaaattaatgttttaccccttcaatatattttattcttattaaacacttaattacttgtaaatgatatttttggaaactaatatagaattaccaaaataagcgttctatcatttatcgcgtt

SEQ ID NO: 201753 - DNA, 984 bp, Cannabis indica
aaatagacaacaagattcaaataccctatttcgcaagtgtataaaataaaatagtcgctagtgcaacagactgtttaaaccttgtttttaacatgttaaatgtttccgaaattcttaaaattctgaaagatgtcttaaataactacaacatacatgaccatgaaaaaacatttgaactaaaaaattatcttggatgccgaaactgatagaggtgcacaaaaggagggcgcgttgtagaattctcttatattctatacttaatattcaaaacttagtcaatggtgaatgatagttttaactcctttgtctacaagttctctctaaagtgtcctttttttaaaattaagtttgaaatgtagaattactaaagctttgtatttgataatactttattgatattcacattaacactaatattttttgcattttatgatgttcacattaacactaatatcttttatataggtataattttataatttcatgaacacatattagatgttttgtattgcaatataaattatataaaaaaaaagtactctttgtagcctgtaggaacatcacatatttaatctcacagataaattatcaacaaaaaaaatagacaattcataatgcagatagaaatgtaaatgggacgggtcagtcccacctgttatctttcgccccgctcgccccatcccatccctttatggtttatgaaccgagcgggccgaaagataacctgcagtagttactctatctgtcattcatttcacaagcaaactctacatctatatatgcaaataactatatttaaaaccatgctttcttcatacttcctgctgatatcgacaccataggataactagtagggatgcttccattgaatccattatcaaccagatctaacacttgtaatgagcttaaatttgatagcatgcatggatggaagttctccaacaaatgagttcgaactcaactcaagtattctcatattctcta

SEQ ID NO: 201754 - DNA, 825 bp, Cannabis indica
atttgattgttttttttttttatcttaataactgtttcatgataaggttctagaaaggtcactactaaataagttgaacggatttgggttggttagaacaccgtttctgatgttctcagcacactggtttttgctgtatgtattatgttcaagctaggtggatcttctagtattatggggcagttctgtaggtgtatagaactaatgcaggagcatgttattcatatttatatggaaattccaaggtagggtattccaccagttttcacgaaagcggtcaattgatcgttttttactttatttgtctaacatttgctctgaaaactagtgaaatgttagggtataataacaataataccatcatctataaaaaaaatattaaattatctctagtttggagaacagcccttatagtattatttagttaagtttaacattatgtgatttggaagtaataatggtatttttatttttgttacaagattaatacagcaatatatgattatgagatagaaatttctggtttgttgtaaagactactattggaaataaagaggaaatatattaccgaatgaaatctataggtttagttgtaaattagatcactttctttaagacggttcgcgacactacttaggaatgtataagtggttaaaaattgtcggtcgtctcttaaataaaatagtctagttttatattgtattagatccctattgcactgtaaagatagattgattttttttggagtaaaattgtgtttatttttgtactctatgaaaggatgtattcctcttaccagttgaattgcattatatagatgaatgg

SEQ ID NO: 201755 - DNA, 1245 bp, Cannabis indica
aacttttgtggtagcggatccgattattgtaggggcggaaactgccgataccagtgctggttcgcagcaacaccaactgtgcgtgaaaattctgtaaccaaaatagtcactaaatcactttacaacgaaatgtttaagcatagaagtgattgtcaaagccagggcttttatagctacgaggcttttgtcgctgctactcaatcctttcctagctttgctactactggagatgtgtcaactcgtaagagggagatcgctgctttctttgctttaacttctcaagcaactacaggtaatatctcatgtgtaattacttattgttcaataatatcaatcaatgtttggtaactaataacatgcctatggaattatttttgtatttatatatatataggtgaaagtgagtggtctgatactgagtcacatacatggggctattgtcatatcaacgggactactaccaatgattattgtacttcttctcattggccctgcgctcctgcccaaaaatacaatcctcgaggacctgtacaactcactcagtaagtattaatcaagaaaaccaaaattatactatctacagcttgaatgaaaatctgctgagcttatatatacactaatatatgtgtaggaccctgatcgatgaattagtcatgcgtgactggtcgtgcattcattcagaatcattaggctcactaattattttattactatctaaggctgctaacaatgagaattaaatattacttattatatttttttaaaattaaattttatggctattctggcaaatatatcattttttgacccagctgaatagatcattctctttaagacaaaataagttctcttttcaaaatgaataaatagaattaaaaatacggaagaaaggcaagactagaggagtaagatgaaagagacatttcttttattattttaaattattagttcatttgtacctaattatctaaagcttaaattttagtagtaaaataaaacccttcaaatgactgagtagttagtatatttaattaaactgttatgtatttttcacagttaactgtcaatatggactacacttgtttatattgctacacttaatattattattttaaaattataaaataaaaattcaaaatttataattttttttaaatattttatttaattttagagcaatattttaattaagttactagctatctgtagtagtactaaataatacattcatttttatttaatata

SEQ ID NO: 201756 - DNA, 464 bp, Cannabis indica
acttaagtaaataatataatgtaaaaaagccagataacatttttttgtctatcccggacctcttacgtctaactaattttcataatccttccgtcaaataaaaactttaaagaccaattaaaaaaagtgtaatcatagtaattatgaaagtcaaatgtatgtatatattaaaaaaataaagaaaataattttaataaaataaagatttccttctttttactagaaaataatgaaaatataaacttaattgaaaatttctacgaggaaagaatgaaaatttaatttgtattgatattactataaaaatctatctggaattacattacttcaaaattaaaatacaaccttctttataatcttttttttttttgtcctttcaacaaagtagttggtttcttcttcaaaaaaagtagttggtgaaaaataaaaacatttcctcaaattgattacttatgtcttataat

SEQ ID NO: 201757 - DNA, 1299 bp, Cannabis indica
atagctaaatagaaatatgtgttagggttaatactctaaaatttttatatatgagcatctgttaaatgagttgtctggataaatgctaagggttatgcgttcaaggcataactagattagactcacgaaaaccaaaataaatcataataagaccttataaagtaaacatatgtgagtgtagcacgtgtagtctatacaaaatagacttaaaatgttgtgacatcatcataaatattgtagcgtgttatattagcgcattggcacatttattaatgcaatggcgtatttaatgtgatcattatactatgtgtttgtttttgggtttgattatgctttcttgttgagctttggatcacgagtttagatgtgcaagcaagagtaaggcagcgccaaaccagccatgagcgtgagggcttcgacaatggattgtacatgttttagctagccaagttagacagcgagagttggctcttacatggagtttgctttagaaattttattgtactgcttaggctggcttttgtgtaaacaacttgtaatattttaaataatattttacgagatcttggatatgtaatattattttagtttaaagaataagttactttaatttgattttattcattggttgttttattttaatccacttggcttagtagaccctgattaacgatattagcacgatgtaaccacgacatgtggcattcttttaattaaggcgttacaaacccaccaactgagctcagcatgacacaatcagatagcgacgcgcaattgtggtggtctggtgtgtgagcctcattacgattttgttatgcaccaaatagaatcgctttattacaccccaaaaatttattgttcaaaatcgtaagggtttatgaatgaagaattttttctgtgcagagaagatgtattctctacacaatagtctatcaaccactgcattcctagggtgaaacaacctcaatattatttctttatgcaccaaacgaaatagctctattacaccctaaatgttataaaataattaattaatcaataaataaaaacatttattttattaaataatttttctgtaaaaaattaaaatgacaccattctaacccggcaattgagctcgtcacaacatagttagacggcaacacgcacatgtgatggtctaatgtgtgagtcttcatccatgtgcactaaactaggtgatccttagagcccaaactcaaatctcatatttgcttcttatatacacttacaaataagtgtttctatcccatataagactctttacaatattacacactt

SEQ ID NO: 201758 - DNA, 1037 bp, Cannabis indica
attaacataacaaaactactattttttaataatattatatattctttaaaaacagaaaatttgtttcaataagtaaccctaaagtatattataattaatatatatgtatatgaaaaaaagtgggaaaatttttttttttgtaacaaaagaagttttgatattagttacaccgtatatatgtataatctgatatttatatttatttttaattgatagattattattaaaacaattataattaatttagaaatattgcatatatatatatatatatgtaattaatcatctatatacacacataaattaataaacagaaactcagtacactaattagaaatatcatttcaacaaacctcaattacatagtcatacacaaacgaaaagctatccaagtatgtataccctttgaaccccgtatatataccaaaccaattttcaactttaatttttattttcttagacattagacaaagaaattatgtatttaacatcattaataattcgttgagacgtatgtggggtctacttattattaaaagtaattcgccacgtaagttttttttttaatatatatatatatactagcaaaaagttacgtgcgaggcacgtatactaaattttatgttagtttttttctacgttattaaaaagtgatacaattaaatttaacaaaaatttaacaagagatgattagaaaccaagagatgattagaaagtaaaagcaccgctagaactttcctttgtttgaagtaataatataataactaatatcttttattacatattaataattaattcaagatgaactttcaaaagtatttttgaaacatcgtgggatatataaatgcaatacttttgtataatagcatgtagcatgttgtcttcattagtatttttcaaattttaatatgaaaattaaaattataaaatatagcttaagaaattataactaaggttataaactggtaaacattatgttggaggctgggatttttgctagagaaatttgttagattaaattttggtaggattattta

SEQ ID NO: 201759 - DNA, 2272 bp, Cannabis indica
gcgacgaggtcagataggtgaggccatccttttcgactgcggtcagaagataattatcggagttacgaaggaacaacacacgccttgtagacattaattatgattttatgttttattaacagaggaaattattattatatattgctgaatgtattatttataacctacaaaatattgcaatggtgtgtatggacaccaacttttcaccaaaaatgataccactgtaagtcgttttttccccttataaaatgtgtatatagtcaacctttagttacataattaggcatatatatatataaatatttaatgtccatatatatgtatcacgtcagggatatattatttttttccaatgtctaacagaaggataaagtaaaaaaatttcaaattatatacaacgtacacaataattaagagccgggtcagacaaaataacacaatttgaaactcgcatgaaaaaaaattatttttaatgataattttctaatcacaatatattgttttttgattaaatatgacttttagttacaataaaaaattatttgtgagtaagacataatatttagatacaaattgtcactaacttaattttagtcacaacaattattgtgacaaaactacttttaatcataacaaattatagtttttgtgactaatacttttttgacatacttagcacatatatttaatttgaaaatggcgtaacaaacatgacaattaacttatttaaaaatatgccattttatttattatatttattacatgtaaatggtagtgaattatttaaataaacattaaattactaataaatgtgtcataaaaagattgtaaactactaataaagattactaataaatgtatacacactacaaaaaaacttatttttagtgataactttttagttataatataattttttttatgattaaatttgacttttagtcacaataaaatattacttgtgattaaaacataatatttagctacaagttgtcactaatttagttttagtcacagtaagtattgtgactaaaaatatatttagtcacaacaaattgtaatttttgtgactaatacttttagctacggacgttttagtcacaatataggaatattaatttataattagtcacaattttttcacttttaatcacaaattttattgtgactaaaagtaaaaaaatttgtagtgacacttataaatatgtatagtaaaattttgaaattaatacactaataatttagttaatattttaaagtaatatgtaactgacactttaaatttacaaataaaaaataaataaaacatataagaagtttaagtgcaaattccactaattaatatgaagttggatgaccaaccatcaagttttgttttctttttgtttttgtttttgtattttcaattgcgtgaatattaaccaacttggtatatgtgtgatacaatgagtggtgatgagtcggcttacaattgctacccatatatatatatatataaaaaaatatcatacttgactttgaaaaatagcacatacgcatatacatgacacatataagagatgtgatcattatgaataattttttttatatacgagatatcatcatatttgatgataattttatttagagaagttaatgctacaatttcattttcattttattataaaattaaacaatgtaaatttcactataatatgtgttggaaatattattatgcatgtatttcgttttttttttttttttttggctaaaatgctcggatgcataattaaattatcactttggaggtttaatgaaaaggcaaatgtgtatataaagagtatatttacataaaacaagctgttaagtaccaaggatatattactattagagacatattggcttgaatgacacaaattatcaccatcctccaataattttagtaagaaaaagagggaaacagatactcgtaaacagaatttcatacccaatctctcatggatacattgagaatttttagagaattttatggaaagtcgtattcgataatagtcttatgctcaatttggagggaggtcttttcatatttttcaagattcactctacatatatggagtcaaaaaatcaaaataaattattttagcctttatcaaaataaaattgattattgaactcctttcacacctaaaaaagcctcacctaccgctatttgaacaattcgtcctattgtattttattttttttttttgaaaaaagtacaaagtgtttatcttagattagcaactgagaaaat

SEQ ID NO: 201760 - DNA, 905 bp, Cannabis indica
aagatcaattttacgtaaaactattttattaaaagatacttctactttctactctgaatcagacatgccatcccaccctaaaagctgccatgtataatagagtccttaggtatccatcttcttaaaacacatacgagatattgaagtgatagtgaaggttgtggtccaatcattaccgagttacgccatgagtgtgttgctttaattccttgatatcactcgagaaattgagaagcttatgaataagttctggtggcagtctaatagagatcgaaaagaatttcattggatgtcgtgggtcaaactaagtaaacacaaaaacggtggcagcatggggttccgtgacttgcacgattttaatcttgcattattaggtaagcatggttggagaatcttgacaaagccaaactctcttgtgtcaaaggtgtttaaggctatatactttccacatggtacgtttttattttcccaaatatgagccaattcgagctttgtgtggggaagcattctagaatctcaagacctgttgaagagtggcattagataatgcataggcaatggaagttttatcccagttcttggtgagtcgtggctacttgatgacagcaaccccatggtggaatcggaccaccatgttcttgttggtgcgtctatgtctaatttaatgactttggatgatttaacttgggataaagaaatagttgcagatctcttcaatgatagggatcaacaattgattcttagtatcccattgaaactcacatcaaccgttgaccacttgttctggtgtaaagaggtttcgggtatgtactctgttaagagtgcatactcaaacattccaaaaattaaaaaggcagatggttcgaggatgaagcgtctttgttttggagtaaactttggagcct

SEQ ID NO: 201761 - DNA, 2058 bp, Cannabis indica
ttcacaattaccataaataactacaatcaaatctataatattaaattatatttaatatgtaactactattttccacataaagttaccaattagatattttgatctgataatttttaaaatgatttaaaataataatttgagtatgatttttattaaaataaaatttaataattatcttttttaatggaaaatttatttttattaactaataacttcaactatcaaataaagtagcaaaacagactccaaattaaaacgacaatgaggatataatatagcagctctagtgaagttatgagtcaccatattagctgattgttttactaaaactacagaaatatttctcagtaaagcaagcaaacgcttacaatcatcaattacatgtctataaagaaatcatagaaaaagtgtcttgcagagcttgcacgactaaaagacaatcagtttcaagagacaccgactgccagtatggcctttgatccaagaaagtgcttcccggactcccattgcctctgctacctctgattctacttgaccaaccaagaaggtagtacgaccatcaattagaaagtcgtttgaatctcgagccaccatgccaaagccaaagccattgtccctctcaaacagagttacatcgacattaatcttgatactattaacctgtggaaaaatccaatgctcagccccatcacccgcctgaattctaggccatgatgtctctagagtagggttttaagcatgtctccattgatcaagatatcttttcatttaaacttagaaatcagccataaaaatggcaactaactcaagagacaaaagaatcttctggatagtacgactgggagaaaaaacaaaaagtacgcgcaatacaatgtatgaccttgttagcagattgattaataaaacataacgacatgatttaaatagtttagaatagttttactatcagaaacaaccaaaccaaattctgaaggcactcataatcacttgtacacaaactaaatttctgtatctaaaaccacattgtcccaatgatgatcatcaatctaactcagaggttctttgataccaataatctatggcacttccaatggaatacgactcactttgcccctattaaatacctccaacaacctcccatcactatctcgagctacacattccataccaaaccatccaacatgctcaaaaattgcactgccaacgttaattttgatttgattaatagttgatgtagtccgttgctcaataacttaccatcattcgaagcgattataaagaatcacatttttttgttaagcatataaatattgatcaagtgatactctaacttattatacaatagaagaagcattatatgatttttgattccaaaccatattattacgtgctccccaaatctcccaagcaaccatggctgcctcttgcaacataccaacctaagtcatgaccaacaagaccaacaagaccgtgcaaaggagcagcccaccaagacatgaaaaattgtttcaacactatcataacacaacaaacaagcaacccttacagggacatgtttctttgctagttacacacaagttggcaaaacattcgacatcgctcgccaaaaaaagttactcactttcggaggaatattcaaatttcataattgcatccaaaaccaatagcgttattagaagaccaactattctaaaactcatctaaatatctgtaagcacttttaaccgtatagaagtcaaaactcttaaatcgtcaagatcagcaatcatcatgaatggaagaactaagttgagtagacaaaattaactcccaactttgctcttcaaaaagatcacgaataataccaatatctgattcacgaacctccattctctaagacttgaaatagtttttccaaccaaacttggatgcgaagacatgatttaaggatttgccacatcagataaccaaggatcattaagaacactaacacttaaactagaacccacactacgacgaactccacccactagagagtttggttgagaaaacaacgtccacccttacttgcctaaaaga

SEQ ID NO: 201762 - DNA, 609 bp, Cannabis indica
aagccaaaacagctacagggcaatttttatgacttattaccagccccttttataggctatgtttactccttggataacaaagttattgggtgaaaaaaataatgattttctacaaagaaaaagctcctacaggaaggaaaaccaagtggaagatgaacgagtatagagccattgaggaagtaaacaactcaaacaacatcactactctaatggtaatatatagctatataacaatacttataatctatctttttaatgaaacaccttccatatctaattgtagctgatcatctctaccatgaatttagttaatctttgtacccatacacattgtacgattgctcaaagaaaaaaaaaacgagtaccaataatatcaatattgggggcatgtgctgaacacacttaagaatatccatattcaattaattaatgctgattttgttcttcttttctgatttatttatcatctgggcttgaaaatgatctctcagaaagcattgaacttacagaggtgaggaggatgtgggaaagcttccattctggtgttgtactcaaggactttatgggaatcagttcaaaattattgacaagataaaaaccctaattttg

SEQ ID NO: 201763 - DNA, 1145 bp, Cannabis indica
attaataaatttttgtatgttggtaaaataattgctatgggagttttcatgctaaaattatggttgaagaactcttacaaatttatgataaactaactatcgtaataggaaattattgtcttgattactataattgttttttttttggcattaccactagttgatgcattcgtggaagaaattttattttaatttttttccccattaaaaaaaaagcattgttattgaatatttttagtgcttaacaccttctagatgtgttactttacaattagttaacgatattaaattatacgagacttgatacttaattgtactaatagtggttttgacatgtaagaggatgatagacactactgccaagggtatcctaggtgttcaaaataatttgattatagggaatattatgaaggagaatatgattgtaggaaaatatgtaaactgtattgagttgtgtagtgtaatatgtaaactattatgcttgattttttttaattcttttatttttccttggaaaatggtaccaataattagtttttataaactaaactatatattatgctagtagaacattttagtggtcagaaatattgtactttggcttatataaataaaacgaattaagtaaacttcaacctcaaattaatacgaacctcaattgattaatgtctagctacctaatacaaacaaatactactactattttttttttttccaaataagaagtatagttttagaagccatctaaatatgatttcatctttttttttttggagaagaatataatttgattaataataatataggaagtattgtgatattgtgaaatttaataatatggtcccaatttgaataatattcaatagaacctcctagaaacgtatagtgccttctaagccacacttgaaaataaactataagaacaccactcctatcaacataaagaaaccattaatttttgatttaggacatcctaatatatattttgttcaccaaattaaatactattatatataagaaggacactcctatcaacataaagaaaccatagtttatgcataaaaatttgtgttgcaagtctctcttttaaaacactagcacaattttataacttatgaaaagtaatacttattacaagaaaattt

SEQ ID NO: 201764 - DNA, 1754 bp, Cannabis indica
gtgtactcaactcatgagacattatgatggtagagagaaagggactcacacgagtaggggagagaaagagaatgattggtggtcattttgtttttagaaaataattgatcgatccttttaagtcaaatgtgtatatatatagtttttatttaacccaataaaataaagataaataaatcatttattcaaatttaaataaataacttatcctaactaattatttaatcatttaataataaatattttatcctataatatttttaattaaatagttacttatttaaaattatttatatgataaaataatcgaaacaaatcataccgtctttcaaactgtatgaatgtacagtcataagcatgtgacattattttaatgaccgaaattgatttttcattcttttttcttaaaaaatatttataatttattctcaatatataataaatgattaattctaatcattatcttatttaattttagattaaataaatattattttctactaaaataacatattatctctcataatattatttaactaataaataatattatattcaattaatacatagttttaataaataaaactaaataattaaattaattaattatttaattcataattaaataatcattttcaaaataataagaataattttcaaacaaaattaattctttctcaaaataatcaatcctcatattaaactacctcatttataatgtggtatagaggtaatcaggagtacaaacctatatttctaagctccaataaactcaagattactagatctcataaatatagaatttttctcttagacaatatagaattatatttatagaattattctttatagtccattcatataatctatacaggtagtttgtcctcccgtttattagttcataattaaagctagtcaaaattattattttatccttttaattatctcttaaattgattcactcacaaaattaacactttaagaaaactaatatttaatctttttggaaaacttaaattccacttgttgtatagcatgttctcatgccatccttgttaatgttatataattgttgggtcccatttcttccaccttgttgggtgctagtttaatttttagacactttctcacaaaaatactcatactaatagagttggtagaacacttatatctaaagtaactcttacatattctttcgatgtgggacttgagttgataccccaacaataatctattctgacattaaaaaaaattgaaatgattcattagttttagttttcttttttccaaaaaaatttaatgattcatcaaatttagaaaagaatagaagagttatagttaattaactaatttgtggcaacattgtacaccattattgagtggtgcaagtataattattgagtaaagagcattaaagttagagccaaaaagatacaatcaattatgatgtgatagccaaccaattggtgttacacaaaaaggttaatggtagtcaatttatattatggtttttgttcttttcagctctaacaaatttcaatggcacaccttcatagcataaccacacttatctttatttcaaaaagtattttgtaaagaacaaacccttttattgaaacttgtcaaatcaatactcaataccactttgtgtatttatacaaatacaaaaattgtaagaactactaaaaaaatgaagtctttcatatatagtagtatacaagctggtgattggtaatgatggtgttactatggat

SEQ ID NO: 201765 - DNA, 921 bp, Cannabis indica
aaattgtgtgggattttcttgtttcaatattgtttcggtggagattaaatttgtatcgctaacaatcctcaaatcacacctgaaattaattataattaaaaacataatattacaaattcatggaaaataataaaaggagcaaagagtagtgttttatataaacataatatatatgtagacgtacccaagagcgtgagcagctttaatggtaggaacaactctaggatgtaaacataatataattgtgactaattataaattattattgtgtttgtgactaaaaggtctgtggctgaaagtatttgtccaaaggtgaaccgtttttccattccaaaccaggtcgttttgggcgcgccaaacagctcaacaaattgttgccattgtacataactgatccgaggtagcttgctgaaacacgcgacggcaccagtcaagaaaacaagacccaggagtgacagccgtgcctattccaactcgattccaacactgcttgataacacggcaagttaccaaataattcaaaacactctcctcttcttccatacagatgggacaaagcacattaacatcgacccgctttgttctgagctgtatcattataggtagacattgagtggacgcccgccacagcagattgctgattttagaagggagtttcatcttccacagcttgcaccagaaggcagcaatctcatcatcaaacctgttatttttttgtttctgcagaaaactatacgctgatttgacagaatatacacaccagagttttcaaaggaccaaaacaattggtctgttgctgcagcagaggacaaaggatactgaaaattaaggtttggtcccttgcctcaaaaagatcagcaatgatctcatgatcccaaccagagccatccatataaagaaggcttgccacggtaacatcca

SEQ ID NO: 201766 - DNA, 1093 bp, Cannabis indica
atccactatttctcctctcaggtcaatttttaatttttatcttattgtgacttcttttttaagctgaaaaaaaaattatatattatttttttatatgttattttaaacaataaaaattgttcttatattttttttaattatattttacactggttcttttatatttggagaagaaaaaaaaatacacaactattatgtgattaaaaaattaaattgtatcattattaatggttaaaactaataactaatttattagattattgtatggctaaccttattttatatacttaattaataaaaataaataaatttgttaacacaaatccacaataccatagtataagaataaatatataagactgtttttgtaaaaatagtctttgtgaaaatttttattagcaaaataattttataaaaaaaaaaacattattagtaaaataaccaaaaattacactttacgaccagaaaatgaccataaatttacattacacaactatcatagtcacattgaggaaattattttgtaaattttattattttagattgttagtttaataaattctctaaaatataaataataagattaagtttttaacagagacataaatttttgtcaatatttatatttatgtattgttctgttttttttttttccttttattaatatatatttcgctgtatatatattaattttttttattattattattcaactttaatttttatttctatcttttactattgtgtagaaatatttgttcataaaacttattcataatatattttattatatattaaagcaggagtttgataaatttgttatgataattacattaatttctattttctctaccataaaactatggacatatgtatatacatgataacgtaaataaactccaaatgattgtataaggatcatactgctaattacgagtttcaggatctagcgttgcaaaattttggtactccctacaacaagtaaatcaatcggccctggaagtgacttttcccttgaaaggttttgcatgtactaactttcttacttaatatgtttgatctatgaattgtatattgttagttgactttaatt

SEQ ID NO: 201767 - DNA, 1002 bp, Cannabis indica
gaacacatagtgataaccagacctagatgctagaggtggtatataacgttagttactttttttttgttttggtcatatattcgtgaaagaaattaactttcaagttggttatattataataaaaaaaaataacaaaaatgaagttcatgtattgttgttttataccattttaaaaaatacaaaattcgatatatcatttaacaaaataaatgatccaattaataatttttgcaaaatataaaattcaaaataaatattatattatactgtacaatattatataatgagcattattaggtagcatcttgttagttaataatattctataaaaattacaataaattatataaaatgcgatacttaattaccctaataaataataaccatataacactttagctaaagtatgctaaacataacatttctcttatacaataggtcctaacaaacgtgtattaatatcttaacttggttatattgggtctcaaacaacacactacaaaaaggagcattccttctaacttcaaaatgaagcttatgtttaaactctctatgaacaacatttacgctcaaatgctcaatcattccctaagacattcgatacatgtaccaacatctcccacaagagtactagaagttgactactaaaattatgtttgagctactaaaattacaactcccataacaaaaggtaacacagatatcaataatgttgtttttcgttaggagaaaacatgtgtatcagtgaaaaatctaacagttatatttttctgatactggtttttttttttttttcattcgaatcgtcttatcaaaatatatagttgtgacataaagccaaaaacacgcttaagaaaagacaagacagctaacttgatgttgaccataatgttgaccctttgaaataagatttgtattgacagagttgcggtgccccaacatgttatagataatattctatagcatatttaatctgttaagtgtatctctaataaaacacta

SEQ ID NO: 201768 - DNA, 718 bp, Cannabis indica
ctgattgggtttttgcgagaatcggaactagccttccagggaaatcttgatttttttatgcggatgaggtcacttgtattgttttcgcacattcaccacactgaaaagatcttctatctttcaaatgagcgacttgtcggacagccagatacttggctttggaggtaatgcttttaaaggtgaccaagattaggaggataattttatccctacctcgatctcagaagtggagaccccaattgtcggagatgcggagttgggcccgttgtcttccgaagacatagaaaggatggttcaggagctcgctgaaccggggacaatcgagatctgtgatagcgagtctacggtgtcagctcatgaacaccttgttcattctaggcatgctccggatgttgaaactgaagagatgggggagggctgggaggttcctggccgcgaatcagatgaggacgaagatgccgaaggaagcgagactgattcagtggacaacacgcaactgaatgaacctttctcctgcgaggacttggtctcatgagtcaccaaatctgacttgaccaccttttccaggttaaatttattgcaactcggcaccatgcgtcctcgccctacccaaagaccgcaccttccttttactaaccccccaatcataccctcagaggacgttgtagtctccattcccattctttgatgtgggatatcgattcctttccatccattc

SEQ ID NO: 201769 - DNA, 3137 bp, Cannabis indica
ggcaaggctaaagctgagtagccatgagagtgatcagattaagattgtacatgtcggggcggttaggcttggaaagtacaatctttgggacaacaggttgtacattaaatggtcgctaaacgacaacttttgtattaaatattttgtattatgtttgcaaataattaaaatacgtgattccggttatgtaaaaagatatttattttcatttaaggagtaattaagtaaaagttttaataaatcacgattttttataaacccgttaattagcaacagattgcacaattattattaaatcacgataacatgcctaaactagtagggtgttataatttggtatcagagccgcaaggttgtctttcgaagatcgtgacgacatgtacaatcatcattagagataagctcaactcatggttcagtaagcttttattgctttagtagtttatttcattagtatgttataagaaaagcctgataggaagcatgttagtagccttatgattgaataagcacatgttttagtttctaaaataagtggtgattaataaattattcttgaccgcgatctgacaaggctagttcttggttttgcgggctatgtctagtgacgttcagggagtttagtttccctcgtatagacgtggctgagacagaggtccaagaggcagagcacgcagtttgggagatgtcaacccaccgcaggttgccaaggatttggacaacaggtttgcagctataaaagctagaattaatgaacaagacgaggagattagaagtctgaggcaggcagggtcggttgttgttaagaattggatggaaccactgtatagaaggttccgcaagcagacacctctagtctttttgggaggaccagacgtcatgagaactgagtagtggctgtctatcattatacggattctgaattttataagagtcattggcaacgacagagtggcttgtgccacattccaattccaggaggatccatggtctggtgggatatggtggctttgacttgggatgtcactaccactacctgggaagagttccagtaattttctatgcagagtattacaacgagacagtcggaagtgcaaagagaatatgactattattgagtatacaactcaattcgataggttgactaggttggcctcaggaattatgccaactaactttagtaagaaagagaagtatctagatggactgaacccaagatatgaccttatgatcaccaccgatgataatatcacgactttacaaggcttgggtttgtgttccgagcaatggtgagctcaggaaaaaaaaatgcttgatgagactcatactacaccttactcattgcacccgcgtactgacaaaatgtactaggattttaaaccctactattagtgctgcagaatgaagagagatgtaatagaatacgtgtccaagtgcttaacatgtcaattgatgaatgcagaacatcagaaactggcagggttactacaaccattaacgcttcctgagtggaagtgggaggattttacaatggactttgtagttagtttacctagaaccacaggaatgtatgattcagtttgggtcatagtggatcgtgtcacaaagtcagtacactttttgccagtaaagaaaaattacacaatggaccaatatgtcgagttgtacgtaaaagagatagtacatcttcatggagcactgaaatccatcgtttcggacaatggatccaaaatttacatcaaagttttgggtgagtctttagagggatatgagtacaaagctgatgtttagcacaccttttcaccctcaaactgatggacaattctaaaggacaatacagatgcaagaagatttattgcaagcctgttttatggactttgagtgatcctagagtaagtacttgcctttgatataattttcttataacaacaactattcagagtacaatagggatggctccctatgagatgttgtatggtagaaaatgttgctcctcaattcattgggatgagaccggggaaagaaaatatctaggtcctgagttagttcagaggaccaatgaggtaataaacaagatcaaggtttggatgcctgcttcgaaaagtaggcaaaaaagttgttctgatcctaagcgtagagacattgaattttaggttggagaacatgttttccagcgagtttcaccaatgaagggtgtaaagcgctttgggaagaggggaaagttaaggcttagatccattgggccattcgagatgctttagaaggtcgggcaggtagcatattggctagccttaccactagtgctatcgactgtacataatgtattccatattttgatgttaaggaaatatgtatcaaagctgactcatgtcttgagttacgaagccctgaaactacatccaaatttttcctataaggaataaccagttcaaatccttgataggaaggaaaaggttctttagaacaagatcatagcattggtcaaagtactctagaggaagagcaaggtggaggaagccacatgtgaactagagtctggcatgaggactcaacatccaaagttgttcaagttagattttgaagacaaaattattttaacgggaggataattataatgaccgcatgattagattatggattagtaggaaaattagcattaattattgataatttatgttatgcatgattgtatttgttgtgggttctatttctaaaaaatgggcattaaagttataatttctcaactatggagatcttattactctatgtgtattagtaatgccatatgtgaaatttacattttttatgatttttgctctataacgataaaaaatgcgacagatgatcgttagagtccacgagtgagtttagagcgtttgttttagcggagtattcataaatgatattgggaatatcaaggttaggcggggttgtggtattgaaccattttacccctaaacctaagggttacttaagtgtgagcaagtggaaaaaatggaatttttttcaagagatttatgttgtctttagtgttttggttttattctgattattagttaagtttttaatttattcattgtaaaataaacttagaaaattaagaaaattaaaccattatccattctctctctctctct

SEQ ID NO: 201770 - DNA, 845 bp, Cannabis indica
aaactgaaatcaattaaacaaactaaattcagactttgaataagatcaaaagttttttttttgaatgattaacctaagcaaacctaaattcttcaactgaaaatattcataaaatatataaaatttgttttaacacatatactaaacctagacaaaccctgtaattgtcaagaacaaatatttttaggatcccaaatcaaaactaaatattacaaacgaaataaaaactaatcaatcaaatctaagccaaaactcgattctaaaacccttgatgaagcaaattacatgttgattatacaaatttttattatacaaagaaaaactaagttcttgacaaatttttattatacaaataatcgaactcgaagatttatttcactatttattggcttccaaagagcgaagataggctatataagtagaatataactcgacgagcgtttctctcgagggagataactcagccacgactagattttccatgagaaaagtcttagaccattgatgaagacatggaaacttttcttcttggaataacttcatctccccaacttcttcccatacatcaaggcataaaggaatccaacccaatgctaaatccagataaccaatgctttctcctccgaaatactttttcccttcgatttctttctcgagaaaacctaaagattcttgcacagattctatcagtttttctttcccttctccttgagctttgcaagcttcaaatgatcccatcgaaacctgaatataatagcaaactcatttatttcgtgtcaaaaaatgtgtccaaatctttgtgtgcctaagtgtcatctacagagtctcaacaaggataaaaggtt

SEQ ID NO: 201771 - DNA, 1051 bp, Cannabis indica
taggctaaaaaaatgtaagttacaataaaaatgtaaccattggaacttcctccatatatatatatatatatagatatctacattgtccaataagttattattagtaaacaactgaaattttggattctaagtttgatttctctaacattttaacaaaggtttgaactttattatgaatttttcaactagagtttcgagatcttaagccgtcattaactgttagagaagcacatatatagtaaaaaaaaaattgtttactttgtcaatatatatattgtattcacattcccatgtcactctttgggatgcaatacaagtaataaataaaaataaaaataagatgaatgtgaagattataataaaagaagcgaataatatatgttgcccttaatttactggcgatggaaagtagtcaaaattaacgttgaaaaatttatgaacatatctagaagaatttcatctattggcctacaattttacaacctaaaagattataagtctaagtcaaagtcacatactaccatgagaatcgttacaaattctaaacacacgagtatctgaaaattccaaaacactggaaaaaaaaaatatttgatgttgatcaaatataatatcgatccatgcacaaaagaaataatgtacacatattaatatatttacataaagtataatattttatataactcccaattaccatagcatcatatgatcatcactcgcaaaggttgaaagatatatatgctcctataccttaacaaaacaatattatataattatatgttaaaaaacatacatgtgtacttgattggaatttagaattaattagagctctgttatgtttggattcaattccaatctggattctgctaaaacaataaaagcaaagttgttattgattgagtcaatatactacgtacgttacttaggctatctcatcaaaattttagatatagcatttctatgttatttgattattaagaattataacatgtagacataaactagctaaaccagtacgtacgtaagacatatatatatacatattattaca

SEQ ID NO: 201772 - DNA, 962 bp, Cannabis indica
tgtttttttgtgtgttggagacatagaaatgttctctttcttctatacttagtttggggtaagtaattttatattactaaaaaaaaaatataatattggaaaaatttcaaaaaatatggaaaaattgaattattagttcttataaatatagataaaagtaggccactaaaatacttttaattgaattaattattttacaaattaatgtggtggtaactaattataatcatatcaataataaagtaaaaaaagaaaattgattgccgtaattaatatgaaaaaaaaaatccaataaaaatataaaagaattatccatatttatcaaacttatagacgaaaaaatgatgtaattttatctaatattctaatatatatttatattatttttcattatcttggtaattttttgtaagagctctagctatcatttgtgattttgtggcctttatttcagaaacgagcattaatttggtcaaaacaaatgggcttcatattcaacggcccaaatagaattcctattgggctttctgttagcaaagttgatacattatgatagggaaacttacaaaaatactgaaattcgggttaacttttataaaaatactgtcacacggaaatttttttcaaaaatactgtgtttttataaaacaccagtaaaacacatagcaatataactcaaaacaacactagaacactagtaaaacaccagtagaacaccaatgaaacttaacacagtatattgcagtatggaacttataaaaaaacacaagtaaaaaagtaaaaaataccgctggcagtatttttgtaaaaaaatgacaaaagttagtataccatgtaaatttcccttatgatatttctttgttattgttgaaaattggagtggtatttttctaaagaaaataacatttgtttaaagaaaatatattggtaaaatctaattttctattattttggagtggtag

SEQ ID NO: 201773 - DNA, 601 bp, Cannabis indica
aagcaacatcagacctagtgagtgttagatattgtaaagcccctaatgtactcctatacagagtgtgatctgagaaaggttcaccactggttagagacaaaacatgtgctgagcttgtaaggctaaaattaggctttgcaccttccatatgaaccttaacaagtaagtctgaaatgtatttagattgagacaagtacatttcagttgagtttcttattattttgactccaagaaaataaagaagatctcctaaatctttgagagagaattctttattaagaacagagatgagttggaagattagcttcttgtttggacttgttacaagtatgtcatctacatagacaagtagaatgacaagattgtgatcattcccataggcaaacggagagctataatatcgagatacttgaaaccctttgctgattaagatagttttaagtttatcattccaagcactgggagctaacttcaacccatagacagctctgtgtaatttacacacatgatgtgacttagtgggatcgacaaacctaggtggatgctgcataaagatagtttcttgaagattgccattgagaaaggcatttgagacatcaag

SEQ ID NO: 201774 - DNA, 1358 bp, Cannabis indica
cattgagtatcaaacttaaaagcatgtgaagataaaagttatttgaaggctttttcattattttttatgtttttcattggaaaagaaaacgaagagaaagtctgtaatttttctattccacctaattaaatgtaaagcacgttttttgtaatcatcacctggttccaaaaaaacgaaaaaaataatataaataaatattaattaaataatttccggtaaaaaaattaaagtgacactacactaatccgcccgccaattcggctcgacttaacacggtcgcacaaaactaggtaaccctttgagtccaaactcaaatctcatatttgcactttttatacacttatgaataagtaattctatcctatgtaaaactaattgcaatatagtatagctagtatatttgacccagagattctcttttcatgagtggtgtgtatctttctccttttcttgtaaaggtatgtacccgcagatactctatgagatattccttattaggtccccagcttgcagcacttgccatgccctttattcccaaaatctctctgagcaaccaagttgatcactgggacttggcgcagtagtagatattatatgtgtgtgtgtgtgtttacatctatatatatttatagtggtgtgtggggacataaatgggtaaaaaaatattctttcttatcccggttacctttgcaaaatattggtatatacccttaggaaaaagaaaaagatgcttctctcttcactcatgcatgatgttatgttgcctatatataacggggccaatataacagcaaatatatgtatctaatatatctttctcaatatattaattagaagactaaagacatacaattatggggtatatttggcaaaggaaacctaagattatcaattcttctaactctacggtaattattatatattaatatattatctcactcctcaatcgtatgtatatttatgcaagccacttatatcaggagcttaatatattcagtttaattattaattattattgtaacttgtttagggtatgtttttcttgtctcatattttgttttattttctcaaatgcattgcatgtctttaaaatgtgtcatgacactaaatttgtatatgtagctagctatagataggtgcatgtcattaaaaaatgtacgtagcaaagactaggtacatattaatcaaattgatcaattatatatgatgattatggatggttttattacacacgtactgtacagatggaattgatagttcatatggattgtggtggttgcgaaagcaagataaagagagctcttctaaacttagaaggtattggtatattgtcataacagttaatttaatgtttattt

SEQ ID NO: 201775 - DNA, 1364 bp, Cannabis indica
cttcgttgatacccaaccttgtacgatgaaattttctagcaagtacccttgagtattgttgaccagagtcttgtctaaaccttgtcgctttgttaggtaactcacctcccctttttttttgtgcagatgatctcaagtgactattagggaggtgacaaccgcgtcaacaaatatttacttagtcttctcttcgaggaccagtgtccagttgattcctctagcagctcctcaagtgatctcgaggttagtggtggttcattatggcaaggatcaagctgacatgctgcagggcaccaccttatgacccttatattgctaggttgtgaggaggctgcacaacctctggatgacagagagccaggggccggccaggctgaggtacctgtggccgagcgagatgaggagagcttggatagcgagtttaaaaataccatttatctctatagtaaggattcaaaaaaaagtttttgtctatagcccatttcaacttaaggtcagccttatctctgatgcatggttttcttctcatttttctgagattgacaacttggttttgttttttgtattctctacgaaatcttttattgtatcgactttttaagatatttgttagagaatattactagtttagttatctatttttttaaggtatttcgttcatgttcataatcatgaatgagcagtacagttggatggatagtgaactagtttgaatggattcttcgacatttcttcaaagtgtattattctcgtattatttttcaatgaaatttttgttaattgtttaaaatatataaataagtattataagtaagtaactgctaattaattataaagtatcatgttaatgttaagtatcacgttgatattatactaaatatctaaaagagttaatagaaaagacaaatgctcgttatttatgatatgaaattatcctggaacattagtttcttggcaatattaatttttttttgtttttaaaaaaacttatttgtttaacttgtttttgaaaggttaagtctctatttgttaaataatattagttttgttggtttttatttatttatttaatatatattctttagtttatatattatataaatttcaaatattgattttatttttaatattttttatataaaaaataatgtattaaaattattgattcttttttttaaaaaataaagaattattgagattgttaaatttaaaaattttaatttaattttattaataaaaatttgagtttattaaaacttgtttaagggtataattttgtgcatattaacaatttaatagttacgatttaattaatattaaagtttaaaatacataattttttttagtacaattttttttttttt

SEQ ID NO: 201776 - DNA, 1416 bp, Cannabis indica
ttgagtaatcaacccactctagtcaaggtgatacttaaatctttgtggaacatcgtgttgataactgttaccaaataccaaaaaaagaaaaaaaacatctaggtttatcacttggcaatactctactacaaattggaaattaagggttagagtgattcaatagaaagagtcgctttatttcgctataacaaatgtaaggattcaaaactctaccatatttattttatcgtttagtaaataatattttacgatgtgaaattatcatgttaataattaaacatacattataatttattatagtaaattagaacttgataaaataatttccaaccaacacatcatacttcttagttttagttttgtcatagtcatatgatcaattttctttaccatttttgttagaattatagaagtgataaaggtcactaaataagcggataaattttttgcataaaaaatcatttttagaccaagtttcgaaaatcttagattgtttctctctctcttctttcacacatttaaatataacatgcaatttgaatgttatccacattcaaattgcatgtgattgtttctctctcttcttagattgcatgtgatttgaatgttatccacattcaaatcacatgcaattttaatggtaaggaaaaataatattttttgttttcttctttttgaatgaattagccttaaaataaaatgattattaatgtaacaatcttataaacaaaacatgtcttaaaattattattgctgaagcaaataagaacaaaattagggaatgaaaatataatttgaaatcgcagactaaatcgtttttttttaagtatgtttgttgtacataccaaaattatacaagcagaccatagataaacaacttagtactataactcgctctatctcagctctggaatgctctattagggttctcccttcttcttctggtttctccagcttgctcttccttgtgatgattaagtgtaaccgtcgatttcacttcctctttcttttaattttttgtcttttctggttaataaatcaaagacatttattgcaccccagtaaatctaaccatatctatttgcatttaatacattatcagtccaaatttgatccttatttgttccttaaccacaagctttcccagtgcgccgtcagtgggggaactgaggggatttgggcgatgattatctctatcatcgagggattttgccaggctccatttaatggagagatggattgggtacttcctatcttctatcaggcgtatctctgttgcaggtatattttttctctatttatatgttattctccttttaactatcgctatcactctttctctgggcattattctctttgtgttttttcttcttccttctcaaaatcctctctgagtgttatggcgagttctagtcg

SEQ ID NO: 201777 - DNA, 3633 bp, Cannabis indica
acgagtcattgttgctttttcaccaggtgacttaaatttttaataatggctcaaaagttcacaaatccaagacccctcataaccctatgtcactttcaaggctgaactgatagaatccaagggttagatccatcaacccttatgtccagggatgtcctgagatcatgtggcatcaaaaactaagaaaggttgtcgcattaggtctattgcgtagggtgaattcagttgttatcccccctgaatgcctggtctgagatgaggattgtagcaccagtgagccttccaggaggcttttattatcttgggacccacataaatgattataagatcattgtgaggttactcaataaaaaggagtttaaagatgacttcttttggacctctggtctttacccaatcatcataataaaattttgaattatacgtaagtaacaactcttctcaaattcttggttttaagttttcttttgagaggttttttttatactttgctaattctattctttgctgtgtttccagcaatcactaggagacccatccccagtccagagattgagaagaggcataggattccttttggccttccttatggtctgcgagcggctgagtttttactgcatgataacaacttgaaggcatgcgcccttctcaacaaagatcaactacaaatgacttcacgatccctaaatttttagactgacatcaagttctagtgactcttgacgaggaggatcgagactatgtggctcacattcgttatttaaggaatgtgagccctcgagaagctgaagatgaagcctcccaaggtaataattttggtgcttttggatggtccccaactattcttagggctgagcaaacaacattagttcaatttagagatagccaatataatttctatatttgaaactgggtagacctcatcgctcattgtttgatagttggtaccctaaacacctcgttcagttgcactataatagttcttattttgggattgctagtcaatacaacactaactttaatggggctggatgttcagattgggacatgtctccacttaatccttttgacattttcatgattactggcgctagggaatttagtaattattatagcactacttcctcgtctgatgattatggtaatactcttaagtcagagattaactcaccatatttttgctattttatttgtacaagtgttgatgtctcatttatcgtctcgcaggaatggacttctaagatctcttgtgtagcccctctagttctaccaagagaagtaagaagcgtacgactttgttagaaactaccagacgattaagaagtctactaacaagaaatgtgcctcgactcaacttgtaatcgagaaagagaataccccagacacttcctcgacacctgctgctgcgagctctggtgaacaagacttagggtctgttcatcaggttaaattctttggatctcaacctgaaatgctattcttggaggcctcttttccctacccacctttgcaggtattgtgggctcgtaagtatgctcgtagtacgctaccacttgttggcgccactataagtactttcataggatgactaggagctgatcaacaggggaaacttccaaagcttgacggcaaggagtattgatctcttacattctgttagtcaatacatcttcttatatatatatatccttttttttttataccctctttttcataggcatgtcttctatccttcgtggctcagcaaagggtcttccagagtgttaaccaacttagcaccaaactttgcaagtctaacaaacaacgcaaattcgttgcaaagcaatggaatgactatcagccgaagatatttctgttgaagaagaaggctgaggaacaagagaaagctcataaggctgaactcaatgctacccaaacaaagccaaggatctcctcaaggctaaccagaaggcccaggtagcacttgatgacgctaacaagaaacttgaagaagctaaggctgatgctaaggctagagtaaacttgattgccaaacgatctatttatcaagcttgaatggaaaatcctgatatggaattaagcttcttcggtgttggagccgacgagatgcttgatttttgtgagcaaacaaaaaaggatgaagccaaggataccgaagagggcgaggttgatgaagaagaagaacccactaagtctgccactatgtatacttagtttttattattttaatttacaaacaatggtcattaggccgagataatattttgccccatgtggcatttatgtaatataaattttaacttgctttgttggatgacaaacatagctatattaataaattttttcttatgtcattttaccttgcttttctcgagttgccaacatttatttaatgtgtttttccacaacaaaacaattttctcaatttagattgggatatatttcaagcttacatgttctcacctaattaaatgcattttggcattttcatgaacaattaatattctgtcattttgtatgcgagcaattaatattctgccatattattcacgagcagttaatattttgccatgttatttgtaagcaattaatattttttcattattattaagagaaaacttgaaatattttgaacagttattttgaaattactttaaatatttcttgattgctcgtatgaatagttaatcttctattcatactttagcttgcatactatttttcaagacacactataaaatcttatttatgatacatgctataatatgcgagctgttatgtattcatattgcacttagatttatgttgttttacgagacaaatctcatttacaactgctattttaatattttactttaaggaaggttttaaaaaaaatttaattttatgctgttccagactagcttttaatcaaacatcctttattttttgtacttttttccaggtctcttagctaagcgagcctagttctcttttgcatatacctctaggtagaatctaggtattgtatatgcccctaagtaattctaaagaaataaattttgtgattacttgaaatactccaaatatttatttaaaataaagtacaacaattataaagatgaaccttaatattacaaaacaaattactggtaatatagccgtaaatgttccttgttctagtagttttttttagcaagccattaagccatgataatttgtaaactccagttccaactacaacttcgataacatacaaaccttcccaatttaggttgaacactcttgctactggatctcacatattcataaacacatgccttaacaccaaatctcctactttgaagagccttttttgaactcttttattaaagtaccttgtgatatggtgttgataggcagcattgattatctgtgattctgtgcatttttcttcaagcagatccaaggagatacttataagttcttggttttgttctccatctaacagatttttgacaataggtgtcatccatgtagggctcgcatctatcatgttaatattttccttttcacatatactaggctcgtacagtacctccaccaggaccaagttcaatttgtcgaggtcaaattaagatgccaattttgtcaaggcatctgcattagagtttt

SEQ ID NO: 201778 - DNA, 1838 bp, Cannabis indica
aacttctaaaataggtgttaaatttatagcaaataaattcaaagacaaacacccagtcgtagaagatgacaactcggacttcagtccgcccattaaatgaaatcgtggacatacgaagaagaaacctaaagttttcgttactcaaaaaattctccatctaagaataggaaagggaagattgaagttgctcatggttaggaggtttgtttatagtttctttaatttttctaaactttgatattttgtgtttttatttgtgggttgtgtatattgttttgatttacttttagggtttagatttttttgtattgttttttagttgattttaacttagtgtaatcattttgttccttgaaattggtttttatttggattgttgcttctcattttttgtgagtattattttttgatttttctattttttttatgttttttatatgctttatcatttttattaggcttgttttaatttgtgttgatggttttatttttgatagtagtgtgtttattattttttgatagttttttttaaattgtttctatttatggttttggtcacttttctttataggggtacgatatattcttttgttatttttgtttatcattattttaggtttattgatgtttatttatttgttattatttgtattcgtatgtgtgactgtatatttatagtattttgtagtttttatatagttttgaaactatatagttgttttaacattaatgtttctattttcatgttttaaaagttcttctttttttttttatatgcaggattgtgtttacaaatttagtactcgagattattacaaatctaagtgtgttactacatgcccttattctgacattagtaactaaagaacactatttttgataatttgttgaagttgttctgagatacacaatttggtcatttttttggatgttccagagtataaattccatccccaaattgtccacagccttttattgagggaggttaatcaacccaattcaaaagaattttgggcaaaggttgttcgtcgttgtattcggtttagtgcagcggagttttatttgatctctaattcggattgctttggtttttgtaaaaaaaatgatatttatagccaagaatcaaaccaattggtcaatatatgctttcttgtaactaaaatcattgactataagtctattgaagatacatttttgggccctaggtggggcaatgataattatcttagtttgaagttgattgtttcgtatttcatacatagtcttcttttaagtcacacacctgagataggtcagaattagatattattaataacgatcggtgggatgagtactgttggagtagggagtcattcgagttgacaatagattcattcaaggaaaaaattgatcatgcgatcaagatgaaaaatcagaaggagaaaatggaggtgagacttatgatggttggtattgaacattggggtgtttgtgggtgttcattgtctggtttatgagtgttgtccagagatgcttaattatttttgtaaacgagttacatctagtattctgagaattctcaattgggcgaatgatcttaaggccaaaaacctaacttttaagcttttgaaagataagataattgatttgcctttaaagtcggtgattctaagtttgttaactattttattatagttgttcccctagttttcttttttttttgtttatgttttttgttattttgatttggtaacttttgcagataaagttgaagaagattcttcctactgatgaaagaaaggaaaactcttaaaattggatggcttatttgtggatgaatctattgatgactgtgctcc

SEQ ID NO: 201779 - DNA, 739 bp, Cannabis indica
tttgttccttatcagttagtgtgaggtctgctgttcctggtcgtggtgaaagattttaaggggttagtatcattgggaaataaatttcacgaaatgctacgaagagggccttcccaaactattgctttggaatggtgtgttatgcagaagctttcataggactaggtaatagctattccaagaacttgtgctgattctttatgttcaattgggattggttggtaatggaatgaggaaattgttgttgaattctgctgtactggccatttgttgggctgtatggtttgagagaaatctaagaatttttacatatttgagaggaaatctgggaaatagttaaattttggctgtaaattgctaaagagtttatgtatatcacttgttctgacttattaagaatttgagagttgctagactagactggtttttatgttgttactctggtctagtcatttcgttattttgcaattggctagtctgtagcacacttcttccccttacaagtctgattgttcattttttttttctctttcatatcttcatgttttatttatatcttcatttttctaaggaggtatatttttcaggcattcaggcatttatatgtacttgcaacagaggctcgctggattcaaactgttgatgttgacactggtctacctgtgtatgcccctctgaagttactataaggaactgaccatatgcagaacaagcttctgcgaggtcactccctgccttc

SEQ ID NO: 201780 - DNA, 1119 bp, Cannabis indica
tttttttttaaaaaaaatgcaacaatctctctttctttttgcttttattgaagattttttaaaaatttttaggtgtttttgagcacttaagcatccaaaaattatatttttatagaaaaaaattcccaacttattaattaagtttgtaggacgtacttaacgtttttacagtgaaaataatcatattataaataaattatacaccaaataaaccaactttatttatttgtagaaatagataaaatataaataaattataaaataaaggttccacatttaaatagatgacaaattacataatcgattattatttcgatatatatgactatttaattagaaatttgaggaatcaagtgcagattatctcttcttttaattgttacaccaaataactctgtcatatctaaattttgatggtttattccattaggaagtttccaatcaaaatagtatagcaaatatgctagaggaagctcaatattgatgagaccaaatgacataccaggacaaattctccttccagaaccaaatgggatgtactcaaaattattgcctttgaaatcaatagagctatccacaaacctctctggcataaaattctcaggttcaatccaatactttggatctcttccaattgcccataaatttactaccactctagtgttcataggtatttgataaccattaatctcacaattatctctgcaaatcctaggaagtagaggagcaggaggatgcaaccttaaagtttctttaataactgattttaagtatttcatcttattgattaattcttcatccaccaatccttttgtgccaacaacttttctcacctcatcttgagcctttttcattactcttggattcttcatcaattccgacatagcccaatccagagttatagatgatgtttcactcccaactataaagatatcctgaaattaattagaaaagtgtcaaacaatttaaattcttacatataaccctacaaagaaacaactatttatcaatgaataatgacatgtatactaaaaatttccacacacaagatagctatattttggatatagtatttttattgggcaccaatagtatctagcacttctataggttgcgtct

SEQ ID NO: 201781 - DNA, 595 bp, Cannabis indica
ttttttttttattttttactatagaaatatagaaaaaagactccagaggtattttaaaactaattaattattgacacatcatatgttattgtgaggtaacacgtagtataacattttttttaaaattaaaaaactgtttacacaactttaaaatgtgtgcaatgtcccctctctcccttaggaagaaagattgtttactaggaaattgtaatgtcttccctctcaataagtcaaactttttttttttgtttaaagaactcatcaaattagacttaacttatacacccaaatttatctccatgtagctggcccttatgcaataatttttgtggtaggataagggccaaagacaatatagtttttttaaataattaattttcctttttttttttttgtcaatgattaattttccttcttcatttctaatcaaacaatatatatttttcttttttttaaaaaaaaaaatagagatatgagaaagattcaaaatttttgcgaggttgatgtcacctgtgtcaacacagatgatggtgagtgatacacaatttttactgcgttattaaacccatttaattattaaatttcactaattatt

SEQ ID NO: 201782 - DNA, 632 bp, Cannabis indica
tagttatttaaaaggggcctgtactcatttgtggtttgcagacaatacaaagagccttcactcattcgcttcttaaacttaattgtaaacaaattttttttctattgttgcatgcattagaccaattgagtatttaataattgataaattgataaaaagaaaagtagtagtaaaagaaaaatacgaatacaaaaaataatcattttctcatcaataaaaattatatcaagacttattaattctctcattttcttatcagtatttaagtcggtaagaaaataatatttcagagaagaagagagaatgttagttaagatatatatagagaatgtagtaagtgataaaaaaataatcattttttaaatatcctaaaacaaagccaaaagcaaaactattatgatagattttgaagttatcaattttttaaaacatatcatttaaaaaattaaaaaaaaatgtgagaattaaagagagaacaaataaatgttaattagagaaactttagcgttccatgtcatcgtctcatatctctaattttttttaactatatagatttattgaaataagagatctaattttgaaaaaaaaaattaaattacacaatataagttaaaataccaaatataattatt

SEQ ID NO: 201783 - DNA, 615 bp, Cannabis indica
ctttttagcgattggactcactaatcagacttgtcaccttgtcctatccaactatatggctttaatggggatgcccaaatgctaatagggaacaatgcaagtgcttacaagtattatacatttaaggtagtggattgccccatagtgtacaatgcaatactaagacgccatgtcttagtggatttgggagtggtgacttcaattggaacaattagaggtgaccaaaggagcgtaaaaaaattgttacaatgtctctaagcagacaatattcatggtctgggaggagacaccaattgctcttgggattggaactcaggcaaaagttgaacctatctaggggcctttgaggatgagttagatccccatgtgggtacagaaagagcgctcgagcctacggaggatgtggaagaagttaacatctgcaataaagaccccaccaaaaccattaaggtaggagaaacctgccttagcagtgaaagcaagcatcatagatactgtcaagagaaaatcaagatgtgttagagtggagccatttttgatgtgacaggggattgatcggcaacacaatttttccatgccttgaacatcaataggatgcaatgtcagttcaccaaa

SEQ ID NO: 201784 - DNA, 1900 bp, Cannabis indica
atattagctaaagagaaaggatgtacggtggttgggctatgataaaatacttactgaaaaggtgtacaagaaatctacttggattgttcatggtggcatattgataacagagaaatggccttccaatggcaactaaaaagatgccaacttaaatacggttgagtgctggatcaagatgaagggtttcccccctaatgctttgactctcaataacgttaaaagattgagtaatatggcatgggaaattacggagattcaatggtaaatactaacgtgttgttaatgagggacacggtgagagtgaaaattaagttcccaactaataggaaacttttgttggaagatatatccctaataatggtagctaggtttggattcaattcaagtttgaaatcctccccttgttatgttttaaatgtggtcactttggccatgaacaaatggattgtaagatggagttggtaaaacaaagcatagctcaggagtgatggtgccatactatggaagctggttaaaggatgagagtagaatcaccaattgctttgagaccttgctagtcccaagtctcagtcgtcaccgatgggaggaggaagtcaacaaaggtgttcaaatgcttccgaccaagtgtaatagtgtcgatcaccttattatcccgtaggtattggatggagggaaagagagtcagatttctgggggaggtacaaagatgaaaacagctagagaagagaaaggtggtgggtctcaagatagctacgaaggcaagatatctttgggagaaaacatatccaaagtgaagtcaaccttaaacactttgaaagtttcagaggagaatggagacaaaaggaatactggtgatgtggatcctagtttaaataagggtggacacgtggacaatgtgaatctgagtcacttaaatataggtgaggtggatggcttggaacgacttgtcgttgagatgagaggagtgggtattacaacattagatttgggtcttcaatctaattttgaatccaaattgaatgtatctaataatattacactacatcagatctctccctcctctagaaaaataaaggggatgggggctaagacaaaggggaaaggtgcaaagctagttgatagtattcatagagctagaagagattagaaatctaccaaggaactatccaagaaggtttagacagaagaaagaaatgcaacaagcaatatggagattgatgttgaactagagggaaagagggccaatcgtgagattgaaatcgcgaacgccagtatggttcaggagtttcgaattccaaaagttggggaaggctttgtagagggttggaacaaagaaaagaaacggacagggaatggtgcaaaaggtcgaaagatcaaatttgtaaaagaattggctagagatagagctcaacaattgggtactaatttgggcgaagcttatcaagtttgtactaaagatggagttttggggatggctgagacggatatttcagggagtgaggatttatctgccttgagtgtagaagatggagcggcggaccttgaggctcaaggtcgtcgatcaaaatgataattatatggtggaatgtctagggtctcggcaactttgagacattaaatgcactccatttgagaattttggagtgcaagaaaaatttggtctttatttcaaaatctaagctaatgaactcttaagcggagatggtgacgcaaaggttgggttttgacaatttttgtctagtggagcaggttggtcttagtggtggtttaatgttgttgtgggaagctgattttaaggtaacaattctttctcattctagattccatattcatactgtggtcagtgacttgaatttaatgattttgaactttactagggtgtatgtgttggaaattattt

SEQ ID NO: 201785 - DNA, 684 bp, Cannabis indica
attcctacgccatatatagcgtcggttgtattcaaccttacaatatcgccctgatcaatgttcgtagagaattttgccaaaactgatgctgaaaggccttaaaaactgcctctaaaggtggtttttgtagtagtgtaaatctggaataacatctagtctcgagtgcttgttactaaataatactgagttccgatcataccaaacccactaaagggttgtcattatcaattcaaaaacctcacgagatagcctgttataaagaaataagagaatttcctatattggtccatgtacacagcgacggagcaccgaccacacttccaagtaatgccacacaggaatcaaaccaatactgaagaaaacagcatactcaggagtttcagattcttttccgtatcgtgaacaacaaaaagatacttaatctttcggaaagataaattatgttgctactgataatgctaaaggtacatattttttttaataaaagtttagaactaaatatatatatgtatatatataaataaataaaaatataaatatataaaaaaaacactgaatacacaaatcatggacctgcttaaaaaaaattatccatgcagatatacatagagtagatactggtactaaaaaaaagggaaattgtaacaaatgactttaaatttcacactaatgaaagttaatgtc

SEQ ID NO: 201786 - DNA, 535 bp, Cannabis indica
ctttgccgaatttgatgagactgctctgtccttcgttatatttatcgatcatggactccgtcattttacagagtagctccaccgagtttggagcttctcccggcacatctgaatggttcaaactctgaaagaatcgatcaacgtcttccagaatctgattgtgattcatatgggaatcggaattggcagctcgattttcctcggcattattacaaacattgtccttctcctccgtcttattttctccggcgagctgagattcagattcagatttaggatcaggattttcatggccgtgtttaggagttcccacattcccatcttttgaattacttgtggatttttccatgatcacgtatgtctttttttcttttcagtgattaatgaatctcaacctcaatctcaatctcttactctaatcttcaaaacaagggaaatggatttggttttcgaagaaaaggaacgatgatggatcgagagaacagtcatggaccgaaaatgaaggagaactattctccaattcttactaaccttc

SEQ ID NO: 201787 - DNA, 844 bp, Cannabis indica
aaagatgaatgagtttgtcaatggaagttaggtgatcaggagagtagccaactattgaaaagtcatcatgggctaatgaagaacaggcaaagagagacaaagacaacaatgccaaaagggaaagcttagaaagcaaagagaaagccattttctagtaaaggaaaaattgaatggagagaagaagtgtttgatatgggatgagtgggaatgaatgactatatatatagtttttgatttgaaggggttgcttttgaataaagtggtgtgctatgcatttttttattttttattgtaaaatttaagttgaagaaaactgagtctttaagattggttctatttggcaggcttttcttgcaagcatatttgatcatgtataattaacacatgagttgaatgaatgtgaggaatgtaaggtataatgaatgattttccacacttaaaacatacataggagtgtggattttccgtgttctagtttaactttacaaaatgattaatgggtttagcaattcacttccagaaattgtgtgtatcagttagtatggtaatataaacaatctcgtatagaactctaatttatgggttgggaagactaacattgtgtgtttgtacaagtaaaagataatgaaattctcttaataatgacccataaataaaaaatgataaaaattggaactttaaatatttttatggaatagaagttctttttattttttacaaaaatatgaactatttattcacattgttgtgttttcatgttgtttctacggtgttgtattttgcgttcttattgtttcatattgcttataagattcggtaaaattgaaaagaaaaaaattgtaaa

SEQ ID NO: 201788 - DNA, 791 bp, Cannabis indica
cttgcagcactctctcatttgttgatttgagaatatttcacttaattatttggtaattacaagttatatatttatttaaaatattatgtgtgtaattgttgaaatgtcagtgtctacgaatgacaagtttcccaaatattgttttattagctcatttgacttctaattagacatcccaaagaatttcctaatatataggtaagttaaaaatgttgcttcctagtgtgttgcaagtctttgacagtatttaaaaaagtgcatgttatcttatgcttacttaaaaaattagggcaatacaccttacaataacactaatattaaaagtgttgttatataaaaggaaacactttttatgggccttttaacacatgagtttcttgagcctttaaggcacatataaaaatagataaattagaaacactttatataacaaggattgttgattaagtgttgctaaaaataatttttgtagtagtgataaaagctccccttttatgggccttttaacacatgagtttcttgatccttcaagacacatataaaaggaacattatgtttagggtttcatttattaggtcgatctttccctcctccccgatctctctctctctttcctatctctctcaccctagtccgcgtgcgtctaaatagcttgagtctatctgcttatttttttcttctactttgatatcttgatctagccactctgactgtagatccgaaatcccaactccaaaaatttgaggttgacgtcgcttgaacttcttttttttttttttcttattgtttct

SEQ ID NO: 201789 - DNA, 3721 bp, Cannabis indica
tagtggaggtggaaattcctccagccataaacaatcagtatccactgaaagagcaaatttagcaagagtatgagcagcagtatttgcgcctctcttaacatgagaaatttgaactccaggaaaattggacactaaaagtaaaatatcagacaacaagcaatgaaaatatgagattgtggcttgttgggacttcaaaccattaatgactacaagtgaatcagattcaatgtagtccacttgcagctgtaggtcttttaaccattgtaggctatggatcagggctaaagcttccataatttctggtttaaaacagccaggaaaaggccttgacatagcagcgatacaatcaccactaatgtttcgtaatatagcaccaaaatcagtaatctgagtagctttgttgatagccgcatctgtgttaagtttcagtctacctgaaggcagatttaaccattttggagaaggttgagtcagaatcacaccatgttgttgagcagctagctgttgtagcgaaattgccttctagtgtgtgttatttgcaccacgggctgattgaaagtcatcaaggtaagtcatagcgttgaatagcaacaactcgatcaggtgtgtttttgaaccatgacgctccttgtttctttctgtccaaaggctccataaaatgcaagcaaattgttccaattctaaatttgaccagatcgtggagacatggatccaaagctctttgagtgaagcatgtgtttgaaggagattttcaacagaaaaagtggataagcaccagaatttccttggacgcttacaatggaagagagcatgcaatattgtctccttctcacgttggcacaatggacaaaggctggtgtcactgatatgtcttgtatgcaagatgtctaagaccgacaaacagtcttggattgctctccaaaaaaagatacgaaccttagatggaatcgagagagtccagaattttttccaccacgacattgcaccagaggtactggtgtttggttgctgatcttccaggagtaaagccattttgtaactggttttgatagaatagcaaccattattttcatgatgccaaaggagatgatcagtttggtgaaaaaaggaaaggggaatgctcagtattttttctacatctgaatcaaggaagagggattgtaggagtggaaaatcccatcgtccattgtccaaaatcagatctgctaccttcaagttcctgtcacctcctttataaggtaggggtttgaggtaagttacaccaggtatccacgggtctgtagcacagcaaatgctgtggccgtcaccaaccttccatcttagacctttaattagaagttctttgccccatactatgcctctccaagttagagaagaataaattctagtatcagcatccagaaagtgattacgtttgaagtatcttggcttgagaacacgacaaagaagggaatttggatccgaaaaaatctgccaagcttgcttagcgagtgaagcttggttgaaatgaacgaaactcttaaagcccataccaccttctactttagcttgacatagagcattccaagttttccaattgataccagttcccgaagaattagagccccgctagaacttattcatcatgacctctatttgatcaatgagtgaattagaaagtcgaaaacaactcatggcataagttggtatcgactgtgcaaccgcctttaacaacacttctttaccaccaattgagaagagttgttcttgccaagaggaaagaaatttccaaagcttttccttaatatcagcaaacaataatttcttatcccttctagagtaagatgtcaatcccaaatatctttcatggcatggctgaatgggcatatccatgatttattggaaattcaattgaacatgctgagaagtgtttgatgagaaagatagtactgatttgctacatttaacctctgccccgaggccgacagtaggtgtttaaagatcttcatatagctttagcagaccaagtattggctttgcaaagaactaggctgtcgtctgcgaaaaataagtgagaaattgcaggagccccacgcgcaacacgcaaactagagagattgcctgctgcttcttcaaactgaagcaatcttgaaagaccttcagcacatattatgaacaaatatggagataaagggtctccttgtcgtatgccacgagttggtaacacttctccatgaggtgagccattgatgagaaaagagtaagagacactcgatatgcagcgatagataagatccacaattgtgtggtggaaacccatagcagtcatcattccatggatgaaatgccactccaccctatcgaatgctttactcatatctaatttgagataaatttttctaaaaactttaagcatttgtatttattttttttcttcaaaaatatactattatattccttttcataaagttttaaaataaatattattctactaaaataatattatttatctaataaattatatataatatttttattcaacttttaaaaatcaaaatacatatacaaaaaaatttatttagtcacaataaaatttgtgatttaaagtaaaaaattgtgactaattataaacttcatttttttattgtgcctaaaaggtccgtagtgtattagtctcaaaaattacaatttattatgactaaatatatttttaatcacgatacttgttgtgactaaaattaaatagtagtgacaacttgtatttaaatactatattttagtcacaaataattttttattgtgattaaaaattacatttacaaaaaaattatattataactaaaaaattgtcactaaaaatagttatttttttaacaataacttaaataaaaaatttaaacatatatgtattgtgtccattctagattcgtttattctcaccataagtagttatttgatgaagtacttattatagattaaattattccgagagatcagacatgagaagcatctttgacaatatttgtatagtggaaaagagacctaggtcattcatgggacaataatattaatattattggtagtggacctaaaaaaaacagcatatttatattatattattatacattaaggtattagtggtgtaccaatttttttttacgtattttagattttatgttttgtaaaagttactaattagattttttattttgttaaatgataaaatatattttttatttttcaaaattatacagatagaaccctgagctcaatttttaactattttattttttaatataactaactttaagatagtttttaatacgaatagatattattaatgtaaccagttttgtcataatatttttagatcggattattattacgttttattttgacaaacaattagttcagggtcttatttatacaatttcaaaaaatataagatttattttgtcatttaacaaaacagaaagtttaattaataactttgcaaaacagaggatccaaaataatatttattctttttttatattacaatagtggtagtctcatttttcttacttcctgtattgtaattattaaaaatattttaaaaaatttaaaataatttacaaagtaaaaaatagaatttaaataacttattttattcgtttataaaataaaagaaacatgtgtaatacaaattattatttgtacatgtatctctcttgattcttgatccaacacaaacattaaaaaa

SEQ ID NO: 201790 - DNA, 793 bp, Cannabis indica
atctaagaaatcaaaggaaaatcattgaggtgcccactattgctatcgacctggtggagatcgaggtcaactcttctgatcgttgatcgttttttatgcccactaattcttcttctcttctctattttgagaaagcttattaaaataagggttaaataaatccccaaagtttttatctttaagcttttttttcgttttctcttctcattcccaatataaaattctcttatttatttgtttagagaaataatgtgctgttgtcaaagcaaaaagagaactccaaaatcaggtgctactactgctacatccgcctcctgtggatttgcacctggctcagtgggttgtaaccgttgtaccattgctcatcaacttatcaacaccatcaccaacaaacctcacttatcgttcaaacccaaaaaatttaagctaaccctaaaactcatttaccaccagtacccaaactccagcaagaaccaatgccacaacccaagcagcctctccctcttccacatccaagcccaatttcttctaacctaattccaccaaatgctatccaaggtacttgggtcttgcaaaaagtttcaaaatagcatattataaatgaagaagatcgcctggatctaggtctcgcagaagaaaggaggaagaagttacagggttggggaggttatgatcgttctagaagaaaaagaaaaagaaagataaaagaagaaaaaataatatcctctattttttttttaaatttaaaattatgtagtcacttaaaatttaccacgtatacacttatgtacac

SEQ ID NO: 201791 - DNA, 731 bp, Cannabis indica
tgttgttgcttctcaggcttgtttttctggattttccaagttgttggttgttttcgatcttaataatgagtactttgtactttatgtcttttagaatttgaggtaagataatgagatttcagctcaaaattaattggcgaaagttttttagtttggctcgtctttattttggaccggcggcactttcagtgcagaacggatcataacctgattctgatactaaccaattgacaatgaaaagagtaatccattcatcttatatataacaatttattttcacacattaacaatgttggactaactctaatattattaattacaaactaaaccatatattaaattataagttgtactttatgacatatatattttatgagttccattacattttcttattttccctacttatctaggtcataaggcaatatatatatcttttcattcgagtttatcatgtatatttggtcataaggaaattagtatagttgctctatgggtcacttcttccattgaggcccctattccgcaagtgttctgttgatttttcttccaaaatttgctatacgaatcacaatgcagtagtttttttaacattatgactgaaaccagaattgatatttgatatagcatcatgccaacacccatttcttaagagcatacagtttaaagcccccattaaattaagataaagattataatgactgcgctttcaaaagggtaagttcaattaa

SEQ ID NO: 201792 - DNA, 644 bp, Cannabis indica
gtaaccaaggataatagttaaacctcagttacttggggcataaaggtatagatataactgaacttgaaatgaaaaatcttataactaccattaataacgatttttggaaaagtggtgaactttttaaattcacaaacacttaaactaaaaattgtaaatggacaaagaatagatttaattatagacacatggtaaagcactcaaatctgaaaaagtgagtattaactccaaaaaaacaactagtgagtgaaacatgttacataagggagctcaaagaacaaactcaccatatcagctatttaactaagaaaacttagaaaaatagggtgtataaagtacttgggataatataaccaaggaattaaaacacaacctcgaggaagggacaaaactccgctcgcacatcaataagagtcagggatataactctactcacgcataaaaaaaaagagtaaggaatataacttcgctcatacatcaatagaacaagaggttttaaatctactcaagtatcaaacttgagtaagagactctaactctagtcaagtgccaagttcgagtaagagaagcaacactactcgaatatctaatgggatgagatatgtaactcagcctatatagcaaggaaagtcacgagtctcaac

SEQ ID NO: 201793 - DNA, 1285 bp, Cannabis indica
aaaaaaaaaaaagtctctcatgttgaatgtgtagatgtattttaaagagaatgactaatagaatcaaagtttggagctctaggaatatatcttacatggccagggtaaccttgattaactttgttttgttaataatacactcatattaggcccaaattatgatcttaccaaagattctacttcgagatgtagaagcgatatgcagagcattcttatggaacgggaatacagtgaacacaaatgcagggttaatagcatgggatgcaatctgtaggccgaaatctaatagaggcttgggatttaggaatatacaaaaatagaatgtagcagcaatagaaaaatatgtgtggacaattaccaagaagaaggataacctgtttgtcaagtggattaactctgtttacttgggaaatcgcacttagtgggattatacgtacaagtcccacatattgtagctggtactagaagaaattggtggttgtcaagaaccaatttaaaggaaaagatcaatcaagatgggtgtgtgcctaaaaaatatagcattcagttggggcacactatactatttgaagtgcaggataaaaaagaacaacaaaagtttgtttgagatagactaattatccctaaacacaggcttatcatgtggcttgttatgtggcaaaggcttcagactaaagacaaaatgataaattttgagccaagcttggacccttactacatgtgtatgtggtgaaggaatctgtcacttattttttgcatgttcttatagcaagaaatgcttggaaggaatcaaagtgtagtggaatcgaaaagttcaatccgagaatgttcttgagattttaggaaaagcttctaaagttaaaataagcaagataaagaaaagcattttattatctatcgtagctgctatggtctataatctttggtaggtgagaaatgatgctttatggaatcagaaagtgtgccaaataagacacactattaggaagatacaacatgattcattgactagactaatagaagtattacctaacaaaatgtcaataggggacaagtcttggttctctgaagttatttgatatgtgggatatagttgtatataatgacatatagataaattgtaattggtgtacgtaaaagtttgtttgagcaatacaattaaaccttattcataaaaaaaactttgtttgggtgctgctttgtagtttgctttgtattatttttgtggttgttggaataaaaattttcttccttgtacaaaataccaataacaaaagtaataata

SEQ ID NO: 201794 - DNA, 1266 bp, Cannabis indica
ttacatttggtaagttattaacctgactcatgatttagtctttttggtaattcatgactgcacagtggaaattagtgatgcttgtttggtttatgaatttgggatggtgatgatcatttgttactgaaatgattgtgaccaatcacacaagcatgtcaggataagaaactgcaataatatgttgtaacaaaagattggacttagttaccaatggggaaaaagcatcattattcattacataataatcatgtgctgaaaaaaccccaaggcactatccaatttcatacacattcatatcaaactatgaaatcataatacaataacgtcatcagagataaataaacaaaccaaacatcaaccacacaaagcaatgaaaaaatggaacattaataattaaaaccaggggaagataatatgatgaagctactttttattgagtgtactagttgccaagaaccaatcaacagtacctcaaacaacaggggagcttgaatgaattattggatgtagagaggatctttaagcatggttgcaacgtgagaaactccaggacaatcctcaatctccaacttttttgaagttgcaatgaggctaagtctctcacgcggtattatcaacttggggcatagcttgatcgagaatgtcctaagaaaatcagagttggtgatccagtttggaattaccactaagctatcacagcgccatatatggagttgttgcaggcccttcacttgttgaagtccttcgagctgatcatttatgtcagtaacatgatccaacgtcacagaatggagtctgtgaaggtactgccacatatttggatcaccattggacatatccatgatatgcaattctcttaatttggagagaggaaaatctgtgaaagaacacagtcaagatcctcagtttggaataataactttgtataaactttttgattacttagcacataaataagattgagagaaaagaagtacaaacttgatgatgatgatgatgctgatgctggtgatgttggttttgctgctatagttcgtttgaatggctcccaacttgtgtttttcagcactagcagttcttctagccatggaaacagaggcatggaagtgagacaggggcaatcttcaacaaccaatttagaaagacaactaaatgtagctttttcttctccttctccttctccctctccctctccttctccttctccttttgaagcatcctttttccaccatctctttagttgtggcaaattagtaagtctcagct

SEQ ID NO: 201795 - DNA, 822 bp, Cannabis indica
aaaaaattctgaataatttaacatgtttaaaataagacgtaatttatttttatacgcttccacaaattattattttaaattttatttttgacacttaaattatttgtaatttttaaaaaactaatagaatgtctactataattaaaatctaaatcatcatataccaaaaattttatggaaccattatttaactataaaactctcctagatgtcgaaatagataggaagtctactaacaagtaatgtaaatcaatgaataagatagtcattctcttatatttgttaacttatattattagaacaacaaaagagagaatttgattaaataagagataaaataaaaagaatacctcctctatcaatttttcaaggaatgtcattaatgcacgtttactataccgtattcaaaattggaataaattaatagagaaatgtaacagaacaaatgaaaaataatcggaatcaatatttgtaatatgttgtttactaaatttttttagaaatggaatagttatgatttatcttgtttactttattaagaaatgtaatcggaatgcttaaattgactaaattacccttttgattataaagtagttattttgtaaaatatattttaaaggataaaattgtcattatatatttaatattaaaaaacaaaataaaaaataattaaaattcattacccttaatagcatttcttacaaaattggtgggggaagttttccctttcttttctctcttatttaattaagttctccttttcctaattttaataatacaagtaaataaatgtaatgtaatgattaccttaccgttgattcc

SEQ ID NO: 201796 - DNA, 529 bp, Cannabis indica
tttctttttttttttcctttattctccttagtgttgtccaatcacatttagtggtatcacaaattagggttctacaatgcatttggtgggtcaagctttgtatggtgatgccaatctgaaaagtgtcacaatcttagaccatcccacagtttttttttattattcacttaatttgcaaatattcattttcaacaatgacatgataatacatataaaccttttttcttaatctattcttttcttttcttttatttttaatttatttacatatatattgttgtgagtttgtgaccaaccaaatagttttcaaagaaatacctcaagattagattagactcaaatataagtacacatttaattatcataatcacctttttcaaaatatatacatttcattatcattattagatgttaattaattaatattaattcaaactaactatagatagcattttagtcctcatactagttagcttggttaaaatatttcgagtaattttcataaatactcaaaaattacaaaaagttt

SEQ ID NO: 201797 - DNA, 1304 bp, Cannabis indica
atcagtttgatagttgcagttttcctgaaatgcattcctgtcgaaaagaaaattaacattaagcatcatgatggctatgaagcactcccaagtggtccagagcttgcttaaacttccctaaggtgagaaaaagacttatattttctttttctactttagtaattggaaaaagaaaaaaaaagtatataaaaatattagtgattactaaactgactgatacaattactatgagggtatattgtatgaagttgggattcatttccatttttggctggagagaatcagaagaattaaaaaaatgttggataggatgattgtatttttcttgtcaaacttttgaaaattttcttgattttcaatcttttagtagtggtttagaattttaattgaattttcttgctttcttttgggttcgaaattgatgaggttgtttttgttatgcaaaattatttccaaagtaaattgtgaaatacacatatgttcttcaattcctttttttttgtctttttttatcttgggttgaataataacactaaatgcatcttcaattggggcaacacctatagttgtcaagatacacacatcgacctaaaatattattttttttattctctctcatttacataagatttgacaaattttcatacaaaaattactctaatagttgacaactctaaaagttgtttaccattctcacatgccaccatttaaataattaaattttattaaatataataaaataatactataaaataattttttttaatggaaaatgaattttattaactaatataatctgttaccaaacaatgtaaccacttggtaagaatagattttatattgaaatgacaaccaggatataaaatagaagctcgtacaaagttgtgagttaccacattagctgatcgcttaataaaaagaacggaaatattttttaactcaaaagagagttgtttacattcagtaacgatttgtccaaataatgaaatcatttgaactgagttatggagagcttgaaccattgtcagataggcagttgatgatcattcgttgccagttatgttctttaatccagcttaaaacttcacggactccaatcgtctcagctatttttggtgttgcaaatataaataatggtattgataaaattacattgaaaatgataaccacattgtatatgtgacaaaaataactccataaacaaaagatgctctaataaataataacatgtccaaagagctagaaagataacccaagtaccggctaattaacctcgttacataggtaatatgaacaagacatta

SEQ ID NO: 201798 - DNA, 875 bp, Cannabis indica
agggaccctcttccaaatcttactcaatacagaagcttaattggcaagctcatatatctcaccatcactaggccagacatcaaattttccgttaacaaattgagccaataccttcaatccccacgatagccacattttcttgctacgactagaatcctacagtacttaaagagttctccaggtcaaggtctcttcttttatgcttcttaacctacaaaactccagcttcaggctttcgcagatgcatattggggtgcctgcatggacactcaaaggtcaatatatggctattgcgtcttcttaggccaatctatcatttcatggaaatcaaagaagcactagacagtgtcctgatcatcaactaagatagaatatcgtgtaatggcaaatgttacctgtgaattaacttggatcacttcacttctcaatgatttcatcatcaatatcactcttccatccattatgttctgtgacaattgtgttgttattcatatctcaaagaatcttgtttaccacaaaaaaacaaaacatgtagagataactcacattgttcgtgagaaaatcaccaatggtagcttgaagatgaatcatatcttctccaaaaccaacctagctgacatactcattagatctttattccttactcactttcatgagatcgtatctaagatgggtgttaaaagtttctacactccatcttgagagggactattaagttagttataattagttcatcaattagtggttaggtggttagacttatttttttatatcaacttgtatatataggtctctatcaacggtattcgatttattcaatcttgattcaataaagattcatcttctttctctctctaaattataatttggtatca

SEQ ID NO: 201799 - DNA, 1471 bp, Cannabis indica
ggaaattggagtttttgaaccacgtattatggtaaaggacagcatcgtatactacaaactaaataaatagatctagaaaaaaattatgtagtatgaattggactattgtgttggtagattaataaattcaaattggagtttctattgacaaattgaatgaaaactaaaattttactattattagatacttataatgttaaaaaaaagttattgaatttatacttattaataaacatacaaaaatttaggtacaacaataatccattatgttatatctagtggttatccaatcaaatctacactattttactcctagtgcattcgatccgcactaggtgtagattttatattttgtatctaatctattctacataataaattcaactcgcaaaaaataacaaattaaaggaagaaggaaaacatgttgaaataaataaaataaaaaataacaaatttaaaggaaaaaggaaaaaaaaaaagtatatagaaatgttgaattttgttttagattataatttccttatattaagaataaaatgatgtactaaattttgaaataattttctcttttgtaaatttttaaatttctatcttttaaattaattaaaatattaattgtgtatataattttttttaaaaatatatataggtaaacacttttcaatggatatttatgagtactaaataaatttaactataaacattaattttagaaatattaaactattaaattttgatccgatagcaaataataaaagaaaaattataatttttatgtttaatttagctacttaaattaaaaaaaaaatcaaaaaatacatcttttacactatataaaaatatatttatataaaaaatatttaagtcaaactcacttttttattatttttgccaaaaattttattttattattatttttttaaccaataaaataaattccgtctatatcatgtaaacattaagagatttttctaattaaatataaaattaaatataaaaattcaaaattttctaatattacctatttataggtaatatctagacatatatagatatgtaaggattagattaaatcgattacttctacatgtcaattaacatctaataagtaagtgaattttaaattttacaatctaatctacacaaattctaatatctatgttttatggattggattggatgggattaaattagatatttaatttattagtcaaagctctttttgggtgatgtttcatataagcccaaaatgaaaacgaaaaaaaagaacaaatatcataaaaatccagcaacaaaataatacaatatatgcgaattgttttgataaaggttatttacattacattgacaagtgtgtagagggtcttaacttagtgcccaacaattcaagtacataacagtttgaagagactcctcagcttttctcgtactcttatttgttgcagcagaaacagccccagcatttaataca

SEQ ID NO: 201800 - DNA, 1344 bp, Cannabis indica
tttatgcattcaatgacatatggcttcttgttaatataccaaacaatagtttgcatatctttttcttgcataagaccttatactcagcgagttgccagtatgctctgctatacttatgcaattaatgatttattacattaaaagtgatcacatcgatccatattctctttatcttgacacatgtcttccactgagatggtagccgaatttcgggtataacacttgtgattaatgaagttgttttcttgataaaaaaaataaaaatagttggacattttattataatataaaatttcatgatatttgattattttggggtgtcaatcactgttttacattcggtttgcttgcttgagtggcctcaattgttttgtctgaattctcggggttatttggtcttatataagttgttttgtttaaaacgattcatattttgaccttgtatatcttttggttagacaattaacttgtttggctgtatatccattcgacgtttatttatattgtgattcagattactttattataaaaaattctgacaaagtagaaaggatagaaaactttgttagagagtcacatattgctaaattgtagaaaaataatagaatatataagatgaatgagctactcctctcattgtcaattgattttgtgatagaatctcattcatcttatcgcaaattctaacatagtatcagagcaatcaaacaaaaataaaatctctgacgagtattcgacctaaaaatagataaataaataagtaaactaaaaaagtgtatctaaatagaaccacaaaaagagccaccaaaaaaaaaaaattaatccaagagccaaagtaaataaaaaataactacatgttattcgaaaatagtgagttaagaaaataaaaagagccacctaaaataccaatccaaaaagtagagtaaaaagaaccgcttataatggagttatccaaaatgatgagtaaataaaataactaccatctaattttgaagaggatgttagagaataaaaataaataataataaagcttgtttttttttttgaaattaaataaagcttgtttaatgtttacagtggaaataaattaggcgagattccggtagagaaataaatgagtagtctgatattgacaaactcttaacaaaattgaaaagcgatattatccttgttttttaaaagtgtcaataatgaaataatatgattttttttttcagaataaaaaaaaacaaacaaatttatggtcttttatatggacacaacacctactttaaacaacaactaactagttattgccacgacgttatttatggtaatccattatgctgagagagagagagagag

SEQ ID NO: 201801 - DNA, 861 bp, Cannabis indica
gtaagagaaactaattaaaaaagtaaaaaaaaaaaaaaaaaaaaaaaaaaaaaaaaaaaaaaaaaattaaaaaggtccaaaaatagatgtacacgcgcccccacgcgcctgttcttgtttttttgtaggaggaaatgacagatcgttttcgaaaacaacaggattctttagacgcgaaacaacacgttgttttggggaaggtcatccctgacctgaagggcatgcgtgcgggtctggtctcgaatcccgtacgacccagatcgtgacccgactgaaaaacacaccccggccaccattttggtcggcgtttcaggggttttgttcctcttcctattttctttcgtcctcaatcatctatttctccattttttttcttcagaaaatacaacaacagattcgaaaaaaacaaaagaacaaaagtaaaaaagtttggaaaactatttttgagcatctctatcgcaccatatatgtatacaataatgatagagaacattgtacaaacacccaagccttactggcttatttcaacaatagtttgttaaaaaaatcaaaggagaacgaagaacccgaaatgggttttctcggatggcaaaaccaaaaaacttgtactcatgaaaatacaccgaataaaaaatgtatccaattagagttaaacccactaaatcaaatttcttacatcatcaaaatatcaattccaaaaaatattactctaaaataaaatttttagacaaaatgagtttattactaacaagctctaaaatcaaatggcatggctcatgataccaattattaaaattactctctaatgagcattataaaaaacataaatatataaaagatttaaagattaacaattataat

SEQ ID NO: 201802 - DNA, 1641 bp, Cannabis indica
tttttccaaataagttgttagtgacgacatgtcatcactatagaaagttaaaattttggataattttacatccaaaatttaacaaaactcaaaagatgttttaagattttgattttaacaacctatagcaacaagactgttatagctagttatagatgaattaaacaaatatttttctaatgattcaattaataaaacaaaaatcttgttaattttctcatttttattttattttttcaacttaaacttcaatgaaaatgttgtcattgcgtatccatatatagtgatgatagtttttttttttaatgaattttattaatgacaatcaactaaaataatagcatgtaatctaatcaagatatctcctcgttggagacacgaccagatatagaattagaaaagtgagtcaaataatcaaccgcctaattcttaaattatttgacaaaaaaattaaaataaaattagatgaaaaatattgcagcatcacaattaaccttaagaacacctattttctgtttcatccatcgcttagaagacacaacaatagaaattgttgtaggaggttcattattcaacctcgtagcttgagcactgaactattgtgtaaagtacataacttcactactaataacccctttagttggaaagaacttgttattctcattcactaacaatgagttgatgatgagccatcaaagaacaaagaagaaccaataataaaaaaaacaaacaaaactatgtcacatagacaagactaaaacactcaaaactttgttacaaaaacaagacaaaaacgctcaaaactatatcagacgatactaaaacactcaaaaccatgtcatagaaacaagactaatcgcaatatgaaagatcaaattgcagttgcaaaatacaatcccgaccaagccacacctaagcccaaggaaagccaacgggcctgaccagagaaaaagacaacctccaatagttatagatttagaaacgtgaaactttaatttttctcctcttattaacccttgagtagagagagtttagatacaaatatgataatatcctttaattcaatattatcgtaaaaatttagtgacgatagttttgcttcatgggggataatattttatgcaacgacaatattatggcgtaaaataatattatcacgactatattgtcgttataggattgcgaatataacttattcgcaacccatattcttcctcattcaaccaattttcccatttcttgctcatctctctacttccatggccaaaagagctcacttctttgaaagtaggaataactcaagagtaaagatcacatgtatccaatcttacaacttttctcaactcacttagttttttagcctcaattttcttaataatattattatgttagcaaacaaggtctaaagcacttgaattatgaaaggaagaacgtcatttcaagtgaaagagagaagccttcccacctacctatcatttttttttttaaaatgggttatatagagaaagagagcttcgatcccacgtgccttcctacctttcttttttctcttttgcatgctttcatccatcaccttcatttcaacaataataatctaaaaagatatcatatgtaactctttttcttaaaaaaaaaatataa

SEQ ID NO: 201803 - DNA, 1083 bp, Cannabis indica
actattaccattacattccattagtattcctattaccattatattccactaaaccaaacaaaggattagaataaaaattgattcttttcctttccattacaattcattaattccaaccaaacacaaccttaatataaacaagtacaaacataatgaaaaaacaaaaccaaacaaggaataacaatggtgatactaacctgcatcacagggcttcgatctttactcttttccaaagatgcaagctttttattatctaactacaaaatcaccacaataattaacaaaaattaaacaacaaagaaaccccattaaagcataataattaacaaaaaagaattacatcaatttcatcacataccaataaaattggtgcttgaggaaaataacgagacatatgatcaccaatattcttagccacaccacttagctcaaaatcatcaaatctctcattggcatgaaaatacccaacaacaccaaatcccttcgcagcataatactcttcaatctgacccccaaattcattcaatcaatcacacatcgaaatttgacctaaaggttagatctttacgattaagagaaagaggggtttaggtttaccagaatcagagagatctcaagctgaggtagaagaccgatatgggagtggaaaagtgggactgaatcagtgatctcgataacgtcgtcgtttccgggagaaacgcggccgagtaagacggcgttgacggaggaagctttgtgctttagggcatgaagaactagctttatgtaagcgttctgtgctatctcgtactttaactcgccacccatgactcactgagtccgaccttaagatgaatcgccgagtagagagagaattgcagtgagtccaaagtttgagttattttttttttcttctgtagatttttgaggaagaagaatcttttgtttggagatatttaaaacgttgtcgtttgggtttcgtctaattaatttaaattttagtaaatttgaaaaattaggatttcttattcttaaatttatagttacatgaagttatctttccctgtggtataggtgcggtttggtcggaattgtattttgcta

SEQ ID NO: 201804 - DNA, 685 bp, Cannabis indica
gggataagtttccccttccccgcaaggacttggctataaagaactcgcagtatcaaaagtaaagaccttgcaatattaatagaaagaaaactcgctatatcaaggaaagtacacctcacatatataaggaaaccaaagtatcaatggggaaagatgcgaacacattgatttatgaaaattaacagtcaaacattcaagaagcaatcatgacaaacatcacatttatttttataactgttgtaatcaatacaatttatatattaattattgtaatagtcttattatgaccatcatttctaacagcactccctataagtaggggtttttctctccatttaaaagggggctgatttgaataaaaaaaaaatagagagaatactcttttcaacagtagattagacagactgagcccgaaactcctaccggaaccactatactcttctgtgtccattttatattatttataatactcgcatatattatacactatattcttcgagtacttactattctaagtgagtactcacatatttatttttgggtattcagatgacccttgaatactcgcacactggtaaggaattggtggggagtgctcttccgttcccatcctcgttaaggattttcatccctattctcgcttatttcttatcggagatggggcagagaatttcctaataaaaaa

SEQ ID NO: 201805 - DNA, 597 bp, Cannabis indica
ataatgcctctagattggcttattattaaattttattttgatgaaaaatcaattcagaatactacattactacttagtactattttgaaaaatacaaggtttaatttatcatttaaaaaaataaagggtccaaaataacatttattcaaaaaaacaaaaaaaaaacaaaggctaatgggacagacaacattcttgattactaccccatccccatctttacctttttgattcagtaccataataaaaacagagaaagaggatcaaactctatatataaatttatttaattttataaaagaataataatttaattgattgattacattcccaaaccaaacaaacagatcatagtttgtttagcatataccttttcatgcaatgcttttttcctcttgcttgaacttcccaactatctaaattcctcttttctcaagttttctcatattctcacccttcttcttcttcttcttcttctacttcttcttctcctcttctcttatctctctctctctctaacacccaagaaagctatgattccttaagattttattatatttaataattgggtttatgaaattaaaataataaattaaaaaa

SEQ ID NO: 201806 - DNA, 1257 bp, Cannabis indica
ctttttctcacagtgaattcttattagtacattcttatcacaaactcttgcttcaatttctggtagtggctcatcgaaggaggaataattctcatctgaagaataaggtggtgaattgctatctttatctgcaatgagcttgaatttccttacaaagactactgcttccatgtttctctttctcatctcttcctctagtattttcactctctcttgtaactgcttcatgtacttgatagcatccccaagaacagaagccttgtccatctgtatcaataatatacaagttcacaactttattagatttgaaaatactccaaattctccgagcttgaaaagattagactcacaagctcagtaatccccaacatatttcataaaagaaaatcagtgaaatcttgttattgatatgttgagtcctatgttgacatatcaataacatgaattcatagaatcacatttatatagaaactggtcgctactgagcttgaaacttagactccatcatccaaagtagctcaagctcagtattgaccggccagtgtagaaagatttgacctcttgatctttcattaaataaagatgaaatctttctccaacatgtcttaagaggaatcagtggaagttgatttgatcataccttctttaggccaggaactatggcagataaagctatgaatctttggctgagcttctccctccttttcctttcagctagaatatgatcttttgtttgagaaagtttggtgcttgtgctgttgatgagcctcttattacaattagcaccttgatgattagcaaccttgactacacaatcagaaggtaaaaaattactagtagtgttgttgttcttcaaaccatctagtgcttccgccttaggcttgacataacccatttcgtctataacatagttattagaaccagctgcaaaggaataaaggttattgggagaagaagcaacttgttgttgatgaggtactgggttattaatctcgtttgagctccaaccatttggtttgtgatgtttcatcatcatcatgcttctatagtctatgcccatatgagaattgttatcaaaagaggaagctttgacattgttgaagtttaagtgagagtgaggatgaggatgatgatggagattctcaccaagtgagctgaactcatcaagagagttcatatgccaatggggattaatcagattggggtcattcattccctgaaatatgtcaaaaaccttcatctgtcatgaactatata

SEQ ID NO: 201807 - DNA, 2027 bp, Cannabis indica
taaagctcaaaatgaagggattatgaaacacaaatatataatctgagaatttgaaataaatgaataaatcatgtacccttttccaaagtccttctaaaggaatccgagactgaacttgcaatggatttaacaaagttaccagacaagtggctctgtaaaataatgataatataataaagaaaacaaaaatcaaactcaaggaaatcataaacaatgataaaaatgaaacccaagaaaatgacacacatacctctcctccaggacctttaacaaaactaggttcctcggtaaagaaagcatctgagataactcttccacaaaaatcacaacatctttggtttgaaaaaaaaaaagaaaaaaatcaattattatacaaagttattgcaaaacatgttctgattctagtttctcttaaaagtaaaaatataaaacaaacaagtaaaaacgattcagcatcttagaataagatactcacattctgccagtctcctcagtagtagggcagtccttttgacaatgactacaccacattctacataaacagaggaaccccaacttagataatatataaaaacacattcttcacaattaaaacatcaaaattcacacaaaacaaaaccaaccaagaatttaatcaaaacattcattcaagaaccacccaaaaatcagctataaagcttcattcactcatatacataagaacaagtctagctgattaaacaagcttaacaagaagctgatcaaggtcaaaatttatacataatgatttattttgacacaacaataaagtaatgacctttatcaaaacagttgtaaattacatattggcatgtataatctagttataatttactcatctttttccccccaaattgacaaaccatgaaaaagcagagattccatttcaacctccaacactgatatacaacccaatatttttacatacatacatgcatatacataaattcagaaaatattttacataaagtctcacaaaagattcaatcttcaaagttaaaaacccaaagcttagttagtgagtgataccttataagggggttttaagaaggaagagggagatctggagttggaaactaccagggcagttaagaggaggtagctggtcgactgagcttacagcagccacggtgaggatgaccccaccggagagagacggaggccggagacggtggggtggagggctccgagaagagcagagagagagagagatgaagtggatttggttttgaggggtttagggaagaaagtttcacacaacgaatgaagacgtgattttctgctatatatatacctttttgcagcttggtcctctaatttatcattgttttataaattcatcctctgctgttttttttttttcaaacaaaatgatgtgaagaaatactcttaatttgcgacataaatattaagtttaattaaatagctacttgaatgttaagtgttaaataaattgtcatgtggtagttcttgattggtccatgttattgaatttatatttttatttttaaaatagtttaaatataccaatgagaaaatgatatgtggataataatttggcatacatacggaagttccagaaatttaacttaagtattattatcgtaaaagtttaaattacataatctctcttttgatttttatttctctatataatattagcaataggacacagaaatcttatgagtatgtttattgaaaattctacaattttctttaatatttacaattaataatttaactatgattagttgtattatttcgcttcgcacataaattaaccatgtggttaagatacttaaccgcactttgtgggttagttaagttttcatcaattcatcgcccaacccacaccacacatagcatatttctattggcttcgaagttttacagttacatgtacacaatggcaattttagttggcgtttaatattaaaatttaaactgacgcttcaaaatttcaaaaaaaatgtgaagttatgggagtattgctacaaaaaaatataatc

SEQ ID NO: 201808 - DNA, 1488 bp, Cannabis indica
agagagagagagagagtgggaggggtttaagaggcaggggaatataaaggaaagaaaaggaagttatttctgttatgttttagcatactaatccttactcttcttcatatataaaaccgttaccattatagccaaccttgattttaaatgttagtttatttctcatagtacaattttattaaattacagtttcttcaaagtttttaatgtatgtatatattctttaacaaaatgtatatatagttcctcgtgagttttatatctatttcttttaacaaagtatgtttaacaataaatattgcctaaatttaaaaaaaaaaaaaaaacaaataaatattgctatatatttttttaacaaaatgtatatagttcctgctgagtttttaatgtatatattgttatttgttacaaaaaaaaaaaaaaaaaagaatcataaaacttcactttagaccaaaacccacttagaatttgtttccatctttcagtcccaagattaaacgatatagactgagtcatcagacaaagtttgttcattatcatagcaagagaattttagggactagggaggggtagtttcgtcatttcacttgctcaaatttaactaactttctctgttttttatttgagaaattttatttgcactccataaagtaataagtgcaccccaatatcaacaaccttaaggaatcaaatggcacaacattggaatagccggtatcctgttacaataactgattcttcagacatgttttcagtaagttttggttgtgcaggagacaaggcaagagttttgcttcgtgagccatatcactttcaaaatcatcatattgtgttacactcacctactcctggacagagtgttcactctgaatctctcatcttcacccctttttgggttcagatatataggcttcattttcttaggaaaacaaaaggacttgctaaagctcttggtgacatcattggcgaatatgtggatgtctatgaggattctctaaacgaagggtggggaccatttatgcgtgtcagagttaagattgatagaacaaagccattattgagaggaagaatgatcactttacaacaagcaaaagaaaagttttgggtagaattcagatatgaaagattacctgaatattgtatggagtgtgggtgcttaggacatccttttgataagtgtctaatctatcttgaaaagatagataatggtgaagaaccagatttagaatatagaactacaatgaaaggttcgacacttccaatttcaagttatgaccgctatagaactaacttctcaaagggtaacacttggtcattactcactcgtttcgctaaaaattctttgatctctacaattccaagtttaaaaaatcaagatcaaccacatccaaaacaatcaatcagcagtgaatcttctcaaccaagtcatatttcatcaatggaaaatgctctgttaattcagttgttggggtttagttttggttgtaa

SEQ ID NO: 201809 - DNA, 1004 bp, Cannabis indica
aataagatttcaaacaatttgttgtattttttttacatgcgtgaaaattgattgtttggaacttttcataaatgtgctgattatatgttataattacaataaatatcgttactttaaaatataagaatttttttatttttatactttaaaataattttttttttattttttataaaatataattcacacaaaaactcacataacaaccaacataactaaaattacaatcaaaatttacaaattaactcacatagaaaatataggagcatttacttgagcaacccaaactagaaatttaaaaaaataataataataatatatagaataattcttcaaaaatatatttataaaaagaagttcaattagattggtttttttttttttccttatccttatatattaagtatggatgtatatagaatataagtaaacatttcattgcgtaggcatcttattttgtgttatctatatagatagcttttagctaggattgcttttcaagtctttttataattgcttctttcattctatatattattctcatatataataaaaattaatccaaaagataggtaataaataatggatgcgaacgaaaatggcaattacaactattctgattcgttcatatcgaattatatttgcaaacaatttaaattattattataattattcactatgtgtagaggcagaaacttccttggtctttttcttgccacatcttcatatattactattatgtatatatacttgatcaaggtatatatgctctaacacgatcgatattccatcatatatatatacatacatatttatttacaacaagtatatgctatatatatatatatatgcaaaggaatattatatatgtgaatatcatcaggacgtctctagctttaatagggtgttgggcaaaatttataatcaaccgttcacttaaaagaaataataaaatgaaattcaaatgagttcttaaaccatttttcttagcaaaaaataaaaaa

SEQ ID NO: 201810 - DNA, 2122 bp, Cannabis indica
aattagttaaatataatagtattcctatataatattatggatagaaatatattattttaaagaaaataatatttattgtgattcttgtgaaataagagactaatgattattaatcaattatcatttattagcagaacaaataataaatttatttatggaaaaattaagaaattatttttggaccttaaaatatggtccacacgtgtaggcccattctacacgtgtagggtgacatataaaggctcatgatttatttggtttaattatttcataagttaaaataatttaagtcaaattaagttaattatcttttaattattaattaaatgaattattagataattgtttaattaaaagaataattataaaaattaaagatctactgatatttgatattcagttattagatatttatatttaaatttgaattctgattcaaattaaattagatatttacttttattttaaataaagaattaaaagactttatttatgatactatatatcctatatatagtatcataaattaaaaaacctaaaacagacaattagaagcgagagaatacgaaaaatagagtgtaacaaagttagagaaaataggaatttatttactcactcctactctctctcacacacacgcttagctctctctctctcttcatctcacacacaaataagcgtaatttattaattacggagatttatttagaatatgtggatataatgtgagttatgtttgaaataaaaatattttcaggtctagaaaccatggaaacccgatttgggaccagaaatgtcacaacagtatttacttacgatattagtggaactagggagttaaattgattttaaaatactgggatatataggggtactaaggtatgaccaaaatacccttatggttgaattattctaaaggttagttatgaaggcaaaatgttaattactagaataggtcatagataactccttagttttaattatatttaaatttatctttatcctttttctagaaataggttttaaataaaacctaatgtttcgtagaagcaattaagattcaaacacattatttacttcacctctctctttcttcttcttttggctcaaaccaaaactaaaaaaaaacaggaattttcttttcctttttcttgttgtgattgaaagttgtggaggctagtttggagtagaagtgatagcctagcccaaggtaacttttagcctcttctttttcatttgatttcataagaaaaagcttagtgttgagtttggtttttaggagtaaggtttcgtatggccttgtttagattagaattggttttgggagcttaaattatatttgttttattggtttttgaagagttttagcagttggtggaggttgagtttgagttttgaaactcaaagttttctcaacaatggaaacttttgattcttggtgtttttgttgtgtttgaagtgtggaatatgatctttatgttgtttctaggtgttttggaaggttttgtagcatttggattagattagagaaaattttaggactgtgaaaacttgaaatttttgagtccctgttgttgtgaaccagaatttttttatggtaaagggttgtaccaaccggaattctgtttggcagtaactgagaaataccgatttttgtattttagccataatttttcactcgggtgtccgttttagatgatgtatataccgtttcaaaacttgtgaagagctctacagtgtgaagcataaagtagagctaaaatatgtattttacttaaggtgttttttatacgagattcggtagaaaaccctaaattgttttatgcaagtattaggcagtgtttttgaatagacacttaccaaacatagggctgagattatcaggtttctccacttaagttggccgacatacataaatctggattaaaggtaagaaaagtacatttgtactacatagcatgttatgttgagatgtgattattattgtttgtgaattgattgatatcgagattaacttaggtgattattgttatgtaatgtaaaaagggtggtcttattagacaatgatcaaaaggttgtcttatcttattagacaacagtatttggataccgaagggttagg

SEQ ID NO: 201811 - DNA, 744 bp, Cannabis indica
aaaaactgattctttgagtgtcccattgagaaatgcattcgagacatctaattgtgtgatgtcccagttgttagaaatagccaaggtgagcaaggttcgcactgttgttggcttaacaatagggttgaatgtctctgtatagtcaatccctggagtttgtgagtatcccttggccactagtctcgatttgaatttgtcaatagatacatcagcatttaattttattctgtgtacccacttatttcccacaagagtcatatttggtgaataaggaacaaatgtccatgtatgatttttcttaagagctgtgtcctccttctgcattgaagcaaaccagatagggttggtaaggggttgttttaaatttgtagggactttaggtagggtggattcaggtaatggatgtagagtagaatggtaggcttttggcttttgaatacctgatttagatctggtctgcatttggtgtgtattggtggtggaaatttgggtaagggaagcaggcatttgattgttggtaggtaaggcagttataggctgctgtgaggggttgattacatgggttgcgtgggcaggtgcctgatcaaaagtaataggagcagtggttattggtggtgtttcagagttaaccactggtgcagaaggatataatgatgcagcaatgttctcagcagcatgcaccattgttgttggaataacagtaggtagcacaacagttgcagtaggcacaaaatgtacagtggg

SEQ ID NO: 201812 - DNA, 2440 bp, Cannabis indica
ctttcattgagaactgaagaaagatgtaaaccactgttgctgccatggttttcacatgaaagacggttcctaagaagacttttcaaggtagcctcgagactgtcatagaggaagtaaaccctctcttgccagagcacgcccagttgagcgatgcgagaggcggggttacatccaacatgaacaatcgagaggacaacccaaacatccaacatgaccgtgtcggtgatgacaaagatgttgagatgaattaagaggaggaagacaatgaagattacgtcaaaggtgggtattacaaagacgactaccattatgagcaagaccctgaagtagctagagtgtctaacgagttgctcgagaccagacaaaagctagcatgttaagagaaattttctcaaaagatggagaaaatgatagctcgccttcaagccaagtttagagatctagatgaggaagattctgatgatgacccctcagtggaatgtgtcggaggaaacactagggagaaccctaccaatgctggaatctctgctcctgcacaggacaaggggaaggtaaaggtaagtgaccctaagaacccccatcctcttgtacctccttgttttaaacacaaattaggccaacaggccttctcaagcatagaaggcgattgatgtcgctgggctcagacgcccttcaacctagaaggccttatagcgtcaaaagggattggtaggaaagcaccaaagcccaagaggaggaaaaattgccctagtgattcagtaaattaggacggttagataggaggatagtactccaacgatagttggtccataatgaatctcaaaaggtgtttggatgccaagtacgagaaagaaaaaagtcaaaaggtgaggccatgtggtaatgacctcaggaaccacttgaacaacaaagtccgtggaagagatctcccaaataggttggaagaacaaatttctacattgataaaattggtccaaaaaataaagtgggcccctcacccactctgaggatgaggacccggagccctgcataagaaggatcacggaagctctgctcctagaaaacttcaagatgccccaaattgagttgtacgaagggagcactgatcctagaactcatttagccaagtacaacaacatgatgcaggtggcaagagtcagtgagaacacaaagtgtttgtgcttctccttacccacaccaaatctatcgaggactagtggaagacaaagcctatgtatacaaatacattaaaggtaatgtagtggtattcgtagttctttatgctaatgacattctacttattggagacaatgtagaaagattatcagatgtaaaaaagtggttagctgataaatttcaaatgaaaaatttgggaaaagcaagcaatgttctcaggattaaaatctatagagataaagagtagagaacattatcactttctcaagcaacttatatcgataaagtgataaagattctcaatggagaattccaaggaaggacagttaccgactagacattgaattactctttgtaaggatcaatatccatagactcctcaataggaggaggacatgagaaagtacccttatgcatcagcagctggaagcttgatgtatgcaatgttgtgtacaaggtctgacatatgctatgatgtaaggattgttagtcgttatcaatctaatccaggtttggaacactggatagctgtaaagcacattctcaagtatctttggagaacgagagatctcatgcttgtatatttcagtggagaattgaatcctattggatatactaattttgattttaaagacaaagatagtcaaaagtcgacatatgggtcagtatttactcttggtggatgagttatagtctagagaagcattaagcaaactagtattgcagattcaaccatggaagccaaatatatagtagcttgcaaagcagtcaaggaagcggtttggttgaaaaaaatttacattgctctggaagtagttccagaagtagaataactactgatgctctactatgacaacagtggagcagtggccaactccaaggaaccaaggagccacaagagaggcaagcacattgagaggaagtaccatctactaagagatatagtagagagagttaatgtgacggtcttgaagatcgagtcaaaacataacctgacagatctattaacaaagacgctaccagcaaatttttttatggattatataaccaatatgggactaagggagatgcccagtttgcttttagggaaagatggagattgttaaggtttatgccctaaaaaacttataaagacatttttgattattaataaagagttaaatattttgatatacgcatgaatgctaaactattaatatttattattaaataatttatatataaatatcagaacattcctcatttatatatgaggttgtgactt

SEQ ID NO: 201813 - DNA, 1146 bp, Cannabis indica
ctcaagtccagaacagctacaatttatcactatgctactgtacatttgatatatgtccaaggtggataattgtgaaagtggttggccaaatatcaaatccctaaagtacccctactgaacttaactatattaaccaactgtctgttatgatagttggtgatcgggtcctacaattcagctgaaaccttggtatttaagggcctctcattcaatctgcagtagccaatattttgagagataatagaaacggaaagagagagagttttcgagagcttttgagaaaagaagagtgttgccttgaagtgttgtaattggagtgacactttgttttgtgttcactgccattagaggagacaattactgaagctttgcctctcaatttgcgtaatttgtagctattgtaatctctcagtttgaagctcaattaatatagactctcaaagccatcattgtggctgtttctagtcgaggatgtaggcaaggtaatctaatcattatcttgttcgaacctcgttaaaatctcttgtgttctttatgttttaatgttctaattctctggtttaagtgtaactgtattggtgtgtttattgttaattggtttcattgatctttttaccattgtttcatgttcttgttgagttgttgttttcacaacaggctttaataaattgagtgaagtgaattaatacatgtatatatctacatgtgaaaaatttgatgtatatatttgagtaaggacttaagcctacatgtaggctaaagtctctccgtccctgcattcaacatgatgtcaagtaagttctcattaataaaaaagaaaaaaaaaataaatgataaggtcaacagtaaaaacaaataaagatcagcttgaatatataagcataagagtaaggacatgcaacacccaataaattattttaagctggcagcaactttattttatgtaatgccctcttctaatattgtcctgtaacagtttattgattgggaaatgggtatatatacatataaaatatactgcgcatccttagtcatccactaccacgacatgcataatgctatatatgccaaaagggtaaaaactaaagaaaagaaatcatctgaactgcacaatccaaaacagaagactattattattattattat

SEQ ID NO: 201814 - DNA, 508 bp, Cannabis indica
ttgagcatgcttatttatttttattatataaatatgatgagaagactgaaatgattaaaacttattttaatttttcggtataaattaaaacgtggagatcttgacagttgacgcattctattctattctactagtcttaggtagatgtagccctcttttatctaaagggactcctaaaaagttaagacaattttaaactaatttcatgactttactagctactagctgtgtctggcagttttagaatgctttccttataaattttttttacattccatgatggatgtctttttagtttttatttactgttttgctaatagggtgattcatagttttgtgaggatgtcttgttcttttatttctaagttgttatctgttgcataaatgtgtttttaattactcaaatgatttataatcttatcatataaatagatatattgtgtgtgcattgatttcatatttttggagtatccatagtcacaagatgggaaagtatccattgtttttt

SEQ ID NO: 201815 - DNA, 3897 bp, Cannabis indica
actttgagtttgctgcgaagatatttaaatcgttctttaggaagagccttggtaaatatatctgcaacttggtcaacagtagggacataacgcacatcaagctccttgtttagtatttggtctctaacaaagtgctggtcaatctctatgtgcttacaccgagcatggaaaatcggattagcagccaaagcggctgcaccttgattatcgacccatatcacaggaggagtatgtaaagtgacttgtaattcagaaagcaaagaacgaagccacatgatttcagctgcagtgttggctaaagcacggaattcagactctgttgaggatcgggctacaacctgctgctttttagcagaccaagagattaaattggacccaagaaagatggcataaccaccagtagaacgtctgtcatcgatgcagcttgcccagtctgcatcagagtaggctgcaatggtcatggtgtccactggtttaagaagaataccatctgaaatagtgcctttcaaaaaacggagaagcctcttgcatgcctcccagtgaacatgtgtaggagcatgaataaattgagacaatttgtttatgatgtaggcgacatcaggccgagtgagggttaagtactgcagagcacccaaggtgctgcgatatagggtgatatcttcaaaaggaacaccttcagcaagtgacaatttgtgtgcagtagaggtaggattagcacaacttttagctccttccatattgacacgagtgagaaggtctgttatatacttggtctgagacaaataaagaccctcattcgttctatgaagttcaacaccaagaaaataatgcacctgaccgagatctttaagtgaaaaggcagagtttagatcacgaataagttgctgaataagagctgcattaggacctgtaacaagtatatcgtctacatatactaagagaattaccagatcaggacccgtgccatagacaaacagtgacgtatcagcttttgaggcaacaaatccccaaccaaatagtgtagacttgagtttatcgttccaagcgcgaggggcctgcttcaagccatacaaggctttatgaagtttacacacatgtgtgggtttggtgggatcctcaaagccttgaggctgagtcatataaactgtctcatgtaaagttccatttaaaaaggcatttgcaacatctagttgcctaatttcccactgaaatgaaatagccagagtaagaaccaatcgaacagtaaccggcttaaccacgggactgaaggtatcttcaaaatctatgccaggtttttggagatatcctttagccaccagacgagatttcaatctatcgagagtcccattagcgttgagctttaccctgtgaacccacttattacctataaggtgcatatgtggttcatagggtacgagagtccaagtgccttgagaaataagggctttaaattctttgttcatagaaccaaaccagccagggtgtttgagtgcagccttgagagactttggctctgtgggaagcagagattcaagcaaaggatgcttggtagccatgtatgctttgggtttaaaaatccctctttgtgatcgagtgaccatagggtgagttctgtgtggaacttgtgatgcaggagcatgcgcaggcacaggagcttcaggaactgggctcacaccagtagcttcaggaacatgatcatgagagattggaggtgtcgacactgctggaggagaagtttcttgaacacctgatgttgtagcaataggataaggcaaagaggagtcattgaaatctcccgagttagtagcactgagattgtgcaactggtgctcatcacagataggctcagcagcatagtcagaagatgttgcagatgcaggaacagcaggattagcaacattgcaattgtgattagggtcgacaggagaaaaattagtggaaaactgagcagtaggaaagtgagttgaggaagatgatacctgtgttgcagagatggcacggagagcaggatagacaagctcattgaaaataacattgcgagctataaacattctcccagtgagactttcacacaggtaacctttgtgcttgggagaataccccagaaatatgcattcctctgatctgaaatcaagcttgtggtgatgatatgggcgcaaatggggataacaggcacaaccaaaggatttgagaatgccataatcaggagtttgttggaacaaacattcataaggactgagaaaattcagaactggtgtaggcattcgattgatagcatgtgtggcacattggaaagcgtgccaccaataagtcatatctaacccagattgagcaagaagagtaaggcctgtctctgtgatgtgcctgtgttttctttcaactctcccattctgttcatgagtgtgggggcaagaatgctgaaaccaaataccctgatctttaagaaatctgtcaaagactcgaaactcaccccctccatcagcctgaacccgtttaataggaagattaaactgcttttccaccaaacttttgaactgaatgaagagttcgaaagcttgagatttgactgtcatagggaatatccaagagaatcggctaaaatcatcaacaaaaacaatatagtatttgtaattatcttttgaagcaacatgagaggctccccatacatcagtatgaatgagctcaagaggttgattggctcgagaattggacaaaggaaaaggaaggcgatgactcttccctttttgacatgcactgcagaactgtaagttcttgagagagtgaggaatgcttgattgtgtcaagattttagaaagaatttggggggcagggtgccctagcttacagtgccacaagttaatatcattagcagtattaataggagaattagacaaaaaacagtgtgtattattgatattgtcaatattacaagactttggagtacttgaacttttacacatagaacaagaacaagaaataggacactgttgtgatacacaagagtatggaatttcagctaaatgacattgaatagaggtattagacagactcgagccttcatcaccaaggagatacaagccatctttaagttgtcctttgagcagaacagcccccgtttgcttgtccttaacaaaacaacaggttttgtgaaactcaagaaagacattattatcattagtaagctttgaaacactcacaagatttttagtgatagaaggcacttgtaaaacagagtttaattgcaaaggagatgaatttttggatgaaagaaaggctttaccaatatgagaaattatgagcttcttaccatcacctacagctacagattcagaaccagagtagggagtggtggtatcaagtggtgcttcattgtaggagatgtggtgtgtagcccctgtatctacataccaaccttgatcatctccaaagtcaggtacattttgagccacaaagacagtgggatcgtaatcaaggatctgttctgtgaggttagcttgaggctgaggattccctatgacagatttaggagtcacccaattcttgtcaaaacgataatgacaagtgggggctgtgtgaccatatcgcatgcaaacttgacacaatggtctgttgggattggaagacctttgatgatgagagaagtgaggaccacgagatggaaatcgtgatgaatcagtggcctgtcccttgccagcattgtgataaggcctggaattgccatttcgagagccaaatgtgagattggctgccattttactggagagatctagcatggtggtgtgacgttcaagccgtgtttcatgagaaagaagcaaggcttgaacttcttcgagcgagagatcgtcactgcgagtggtgatgccagacaccacagagtcgaactcaggtccaagacca

SEQ ID NO: 201816 - DNA, 852 bp, Cannabis indica
aaaattaatacttttcatttaaagatcaatttgaatcatttattgcttatcgatctaataaaccttttctagaaaaatatatatatatatatatatatattatgcacaatatttacacatgtatctacgttgctataattaaacagatagacaatctgtataaaatcctacaaatatgaagtgtataagtaattcatatacttatttgatttacaaattacttataaaggttcgtcaccttattaattatttataattatttaactattttttttctttaatttaattaatgtcgtggaccactatatatacgtcaatctcttatccaattacatctatatatcttatattaattactaataatagtagtatatacacatatagttccttttgctactaatattctagaaaaatatggcatagattatatatattgttacatatatcctatatagctagctagtaaaataatgagaacatgatgatggtgaattggcaaggatgtcgtttgttgccataacaaaaaagagaggtagttgtgaatttaattataataaaatctcatggaatgaattaaataaaataatattgactaagaccacttacacaagtaaatccaaattaaggattcattgcctaatcaatcataattgaccaaaaaaatttgtctttgtatcaattcatcttctgtcttatcaacactaccgccgatccaaggattttgcaatccaacctccatatatttattactttttttttaaaaaaaaaaaaaactaacatttgatattttaatattttttattattaatgtaatttagtctaaaaaaaaataactacatcattaagacataa

SEQ ID NO: 201817 - DNA, 1308 bp, Cannabis indica
gtttctgtttttcttccatttctgattcaaaaatcaataaagatattgtatggcattataggttgagatatccctcttgtatcgaaattcatccattaaataaaactttgaattttcattcagattttaactctttatttcattgttccatatgccattatgccaaacaaaggagactgcctttcatatccaatcacaatttttctgagcattgctttgatttgatacatgttgatatatggaggcctttcaatactataacacatgagggctttaaatattttatcaccattatagatgattgctctaggtacacatggatccaccttattaagcacaaacctgaggcacaaactgtcattctactgtttataaaattggtgcaaactcagttcaatcgaataattaaagcctttagatttgataatgctaaggaattgcagtttgatgtgctgtttaaagaccttgacatcatgcattactattcctgtgttcaaagaccacaaaaaaattttgtagtggagagaaatcatcagcgccttcttaatgttgctcgagctcttcttttccaatcctacattcccttgtgttactggggagaatgcaaagctactagtgcatatttgattaacaaaacccccacccccactactaatttgaaacacaaatctccctttgatattatatattttaagccaccagcctatgaacacttgaaagtatttggctgcttaacctatgcttcaacattgagtcaatctagatccaagttttcaccaagatctgctccatatgtttttcttggttaccctacaggcatgaaagcctatagatcacttgacctcaatttaaacacaatttttcattccatggatgtgtatttttatgaacacatttttccctttgtgcattcaggtggtcttccaactgtctatgaaaaaattttctctgaaacaccacccaatttttcttataactctcagcttaacacacatcctaatgacaatggtccatccaataatgatcattgtgttcctattcataatcaatctattgacaattctgatcaacctgagatcagttctgatgttggtaatcctgatccacctgcttccaatcctcaaaccaaaataggaagaaaagttactaaaccttcctatcttcaagattatcattgctatttagccactaatgcttctactcacatgtctcagggtgtttttgtcactccacatcctctctcacaagtcatttcatatcactggctatctgttactttcagagctgctgtgctggccatatctagcc

SEQ ID NO: 201818 - DNA, 688 bp, Cannabis indica
cgcgtgagaatcgggtactatagggatggtgatgaaaacgacgtcgtttcggaagagatctacgtatcgaaaaagttcgttgggacgatgaagctgatttattatcaactggtgacgagttttttgaaggttggagctaccggcatcggcgggcatcagttgaagttggtgaagaaaacgacgtcgtttgaggtggaaagtaatgggaagaatcagaagaagaaggcctttgttgagaagcttgttacgacaatcaaaagggtttttagattggtaaacaagaaaagtggcaaaaatagcaataataatgctatttctgtgtaagtaatagaagttagaacaaagttagggacctgtttgcaaaattgtcttattctctttaaggggggtagtagcaaagtcttattttaattttcttagggtttcttttttctttttctttttttaaatctaggtatagtttggttctctgttttcaataattgcatataatgttatttgttagtacgttactagacatatatgattttaattttatttttaatactaaagtaagaactaatctacatgataaaaccagagttttctaattttatctttgatggaacaaatgttctaacataattgtaatttaagaatgaatagaattttttctccctaaactataagagttttgctttttaatttt

SEQ ID NO: 201819 - DNA, 1489 bp, Cannabis indica
gagtagcatttgatggttatctttgtcgttctataaattaatgttgtttgctgtcgttttttttaaaatttattgtcgttttcaaatgtattgtcgtttttcaaatatattgtcgttttttgtactttttgtcgtttacctttttaatagcatttttttcgtcaataaattgtagttttctccaaaaaaaaaaaataaaagaaagtaagtgttagtgtattttatttatattataataacaaaaaaaaattcctaaaagataatatttatcataaaattaaccatcattgtaatttttttttaaagactcaattaattcaagatttttcaatgaaatatagcatagaaaatcatgaacacaattgataatacaactttgaataaaatttatttatcacaattaagtataataataataaataatgataataatgataataataatttccctgaagaaaaaatacgtttctaaaaaataatgagacgttacagaatttaaacctcaaaacaaattcaatttaattaaataaagacacataacggcaatcaaacgacgtcgtatcaagaaatctaatttaaaaaagtttcaaacacaacggacaatgattgtccacgtcatcatgccacgtggctttcgatttcactactgtccaaaaagtaagggttttggtttcttctttctatatttcccgttacaaccaactcgctcaaaatcacagagtcgactcagattcaactcgttccatttccatccattttcttcttcttcttcttcttcttcttcttcttcttccagatctctctcgatctctttctccggtaatgaattttcttagcttaatttggggataaagtttgtaactttagtttgtttgtcttgtttttttttatcgattaatcaattaatttttcatgttcgttttgaatgtcattcccgatttggagtatgttaatggaagtaagtctcgtttggtttctttgggtttctattttaggtttaacagaacaatgaatcaatgatttaaacacaagaaaagtgttttttgctttaatttacttttattatttttctgttatagcatttgtattcttcttccaaaattaaagctaactttttttattattattatgatgtgtaatgatgaatggcttttagcttaagggattatgattttagtaaagtgttaaaacatgttgtggaccatatagctaatcattacaatggtcatcaactgtacccaaaaagaaagatgattgaaatgatattgggatttgttttgtttttattagttttgggaaagatgaatttttgggcatgtttgattccaattttgaaagaaatttaaaaattaaggtcaccattttcacttgattagtaagctcacatagcaaatggttagattgtaatatggtttatttttgaagtaacagaaagaaaaacaactactgaagtgggagaataagagttgaaaagaggattgcttacttc

SEQ ID NO: 201820 - DNA, 1506 bp, Cannabis indica
gtcttcaataggaatccaatcaatcttagaaacagactcatcacttacaaacttttcttgaagagccatggcatcgcgggccctaacagtatgatctatcataaccttcttccccttatcttggtgagctttgtgctccttcttcgatgagtcagccgcctgtgtaggaacagcatcgctcttcctcgtttgtaggactattagagacatcttcgcagtaccaactttgggctttcggctaaaagttgcagcttgcttaaggaaagtcgtttctgccataagatcataagtaagtacttcttgtcaaaatggaaaagtgttttatatgccatagtatattacctgagcttggtctcaaagtctgtttagataggcgctggtctattatttccttttgcttctagaaggttccttgtatactagttctcactgaagtttggagttctctgggatcagcttatgttctcgcaattttgtagtagtacgtaatcgccagtcgcgatcttctacatgaaggccacttaaaacttcaatgatctcccgacgagtagggtccaatatagatcgaaccggtctatctacggtcagtgacaatagacattagaaattataaaagataatgacaaaatatgctaagtgttaagacatgcgacatactaggtcaacgattgaagtcaactctaatccctagaattttaaatgcgtagaaccatttggatttccaatctcccatattagaaaccgtgccttctaccccgttaatttcgaaattagcccatttactaaaatagtgaaagccgttgtcatggccgacgctctttatatcataaaagtagctaagtcttccatcgttggttcccctcgagcatactccatgcacaccgcatgaaatcccaatattatgcgatagctattcagagttaattggaagggagaaacatcgtaacatttgaggatggccttcacaaagggatgaaaaggcagcgtcactccacatcagagaataggaattgagaccactacattttgcgtagggatgatagcgagattcgtgaagggaagattaggtcgctgggatgctaaacatgttgaagtggctgtatgaaccaatttcagccgtgtaaaagtattcaactctgatttcttgactcgcgggacaagatcctcgcatgaaaatggttcatatagttgagtgttaccgactgagtccgtctcacttccttcaacttccctctcttcctcagaatcgcgatctagtacctcaaaattttcacctatttcttcaacttcggtgtcaaaggcgtgtctcgaatgagtaagataatcccgagctgacaccgtggactcactgtcgtgtatttcgatcattactctttcagcaagttctcgaaccatcttatctatctcattagtagataggaagccctgagggatcctgggtgtaggggcttcatccttagatattgaggtcggtatgaagctgtcccttctttctatttcatcagt

SEQ ID NO: 201821 - DNA, 712 bp, Cannabis indica
taagagtattacctccttttggaagcataaaacacccctaaacataggaaaggaggataaactcagtaaaacaaggatatttctgcatgaacctgccaatttccattatttaaatcactaacaaattcattatagaacatgtatttagtttatgtttatagaaaagggcagcagataagaacacttaggaaaggacctttgaaaatattcatttagtcaaaaattaagccgtgtacacctagctgttgaaatgcttgatgttaggtattggctggtatgaaactttaattttgtttgagacacttggggataaaattcaaagtagggttttcctaatatctctacaatagtggaacaaaatatatgctctgacgacaatgttgtatttagcgaacctcatcctggtcctgcacttctaagagaaaaatttggatttctcttgttatttcagtgttgctatattatacggctgtcttcatttgtttctaactgacaaaattagttatctataagccctgaggttctttattattataattattagtttaaaaagtagatgttaaaggatatagcttcagactaggaaatctctagagaaagttcgagttcatatatgactttacttggcagttcgtccttttttttcttttgccaagtactctcatttctgattctgtttttaatgattagacttgtgttatttagtggtaga

SEQ ID NO: 201822 - DNA, 1908 bp, Cannabis indica
ttcgtacgtggatagagttttctcttttttataatctttttctttgtcattacctttactgcatcacaaactcaatcaacacagttttgtttagatgaaaattgatggttcaactttcaaggcacagcttaaataaataaatgttaatattggaaaaacaatgtcccaaagcattgtcttcttcattatttttatttgttgttcaaacttagacagctgctcccacaatattactagattatattcgtttccagtcttatatgtacactaaggagttaatccatatgagattccaaattcaacccataccactttgagtaaaatacctacaaaaaaggaaaaagagggaaaacagacatcataagtacaaaattcttcttctgagatattgatgaataaattaaggagacaatggattacattgtacacttgacattacaaaaacatataaaaaaaaagggttcaaacagggagtgtttcttgaatttgggcatcaaagcgactgtgagttagaacttccctcgctcgcgcactcctatactgaagacgctggtggagtgtctccgacatctggttgaaaaattcggcatcccaccgatggattaacaagggatcctccgcatagcatatgtatatagatgtaaccgcactttccacaaccaccattgccagtccaacctgaaaattacaccttcaacttcaatcccgttcgccatgccatataagtaaactcttaactgggcataccatgctttaataaaataaataacctttatttagactaaataacacgttatagtgttataccctctaatgccataaaatcacggatatacgccctacaaacaaacaaacaaacaaacaaaccaagatatctatccttgcccaaacttttctattttagtattttatattattatgatacacaaaacactcttctctgatatatactaaaaggtaatgaaaatagactggagactataaaataattataataatttatcataaaccaacatgtaatcaacacccaaatagaaattgcactctcaccaccaccttattccactgttgccaccctacctgagggtttctttagcctcattttccttcattttatgatccttctagatttatttccttcttgatatgctcttttgttgatatatttaaagatattcaaagaaataaaagatatttcttttatttttctagtctttggctctttgatcacttctataaaatggtggtgttgagatgttgtggattcccatggtgaaggattatatgaagattttgaattggaaataagcttaaggtgtccaacactataagacgtgaaatttttatgtgtagttttttcaagcacatttatgcgttgctataaagcaccttacatgacaccttaagatgctttcattaatttgtaaattaagctctcatttgtttgtttgtgtatatttgtcccacattcttcatatgtgtgtgagtagtgtttatattacacttaaccctataatagagttttagtttatgtgattttaattaaaaaaaaaaatctttataatattatgaaagttccaattttaaaattataattgaagagagatgaaaataatttaagaagatataaataagccaaaggtttttttttttttcttttttgacgatatttttatgcatttgatctgaatgttatttactcttggtttcattttaaaaataacaatttcggttggggtaccttttttattttattttatttttttcaaaaatagtgggtataaattttggatttagccccaagatatataatatgatatttatatattagttggagcgtgaaagaagaaattcacaaaaacgaaagaaacgaccaggatttattgttattcagatacagatgagaat

SEQ ID NO: 201823 - DNA, 942 bp, Cannabis indica
catctgttttgattaactttgaaattattggaatttggttatcaagttgatttgaatttgattggttggaaaatatttataatgatgaagtaataaattccttcattccttttacattcttgttttttttaatcaatggcccaattgtcttctgaaattaacaatattttggttgtgattcttttacacactcatctcatcttcttccatacacacttaaatccaaaacttgtaactttcattattctttttgtgttcactaacttcatccataaacatcttcaaacagattaaattataacagaagtaattatttagcatctcatcctattatatcatcaactaattggatacaaatatataaaaataactaagtgatccaatgtttaactttgtctgtactcaggtccggtcctaattagttaaggtgggctaggcccgtgcctagacccactcaaacccagggtccaaaaattttatatattatattttttttttttgcattgaaaaaaatagtatttttgaaaaaatttataaaaagaagcacaataatactcacattcctagataaaacacatacttaacaaattacttgggcccattattactcaggaccgaccttgtctgtttcatacatcgtagtattatgcattgaattgtattgtataaaaatgtgtaaggttgaattttattgtattatatagtaatgtgttaggttgaattttattgtattatataatgatgtataatacaatattatatttacttctattaataggttgtgtaaaattatattatttttactataagtctgattctgattgcagcttgaacttggtcctggccccaaccttggattcggacctagaccaaggactccgacccgaaccccaatgcccacccggaccctggccattaaccccgacccacaatcatggaatc

SEQ ID NO: 201824 - DNA, 1645 bp, Cannabis indica
taaagtcaaaaaataaaaataaatatgaactttatataacatacttttgctttctatttttgaaattgaaaagcaaaagtagttttaaaacgcaatttttgtttttaaaaaacaaaacataaaaattatattttcgtgattaaaaaattaaaaaacaaaattagtataaaaaaagatagcaaaattcgtaagtaaaaatatttttaaaaaataaatagctatttaaaaataattattataatatgtataaagtttttattgtatacaagcagtcctatcgtaagagtatagatattatattttaatgaccacgtgatctaaaatcaatggtcaaaaaagcttccttaccggtagggaacttatgttaagtcctaccatagtcttgccctatatatataactctgtttatttttataattttataatcatattatttagattagaaatttcttggagttttgcttagtgcaaattcttgtcttttcgttttaaattaaaattttgatgcctccttataattttatgctcggtttgtatgtaattgtactttttcaagtttttgcgattgcttgattttgtcattataattctaaatatttataagacctgaacttcttatatcaattgtcattagtgtgcatatatgattatagttgtttattttgttggagagtcctctgttttgatcaatgttgtttgacttttttattgttttgaatatgttttttgccatactgtttacttggtgcttttggcatcgactttcgtctgattctatttttggaaaaaaaaagttatttttcgtgatgataggaaaaaatccactaattaaagtaagttaaggaaaattataacgacattaaggtaaaatttgctcttttaatttcgagtaattatagacccatgttgggttatatacgttagtatttaattaccctattatatgtgttaattctctcattaagttccttttatgttattcgatttaaaaattatttttcaatccgaaaaggagttcttgatggttagttgttcccccttgaaagggtgtcccaaatagtcgactctagctggcaccgttcctatccaggcagtcccttcagtgtgcatttcggactgttgtcctggaagcactattgacttatgctgacatggagatacatttacaaggagtttgttaaatttgtaagtcgtaactaacttaacagtttaatacttgcaatcaccgacttaggatctttatcctgagcctataaataccactcacacttatcattttagaagataacgagttcagacgagttttgaagagagagatttaaaggtagagagataggggtacggagaaaagagaggaaatgggtttgggatttgtatgaataatcttatgtagatgaagaagattcttaggtaagagtgtaagagttaagcattttgagaaaagaatctttctcgactgtagtgtaccctgttcttgctcaatccataaagaatatttagtggtattttagaactagaatagagctattgatcacatcgatatataggacttgaatcattatatatcttgatgttaattttattattttattactttaatcatttctcgttttattactatgtttattcttgttttttttttttt

SEQ ID NO: 201825 - DNA, 621 bp, Cannabis indica
cttagagaaactctaaaaatgcttttaagaatatacaagtctcatatgctcaacctagtatctaaagatgatcatattctcaccaagttctaacaccacacaactagtggtttcaacaagtgtgatggtcgatgttttgcaaaaaataatttatttttacaataagaattattaaataatttacagtaacaagttggttacttcctcacacagaatcagaactaccagtagaaaaatgattattgttgcaaaagtttatgctatacaagtgcacgtattgctttcagtaataaaattaataaaaccaagtatcagccttaatccaattcgccaatattaatcaattaattttttaatttctatttagttaaagaaaaattgaatttttaattcaatgaaaaaaattacataaacaataaacaaagcgctaataaaacaattaataatggatgtatttgaaacaaagcaataaaaaaattaatagggcattcaatatcctcaactatcctccctattaatccctaatacaaaaattaatattcttcttctaattcaaatagtaagttgacaaaagaaatgtttataatcagatgatgacttataaactcaatctaaatgata

SEQ ID NO: 201826 - DNA, 857 bp, Cannabis indica
gatcactagagcctcttagatacacaaactgctgcactttcatattatatgaatatgaactaaatagacgccgttaagcgtttattaaagtgaaatataacaatgtttttacatatcacaaataaaaatcgtgaaattatgctaaattgcatcattttttttctatatatttttaccaaaaaaaaaacaaaataaattattttcaaaggacttttataatttagtaaaacataagacatgcttgcattaaaaagtgggactaaaaccatatttatctggcgaaagggtacggactacggaatacggaccatgtattcactattgaattcgggaaaaatggagatattgttgttattagtcaatatcatctacacgtactgtccgtattcactcattatttttacactcattatttttacacgttattgtttgactttcttgaaaaatatatagttaaaagtaaattattacttcattttcttttgaatggaaatcaaattattacctattcaaagtgacggatattttctaaaaaagtttttaattttatttcatcactttcataattatagaaatcgatccggggaataattttagtattaattattgatttacatttggtatatatttttagctaaagctcaggaacataaaaaaaacagaaaattgatattttttttctttttagagagaatattgagccattgagggttttgatatttatatgagatgttacgtggatgattaatcgcgtggctagtaaacaataagtcatgatatgtaacatatctaaatggtccataatattacaaactacctgaattcaatgggaatatattaatttttttggtgcaata

SEQ ID NO: 201827 - DNA, 800 bp, Cannabis indica
cttttttttttctttcttattatacacttttttatacaatgaaaaaaaaaacccggttcaacatattattgcatgttttggctataaaaaaccaataaagaaaaaaatcaaatttaaaaacataaaagaaaattaaaaaaaaaatagaaaaactattaaaatttttcacctactatttcaaaatcaattaatattccaccaaaataataaaaaatcatttcattaaaataacattccaacagtttaaaatgtaacccaacaaaaaaataaaataaaaattattttatttttcattctatttcgattactaaactccatctaataaatttctaacagggttagtttttgggaaattctgttaagttttattacctttctttcaggattcttatttactgtaccattccatttaatttgttatttgtagagaattttagaaaattaagaccctgaaatttgagaagctaataatctagtcatcggcaagttataacaaatatggagcctaattgtcagataaatggtaaaatcaaaatcccatttgcaaatctacaaacaatattagagccattcacgttaattaattatattttctcaacacaaaccagctatatacactaatttggatacacttacatatccactgtaataattaaatttctagtcctaccaaaataaaaattaaatgtctagaaagacgacaaaaattaaggaaagaataaattataaatcaacaaatattttgacatttgaatcagcaaggcaattataggttcgacaattttgatagcaaaactgca

SEQ ID NO: 201828 - DNA, 381 bp, Cannabis indica
cattgacaaattaatctctgttctcaacctcatgtgtatggatatgtttgtgttatctataaatgtacttccttgcatttcaaatttacatttatgatatcccaaatcagctatatatataatataattatgtatatatatgttatgtagtttgacatttgatttctagtactcttatttatgtttatatttaatattgaaaaaaaattatagtaatacacaccttttcagtacattttttatttatttgggtatgtaggagaacattaattgtaatccaattattttgataatcatgtattttatacttatttaagatcacttataaatttttagaaaatttttaaataatttatagtgtcaaaataagattcaattaaa

SEQ ID NO: 201829 - DNA, 968 bp, Cannabis indica
tataatttaattttaaatattctaaagtaaaaaaggttatataatatacgtaagaaataacgtatatgttatcaaaataaattattaccataatgatcctatacgtaaaaacatgtgggaatttaatataaactaataattaaagcctagctagttaaatatataaaagaataccatcagctcatccatgtaaagaatagttctccaattcaataagagaaatgttaaaggagtatcttatattgttattagtataaattaatatggagttttatataatttgatttaataaataacataagaaactgctaactaatcttaatgcgccacgtcattatagtgtgttggacaccatatggtgcctagagaaattatgtgtcaatatcctcattagtttaactaagtatcatgtatataattaaatgtaataatttttagaaagtatcgtctagccaatcttaaggcgacatgtctagagatgctaggcaccactaatctctaataacaatgttatagtacctaataataacaatactcattaaataaccacttagtcaggcccggccctgggcataggcgggctaggcctgtgcctagggcccacccagcctaggggcccaaattttttttttcctcttttaaaattatacattttttttactgattttgaaaaataccacattttttctaacataaaggcccaaatttttttttttctccctatggcccactttgtttcatggtcagccctgcacttagtacccaatataagttattattagtatatttcatataaacattgttattaggtatcagtagtacattaactaaaagtggtaacattaactaaaagtggtgttttattattaattagtaatattttttaaaaattattaatatgagatccaatatttaattacatatatatacatacaagtgtaatatcttttaacactttttattttata

SEQ ID NO: 201830 - DNA, 1861 bp, Cannabis indica
gtgaagttaagtgtacaaaaattaaaacataataaaatttcgtcaccaattacttatgcaaataaataaaaagttatgagtttaaattttaaattctaaatcgtaaattctattaacctcacaaaaaaaaaagtacacatatatagttgtttgtcttttaaagtggtagtattgttgttttggtcccttgttatatggaaaaattcgaccatctttttttagtttttttatttttatactttaaaatagtttttttttttgttattttttaagtaaattcacataaaaactcatatagcaatgaatagagcaatttaaatcgcaaccaaaatttacatagaaactatcggagcaactcaaactataaattagaagaaaaagttaaaaaataatatatgaaatatttttttttaaatagtggggagaagatttaaacttgggacttcaaattatatctcttaaaaaaagcaaaaatatgaaaaataaaaaagatagattccaaataagtaaagtgaggataaaaatagagaatgagatactaagatatatattcttatttaaagtctcggaaaagcacgtgatctgcacgtgactgtttgtcccctgcaaaagtaactgaccggagaatacaatctcctttctcgccggcaatccaaaccaaaccctagcccccaatccaaattcccctcccttcaatccctaacacaccttttcaatttttctggcttctacgtcggacccaaatgtctttcgtcgaggactttcaaaccagtatgctcctcttccttttaattttctacgaaccctaattcccattttcaataaagtaattgtctttttcaaattggggctaatttattttaccatttatctacatgttttcactttatatgggagtaaaaatatgaatttattttccatttggcttcatttaacggggaatttcattcatattcactttgttttgtataaagagagcattttttttactgttcttttggtcttattctggtaatttaggagtttttgtttaactctttgaactattgtatttatgtaagtcaaattgtttgctatcaagtatcaaatttgcatcttttattctcaatcctaattatgagctaactgggagaaaataaggacagggtttagagtaattagtagtaattttttgtttgatttttcttgttatttaatgtggttgcactgcacttttgaaccttatatgttgatattaaacattcttattcttcttgtttatgaaatgtgcttttatgcaggcttggacgcacttcctaatattttacagaagaagtatgctttgttaaaggatctagataaaagtttacaaggtataatttgaatatcaccattaagtgttgtagagagattaacttagtaataaacatacagtgccttacacttttgtctgagttcattgacattaaggagtgattgatttgaactttgaatagaactagtataccatgaagagatagtgaactttgatttgattgagagtgtatgtattgtatcaccaaatatatttataatcaaaatcacatttggttttaatgtaatatggtaataaagatatttttactattttgagatttttctcttctgattcggccaagaaattttatgtatttgagcagatcttcagaaacagaatgagcaacgttgtgaacaagagatagaggaatttaaacgagaggttaggtcgggaaatattaaacctgatgcttcacttgctaaattctcggaggaggcacttgatgagcaaaagcacagcatcaggattgcagatgagaaggtagccttggctgagcaggcttatgaattggtacgcaatttccat

SEQ ID NO: 201831 - DNA, 879 bp, Cannabis indica
aataaattatcaaataatttttttgaaaagtctatccattttgtggacagattttgtaaatagataaaaaaggaaaagcttaaaggtattacaattattgtttcaaatgtgaataatttgtaattttcatttatttaattttgggaccaccaattaaagacatggggttcttcaatgcagcacaaaatgtgaatcaaaagccattagagtcagatccaactcaactattgatttgtcacattagacaaatgtaccaattatgtattcggtgcccattatgaaaaaatgaaatgaaaattacacttttccccaaaaatcagagcatgtcgcataaaatacgagtaatattaatatatcatcaaaatttacataataataatttcaatataactcagttcatactcacgtgtcattgtcttttttggcccatatagtcaaattattgtacaaactacaaactcctagacatgtaaaaaaaaacctgaattaggtggaaaactgaaaacatcaccacttaattacctttacttttattttgcagtttaatccctatattagtgattattataatactttgcatgtaaaagtaaaaaaattactcatggcttctgtgtataatgtagatagacataaatgtggattagatttagattttatttatttattttactttttgtaaattaaattttggagaggttttggtaacatattattgtaatggttaaagcttgttttgccgtctaaaaatttcaccgtcgaattcgccatccattacacgcttcgtcattccgttaacccatcaacccaaccaaagctttcttttgccatcgacaccacaccatacccattttcacaacaaagacttctctctctctctct

SEQ ID NO: 201832 - DNA, 641 bp, Cannabis indica
tcagtagctggggttgaagtgaataattttttaaagtaatcacaagtcaccttgcccatatgccggttccctgtaacccacttcagcttctcatccaccagcccttttattgtattttttgcctttctattacaactcttccgatgaaaaaacttggtattcttgtccccttcctttagccatatcgctctactcctttgcttccaaaatttctcttctttatcgagcaagatattctgtttatactccaattcgtggagctgttgccaatcatctatctcagttctgctggtcagttgggatattttttccttgtattcattcaattgctttgtcatctccttcttcttaactttattccattgttgaagcacaaccccacatttcccaagctggttctttagctccttagtatgctcaattgattcttcattaaccaaactgactgtacaatctcattacactcttcatcatctgcccaagcactccaaaaatggaatctagatatccatctggtcgtgtgttgcatcttagaagaggggtccttttccataaggatgagagggcaatggtccgagttaatacgatcaagacattttacgattgcgtgggaaaatatttcaaaccaatccgagttgcca

SEQ ID NO: 201833 - DNA, 683 bp, Cannabis indica
ttactttatgtggttataattaaaactattatttaaattgtgagatttattactctagaggggaactttaaaacacttagacatctagtagatcaatttagctggtgtgagatcaagaaataataacattcacttatgtaaccaaaatagttctaaattgtgaaatcgagaagttaaatatttaggattgtgtttagaataggagttaataaagataaggtataatgttggtatatagatatatagactattattcacttacacattggttatgcggcactcgagagagggtatagagatacaatattactctaagctctttaaaaaatagaaataagctaggcacattaatgattaaaatcatagttaaattagggtgaaattgaaaccttaataattatatttatctgattattctcaactttaatttattattctcgttctttctttttttctaacgtcatttgaaattgattgcttagataaaattaggttttaatattcgctataaataattactttaattactttgaatttctataggacgataccagtctttgaccactatagttacttgtccatttttgcacttacaagcatatacatataattttcgcaacagttatattgaggttttgaccttttttattaatgaatttttctccttttcaaaaaaagaaaga

SEQ ID NO: 201834 - DNA, 636 bp, Cannabis indica
ctcattacttatatcacgtgttcattttctaatattgcagtggcattgttagtcacaggtgttgaattcaaattaaatggtgttcatgaactgagcatattgtgaactaatttcttttttttttttttgataaaacctgagaactttcattgataaatagaaatttagtacaaagtaatgaggtcaatgaggaaggtagagaaccattttaagtacattcattgtcacttaataaaaaaaagtacattcattgtctaattctattcatgccttcgcatgatgatgtgccatcttattgctgtctcatggtacataaactataagcaagttatttttaatacaattaaccacatcactaagaacataattattacattaacagttgtgtagtttatctactacactttcgaggcaatgattgacacaggaagcttgattgcttgaatccatttgaggattgctaggattgctttcccttctgccacctcagggggaataacacctgaacaaggagtcgcaaaacctgctctggtatgaccatcaacatctgtagatacaactccatagctgtgtttcttgaggccaaaatctatggctgcatcagtatgaactattcattgtccagggggaagtcaa

SEQ ID NO: 201835 - DNA, 1336 bp, Cannabis indica
atacattgacgacacaactaattcagtcctctttaaacctgaaatatgtgttattcaggagcattctcatagacttgtgattgggatagctaagcggcatggcaagctttatttgctgcaacaagatgctactgcaatggccaaaatgaatttatcctttagatagcatcactatgacaaacacaaaggcatgttttaggcatggacatcagaaaagaaaagggaaaaaggatgttgtacttgaatcagaagagttatatccaaaatgtactggacacctttaaaatgagtaactcaaaggcaattagcactccacttgcacaacacttcaaattgagtgcaactcaaatgcttaaagatgaaatagagggcagagatgtcaaagatcctatttgctagtgcagttggttcaattatgtatgtcagggtctgcactagacttgcatagtttatgcacttggtctttagattcatgggaaacctggaaaagaacacttggaggccctgaaatggatcttgaggtactttaagggagacaaagggttggttttagcatgaacaaatagaggaaacacctaaatgtaatcaatggatatctggactctgactatgcaatgtgtattgatactagcaagtctttaactggttatgtgtttaagatgtttggtacaacaatcagttggaaagcagaccttcaaaatttaatggccttgtccacaaatgaagttgagtatatggcattgaaaaaagccatcaaggaggcactttagttagctcgtttgatggaggaatcaagactcaaacaaaaagttatcacaatacattgtgataatcagagtgcaattaaattaaccaagaattgtgtgcaccttgaacgtaccaaatacatagaaataaagctttatttcataagagaaattatggagaaagaagctgtgaaaattgtcaaggttccaacaaaggataactcttctgatatgatcactaaggtggtgtcaagtagtaaattcgagaagttcttgaagctgattgggataggagtcagttgagccctgaatggactaggggacagcaacatcgagcaaaatttcaagaaacttcaatttgcaaccaagttggatatttgttatgtatggttacaagttagttactagtttcatgttttaaaaagttagttgctcgagttgacttggacagcttggaataggtgttagttaattcagttagtattgtcattagcctataaatacccatcacctattgtaattcagtctagcttgtcatatcactaaattataaagattagggtgagagaaaattagttctaaaccattga

SEQ ID NO: 201836 - DNA, 1772 bp, Cannabis indica
tttcctaaacaacaagcagtgcatacatcagatgaatgaatattatttttatttgtattgagtttgatattacaagaagctaaagtagcttggacaatccgagaggagggatgtccaagtcttttatgccacaaagaaaaaagactattttcattgttgagagtatgattgttacagaggtgagatgaagatggatctgaagtttgtttctgatgtgatgacagaagatcaagttgagatggatcaaatttgtacagtcccttgtcaaatttcccaagcattaaaatcctctgagtatcctggtccttgacaacacagtaagagggatgaaattcaaagaaaacattgttgtcattagcgaattgggaaacacttaataagttctttgtaatctcaggaacatgaagcaaattattaagtgtaagaaattgtggttcataaggagaaaggaaagaggattgacctatgttactgatgtttagaccagctccattgcccatatgaatttgttgctcaccaaggaattctgaactggaagccaagttatttgcatttggggtgagatgattggtagccccagaatcggggtaccaatttggatcagccacagactctggggtagcaaaatatgcttgcagttcagctacattggcatttgcagaaggactttgaaatgactcaggccctgtgaagtttttgtcaaatctgtaaaagcactgttgcacagtatggccaagtttatggcacaactggcactgtggtttctgaccccaggcagtgaaggaacctctaccacgagggggaccccctctgaaattaccaaaatggcctctgctagatgggggaccacgagatgcagggtatggtgggaatccaggtggcccattccctggattaaagaagtgtccaggaccacttctttgttgattctgaccatatccaaattggctttgggagaaatgaggagattggccacgtcccatactggttttggcatgagcaagatttgcttcattcttggtaatgtcgagttctttggcagctttgtccaagaaaacttcttgtgccataagaagagcttcaatttctgcaacactataagcatcagtacgagtatttacagaagtgataaagacattataatcactagttaagccattaaaaatagcttctatatgatcctgtgcagaagtgggatggccaatagaggcaagagtatcaacaagattcttgatcttgagaagatagtcactaagagagtccttcattttcgtgtttctcagtagagttctgtactgtccaacattggccctgttgagtgcagtataatattccttgagagtgatccatatttgagctgctgtttcgcacccgaccatgcgagtaagaaccttctccgacattgaagacagcaaccaagataccagaacattgtcttgttgctcccagtcttcgaattcagggctgattttgtttgtgcggcgatcatcgtctgtgaggaactttgaaggagccagctgtggatcaagaaatcgctgaagacgacttcctttgatggcggcaaggacttgttgcttccatgggagatagtttgtctcatcgagacgaacagatagagagtgagagaaggaaattaaattcgttttaggaagagagttgttgctaagaggagtagcacctggatttggttgtgacgaagagggaggaatcaaagaacctccattgttgggagaagccatagctaagaacgaataatggctctgataccatgt

SEQ ID NO: 201837 - DNA, 1037 bp, Cannabis indica
tcattgaccttcatctccacgatgaagaacgaggaactcgccgccatgattcatgctttggagctgaattttcagaaacactctgaagaacaatttgctcgatttaacgcaagattagaggaacaagttactaggcttgacgaccgtgtgaaccagttgcaaaatcctttggggacatcaagtgacgagcatacgagtgtaactcgcgatgtgcactctccatcgaagcagcagcactcggagggagtatcggagcatagagagttgaacaacattctgaagagtatgagagttaaggtgcagaggtttgatggcactaatgtggaagattgggtgtataagatcagtaagttttttgacttacatggaatttctcctagttctcgattgtctttgattgctttccatttggagggaccgccatccacttggtttcaatggatggagaaaggaggaggggtttgcggattcggattcatttctcaaagccctgcgattacgatttggtgtatcggtttatgaggatccattgggcaggattgctaaattgactcaaacggggcgtgtggctgattttcgagcagaatttgaagatttgatgactcggatttctggtgtatccgagcaattcttcctgaatttctttttgtgtggggactgaagaatgagattaggagggagctgctgttatcaaaaccagtggacttagctgatgctatggctaaggctcagctatttgaagatcggcatgacgatttacttgggcgtggtaagatggagagcaatcgtacagggtggtctctgaggtttcccacttcaccactaacaggtcagagcccgactggatctgttataacttctcctaattctactgttgcaacgccaccaaaattacacaaaccaagcccttcgggactaccagttaagcggttgtcacctgttgagatcaaggagaaacgggataaggggctttgttttacttgtgatgaaaagtacagttttggtcataaatgcaaaaaccgtgttcttattctctg

SEQ ID NO: 201838 - DNA, 776 bp, Cannabis indica
agattagtactttattggcttatcttttagtcttaaatgattttttattgttagttatgctttgttttcatcctaaactgtacttgtttcaccccaacccaaaagttcatctttattgttctgctgtaatcgtttacttgtattatattttgcttcaattttgtacgatatgctattgacgttttttttttttgaacaaatatgctattgaggttggtatcttgtaactgttcttttttcagtcgtgattccaagcatccacttgaattaaatttattcttttgtatagatacattaatcatgcaatggagtgagaatttaacctgtgttctttgattgtgtaccttctcaaatacaggtatgcttaatatatgctttgatttagattgctctattttatattttttaacttagttcatgactttcttttcctaattgattttatattttggctgaataaaagtggctcatactaatttgatagaattcaatttgatctgattttggattggtaaaatgttatggttctgttggattcatttagtttgtggataaagaatctggatacattttattatttacaacattgctatgatagagaaaatcaattgaaccattatcgtatttgaccttttagacttagttctaaccattattctttctgatcttgataaaagtcctagcaagcaatgttcttttttctccattcattatgaaatgcaatttatttattcattctttctcttaacaattcatcttcataacacttttttttt

SEQ ID NO: 201839 - DNA, 907 bp, Cannabis indica
tatcatggaatttagagttctagaatataattggtaaaaaattctatgttttggatgttcaacacgcttcgtttgtgatcaaaaataaagtctgaagcttcaagcaaatatttgactttgatgcgttcactttgaggaaaaatattgtgaataaaagttctagatctcttttacgtctttgcaaaacatctttaatcgttaacttccgaataatattgaaacatttatggaaaaattatcatcagtcctcttactaaggagcttgctgtcaaaaattaagcttcacgctctgtgacactacaaattagtgtcgaggcttgcatattctaaactgcaaaagtaagatttttatctctttttagctataaaaaaactattttttaacacgtttcacaagaaaattatttgggacaaaaattgaagaaaaaagcggctctgaagacttttatcaatattttgtagcgagtttttttcttctactaattttttttattttcttaattaattgttgtcagttatttataatgaatatgagtagctagacttttcattagggtgttcatggagattgtttgacactttattttgattttaatataatttcgttcttctcccaattttctatgtaaatttatttcattcgtacttaattacttttatttgcttgatccccaattaaatatgtcctaactcgaatacaagtttctttagtagattttctttcacatgaaaattgaaattgagaattaaattatattaaaccatataaagtagatgcaattaaaattaatcaccctaagttttattcaatgttaatttcaccttaattatttattttcttttttagtagaaattaaacatatgttcttatttttattgtcaagaaatagaattaggaatttaattg

SEQ ID NO: 201840 - DNA, 763 bp, Cannabis indica
tggttaaaatttgtagattccttgaattttatattcagttgtttttatgttgttgttaaatatttgttaacagttaatattgtttttgttgttactattcagcttttataggtacatatattaatattgtttttgtactgttattattcagtttttttatttgttattatttagttgtttaaataagagaaaaatttatatatgtttagctttttataggtacgtataattttgagttagtatacatgtgttttgtaattatttttaagtttcttttattttatttttttataattattgatgtcttgtttttatttttattttgttgtcacaatgcattgatacatatttaatttgcatattaacatggtgttgttataaagttatttgtttgttattatttagttgttcaaacatatatattaagattatgtttctttaaaggttctggacaatatttattgatgtccaatgatttgcatattaatttagtgttattgtgtagttgtacttttttatcgaataaaagtcaattttttaaatatataattttgagttttttatctatttatttgattattgttaatttattgttcgttgctatttaattgttcaaccaagagaaaaaatgaatatatatatatacgcttaatttttttataagtacatacattaatattatttttgtgtagttattattcaattttttgtttgttgttatttagttatttaatcaagagaaaaattagtatatatttaattt

SEQ ID NO: 201841 - DNA, 738 bp, Cannabis indica
gagttcttattttgtatacgaataaaagttaactaaataagtgtccgacttaatttagtatgagctaactactctattactaacaaatagatatctttgtactctcgcctaaacggacgattatttattcaatttattagaaaaccttaagaaaataaatttaaattattgttttttttttttttttttttttgtattttttataacatatcttcaatacttgttatattctgaatatgtgtatgaatttatattgaaccaagtaattaaaatgttattgatatttgtagttgtcaaaatattgtttaacgatcctcactccaatcctttcttactcaacgtatttgcaaataaactcgaaagtgtgaagatgactcttggtcagagtatcacttctcacttacttatgatgaacttaaaatgagctacgatgatgacaatgagtgagatacaataataacaactttgaatgattgagatacaaaaataatgcattttgggagaacattctaatttttttccacactactctatttatttatttttaattagagaaatgctaatagacatttgttattgatgtaatttaatatcaagtcctacactttttgatttaataaataatataggaactgctaaacactcacaataccacacatcagtatagtgttggacaccttaaggtgtctaatagtaatgctcttatttttataataactaactttttttttttaaaaa

SEQ ID NO: 201842 - DNA, 1391 bp, Cannabis indica
ttttaatttttttgaactttttttaggatcttttaagcactggctcttttttgataatgacttattagatagaatatgagcaacaaatttaaggactaagatcctataggggaaatattttatcaatgaaagtgttaaaattatagagttgtgaactagctaatttaaaatattagagttttttgttattaaatttatagctacaggttcattagtttaatctcagcataggtgcagcttatttgggattgtattagctattgcgttttaattttcactactgcgatcaattagtcttatctctgtgacatggtcttattttattttgtttcgttgtttgtttttcgatggctcaccatcaaatcgttgttatgatggtcaaatataatgattatgagactgtgtaagtatgagaatacatagttaaagagagtttaaatgaattgattgatactatttatatcaacaagttgcattttatttttcggtagcatattatgaaagaacttcacagttaaacgtgttttaaaattttcctaatgaatttgttagttgtgtatatatttagcatcataattttttaattaagtaatttaataatatttattaattgcttattatgaactttactaatacgataaaatcctttattttagtattattgtgtttttattaaaaggagtaaaagttctacttttatgtaggaagatatgcaaacataaaatttatttaaatgataaaacgacttgtcgtttcttcaaagtcatagtaatttttgtcgtatgatgtcaccatatcacataatgtaaatatgtattgtcgttttcaaatataaagaaagtacaaacaaacacatcattgatatttaagatataacatagaacacatcaattattaatatatgcatgcatgaaacattttcttctacgtacgtatatatgtatattatttataaatattaataaccaattaattatttttggttttcttattttttcttcatatggacagtacaatttgagcattgttcatatagtccaagcattaatatttgaaatcttaacactatttgtttcattgttgaatatgcatataaatgatcttcttgttaattgccaattttggataaaccctagctgtaataacacttctcccttctccaccaaatcaatctacaccaaaaaaaaaactaaataaataaaataaaaacaaagttttactaaacttaattataaattaatagatagtcaaacttaataactacttaattagtaaaaaaataaagacaataatgtatcgatctctttgttatagtcacttaaactaaaattaaagtaagcgtgtttcgttaacgatttttattaagtaatttttagtttttatttaattag

SEQ ID NO: 201843 - DNA, 814 bp, Cannabis indica
tttattgtgagtaaaagtaagatattttgttgtgaaagtatatggttattataaatatatattatggcccaaaatatggttgagagacgcgaaaataaacatccacagagtaatgtccttcattggtacgatgtagatctcaacacacacaagtgcttggtgagcagttacgccacctgagaggcatgaccctttacctagacttattaaggcaggggccaaagggcaactcccagggctcagggctccagacgggctattgtaaacatcgaggaatatgaggcgttaaaacgaaggctagaaaagcaacaagaacgtaataataattataagcaacaaatgatgcagaaacagtacctaaatacgttccaagagaaatttattaggaatttttccagcattgctcctagattcaacatgccagagatgtctccgattccaccttgagatggatcttcatcacgtgcctcaagatagaaacactattacaaaaagggggtattcgcaagagtcctaaaatatttttatgaggaacctttgcaaaaaaaaaattaaaactattaggagaaatagggtatttctgacgatttaaacagtcgagatgtataggcgacgatttttaaatgtgccttaaaaaatctagtgtatttttaaagggaaattgctgctggtttaaaactgtcagtaattctcatgatttaatatttaacgcgtttcaaatctaaaattttattttctcgcatcttaaactttaaatttttatttcccgcatcttaagatataaacccccgcaaaaaaattagatctcattttt

SEQ ID NO: 201844 - DNA, 627 bp, Cannabis indica
gtagatgtcgtacgaataaactccacaaataaacccgagcccagagccagagcagagccctagcttagctccagcttcagctatccgcgtccatccatggatcccaagtacggaatcaaatcatgtattaatccccatcaccatcaccatcatcatttccaccaccatcatcatcatcatcacaatcaattattcttcttgcctcatcaccaccaccaccaccactaccactgccatcgccatgtattccctaattgtgcttctttacccaaaaccctagaacatttgggttcccatgttcatatccccaataatgatatagtggaggtttcagaaaatggaggagtagtcgtagattcttctcctcggtaagattcttgcattcttgaattgtaggaatatgatgaacaaacttgaaattgagttattagtgattttgaattatgaacagggtgttgcaggaggaagaggattatgggttagaagaagaggaagaagatgagcttatttttgtgctgactgatgagtggagggacttctttgcaaaatctgaagctaagaggaaaattggtaaacctcctccttctttttcttattctaaatccatttctttcttaattagttttt

SEQ ID NO: 201845 - DNA, 1391 bp, Cannabis indica
acgtggcatgaggataccgggaccgaattgatgaagaacgtgtaaagttatgactgttggaagagaagtctgacggtcacctttccccctagcttgagcaaggtgactaccctcaaagggatggtggattagcacccttataaatgggataaatgatcactaaacacctacgggagtcaaactagtctaaggggtatatactactaccctacctcaaatgtaatgatctagactaggagtacaccccttaaccctaaagggttggtctaggggtatacccctaccccatacaccttcatggtacaagtcacgtattctacctacgtaagacatggttgatatagtgcattctcaagacaccaaggctacccacaatatcaaagattaagtggaaggagtctcaggggtgtcaccccgagatggcaactgacgccctcttcatgttgggtttcggaggtgtcacccttaagtattaacttctacccccaaagtgggttaacgatcataccacaccctagggagaccctcatcatcatcagctagtttaaatattcaaatcctgcaagaagctcaatgatggttacaaactcataaaaataacaagatattactatgagaatcgaatttcaaccacctccgaaaaccaaggagatgattgagatagaagcctctgggcaactcattaacttcaacaaatcagaaatttcctttgaaaaagttgttccaatggagagaaggagggctttagcagccatctttggggtcaaaatagtggacaatcatggcttctacttggtggggagaagaaagaaagatgtttttaactacatcaaaagggtctttattttcagcagctggaaaagaaattttaattaaagttgtagctgaagcgatcctcacgtattgtatgagttgttttaggctgccaaaaaaattaatcaatagtctccatggcatgatagctcgtttttggtggggtagttcagagaagcagaagagaattcattggtgcaaatgggagtatctttgtaagcctaaggagagaggtggtcttgattttagagatctaggcttcttcaatcaagctcttttggctaagcaaatatggaagattataagagatcctaacgccctctgcaataagattttaaaagcttcttatttccctaatagtagtattcttgaagctaaatgtggatccaatgcctcttggttatggagaagcttaatttggggaaaagagttaattcttaaaggtttcaggtggagaatcggcaatgaaaattctgtgagagtaatcgaagaccccaagattgataggccaagaaactttaagatctttgatatgccttccattccaaaggaccttcatgtattgattgtaagctggt

SEQ ID NO: 201846 - DNA, 1232 bp, Cannabis indica
tgtcaaaatgaaggggtggagaaggaatttgcaccacgtgatgcccttctagttatattaaaaaaatatatacaaaaaaaattcaaaaaggaaaaaaaatgtgtatttgaatagaactgaaaaattatattagtttttaggcatgagtttgattttattgtgttgatattgtacataggatgtctatttggtatgatgctaagctggtatttgtgggttggttggttcttccccaattcaaaggagctgctgtgttgtacaagaaatttgtgagagaacaaatcaaaaagtataatagcaaacatggtggccgtaacttattccaaggaaggagcaagtttatggatttcatgcaccacaagaaagtcagttgttattgttttgtattacaccttttcaatacttgatgatcatgagttgagttgattatgttattctaatttgtgtgaccctttcatctgtcattttcaggaagaggtgcaggattattatgattaaaaaagaaggcaaaactaaatgcatggcttggattaatattccactactcttgtttttaggtctatgttataactattattgttggttatgttaattaaatgatctatctttaactttgtgcaacttactcaatattgtaaggcttttgtgacccttaatcctcctaaaatattgtaatgttacaaatattagtcttgttttgatgtaagaaatcttgtgagatatttgtgttgcttttttatgcaaatgtgatctcattttctaatttgactatgatcttaccacaaagggtgtctatacttttattttgaaattgtataactatatttcaaaatagatttttttttttttttttttttttatttttttttgcagcacaaaataaaatggaatcggcactactcgtgcgatttatttatttgaggaaattatagtactacattattattttttttttgggtatttttttaattttacacttctaaaactagttttttttacaattttacggaattgtacataaaacctctattgcaactagcgctgcaacttaaattgacaacaaaaatcgtacagaaacctttattgcaactagtgttgcaattactttagaaactcaaactgtaaatttagaaaaaaataatatattaggtaattctcttatttattttaaattgattattttacaagataaggtaaaattaagagttaaatcctatctctccactatttta

SEQ ID NO: 201847 - DNA, 2281 bp, Cannabis indica
aacaagctaatcaagcaataaatattagaagatattttttggatcaagaaggaagaatcttcattaatcgacaaataattacaaccaaagggagcccaacaatcctacacgtctcctaagcagacaaccaccccattacaattgtagtcttttcaagtataatatttttattctagttacatatttgtgctttacaatttataatctataaatcactaaacttttaatctctttaactatatgagactattttagaaaagccctcaaatatacatttatttttattgacccataggctataacaagtggctggaaaaataaatatatctattagtaaatttatggatgacaatgataaccaattgtactagcccagtaatccaaataccaagcgtgtttgcctagccaatcaaagatgactctcaccacccactgagaaagaaaacactcaaaaaataggtgttcatgagtttctaaaccattagcacacaccagacaatctaaagagtccatcacaatctaatactttaacaagtttactcttgttaaaagttgatggttcacggctttcataaaacaaattgatgcttgggaagcgtcaaagaattccaaacaactctatggtagtgaacttgctgttgttgaagagagcttttatatagcctccttatcttgaatttacctgttaggactgctaaatgaatgtcaacctctaagaatttaagtctcaaacaacaaatcttacaccaataccaactcgtgtcttgttttagtttataggaccaaatggagacatttttcaaataaatgatattaatccatttgactcaaataatatctctcttttctgaaatggcacatatatattttgcaagattggcttgattccacttagctccgtctttgaaaccaagacctccataagcctttaaaagacaactttctctcgagatgctacgtgaattttgttcctatttccggacagatcccaaaggaagcctctgcataatctttctacatcctttgtgatgctttaaggaagaacaaaaattctcatccaatagttgtgaagcccaagaagaacagagtgaatcagttgaactctgcttgcaaatgagagatgtctagtagactatgaatgcaacctctgctttatctttttaattatgacaccacagtcttcaggcttccatttggtcagtcttaaaggcactcccaaatacttgagagggaaggatccttcaaacagattaagaactttgagaatgctgagtttctctttagttttcacaccaccaaaaaaataatctgagatttctctccatattgatatgcaagcctgaggaagagctaaactcatcaagagcatttttaagaaccaaaattgattgccttgaccctttgctgaaaaccattaagccaacagcaaagcaaagattaatgattcttaagtttttaaacaaatgatggaacttgaaggaggaaccatgagctacattttgaagactcctcgtcaagtattccatgattagaatagacaacaaagaggataaaggatcccttagcgaagttctttttctcctttaaagttaccttggattcttccattcaaaatgatcgagtaataggtatatctaacacatatcatcaccaaattagaaaatctttgaggaagattgaagcattcaacaaagcttcaaggaaattccaattaaccgtgtcataggccttgctaatgtcaattttaatggcacaccgaggagatatattttttctattataattcttcaagagatcttgaagaatcatcacataatgggctatgaaccttccttggatgaaagctcctaactttagttgatcaaataaggaagcactatatcaagcctagagcacagaagcttagatatacacttgtatattgtagagcagcaggcaatcgacctatagtcaaatacccttgctggatattgtcaatctttagaattagggagattacagtagaatgtaactctaaaggtatattccctgtataaaagaaatcagtcactgttgaacatgttaggttttatgccctaaataaaactccatttctaatgtaatctattttattctaacatcaataaagaaacagaagtatttttctattctatttgtgtatgttttggttctactttatcaattgtcttgtctatttgattcataaattctatcttaaaccctttttacacctatacttgtatcctgtttattgtgctgtcatcacattggaaagtaaaca

SEQ ID NO: 201848 - DNA, 934 bp, Cannabis indica
tgtcttaaattaatggccctatcaattaccaataaactaaatttggtttacttggtgatagaattatacaaatcatacattataccaccatacaatcacaatgtccaatttaatttactctcacaatatctaaagttataatcccagtccaatggtttcagaaaacaaactaattaactcagttaattacaagcaataagacaataaattcaaagagtgagagagatgttgtgttaattgatgatgcattaatgaattcaattactgattatatcaaacctcaaaataagctctgttcttcctctgagaccaagaaagagcttcatcaattaaactttttgaatttaaaacataaacaaacacaaattattaaatgtacacagattttctgaaaccaatataattcacttgaatttctttttgaatgaataattaattattatatttggtcgttagtccattgatgaagcaattaatgtaggtgtagttactatgtaaaaacaattgatcaaaaaagttgtaatgtaactattaataatgttttgttttgtgtcaatgcaaataatatcataataaaattctcaattcaaaaaaatggttatttaaaaaataagatgaggtttggtaacaattttttcttttaatttaaaacataaaaaagaaaaaagataagtgtgttatttaaattttatttttatttttaatttttaggttggtttctagtttagggttgggtatgaggccgaggtcctgggttcaggttcgagttcgaagtcgggtccgggactagatccatggtttgagatacgatcaaggttcgtgtttgggggtcggactggagtccatgtgatagtcaatagtcccgtgattcgtaagaaaaaatatcgggtaagttgtgcaatctcactcgcctggagaaagtcaagtatgatga

SEQ ID NO: 201849 - DNA, 650 bp, Cannabis indica
gatatattactaagtacataccaatgcaaatattctttaagattaggttcgctagggttaggagcatcaggatcaaccataacctgcaacattaacagtattaattatacattaatttatcaatgatttattatgaagatagagtagtgaagatatatatatataccaaagtgtagaaagtcctgagatcatctccaccaatctcaaccctaggtgagttagcaacttgagaaggtctaaggtcagtaccattgttaatagccctattcccactatatgatactttaagagacacagtttttgtgaaagggtccaacacatcacttatcactctcccaaccacaagaggatccctgttagccatttatatatataacaactatatataaatatatgtagagagagatcagaagagggtttgatgagttttggttatataatttggtggctgacattcaacaatttatggctctatttatagttataacttatattctctcttttagcttttgtaacatcaaaaggttctaatatatattgtggattctcttaattagtaaaaacatttatttatttatataattcttatagcaatggccgactactgtaaagttattgggagttgtgtggaccaattttttttttttttt

SEQ ID NO: 201850 - DNA, 2947 bp, Cannabis indica
gctcgttgtaataataattgcaagttctctgaatttgatgtttggcacaacagattattggggcatccctccagaagtattgttcattttgtactcaaaacttgtaacatttctattgataataaattttctcaagttgtttgtctagcttgttgtttgggtaaaattcataaactaccttttgcaaaggtgtgtactattgagtacacaaccctttcacagcttgttgtctcagacttatggggtccatctcacactatttctcacagtggctacaagtattacatccatttcatagatgtatactctaggttcatatggatatacatgcttatagacaaatgtgaaactctaaaagtgtttcaaatgttcaaagctaaagctaaactacaattggggactcaaatcaaaatggtacaaactgattggggtagggaatttagaagctttcctaagtttcttcaatattttggggtattacataggcaccccttgcccaaccactcacgaaaaaaatggtataagagaaaggaagcacaggcacatagttgagaatagccttactttgttagctcagtcttctatgccactaaatttttggggcgaggcttttaggacaactatctttatacataataggttgtctactcctgtattgaatcacaaaacccccttagaggttatgtttcacaaacaaccagattatttctggtttaaaacttttggaagcaagtgatttcctaacattagaccctataacaaacataagatgcaattcaggtctgaaccttgcaccttcctaggttatagtctatatcacaagggtacaaatgtcttgcctctaatggaaaaatgtacatgtccagagatgtcatctttgatgaacatcaattcccatacaacaaagcacatagtgaaccagaatatatcactcctcgggaatggcatatacctgctcaaattccatctatcaacacacctgctactagtgtccatgacttgtccaataccaccaactctgcctctccaccaagcacccctcctcataatccaaatacatctcctatcaccactttcagctcaccttctgccactcctactcaaaggagtaaatctgtaacaccttccataccccctggtttttgagcatgtaattcctatccatgcctctgcaacatacgtttttgttactcatgactcaacaactaaatcaacacctgatcctctacctactactgatcatcaataataagaaaccgatgttcaacaagtgaaaaaagttcaaaatcatcacaaaataaaaactagagccaaagctggtatcataaacctaaagtgtttagcgtgtcttcaattcccactacagttgctcaagctcttcaattgcctcagtggaaacatgctatggatgatgaaatccttgctcttattagaaacaagacttacactcttgttcccctaccccctgaaagataagtcataggttgtaaatgggtttaaaaggaaaaagaagacacatatagcactgtgactagacacaaggcaatgctggttgctaaaggctttcatcaacaacctgggttggatttcactgaaacttttagtcctgtagtgaaactagttaccatttgagttgtgttaactttagctttgcttcatgggtggaaaattaggcaattggatgtcaataatgccttcttgaatggtatacttcaagaagaagtctacatgacacaacctcctggctatgaagtcactacatcacccaatcttttttgcaaactccacaaagctctatatggactcaaacaggccccaagagcctggtttgaaaagttgcaactgtctctgtcaaggtttggttttgtctcatccaagtctgaccactctttattcattcatcactctcttcagtccacaactatcatcttggtctatgtagatgacattattatcacaggcagcaatcctaaggttgtctccagttaatcaccaatctaaacactgagttttgtctcaaggaccttggagggttaaattatttttggggaatagaagtccaacacaccacaaatggcctacatctttctcaagagaaatacataagagattcgttgaccaaagctcaaatgcaagttgctaaatcttcttctgcaccaatgacaagtggtctcaaactctcagcctatggaagtgatccagtggaaatgctcaactgtacagattagttgttggagttctccaatacctcacaataaccagacttgaaatctcttttagtgtcagcaaaatttgccaatttatgcataatcccttgcaatttcactgggttaatgtaaagagaattctgagatatctcactggtactatgaactatggcctagatctcaccaaatctccacacaataaatggttgccttctgtgatgctgactgggcagcaaatgttgatgacaaaaggtctacttctggctatgctatttactttggtacaaaccttgtagcttggtcttccaaaaaaaaaacatattgtctgaaggtctagtactgaagctgaatttagatccctcgccaatgtggttgctgaactaacatggcttcactctctcctatttgaactacatgctactcttccaaggccacaagttttgtggtgtgacaacctaagcactgtgcttttaactgttaacccagttcttcatgccagaaccaagcatatcgagcttgatttgtattttgttagagagaaaatcatgcaacaacttgttgacatcagacatgttccaaccgtcggccaaattgcagatggtctcactaaattcatcttcggcaatcggttcaatgtgttttgacacaaactcagaattgaagatgcttcaattcaatgtttgagagggagtgttaagagtaccaattctattatagatgttgatgaggtgtcagttaaa

SEQ ID NO: 201851 - DNA, 665 bp, Cannabis indica
aaaaaaaaaaagaaaaaagaatagattctattacagaacaatctttagtggattataatgaattaggcttacatttatgatagaataatatacactaatcatatatttaattacttaatgtgagtgtaatatattgtaaacaaatgtgtatggacacaaaaatgatggctataaggcctaagagcactccataaatgagcacacaagaatcctgagaaaaccctatatacttggaagtcttttgagaaataaaatagtacagttttttgtgttatttaatttatacctatcttttttgtaggccacaacctccactttgtcaagattcccctactttccttttttaacaagcatctgatctgatattctggttttttagcttcaaaatatttatataattaaatgagaattaaagatattgtattattaacatacatatgagagtgagtgtagtagtactactcactttttctagcttttttatttaattatgatggctatacctgaaaattaagtacctatctatatatatatagtaccgtaccattatagctaacacaccatacaaattcattacaatatttacagaaaaacaattggaataatctatatttatattataaagtttaagagtaattaaaaagatgacatcttacttttttttt

SEQ ID NO: 201852 - DNA, 3132 bp, Cannabis indica
actaaagttccaccgggaatactgaattcaaataaatatttaatttatttttaattattcaaaattaataccggcggaatactttttccgccaataataaccccattaataccggcggtttggctccgccggtactgagtaaaaatattgtagtgggggacaacagaagagcaaccgaccaaccccaccgaaaagaaaggaacagtcaagccctaggtcgtccaatcaatttgcggggtaaagttgtgcataatgatgggtcacatacttaggtataggagcctatcctttggggatggaaaaattgtccaacgattctatcaaccaaagtattacaatataatgacgcaagtggtacaagtaagtgatgatgggaagtgtttgtacttttctttaactttgtccatatctgccgaagactggaggagaagtctttcagctagctttgttcaaaactggaaagacctacaatctatgttttggaaacaatttgtggctgctaaagaatttgacatagaggttagctcattgaccaatatcaagtagcagcctggagaggagccttaaaaattatatttagcagatgatggaggtagttgtaaagaccaaagtctatgatgatatgaagttagtggccatacagtctcggatagcaccaagatccctactcaggaatgaaatacaaataaagaggtccgacaatctgtcagatatcataacgagggcccaaagttttatccattttgaagatgcctacatataagccttcgaagtgggttcgacacccttggctaatgtcattaatttagctttttcaccgcagcttctgactccatcaattgtgacactcaaaatcgagtaaacaactctactatttatggacatgctacctctagctacacatccacacagatgtatttcttcagcttctgagcggcacaaactgaatgcagtttctgttccaagcaaacataaaataatcaataaacagaaatcttagagccagacgtgagcgagtcacagagcaaaaagaagcagaaatagtaagagcatgagtgaagccccaaaaaaatgaaggaattaaaaaatatgaagcccaatatacttagtatacagatttgatagacactctgagaatgtctacatgttaggttttatgctgtcaaaagcatgtaaagacattctttatattataaatattagttgaacatttttctatatgcttgaaatgttaaattattgaataatttttatataaatatcagaaatttttttattcatatatgaggttgtgacttgtattgtacgaagaattaagattacttagctatgaattaaatagttagcaacatattaaagttatggaatatataatcaatagttcctaatttggttcactgatgtccgttattcgatgcaagcaattttgattcatattgctaatgtggtatgacatctaagtgaagatgttgtataatccctcaaagtagttgagagattttctccaagtagttgagatattctctcaagtggttgagggatttcctcaaccgtttattagatatttaatgcaaacctaaatatttgattcaaaaataaatatttataacagattcagttataagtatttattcaaataattaaatataattgaaattattattttgaatttaaatatttatttaaataaaatttttattggttttaatttatgtataccatataaacctaaaatttataagtattattttaaggatgtctaaaaaggattaatttgattaaatatttttccgtcatcacttctaagatttcatgctcatgtgttgagaatgtacaagaataatacatatcctaatagcaaacactattctgaggtggaagattcggaagactgtgatgtggcatacccaaataggattcaagaggtaaatttttatctccgtctatttatttcagatttaatacatatacatatagtgatcccgataatgtagtatgatgataatcaaaaaaatattattccatttcgtacccgatttagtaccacgaaaaaccaacaaaaactggtactagagcaattccattatgtcactactacaaaaagtagaatttgcgtcggtcaacgggacggtcaacggcaagggccgaacgcaaaaaatggaagccaagatgtggtgtcggtttggttggaaaccgacgcaaaagaatgtgagtttgcgtcggttatctattcgacgctaaaatttaaactgatgaaaaactttaatttttttcaaaaaaaacttttatgcgtcagctaccaatcgatgctaataatgcttgcgtcaattggcaaccgacgcaactccatgagcctttaatgaaaacagtcactaattagttagttttttcacaaaatcccctaattctaacttacacatttcatttttaaaaaacctaatatcccattgctctcttcatgggccacatgtaaggcgtttttgtttgacatttatagaaggagcgtagttacatattatgtttattatggttgagaggaaagcttttaacaaacttgtgctgctttgggctttgctcggaatgtagggtaataaaataaaataacattatatccttattttaatactttggtccataaatctagatgtttgccacaaaattgcattacattttgtggaaatagaaaaagaatatgaaaattgcattttgtgttcctggaaagtttgatatttgttggtagtactagtatatgacggttttaaatatgctgctgcctctaatttgtaatatgatttctaactatgattttttttttctaggttaatggggacacattatttatgacaggaagcttcaatgaatttaaggtagaagaccattcaaatgattcttgggatcatcataatgctatgactagcactgcgttatgtgtttctttatttttttttacctgagatgtttctttctttttttggtctgaattacctgagatgtttgctgtgcacatcacaacttacatgatacaatttcgacttcacatacttcaggattttgttatacattccatgtttttacaaaagtaatagctcataattgatttgatacaaggcttgaaaatttcaatttctcttt

SEQ ID NO: 201853 - DNA, 1457 bp, Cannabis indica
aatcaaatttaaaaacataaaatgtcccaacaacgttttagtggctattattattatcattttttttgggtgtgtttggggactttagtggcttaatatataattagagtactcaacaacttgcataaaatagaaaaagtttaaaagatttaacgaatggtattaaaaacacgttacattatatattttattttctttttaaaatatattatttatcctctatatttataaaatattatttattgttctaaatgtaatttattaattattttgattatatatttgaaataaatataatgtaataaaattttaaaaaattaaaaaagttattgggagtgcttttaggattttccccaattttttttaaatgaataattcttaagccacaaagccaattgagtcacaaacaatacaaaataattagagttggagacgagggtaaattagaccaccaaacttgagagacatctaaagataaagtaatacgagctaaaaaatgaaccataacattatgagacggattataatgggagaaggaaatataagagaaatttttttaatctcatgcacaattatactaaattcaataaatctcttatcattacttgagatagctttaccaacaatcagtgaacacaatgagcctcaagtaaccaaacacgagacaaagtaaattttgcaacgaggctgctgcctctgccacatgaggagcagcccaattgccattggcgaagtagccaagcaaacgaactccccatcttggttcatcaccaccaccccaagaccaattttctagtcttgttcttgaatatcgacacatctccaaataaattgacatcttccaacaccaaatcagtgtttgattctccatgagaagaacaactcgcacgtggagaacttggaaccacatccaaagacaaaggaatttgagcatcttagtacctcgaaagaaaactcaaagaccattagctaaccataggacccgagagcaacttatggtcatggacaaaagtgtttcgtctatgccaaacttttgacattatgcctatgccaaatttctgacattaccaaattgtacttttgaattttgaatttttcagatcgttaaaagttcttttcaaattttgagattattggattgaaagacttccgttcacttttactaacgaacgtctattgtcgacgaaagttcgaaagcacaatttgatatctcaaagttaggggacacaattcagtacatagttatcacgttaagcgtcctttattaaagttgaacaaaatttgacaaaaattctcaaacccaacaattttaattttttttttttaacatattgaaaagttcgggacactaatttagtacataacaaagttttgagaaaattgaaaacttagtatatgtgacgccattaattagggttgttcattaaactgctcaaactaccgacatcacaaaaaaa

SEQ ID NO: 201854 - DNA, 1052 bp, Cannabis indica
gttaccatttgttcatttgtgatgagacatttattgaaaccactaattgtgtggttaggattttgtgaggatattctcattcttatacactagactgtctagccttcaaaaatctttataagcaatattagagtttttttaagtgtccatgtgagagataaaataattgttaggacaaaagttttagaccttctttaagcatatgatgttattttatttctcttatttatttgacttagtactaaattatttggggcttatacctaaataaactttttcgagccttcatacaaatactaatttggttaaaaattattaagttttattatttggggtagtggtaaatatatatatttatagtttagaaaggtaagttcaaatcttcatacattcactttgttttttatatgattgttggaatttgaacccaataattaatgtaaaatgtaattaaaccacaatttattttaacataattgtgtattatttcatattttattatagttaattttataattttcattaaatgttgtctacataatataagtgtaaatattattttaatattatattttacttggagatgcattcattaaatgtcgtctacatgattgtaacctctatattgtaagtgtgatgagaaattcttattagtaattataactaaattaaatttttaaataaaattgagttaacttttattttacaaagaaacaaaatatattaataaccaaataagaccaaccaagttacatataggtgtcatttagtgacactttttgttttttaattttttaatcataaaatgaaagtaaaatttttatttttaaaaattttgattttaaaaaataaaaatgtgttctgtaaccatttttgttttttaattttaagaactattaaataaaagtgtattctgtaaaatttatttttatttttattttttgattttatttaagtcgagtctaggtccaagatcggattcgggttcgggtcagaggtcgggttcagcactagggctatggggagatttaggtccgagtctgatcggagtc

SEQ ID NO: 201855 - DNA, 1447 bp, Cannabis indica
gtgggggataccttaactcaacccaaatgagacgcgttgctgatgtagtagacaaagtgttgtatcccgttcttccgtcacgcaccagagtagcactggctgcatgctcaatgattgccaaatagatgcatagttcttcaccatgtatatttttggataggaccggaggcctggctatatatgtttgagagcttggaaggcttgctcacattcatcagtccattcaaattccttgctgctccctttaagtaaattaaagaagggaacacgcttatcggttgacttggagacgaatctgctaagtgcacaaattcgtccggttagacttttcacgtcttttatccgtggtgacttcatgtcttgtaagacctttatatttttttgaatttcgcttcaatcccttttgagttgaaaataaatctaagaaacattcctgattggatgatgaaggaaaattttagagggttgagcttcattcaatattctcgcaggatgttgaagtactcctctagatctttaatgtggtttttggatatttttgacttaaccagcatatcatcgatatagactttcatattttgttcctgattttgttatggaacacacatttgactagtctttgataagtagcaaatgcattcttgagtccaaagggcattactttgtaacaataaagcctgatgttgtttcgaaaactagtttgctcttcatttggtgcgggtatgttgatttggttgtattcacaatagacatccatgaatgtgagaagtttatggctagctgtcggatccactagttgatcaatttgtggtagtgggaaatagtctttatagcatgctttgttgagaccggtgaattcaatgtaagttctccactttccatttggtttaggaaccatattagggttggatacccataccaaatagaaagcttccctaataaagttgttcttctatagtctttcaacttcttccttgagagctttggaacgctctttgtcaaggagcgtgtgttctattgtacaagcctaaagtttactttgtctatgtcgagggcatgagatcaattcttgtcctcatgcgaccaagaaaaaaaattcatgatttctcctgaggcaagccgtgagcatctcactgaagaccactgttaagtttattccaatcttgacaatttgtcaggtttgctatgttgaggggaaagttctttgagatccttggttggaccaactccagagttgatttccccaaaatgggggtacatatcatccccatcttgggaatgccgtcatgtgactttgggtgccatctctgtcatctttatagttttaactccataggtcttcattgtctctccgacattcacaagagaggtctgctcgtccctcctggtgccatggtagcaggggaggtcttgttgttcctcagcagccatagcagcagaggagatc

SEQ ID NO: 201856 - DNA, 1038 bp, Cannabis indica
atgatagcacagaattagaaaaaatttcttgtcaagaagctttcaacatgctggaaaagttataaatgttttggattcaacaagaaggtgctcatactagtgaattattagatagttgcaagttcaaagacatgataacaaatataaagagcaaatcaatttatcaaacaactatagaaaaatatttttcaaataataaatattaaggattatttattattattgtagttacaattgatattttgggtttttttagtgtgtgtttctatttagttataatctctaaattagaatatattttgcttggtcccaaatgtattatcggatagagcttctactgtaataagatgtattataatatatatacaatatggccatagccaagttagcaaaaatgaaaaatatgacaattcaatgtacaaaagcttaacctttaaaattccctaaaaacatgcacataaaatatataaacctaacctttaaaggtttgattcacaaaataatcacgaatggttcaactactcataattctaatattcataactcttgatatcatctaaattgctttattctttttcatctagccacaagctttatattcaactttatgtaacaatcaagaaaatttattagtataaatcagcacacaactcaaagtttaaatataagatcacctcatttatttgacaaatatttcaatgaacaatttcttaaaaattccaaaaattaaagaaaaaataattttcttttactattctttagcgttatgcccaatatgaaaaatgatatttctgtctaaaaatacaacaaataaaattaaatttagttgggatatattatcgaccatatgataaaaagaacttatatcaatacatcacaatttctatttgtactactcactcaggtttcaaaataactaagtcgagtgatgtaggcattttaatattttcttcacatacacgaaacaaagttatagcaataaataaattaccatgatcctgtaatatgttagagattttatttattaatgaaaaataa

SEQ ID NO: 201857 - DNA, 3283 bp, Cannabis indica
acctcatgttcgctgatgacatagttctctttggggaagcgtcgattcgggaggccaaggtttttttggactgtcttcagacctattgcagttggtcaggacaatcggttagtgcccaaaaatcagcaattcatttctctcagggagtgtctagaaggaaatcccaagccatttcgcaactactgggcatgaaacaaatggggaggaatgcaacctacttaggattacctctctttaagtcacccaagaaaacaaatgacaccgaggagatcattgacaagacccttaaacgagttcaaggttggaaggcccgactactatctagtgccgggaaaacatgcttagtgaaatcagtgggttcaactatctccaattacgtagcctcctctgatgttatacctgtgtcggtggccaataaaatagataagatcctaagagacatctggtggggtgacacggaggagagatgtaaactacacacggtggcttgggaaaagctttgtagcccaaaagtggtgggaggcctgggtttctgatcaactgaggcaatgaataaagcctaccttatgaaatgggcctggagaatcctaaatcaagaagactgtctctggggacgaattataaatggaaagtatatcaaaaatgagaatttcatggaggtggaagcaaaatcctcagactcggttctatggaaagcaattctcaaaacaagacccctcctttggaagggggtgtgccgaaaaataggagatgggaactctacctctatctggtttgacccttgggtccctggtgaagtcactcaaccagcccccactcgaaatgccacggatggcattagtctagttagcaacttcatcagaaataaccaatggaatagagccttaattagaagctggttctgcaatgaagatgcaaaaagaatcctgaacatatcccttcctaattcacccaaggaagatgggtggctttggatgcctgaaccaaatggcatgttttctgtcaagtcggcctaccgtataattaaaaacgtgcaagagaggaaagacacagatgaaaagtggcgaatagtgtggggagccaagatccataaccgtcaaaaattgctctggtggaaaattttgtctcacagccttctcacaaaggaaaaacttgctcacatattccctggtatcgacaaaacatgcccactttgctctgcagcaccggaagactcactacacttattctgggattgcgattttcccaggggcatctggtttggatgcaattggcaaatgagaacatctaccgtaaatctcacgtcttgggacgagtggctgagatggttctctaacccccaacataggcatggtatacaacaattagactccttcttgggtggggcagccatcatatttgaaagcatatggagagtgaggaacaaactctgccatgaagggaactcaactccaatttacttgttgataaacgggattaaccaaagactcaaggaaattgagttgctgaattccaacttatctgcaacactccacgactcacaatggtttgctcctcccccaggatggataatttgtaattcagacatatctattggaaattctcaatctgcaggtgcgacaatattctacgatgaggacaataggattgtaaaaattgttacatttatatcaaactattgtgacccactccctggtgaactccatgctattagtaaaggagcggaatcagcagtttcattgggctacaagaatgtaatatttctcagtgattcggcggcagcgatcgacgcaattcggattgcacgttcagattgcaaaaagttacactacaatttgagagagctgatgccaagcttcctcagtgcaactggttcgttatgcaactgggagactcattggacttcccagagacataatggtgtggcccatgctttggccaaatgggcaaatcaaaataacaactttggtacctttgatttgtccgattttgatggttccctgcagtcttggattgcagatggctgtgtaggagacattcggctgtagtttgtttttcctttcagtagttttttatttttagttttcttaacagttagtttttttcccaggccttgttttgctgggtttttcggttgtttgtgtgttttccctgtttgttctgtttcgttctgcttgtttggctgttgccagtaatcaaaaaaaaaaaaatatgaaactattatataaatattcatttttaaaataaaaagaaaatatcaatataattttaagtttacagttcaacttcttgtattcaaatataattaaaataaatatataattacaaaattcaaattttaaatcaaacaccacatttaataaaaattaacttttgaaaaaattataaaaataatttaaaatagaaaaattttcatttttacactttgaatttctttatttacaaaaatacctcttcagtaaaaataataagccgtttttttatttgttttttagtttattttgttatattatagtcgttataaggttatttttttttgttgttttacaatttatttgtaattgatttatagttattgtaaggttgattttctggttgttttttagtttttttttgttaattttataattttaaaattttaaaactatatttttataaataaaaatttaattagtaaaattataaataaaacataaaaataaaataattttgaaaatttcgaaacatttaaagtatgataaatttatgttaaactataattttttcttctttttttgacaaaacgataattaaagagaaaattacatttactatgggattttaaaagttcttatgataaatatgacatatttaagtttgaccaatttatatggtatttttttgtttttaagtctttttatggtatttaatatgtcatatatatgtaattaggttttcaaatctcatatttaatgtttttatttgtttaggaagttttatttgtcattgatgtcggaaaagtcaccggagtagcggtcggtggcagaaaagtcgtcggagttgctgccggcgccggaaaattcgtcggaattggcattgtctccggaaaaatcaatgaaaaaatcaccaagaaaccaatttcttgaagaagaaaccggtttcttagtaacgggtttcatgatgaataaaccattttcttcgtgatttttccattgacaatgccaattcggacgacttttctgaagctagcagctactccggcgatttttctggcaccgattgcaaacttcggaaaagtcatcag

SEQ ID NO: 201858 - DNA, 912 bp, Cannabis indica
tcttgttgtgttcctcaacggtttattattttattttgtatttaattggtgttgatttggatctggaaaatgtaacgatgatggttggggtagttgtgggaaaataaatctgaggtttggtttgacttgttttaatttttttttctgtgatttagatatgaaaagtagggtgcagtggtggtggtgggtagtgatagtttcggcagtggtagtggtgggtggtggtggtggtggtggtctgtgatagtatgaagaatgaagaagaagagaaataaaatttggaaaaaaaagaaagaacattgatgtataataaataaattaaaaatcgtttttatttctttattaattttaaaattgattttttaaaaaaaataattaattaatttatttcttttaaaaaaattatttacgtggatgaataaaattgtgtcatgtgtacaatgtgtccacatagacaacacactgtgtacacatggacaatccaacatggcacttaatactcaaatatgaatggaaatgacaatctgctaacagaacacgagttttgggagttttaccgtagaaataggttttggggttaattgctagcgaagcaaaaattttggaggttttactacaatttactctaaattctatttaagtagtttatgtacctagacgatttgactaatcctcggaccaccatgacatttgcacatttacatgtgatgtgactgtgtactatcaagagaatgcaagatcttttagatggaagccgtaaatccagtttttaatagaatattttcttaggacaacttggtaaagcctaaatttggttcaacaacagaaaatgtataatatcagtacatattttttattctattccaacctgtgaagcttaacaactggctgagaattttcaaagaagaattt

SEQ ID NO: 201859 - DNA, 821 bp, Cannabis indica
acgtttgaccctcccaactgtccactcatcttgattttaatagtctttcgattaactacgcgacgaggtaactactcgagcataaagacttagattctgggcgagcagcgatcccacgaggttggtggacacaggcagagtttgtaacatctctttctcgatcagatagtttcatggtacggttcagttcagagagaaattttccatggacaaacacaagagcagagtatcaatgacagggaaatcggtttgagttttaaaaaatattttgaattgacatagaggcgggaacgattatagatgaagaaagatagcagaacccagaagatcaaattttgaaatacagttaagacagttaaaaagaaaaaaataaacctaactgccacagagcttcttaagggcacacaacactcacacttctttattaataacgtgaattttttaaatattaatattatcgtatttttttaccattttttattcttatcgttggttgtgtgttggatacaataaattacttttgatgacatcatattaacttctcacatcatgatatggaacagagtgagcacgtgatgggaagttttataattttaaatattgatttcctttttttaaagtttgttcggactcaagatagaatagagtaaatttaataatttgtagtttgtatacttaatagtttgttttcccacctttttaggatttttttgtaatttgttcaaatgtaattttgatactatataatttaaggtttatttttcatttttttagaattttattgatgtatgtacaaacgtatttatgatattatataccgt

SEQ ID NO: 201860 - DNA, 1598 bp, Cannabis indica
ttatattatttaaccacatttttaatagcttcgttcattttatattcggtgttatttaatttaatatcttaatgtaagacgtacgttaatatttgtaactgaaataactataacctaaatttatgaatctgatttttttgaaaaaaaattgggtcctttctatctttgggccctgtgcaatggaacagcctgcacattagggccggctgtgatcaaaccaatatacatatatgtcaatatatatgtactcatctttagatttacacaaaaatatatatatgtgtattcattaataaataaataagttagttatatatttaaatttatgtgtatgtgtctatgtgaatgagaataatttttcttgtgttttttattataaaacaaataaaatacaccagctcagtatattactaaaaaaaattaagaaattaaaagtttatttttctttatattactagaaaattaatatatattatattttaaaattttttaaaaatatatataattaagtgtgaattggattaaatcggttactttttgaggtcaaacaacatccaactcgcacaagtgcggatatccgcattttgcggattatattggattggattggatcgaatacttagtgcacagccctagattagactaatgtaccttatatattagagcttacataaagattaaccactaatgtcccttaaaaagaggaagataaagtcttatttattggtatactcaaattctagccaataatgaaaagttgacacgtgtaccaggggaggaatacgaaccagccaaagtcgtatattattaaatgcacattaaataactcgccttagggataaccattgatagaaatattcgaacttgctaccacatagaaaaaagcgagataagaataataactattaacaaataagatttgcaagacaacaagtccatatcgggataaaaaaaaaatacataataaaagttgttcaagacaaataaacaaagagtctgcagctcattgacccacatactcgtaagtaagagcttgcaactcattgacccacatacttgtaagagcttgtgggtaattgatccacatactcgtgagtatgttcaaagaatgaccacaacatttgttcatctcgccctttatgcattgaagtaaccatcttgctaataccttccaaaatggactcatggactatgaagagttaatttgaaaaccacattaaaaaatttctgttgtctatttattactttaattaattatgtagtttatttattagaaaaaatgctaatattttttgttaacaaaaatctacgttaatagtttggtgctttcattaagaacatttgtagtaaaactcagaaaataacatcctcaaagataaaactcaaagcttgaatttattgtggatgatactcagcgtaatgaagagaatcaggcagaagagacaatctgtcgccctagaaaggaacctcaaagttcgcaaagaactaacacaactgaaaccccctgttcaggaaggaatggtggagatttcaacccaactggtgaacagatcctagaaaggcaaagtgaagacacttatgatccaaccagatatgtc

SEQ ID NO: 201861 - DNA, 742 bp, Cannabis indica
gcggatgacgagcaatcgctaaatcaaatcttcagcgctctgcatgcaaaagatagctagaagagaaaaagaagttgtagagaaaatatggagcttttaagaaatgggagtaaaaaagggacaccaccaaaggtagatttacatttccaaaaagagacaggccatgaaagatcaatggttcaaaaattttgcaatagatccaacagcagggagatgagaagtccccgtacgatcagcgtggggcccacgaaagttgcgaggtccctttctgcacgtcattcagccgccagttgcactgcaccttttttgttaaaggcactttgccacagactaaaagaggcaagagacacttcctgaaatgttgcgtggtttccacgcaagaggaagaaaataacttatgtaccctcagtagatgacagctcatgcgggggtgtatctgtagcctaaatctacagcacatgtccacggtcaacattgggaacaatagcaagctcctctgatccaaaggatctcgaaaccttgggggtagatgttatccaacatttcatcaacaagacgcgtgcattgatcagagggaaaaatacagtcacaacaagaattattcaaggtaaccaagaaaatgaatgtctcctagacatggaaggcaacgagaggcgatggcctctgagagtaacttcctttagtaaagaactcggaaggcgatgtaggttttaaagatgttggccacgtcagcatcttgcaa

SEQ ID NO: 201862 - DNA, 588 bp, Cannabis indica
agttaattggtcccaaaatagtagaagataagtttgtgaggagtgaggaaataccatatctgggaagacaaagtaattttaggtgggacagaatcataatataactaccaaacagacacttgagtcaatgggactagtactccatgtgaactgtggattgaattacttatatttaattcttcacaaaatattagtaaagaggagagaggaaaatattagaaagaaacaaaatctaaaggaaaaaagagaaaaatattttctatcaattattatttggtattgagttgaaaaatagaaggagagaaaaattgcatatttatattatttattattttattcatattattaattttattttattttaaataaaaatattttagtattaaaaaaatatttccattcatttttttactttattttaggagagaaattttgtttgatgagacctattaatattttacactccattttttctttttttttttttaccaaacaatctcaaattttggttctatctatttttctcttatttcttttctttcctctaatttttctgctctactaaacatagtaaactgccatatcttt

SEQ ID NO: 201863 - DNA, 1084 bp, Cannabis indica
aagaaatcaataccaaaatatacactagttcacgtccgataaatcggtgtgatctatggctctactcaagttctggaacaccccgaaccttctttattgattgaacaagaacaagtacattacagtacagacatattctctattgagttctctcaaagtgtttcaactctcacactcttacccaagaaacttcttcatctatagaagattcttattacaaaatccaaacccaatctctttcttttctcaatacctctgtctctacctctcaatctctttctctctctaactctcaatctcaatctgaatcctctgttgaaaaagacaagtcaaggtggcacttatagacttacgataaaaatcttaaagtttgtggctgcaagaatggaagttgttaagttagttagacaataactaacttaacaaactctcttatgagcgagatctccatgtcattgtccgtcttagtgcatttgggaacatatacgagctttcaggatcacagaccaaagacactcgttgaagaggctttcgaataggatagaaccagctagagtcgactattcagaactgtcttccaagaagaataactagctatccaaaactcttccgaaggagggctaactatcctgaagactgaacccgaagtggacatgatagtcatctaggaactcccttctagactcaactatcattctataaaactccttttgggatagacaagttagctgtctgggaacaacatctgaaaaacacctaactttctaagaacaacttttgaaaactttttcatttggagaaactataccacaatatgagtaacacaaaagccccaagagaaaattgatttcctatatctaaatcctaacgaaaaattgagggatgatctcaaaataaagaaacaaagaaatgaactcccttccccataacgagatcaaatgaaatcttagaagcaacaacccaaataaataaagataaagaattctacaaattgacatgtggtcttgatagattgagtggttggcttccacttgtaaaaatatagatggtcatttaaatgctgaaaaatgcatgttgtgtaaca

SEQ ID NO: 201864 - DNA, 1653 bp, Cannabis indica
gacatgcatcttatctgccacgatccgatgcagggtgcgatcctgtctgccatgtcatcgtcaaccgtacaaagttgagagagatttattatttctttattttaattaaaattgaaaattcattatattattatattattattatttaattgaattgccaaaacaggactgcgttgcgaacgtgattcggggagaaatgtgtggacccacatttgtcgcacgtgtgaggtgttatgtaactgttgaaggaagatcgtagactagtgaaatattgtaaggacgataaagctgacctgaccaccaccatcactcctcaccatgtgtgtggccacctcgattgggtcccactctctcagagtgtacggtgacataataagtggttcccaccatttattgttattaatataattttttccacggcggttttcctatttttcctttcttgtctcctaaaacaaagaactgttggtcactgtgtacggataaacaggcaaaagagtaaattgatttcgagaaaggaagtggaaaggaaaaaaaaaaaaaaggaaaaagttataggttgaatgtatgacagtgtgttatttagtgcgggtgaatctacgataactagggtagttttttttttttttttttttttgtgtcttgactcttgagggacataactatgttaggttataggtgaaatatagagtataaatatatgtgatatttaagattttctttagcgtttctacattttcacttaaattcaagatagggtaataaatgcagtaagatttttctttttaactttctatgtttggttttaagataataaatgcatcgtgtttttaatgtaaagtttcaataatggtcagatcacccaaaactatctactgaaattttcgactggctttcgttattgatttttatgcatatattattgttttctacttaaaaataagtttgtgagatttgtgttgcacgataaaaaaggatacaaattggaatccttactccacaatatcaaaactaaatttgtgagatttgtaatttaaaacaaaattactgaccttaattagatttttgttttgatatcaatttttttaaaacgatcgattctattttttttaattaattaaccaagactgcttataatttttaaaccacccataaatgcgttttattaaccacatattgagttttcttaacgaaaagtttaaaatgtttactaataatgtctacgatccaaatttatttttttttaaaaaaaaaaaaaatacttctatccgaatttattcataaaaaaaattacgatccaaatctaaacagaagctctttttattttattttttatttgtcaggcaggccttttaaaaatttatatgcacaaatacaacagaagcaaaatcatttattaatacatgtatttattatatttataggagtgcttttttttttcttgaaactgttaattttggtgcatgccaatgcaaacgatttcgacttaagatggaatggtagatattcaattaattaattaacttatttatttttctttttacctaaaatgaagaaattaaagatgacttggtaatcaagtaaaatagaaagttcactggttaagaatgtgaaactttatacgtagccgacaaaaaacaaaaaataaaaaag

SEQ ID NO: 201865 - DNA, 769 bp, Cannabis indica
gtatcacgtacagcttaagagtacggtttggtttcttgtcgtgactaagaaaatagaaatgggaccaattttcatgggatccctttctatgaatttaataataatgtctcacaatgtcacaggcattcatggctttttttgtttgtttttttttaaaaaaaaaccgttcctgtagttatgcatataaacagcgttaatcatgaatcaatgatgggttttcttcttcatcaaaaataaaaagtcattaccgttcatcagcatggaggtttgtcactactcattactactactattatggtcaatattaataacaatataacaagcacttaaactacacgtgaatggggtaaccttattatcttaccaaacgacaaagagagtttttgttaagagtactcgtttggcttttatttctttccctcattggtttccaactaatacattaatttaatcaagaacagcaaataggaatgcctagattcctgaccccacctaaattaccatcaaggccattttagtttttctcagcctagtccactgacagctcacaaggccattttctctttgctctcttgctttgtattgtatacaaaaactgacctctattcagacaaaaagcattacacaacaataaacattatgtagtgaaaaaaaataaaggagattctaaggttagagtaaaggagatagatttagaaagagagagctcagaaccccatcttgttttcctctctataatcataagggtgttctgtttctggatatatat

SEQ ID NO: 201866 - DNA, 756 bp, Cannabis indica
attttggctttgggaaaactaataaatattgatcctttattgataattaatattttttttatctgaaccttaatattgaaatggtataaaactaatttaattaatatctatatattattattcatgtgcaaattcaaataaaagaatacacttttttaataggacatttggtaaataaaataatacttttatcatttattcgattgaaaaataaaatatatacatataatctccatagtttttaacaattttaagaaatcaatggcttcgatttctaccacggtgaatagtaattcgttgtctttaaattttcattttgagcactccatcatcaaagaacatttaaatgattcagctgcaaaacagacacacaaaacaagttatgtacataatttttcaaatgattgaactctaaacaaatacacaaacaataagcccctactctgaaaataaacaacattcatttttcattagaagagcaacaacaatttaaatgtaaattgaacaattattaatatattttatgaccccaatatatatacagataattttttcaatatttatttatgaaagtggagatatcatgaccagcaaatgccacttaactgtttgttttcttgtgctgtatcactccgttttcaaccccacttgagaattgaaaaccatgttccatgtcacactctatttatattaatgcttgtgggatatatttataattttcttcattcctctattttatataatgaaataaataaa

SEQ ID NO: 201867 - DNA, 1254 bp, Cannabis indica
aaaaaaaaaaaaaaatttaaccctaaaatcgaagtcacatgtacgtttaacgccaccatcgagccccaaaaactcacgaaaccgtaaaatcaaaaattatttttctaactttaaatccacttaatcttacacttatatataatattaataggttttcaacaataatatccttaaaaactattatttttagattaaaattaaaggttagaaatatttacttaatttttcaatcaccactaccaaattttcgagcactgccattaattttccaattactaccatggatgttttgaccatcatcgtgggtatccaaaccctatatcacacacgctttaaaaaaatcaaaaaacgcaacaaaaaaatgcaatgcaagataaaagacaacatcaaaaccctcaaaatcactatcattagtcgattatcgttctttagaaaccctatataagctttatcctaaactcccatatttaccctcaaatcctaaaataaattattttttatagtgtatatgtgtttttgggtgagaaaagtagaagatttaaaagaagaataaggaagaacaatggtgtatggagaaagtaaagatttaggagcggcgtcggtgatatcgtttcttctttgagagatagctggagaagaaagaagaaatgagagtttcagatatgatattagagtttatagatccatgttttcacataggcatccacgtgtatctaatatggggttagggtattgaagacttttgtcttcggttatttcgaaataattaaaattaaagatctacgattatttcaaaataattaaagacacacgtccttaattttaatttctttttgtttctcattacttttgtatttttttttattgtaaaaaattaatgatgttacaccatttttctagtaatctaacaaatacggaagagctaaataacaaacttaccaaactctaactaactgtctaaacaagtatgctcaacatcctccctcaagctgcactggaagaatctagagatagattgctacccaaaaaaatgaactttagtagagccaatggcttaattagaagatcagctggttgctcttcagtaggtatgtagcaaaatgtaactttgccttgggtgactagttctcaaacataatgaatgtaacaccctaactaacataggcgtattacgtgatttttaaacatgctgtgcagctcattgctaatcaacgaggtttatggaaaacgtgattaattaaaattttgcttttt

SEQ ID NO: 201868 - DNA, 1347 bp, Cannabis indica
atacaaataaatgatcttaagataacacagaaattaaaattaaaacttaaaaaaagtccaaattagaataaatggtaaaataaatattaaattactcttttatcatttttaatataattatatgttatgttttaatgggtagaagagatattttattgttgttattttattttttgtctttttcttaaattcttcctacttatgaagggattaaaatttgtatacttgggagtcttcctccatctcacaatggattttgtttatttaatcaatcaatttatccttatcccttcacccttccatctttctatttcctctaccaaacatagtgtaagaaatcaatccatactattattacaattacaatttttcgcttaaatataacctctctacaagggtacataactccactcaacttttaataaattaatttttttttatattatatatattcatatttgtctccacaaaataattttttttatatttactattatatatttttatttttgtctttgtaaaattttaattttatatattttcatatttattctataaaaaaattatttttattctcatatatttatttatgctcttaagaaatctatattttttcttttctaaatatatatatatttttttattaacaagctatttttatagaaaagaaatttttttgctcccctaatatttactgctcttccactgtttgggatgatcacatgtttgaaataataaagaaagttgtgattaaattgtggagttgtttgataatattgagacttaaatattgaaaaattaatgataatattgtgatattaattgttttgggcaccaaatgaaaggaacgcgtatatattgaatgaatggattcttatgccaaatgagtggagaactccattttcttctctatattttgactttgaacctatttatgataatatatatgatttttcttttcttttcttttctttataattattattattattattattattattattatatgattatttcaaaaaaaataagatgtgcttttcaactaatcccaaccacacaactaagaaagaaaaaagctctagaagggtagactcaaaaactattgttatagttttgtttagtagttattgtcactatttgattggtcatgaagatccatttaactaaagcttatattatatcattttggcatatcctgtttttcctttttaacttaaaaccacttttgtttaggcatgtctttgtcacataataacctttattaatttttatgcttaagggatttaaaccccctttaattagttcatgattctacactacacaccaccaaaaattccaaatttt

SEQ ID NO: 201869 - DNA, 736 bp, Cannabis indica
aaatattttattcaaaaataagttttaactaaggggaattataaataagaataattttattatcagttatacatttttttaaatagcgtatttagaaagtattatcactataaaagattaactaatcaatgtagtagttaatttaattatttttagtattataataaaaaataaatatttatttatataataaataattacttaaaaattgttataaaaattaataaataggatggtgtaagaaaaaattagggttattatttttgtatcttgatcatttaaaattgttattattgtatgtattttttttattattttttttttgagaaatttcactgttattaaaattgataatcgtttaccgtaacagagaaaataagatttgagatttcacccatccaacagacatcttcatctaactcaagagcgtacttagctaaaccatgagcagtttggttagcatttctcttaacatgaaaaacagttgctcttaagaagaaggataaaagacaactaacatccacaattaaatcattaaaactaaaaagattcttagatggagagttaatagtcgaggatactcgcaatgcgtcagtgttgatatgtgtaatttgtaattgcaattgcagtgcccaattaagctatgaaagtgctttggcctccatttcatctgatcgaaagcatccttgtactggtttggatataacaccaatgacattgccttgatggtctctta

SEQ ID NO: 201870 - DNA, 606 bp, Cannabis indica
atggagatgaaaattatccgatggattattatgctcaagatggaggagattggaattcctcttatgtcaaaacgacattaagacctcttcgtagaaagcctctagtttgatgtcgtttttatttcttgttgttttcatttcatgtccttttaattgatatatgctcctaaatcttaaacttttaaaaatagaccaattccgtaaattattcataagtgaagttttgttagtaaaaaatgataacactacagtttagattaacgatatttagcgatattttgcgtatttaacgatgatattagtaatgtatttgcgatataagattaaaaaatacactatacattgttaattatcgtgaaaatttaagtgtgctttcgtgatattttgtgatttttgcaacatcgtcaaaataaaaaaaaacaagtgagttgagaacttcaatgataggtagagattttgaggtttatttttatattagaagtaatttatttttagttggatggtattaaactatattttacatttaaccacgataaactaaattttccttcataaatgagtacttttgatgattaagtatgttgtacttatcataattctttttta

SEQ ID NO: 201871 - DNA, 2181 bp, Cannabis indica
acaaaaatcagttcaaggtccattttgactatttagaaatacaaggtcaatttttgacatttaacaaaatagaaagtccaattataacttttgacaaaacacagagtccaaaatagtatttaccaaacgcataccatgatttttctgaatccatattcatatacacatcatatataattttttttttgaaagaatagacaaattatatacctaatggaataacaaccaatgagaaaacataataaaaatttagtaatagaatcataagacacaactaagtagaattggaaaatttatttgcacaaatcttatagctgcacttgaaaaagtaattagatttacgattgtggtttgaaattctctttatttatttatatataaatatttttgttttattaaatgtgagaaaaaataagtttagattagtcaagggtttatgtatattggataattatttagtttttttattaaattttgataattagttatgaattaatagatatttttatgtaattattgactatcttacactttataatataaacatgcatacaccataaaattttggagttcgtagttttgattttaaatagtaaatatctaattgaaaaaaaatatattagaaaacataataataggaaaaataaagagctaatgatattttcattttttgattggaaatattgaatagtattttgtttttgtttgttttgagagatttggtaaaacaatagtgctaaaacatagtatgccaatttaacatgtaaaaaataaaaagaaagaataacatgataatcatgttaagaaaacataggttcaaattatcaggaaaaaatttgtgtatctctcattaatagaatgaatattatttataaataactttatacatttgtggcttcgaatgtttaagtctataacctattaaacggaagcgttcttatatatataaaatttaatgtataatttttacatcctatatgttatgcataatattattagaatacaataattatttgaataaatggtaaattgttcatataatgtactctcaaggatcaacgaacactagtcacctccattttaagtatgatattgtcaatgatcaccttattaaaagacctcatactaatggagatatgtccattcttatatacctacgatcatttctatttctagccaatgtggaattttatttgtattcctaacaattctctccttaaacacaacactcactacaacaaaaacctcattttaagaccattaaagttggaatagataaattttagtagtctattttgtgttggacattatagcttgggacataaaaagtatatatttctagtctaactatgctggactaaaaaatatttcttgtccaattaagctggactttaaaagtagtctcacaccaaaaaatacactaaataaataatgtttttttttaaaaaaatacaattacattttttttatatataattttaatattaaatgtaaataatttgaaaattaataatttctatatatgcaaaatattaattaaattaataaaaataatataatttcaaatttaaatttaataatttattttaattataccagcattataacatcaatacaataaaatttttccattttcataataaaccatcattctctcttttaactgcggcttcagatctcggctttagctccggcgaagtgagagagagagagagagaatggaggatgttcagtacatagagtaacgcgcgtggtgctagagaatcggggccgaagaaacgtggttgttcagttcgtcagggtcggaggtggacgggatagaggacatgacagtgatggaggacttttttttttaacagcgtataggaaagatgttgaatagtttcaacaaacagcaataacataacatgatgaatgtatggttgtatgattttgttgtgttccatacattttcaaccacaaatcaaatctcactattacaagtctattacagtgttgttattgagagaagagaaagagagtttttggtgtggtgtgtggatggtagaaactagaagagatatggtagggttttttgtttttaaatggaagggaaaattaattatttaataaataataaataaattataattaaatagttatagaaatgaaaatgtaagtgtatggtgttaaaattcagat

SEQ ID NO: 201872 - DNA, 502 bp, Cannabis indica
atttattttcttcagtttgaaggtccaacctaatttttttttctttgtttcattttaattttgttgtttgtattttttaattttgtttcagttataaatttattatttatctttattttttaatttcatattcatatagattagatttttctttaatttttgtattcttcattttttccctttacttctcttctctatctctatgttcatttacatttttttctgtttgggtgttaaattattatttttgtagtttttttatgtttttatttgggtattttgttttttagttagtaactgtttacaccaagagtaaccctgatgacatggatatcaatatttgacaagtggcaagaaagatgacatctcaaagttgagtagtcccgagtcatagcaagtcgaccacggaggggtccctagccctacaccaaggttgactttgggaactttgtaatggaagttcaggctttgataactcgtttttaactcactatctttcagt

SEQ ID NO: 201873 - DNA, 1081 bp, Cannabis indica
cttaaagaatttagatgaattacgaaatacaaattataggtttgaaccaaaccaattcgttcttaagtggaatattgatttggattgaacatttaattagtttggttagtttttgaatttttaaaaaatcttaagaatagtttggttggaaaaaataaaatttcaccttaaattaatccataaagagctctaagctgaaaaggcgaaaaagagggccggaagtggtaatagacatcatatatgcagtgcagtgcagtgcagtagtaaattaaattctgattatatttattatatatatgcgataggtacccagatgatgtttacgatcggcattggcttcctgcaaatggtgtggggtcaattaaagtttcaaacgaagcaacgtcaccaattgatgttagcagtgcagaagataagccaccagaagctgtgtttagaactgctgccactttcaaccaaattactagtatgagaatattcaccaatcgtttgcctgccaccaaagttgggatctacatggcactctacttctctgaagtcacattgttggattccagtatacaaaagaggtcgtttcaagtgtttatagatggaaatgcttattctaacccataatcccaccttttgggagtggtatgcaagtttatatcatcaacatcactgcttcttatgctactttgatcgagttgcgtcccactcctgactccacacttcctccacttttaaatgccaatgaaatttacactctctcccaagtttaaacactccaaccccacccacacgctgctacctaaaatcaaccttatacttatccaattaaaatgacttgttatatatagctgcatctgtctcaaatttgtgtgtaatttatgtctccacttatcattattattatatatattgtacttattccaaatattttataaattttaaaaaatttctaaataatttattgtgaaattttttattagttattgtggattttgattgtcttaatacatatttgatttgcttatgattcttcaagaaattttaagctttgtaatttttgttgaagttaagtttacttgtaacgtcctga

SEQ ID NO: 201874 - DNA, 705 bp, Cannabis indica
aaataaataatattttttgtcaatctattaataggaacacaagaaccttagaaagattttagaagatcttcgtttcaaaaacttgttcttaattttatttcatgtggagaactatgaatctttcactaatatcaacaatggtatacattaatatatttttgtggatggaatatttttttaacaatatataataattttgtatctttatatgtttggatatgtaatgatatataagaacccaaaaatcttatgaagtatatatgattgttaaaatgctcacattatttgtgtatatatacatatataattatattaatgattacttgggattttagtgggcattaatttatatataaattataatttatctattaattaatttatataaatatttattataatcaagatcttaagagtaagatcatgaattgtcgtatttgataaaagggtttcatggagtgtcgtatacagcttaattataattttggagtttttctcaaattaatattaatattatttatttatttatgtcctaaagctacttaattattagatttgtttttttctttttgttaattttctttctcatattattttgtaaaaagttgatcaataattaattaacaaagatctaatatgtttaatcaatgaataatatttttaattaaacctaagctaatcaagtgacttgatagattgattgtg

SEQ ID NO: 201875 - DNA, 1178 bp, Cannabis indica
atatatatataatatacatatgaaattatgtacttaattaattaataactctaaattttgatgaagagcgtagagctattgctccgacgcagtaccaaactcgaattaaacgcaagaaactcaagaggcttaacagcaatggatataatagacatacaaacattggagaatcccattgatgaatatcattttcaactcaaagaaactctccaaaacgccaccgtattaacatcatctcatcataatcacaactccaccgtatcaagtaatattaacaaccaatcacaagatcatcatcaagaagctgataataataatgatcatcataatcaaaaagactggatcaaatactttcgctataagaaaacaagagattcacccagcgacacaagaaacgctctcctcgtcgtcgcaaccctcatcgccaccgtcactttccaagccggagtcaacccaccaatccatttttcaaccacaacaacaaagtcaacgactatacaaagaaaagtcaacgctaacaataatgatgatcataataataaatattctaactatgacacactcctacgtatccctgacgtcatctctccgtcaccatttgcacaacagatgccttacatcccaagcgagcctttgcctttcacggttgggtttggagtggttttagccaacttgggaaccctagcagcttctgaaatgttcttattcggaaactcgctagggctcactgcttcgctgaatgtgataatctatttaacagcgggatttcctttccaaagagagcttcacatctcaatatactcgatgttgttcgcttatggttggtcggtgcagggtttggagagtagtgagaatagtaaggttggtatgaggaatgttattctagggtttgcttttcttttaccatttgtattgagatggtttccaaggtggggaattggaaagaggattcggttgtggtggattaataagatgattatgataaggaacactagggttcaacattatccaactttgtggtgaggagtttgtgtagcatgtaataattttattattattaattacacatgcatataatatatgatgtacaacattattaactattgtatgttttattagacatgtatattatatattaactttcattttgttgttatatttcaggtaatgaaagcccc

SEQ ID NO: 201876 - DNA, 1080 bp, Cannabis indica
tatatatatattgaatgaaatatgttgtttttataaatacttaaccaaatcagcaaccaaaatagattgtataccagcacgcaatagacaagtcccccactgtagtaatagttacgatatggggaagaacaaacacttttagccaaaaatattcacaactttgtttgcaaaccatttaataaagacaattgaaatttgaaaaatcatgtcgaaattatatttttatgaagtctaagtgatatggttccatcacttagctaatttctttattcaagtaaagtcgcttactaattctcggaggtttcgctcttttgcaaaaccaggtcacttgggattgcccgatttgcaactaatttactgatatttcactttgttgaaaaggtgaaatatcaaaatatgaatttgacatgccacgagctagagatcttattcgtgatggaaaaatagccatatgcttgagacaaaactgaaattggacaagcaaagcaaaatgcactaggtttagtgtcaacctaggcgctaagtgcctgatactggcccttcaggagtcgttttggtacttcgatcatattttaattcaggtatgagggctccctgtttgggacaaaaatatgaagaatgcttggaacagaattggcatttgagtgacaaaaccacgcgcattaggttgaatgtcaacctgggtgctagcttagtgttctggcccccaaatgacctcatttgcttcccaaaagcacttgtatcttcttgttgatgaaaacggggaaaattccaaaagacatctcatgaaaagtctttggaagcgccctaggttgacaatatgccaacctgggcactggacactaggcctaggtcaacctgggctgggtgggtcttttggccaccaaatggattcgtttgttacccgaaagtacttgtatcttcattttggtcagagatagagaaaatttcatggaagcatcttcagaatagtcattggaagcgccccaagtttacaactaggcattaggtggtgtgaacctggacgccgggtgcctaggtgctttacacgggaagtgctctaaagttgattatggggcc

SEQ ID NO: 201877 - DNA, 1804 bp, Cannabis indica
ttgtgggtttatggaacttgactgtgtgaaatcaaaattatctggcttatatagctttcttaacagttatggaacagtctttatttaattctttctaatagagctcgaatcaacttatatatagcttcaaaatcccatgcatttgcctctttttatgaaataataaagtgaaattatggaagagataaaagtcttttttgaagaatttaacaaaacacagtgaatgtagtctttgttgacagtaagattgattgatgtcaagtcatttctcaagttgtatgttgaaactcagtgaatgattctgtagtagaaatttttagcatgattggttttagtatatgtgaaattttaaactaagacttgctaaccactatctggtgttaataggagtggatccaattaatttagatgggtaagagtaagacggtacatttgtctggattcccttcatatgtttcggctgaaagtgttaagaaatttctggaagagcacacaggagaaggaactgtgtatgttattaagcttcgtccacctaagaatgggaattcaagatcctttgcaattgtgcagtttacctccatgaaatgcgctgagctcattgttgctaaggcgagccagcgtttgtggtatggaagttcctatatcaaggcatttgaaatggaccatgacactgtaccgaagccaagaacatttgaccacagcttgaaaaacataaaactatattttggttgtcagttgtcaaaggaaaggttttcgtttctatggaatgtggcgaatgtatctgtggattttgggactcgtcttcgaaaattacacttctatttaacaaatgatctagtggagtataagcttcagctatcctatgagaacctttggcaaattgagctgcatcgtccgcgtggtcaaacttccaaattccttttgattcaggtttattgctttacctttcactctgttttctttattgttgggaattctacaatatcttgcatttaatactttcagtatttagccaataacttttttgtgtataatgcaggtgttgaatagttttgagttcttctatgttgagtttttgtctgtcttgtgaaacttcctattctgaatgaacatttgaacaagattatacgcgttttaactgtaatttttctaggttatttttatttattttctgttctgttccgttctgttctgttctgttttttttttcacttaatatgcatgatggctgttcttcttatttattttgaaaatgctttaatgggttaggagttacattaattgggttttggaaaattcctatttttaagtaatccttaacaattaggaatatgtacatatgttatttacaaaaatgtgtcaaaaaatcttataatgtttccagagaattgtagtacatttttggtttgagatagacaatcaccaaatcagaataagtctttagaattgataattgagaaagatatatatatacataaattgtattactgcaaatcttggttgtaactagaagtatccatattatgattgtggggaaaatttaatcggttcctgtcctacttgatcattttttatttagagcttttaaatctcaatttcacattatccaatagatgttattaattactttcattttgtacataaccttcctttcatcatctacacttttttacttgtcatttctttcctgtgcccatgtttttagtttgaactatccaagttctgtatgtttaactgtattagtttgggaaaaaattggaagtgaaagaattgcattatattctctcttaaattcgcctgttga

SEQ ID NO: 201878 - DNA, 2024 bp, Cannabis indica
ttttttaataaatttaatttttatccctaaactatgatatttagaatttgcccttgatttattattttgtaaaataatcctcttgaactatagaaatatttgcaaatgttcatttttgcaaaaaaagaaaaaaaaaattgtgatataagagtgatcgaaagctaatttattataattcgtgagtccatgtaaaaataattgtatagacaatactttaatgataaaattaggattgcgtgtctgaaattttagagtaatgtttgaatatttaagattatatacttggtttcaactacatttagttagttaaatatgcttcatagtgaattatacgagtggctcgtggccgcttcaataaattatgtcttaaaataaatgaaatacaattgaggggaaaaatttgcaattattttcataggttgaaggaaaatttttacaaaaaaaaaataataattttggaagaaaaccttataagtgtcataatttggtaggtaaatattctattaatccatgttcgagtaggggcttggtgctgggttgtatctaagtcagggtcgggttcaaatcacgaggttaagatcaaattgattataattaaaaaatgcctatttaaataaaagtttgaagtaatttatttttgttttcaaaattttattttttagtttgaaagataaaacagttttacgaaacatatttttaaaatattttgaattatctaattaaaaaaaaactttttgaataagtgttatataacacacacaaaatttgtttaaataatttttttttttcaattataatatattttgtattccttttcattaatattttagattttgacccgaccccaaatctcaaatctcgacccactttctcttactttattttcttagtccttaattaattaaaaaaatactttaatttttgtgatttaaaaaaagtaaagaacaaaaatgttacacattgcaccatcattcgtaagagtatttctaacagagtataaaaaatgtggtgtattattatattttactacacttaaaaaattactactccaatagttttcttaaaagtgtattaagtttagcacatgctaaaagttgtgccaaattggacacaagatattatattatacaaaatttaaactacaataaaactactttttatttactataatgacactaattaccatataaccattatataaatgattaaagaatgaaaataatatatatatattttttttgtatattctcgataaaatattaaatgacctacaatataatcattttttttttcttattttacattttgtgcattataacacaattataagtattgggccaaatataacacaaagtttggatcttccattggagatggtgtaagacaatcaattcacaaggagtttagcaatagaaacattttctcttggaataatgttaggcatcttaaagtgttcagcactataaaaagtgtcatattattattggtacaatttaatattggattgtataaattttagagcattgctattaggcaccagtggtgcctaacaccttctcgacatgtcacgtttcgattggctagcaatactccttaaaaattattatattaaattatgtgggatccgatacttaattggaccaatagcaatattgacacataaaagggtgctaggcaccactggtgccctttagcatttctctaaattttaatttaataaatcatgtaaaaactactaaccaatcacatatagcacatcaatgtgatactgatattagacatcttaaaattactaatagcaatgttttttttttttttttttttttttttttattttaagcgtttatatattacaaccatgttttacctgggacccgaacccaggacctccaagacacacacacccacctatggccacttgagctagcctcaagtggttaatgttctttttcttcttcaacctaagtaataatttcatttcattccctttcaatataataataataatttcattttcatcaaag

SEQ ID NO: 201879 - DNA, 828 bp, Cannabis indica
tggtaggttctgtttcggacctgatttatgtttttatttttgttcttttattcctgtttatgatgtaaaaacatatagtttgcagtgaaattgctactctcacagaacacttgtttagattctattcccaactgttgcttgttgttggttaggttaaatcatgtgtagtattttatctcatgccctaatcgctgtcatggagtgctttcaactttctttttgtcacttgaattattaggggacttttcttggtagtacagtaaattggggcaggtgtagatctaatgagagcctaccaattaaatatgattgcaatagtatttctatgtttatgatgatctattataacttattccttatattgttgtgtatatataacaacatttgtgacttcacacctgatgtttttatctttgttcttgattagactaaatcaattacaatatggggaacactgaaacactgcatctggtttgctctggtttgcataggttggtgtactagttcaaattttcagtgtttccgttagactcgtgcatgtcgatttgcatactagacatcctgaatcaatagcatggttttgaattcttcacagtgcaggtcttactatattgattgattcaattttttggagaaggttattgtggcctgaatttgaagttttttggttcaactctgttctgaatcgaagctctgagtggggtgtatccttccaaatgaaattcttgcactgttatttttaatttgtaaagttttatattttactataattttcattgttatgtgttttcctttatattgtctccctcccttcagacacatccattc

SEQ ID NO: 201880 - DNA, 1369 bp, Cannabis indica
atgggcgttccgtggagcagcaagtgctagaggtaacaatgtaatgatttggttctaatgggtaattttattcggagcttctagtttctcttggtaatctttcaaatgtcactttccgagtgtaacttgcatgacttcatcttggagctgagcttgcacttctaatattacaatacatttttgtttcatctggtgctttttctttgtggcagtctaatcctgttctagaagcatttggtaacgcaaagacggttaggaacaataattcaaggtaggaacatttatattccctgtcaaaaattctgggtatgaaattggaatttaatgtgtttgtttcttccttacatcctagatatgcatattgtttaattgtattagtttttatctgaagtgagtgtaatataactgcagtcgttttggaaagtttgtggagcttcagtttgacaacaggggaagaatatcgggagctgctattagaacgtatttattggaacgatctcgtgtttgtcaagtgtctgatcctgagagaaattaccattgcttttacatgctttgttctgcaccaccagaggcaagttggtctcctttttatgtgcacaatgtttagaaagataactgggcaatgcatatttacttgaagtttaatcatcacgtcttctttggtgcaaatctttaatttagagacaaccagaacgctttgtggataatattgtgccaaagattgtattaatatattcactgatccaatctaaactagtagtaataagatctttatgcatctgaaatccttggaacgaccaaaacatggtaataactttgatagcggacttatgtcatttcatgtgagttgtctaacaaacgaataatgctcttttgcattttctgataattcagtggttattactctctttctctaaacttccatttgaaattcatttatcaatatttgatcataattggcatgtttattattctctgacatgcattgtgtacctctgccaattgttaggatgttgagaggtacaagttaggaaacccaagaacatttcactatctgaaccaatcacattgctatgaactggatggagtggatgattccaaggagtaccttgctactaggaaagctatggatattgttgggattggttctcatgaacaggttgcatttctgatggccagtatcatatgtgattataaaaatgttggtatagatctctaatattttttctttccaggatgcaatattccgggttgtggctgcaatactccacttagggaacattgaattttcaaagggggaagaagcagattcatctgaacccaaggatgagaaatcacggttccatctcaaaatagcagctgagctttt

SEQ ID NO: 201881 - DNA, 927 bp, Cannabis indica
tgaagaaatcaataccgaaaattagaatgtctaactatacaaatgttgtacggatgcctacgaaaactgtgattacatttaagaaatgcactctcataaacttaactctgataccataacaattatttgagaagaataaccaataaagaatagagagatgcagagaaaataaagagactagggtttcattcaattgctaaattaaaagtacctgcaagaagcaactggtgcacagtggtgtttagcaaggggttcgctaatctaaattgcagggtggcagcagtgtgttgggccatttggggtacaagaaatgatctagtttggaatgggaaggtggtgaaggatgtggacatggttgtatttgcaaatcgttatcttgaacattggagacgtgctcaaagttccaagttgaaatcgccatggtctttctctcagacaggtgatgtatttgagtactggactttacctcaagctaatagtatcaagaataatgtggatgcaactttgtttgataatgggagaagttattgtttgtgtattgttgtgtgtgatgtctcgggatacttataaaggatcgtaccaaactctcccttggctcagtaggaccggtcctggcagaggctattggtgttcgagaggcacttagttggattaaagatcgtggttggtgataagtgtatgttgaaaccaattatagtctatgcacggtacaagctattcaaagttcgttaaacatgatttctggacttgtcattcaagattgtaagaacttactggctaattacataatgtttatgtctattttgtcaaacggtcaactaatgtagtgatccattcattcgctaaggctactatcttatatcttaattgttgtttcaatttagagtctgttctaaatgatttactaccttacttggtagcagaagt

SEQ ID NO: 201882 - DNA, 864 bp, Cannabis indica
atgcttatgtcaactaagctagtcttagagtagtaagtttttttttaatggaattgctttcacttgcaaactaaaccatcatatatgtctgtacgtatggaactttatctcaattttctctcaatgatgaagaaaatattgttgaatgtttcaatatatatatctatatcagtgggctgaattgaatatgtggtccacagtatttaatttagattcactagcaagtagctagctaatagggttctgtagatatgtagtgccaaataacaaaacgctaacgcctgaaaattttgatttatatgtattatatatatttaacttttgaaaggtgtgaaagcatgttttagcatgcaatacactaaactacatatttttttaacagcaccacatttttgtttcttctcgaaaaggattatttttcaagactcgtgagtgttgtaaagtttgtaagttattattcaaggtgtcaaagatttgtttccccatttcttgaaaaaaaaaattgcttctccaaaatatctatgttacaagttatatgttttaatgtaatatatttgggacaaaaatatatattgtatagaaaaaaaaaaattaaaagagaagtgtattataaattttcttattttaaaagagtaaaaaaaatatagaagatacaattgtttagtaatttttactaaatacttaatctaaaataatatttattcaatttaattaatagtagtatattacttcattgtattactatacattactactattactttttcaaaattattattggaaacggttggtgcttagcatattaatatcttgctattggttagtcatatgaaaaagaaaagtgaattgttacaaagtattatt

SEQ ID NO: 201883 - DNA, 892 bp, Cannabis indica
aacagcagtgatccaaattgaaacatggcaagtgtggggtttgcacccataacgtttctctggttagtctctttactcattcttacttcaacagtctccggcgacacctatatacggctgccagctgtcaaacacgtggccctcttcgtcttcggcgattcactatacgatcctggtaacaacaatttcatcaacaccattcctgaataccaagccaacttccctccttatggaaagactttttcaagttttccccccggtagattctccgacggtcgtttaatccctgattttatcagtaagatttctacaaaaaaatgtgtataatatcaatacatcaccttatttagcagatgggtttctaattgttttgatttctaatgtatttaggtgaatatgcgaggcttcccttgattcccccatatttaaagcctggggttaccgactatgcatatggagtgaactttgcatctggtggagctggagcccttgttgagactcatcaaggttttgtaagtagtcctatgaattaattacttcatcaaccaaaatattaaattcttcttaagcttaactttaaatcctctgttttggttaggtggtagaccttcatgctcaagtaagctatttcaagaaagtaaagaaacagttgtgtcaaacactaggcccttcaaaagcccagaaattgatctctaaagctgttttcttgtttagtgtgggaagcaacgattacatgtctcgttataagaaagaaagtgttggcatggtgttaggcaatttgactcaagtccttcaagtaatgaatatagtatattcttctttaactcatttgaatttaattattcatgattggttaataatgaagtgaatcgtgatgctataatttttaatc

SEQ ID NO: 201884 - DNA, 911 bp, Cannabis indica
tttattttgttaaagctaataattaactgtttgtattaatttaattactaaaactctatcatggagttaaggttttgatagctaattaacttcttattatcattgaaactggtacatatgatttttatttatgtatattgttgagaagttaatgatgcttaattaaactagttatataatgatgacatctatgatttttatctcttctgagtctcttattttacaattattacatatatgtcaaaatttaattaattaagctcttaaaatcttttcttatgattttgggcgttatccaatcaattaagctcttaagaacaaatgaattacaaaaatgtataattattctcacacaaatttaatttaaacaagaccatcaatattcaatattaagaatagcttagcaaattggtgatgtgtgtgttattttttttccctctttgtgatataaaaatatattcttttacttaggtacaataaattggaatatctttttactgtttttgttctataaagtgcatcactttcttgttgttttttaagataagaccaggcaaattattaagtactacgtactgctctgtaaaaaaagacactatttccctgttagtgagataaattgtcctataattatatattttattatttatctttctgaattataaaacggcatttatcaacatttatatatgatagcgaatcatgaacaagaagtacacattaaaaactatgcaactaaaagtagtattcccatacatgaattatgatagcgaatgatcactcattggtatttttcttttgtcatttcctcgcaaagaaagcttccaaactataagaagtttcccttaatgatattttaatttccaagtttcacaaaatgctttatcatttcaaaactatctgatagaaaa

SEQ ID NO: 201885 - DNA, 1743 bp, Cannabis indica
tacaaaattttattgtctcacatcgatttgtactatttatttatgatataaatccaattttaagagttggaaccttcatgacatgataaaatttgattggatcatcttctatcatttcattattttttatgtcatttttttcatggatttctataatggcactggtctttaaggttattgagtttgatttattatttgaaacatttaacatatcttgaatggaaagttatttgatattgtctatcaaggttctggattcacttcttgatcaatgaaaagcatggaaacttaaatactgtcaaaagtgatagttggaattgattttaacatcaatttctcctcaagaaaaatatatataataattttatttttctcccaaactcaagatcctcaaaattattaaagttttttgtctcaaaattgacccataatgtgggatcacaaaaattgtagctctttaattattaagagtataaaataaagtatagttccttactatatatataaatatctccctatgtacttagattattagtctaaccacaccatagctcataaagatcttttaactatgctttacttgatactttgttcaggatttatgttgcatacttaagtgatcctcctcaaaatgagtttgatggaaaaaaaattactaatcacctagccttgaccttagataaattttatttacatatctcaaatacctttcaagctaggtttgcctagctagcattttgtattttaagatgaaattatatttctttagtaattatgcaaaaaaatttagacgttcacctaactcgttatacctctcatggcacgactttaatgcccttattgaacaaaattttaaaaaaaattaaagcattgttttgaaaattaaaaaaaaaaaaaaagacattgtttgaagattaatgcccttatgaacaaaatatgcgttccattaattatctttgaacacaacaaaatcttaatatgattacaatatataacatcatataaaaaattatttatttcttatagtataatttttctacaaaatattagtagtttaagttttgattattaattttaacctaacatatacatataaagtcaaatttttctatcaatataagactctcaaagttcaatcatcacttgagggtttattttcaaaaaacaaagtgcaatcatcacttgaatattagaatttagaaatataagtagattttatgtggaaaaaaaattaataacttcattattatgacaacttaaaaaaaagaaacttaattattatggcacccaaataaaaatgccctacattagctaattataagatatttattataaatgatgacaaaccgaaactaaatcatgagaatttgcacactacgattggttatgtcttcttaagaatttacattattatctacaaattattttattaaaaataataataattcaaagcacaaacttttttgtggggttaatgtttagacatatcttaataaatggacgacaaaagcttcaaacgtaataaataataattgattatagtttggaatttatcatgcatttaacaataaatacagcagtggtaggtataacatagacatttttaatataaaaaatataaatatataaaaccataacttacatatttttaatattagaaaattttgaatgtctatatttaatttttctatttaatttttatattatatgagttgagttgttctattgtaaaaaaaaaaactt

SEQ ID NO: 201886 - DNA, 821 bp, Cannabis indica
ggctttttaattttacattcaaactatatatatgccaatagtaattgactttgttcaacagcatttttttgttgtagattttttttttagtattttattataataacaataatattatctgaacatcatttttgttttgtagcagaattcatattttaaccctttattttttacactgaagtatttattttgtgctcgtaaggatagcattcaaaatagttaatccatatacatgtacaaaaaagcaagaatgatggtttggttaagtaaatggtatggtagctcacttgaggagaaatgagttctagcataagttttgtacatacaaaagtatgttgttggcatatttgttccgcaacaaaaatcaactctaaaaatattggtatgaatccctttcctcatatgataattgagtttactttctcttgatatttcaatatgaaaaattattttacttttctaatatatgagtcaacaaaagtaagatctagattcaatgtgaaaaattattttaattttctaatatatgaatcaccattggtaagatttaaatttggttgaatatctaatcacaagtgtaccgtgtttttcaaaaataagagtttaaagattgtttagttttaactttaaatgtgtatctgagtatattttggtaatgtcagtagaaattgacaatgataatgtaacgccctaatgctaaggcacgctacagtgctttttcaataattgtgcaatctttgctaatcaaagaaatttctcgaaaaacgtgtcaaattaaaacttttgcattaaacattaaactttgtaatttaataaaatat

SEQ ID NO: 201887 - DNA, 758 bp, Cannabis indica
ggaacttgcggttagctactagagtagagagaaagaaatgaaacaccaaaggtataacaaacacatattatggatggcatcatagattagtgatcctcttagccaaaatgatgtactttggttcacctcaaattttagttgaggtgaaatgtattctcagcttataccaaaataaaataaataataataaattcttgaaacaatgcatggtctagatttcgatattttagtcttggtcaacctttgtttataaataatgtgaaaaatatatatatatacatatattatttttttttttggttatgtgatgaattttttcacatattttaagtttataaatgcagaaaataaagtaatatatagtacgacccacccaaaaaaaaaatcatattatttataaaccgttatacctcaaagttggttagttcactaataataatagtcttaatgaaaaaaaaagtagtaaattaagagtaggaaagaaaagcttgaaaatgtttcactttcagatttctgaaaagagcaaattaaggtatttatttagacaaatactattacttacgtaaccacacgtctgtctcatcattacgtaatatatttctcatacctaaataaaaaaaaaaataaataaataaaaaaaatacaatctaaaaataatagttaaaagggaatgagccaacaaaaaataataatatatatatataacaaagatactatttggatagaggaatttgtgacttaatattaaaataaataat

SEQ ID NO: 201888 - DNA, 1000 bp, Cannabis indica
cctctttcctagctatctctttcgtcctgatgctttgtgggggaagctcagcagtaaataaaaaaagaaaaatgctgagtcacacgcaagaagtagcagaatccaaaaacgagtgagacttgtagtaaattgttaaaatacctggtagttggaagctcaactaaagagacggcaccctattgatagggaacccggaagaaaagaaccaatattcccggagatcgtgggaacgctccgtttggaaaacgggacaataagagttcgaacgcttatctagtcggaaaaaccctaacttggacatgtccgtcctcatgggattggccttaacacaataaaagtagaggatttcctccggggaaggaacttccagtttattaatcttgcaaaatacataccacccagccaagagtctataagacaaggggattagctggaaggacataatcccaatttttgcaattatatgagcaaagtaagtccttaaagggatatgggcgccgctagaaatgtgggaccaactccatgcgctaaaaccatcaacactcgtggacgcagattctccaaaaatggagagcctgcgccacatcagaccaggaatgttacgaaggcctgcgacatcggagtatgcttgtggtccatctggtcttctgaaagcagttggccttttagtccatatcccacacagattcaaaacaaactcgggccggtgaaggaaacctccctcttctggtaattgtggataaatgttcctccgcaatagacccatcttcagggatggttcccaaaatctccacaagctgaggtgttgctattgagacttcggtttggtcttgtcctacaagaggtattccggcgatctgtacggagtccttagcggcggacatgactttgtccacaagagggtcttggttcaaatccatgggaggaagggtaaactttttcaagaaaaaaggtaaacgaatgaaaaggcgggatcttctttcatatgctcacagtctcg

SEQ ID NO: 201889 - DNA, 1445 bp, Cannabis indica
ttataatcttaagttcttagctaaagtttgcatgtaaaattattaataaaaaaatttaagtggtgcttgcttccccctgctcaaaagcattgtacgcctatttatagataggcaaatgaactaaactaggaaactgaatacatttgataatatatattctagttatccaccactaaataaatcatgatattggttattaaactaataacacttttgccacttgggtctagcttaagttgttgggtgtgtgagtgtctgtgggtcggagacgggttcaaatatcaaaaaataaaattattaacatttcctaaattattttattcattctttatttcagcgagactcaatttatatgagcatacttattcagttagaccattgtgtcttttagatttttttaacttttccatgagaaatgatgtttgaagttttttcgttaatgtgatttttttaggtggtttcagactgagctcgcaagagatatgggttatgctgctgcaagatatgggcatgtaatgtttcctgagaatgtttatgagccggccttagaatgtgctgaacttttgcttgaaggtgttggaaaaggtaagcaaatacttccatgaaaaaagttgagcaccttgcttagccattaagttttgaaaaaaattatttatgtgaataagtttctccaagcctgcctcatgccttcccaaaatcctcagcatatactttgaactgcacaataacgttatacattgtgtgattgggaaattaggcagtgttgacttattttcgtttactgcaatattttggatcaaaacaaatgtataataggtctcaggtcgatagtcagatattgttagaattatatagaatagctagttgtgatttatcttacgattgttctccccttcttcttttgtggttacattttatttatatttgttttcattgttgatgtgcatttattttgtaatgcaggttgggcttctcgaacgtattttttcagacaatggatccacagcaattgaaattgcccttaagatggcctttcgtaagttcttatatgatcatggaggactttctaattctgtaaatgataactcagctgaaacgtctactcagctcatggtgagtacgattaatccttgtaacatatctctgtcagctgacttgttgaactttgtcatgtggtctttggccctgacacattccattaagcttaccctttggttagataaaatacaaacaaccactgttaaatctctcctagataaatcaggagattagaattattgtttttcctgggttagtgctcacctagataggtgaagctggtgctgtattgcttggcgtgtggaaatttttcaataaacaaagctcattttgtgcatttttaaatttttgttggaggtgttaaaaaactatttggatttattttgtcaggtcctagctcttactgg

SEQ ID NO: 201890 - DNA, 417 bp, Cannabis indica
aaaaattatttcgagtgttaaaataaataagggtgcataaatgtatctgtttaaactgttttaagtggttaaattgtagaatttctcgatgataataataataataataataataataataataataataataataataataataataataataatttggggaggaagcaacggtttcatttgatttgatatggtaagagaagaagatggatagaacatggtccattgttgtgggtcccatctctggcgtggattcaactattggtggaccccacaaaacacacaagtgggccctaccacccaccatcacctcaccacctctccttccaacttacttagacataaattaaatttatattttttaaaatgatataaataaaactctaagtaatttaaattcaaattttaaatttttta

SEQ ID NO: 201891 - DNA, 785 bp, Cannabis indica
aaaaaaaaagagagaaaaaaaaatgcagttaccaattaatatttaaaataataattacaattagtattttggataataattattattcaaaagtaggcaggcattgggcttattgagtgttatatcttaaataccatagtaaacagtgccaaagcctccttctccaagttctttggaagggtcaaagttatcagtggcttcctccagttcagtgtaactaaagacctgagttccgaagtacgtactgcccttttcaatgtcagatttagagaaggaataagaatcagtgggggtgcttcgagagaaattagttgaggaatttataaggttcttgcttgatggggtttcggaaatgtctttgctcttggttatagccccttgtctcttccttctttgtatgaagtaataagcaaaacctccaataaatatcccaaggatgcatgcaccagctattgaaaggcctgcagttgaaacagaaagattgctcagatatttttttttttctttattaagacacaaagcagtgatgtgatgtagaattgatatatacaatcatgaaagtattacctacaacttttggagtctgctccttcgatcctgtgaaacggaagacatattagttaagtcatatataatcgcgtcaagtagtatatgttacatatagaagaattttaggtaaataaactagaaagagatggatgaaaagttagatacttcgttactgtctctcatttatttttcttccatttatcctttgaaagataaatatctaacgagcatcctaa

SEQ ID NO: 201892 - DNA, 1593 bp, Cannabis indica
aaagaaaaaattgttaaataacaatgtttaagagtgtatcatatcgaaaatctataaatattaaatctgatttttgaaattaataagtaaagaggagtgttaattataacctctttttaatttttgtgtttgaaaaaatatattgaaatatatattttttacaaaaaaaaaattataatgacaatattcgtaatatatacttagttttgaaaaaattctaaataatttactaagtatgcttaaaaaaatttcaaatttgttttcaaaaatatagttcctaatattctaatttattaagcatgtttaatgtttaaaaaatttcaaacttattttcgacacagtaaactattctaaattttacaaaattctataagaataatatgttgtaactatgacgcacactgttataaaacaataattaaaaaatattacaacatatattttgttgaaaaataatttgtaatagcatactataattaacactataaacaactacaatacatagccactaactgtttttaaattgtggcattaaggtctaataataataaagatgacaattatatccgcgaattcaggtacccgcaagtactcgcctttaatagggtgggggtaggggtcgaattttggaggcgggtacgggtttaaatgctcataaaaacttaatcatttattttcgattaccaattttgtatttactaacttcatttattatacacactattccacttatgtttgttggtttactgagtttttatgattttttaaaattctctttgagacattatttattttcaaaaatatatatgtaatgggtaattgatgggaatcattctcccgctggataatcctcacccggcccatccctactttaatttaaacggtatcgaggtagatatgaggtgaatttagaaaatgggtatgaagatagaagagcaatccccgccctgcccgtttaatctctttttgaaaagtattaaatttatttaacttaatatttccactaattatttaattgaacttgtaactttttaatgattattcaactcaatctaattaatcaaattcattactaaaagattatgtttttttttcaaagctaggaggtttattgtatgtgatgatcataacttacttttggttttgttttctctagttttatcctttatcccacatgataaacgtatggatcattatacactttttcccttataaattatattaatatatttatttagattcaattaataattttaacacatttttaattttaatttatcaataaattcttttctagaaataacgaaaacattaactgaagatcagggctaaattaatcactttttcgtgatgaaattaactgtcttaaactattatattattgattcattaggcagtaggttgttcgtgagatgtaatgaagcttatatactcgattttgatgagtctagtactctctactccaaagagagaatagcttgctcaggcaaagattgctgcaaagaattcttagcaaaatttatggctaataaattgttatggagttacgttggagtaaatctacgagaaattgcaaattgatatgcattacat

SEQ ID NO: 201893 - DNA, 1006 bp, Cannabis indica
aataaaagccatacaagctcacatgttgtgttggccatggccctatattcagcttctgcagatgatctagaatggttgttgtttcttgcttttccaagatatcaacaagtctctaagaaatatacaaaaaccagtagtagaccttcgggtatttggacaagctgcccagtctgcattagtataggctttgagcttgatttctgatgttgcggggaacaacagcccttgtccaggacaatgcttgacatattacaggttcttttgagctactttcatgtgtctagctttaggaaaaccaaaaattagcttaatttgttaacagagaaggatatatctggccttgtgatggtaagatattgaagcttacatattatcctcctatatagtctaggatttgccaacttatcatccttctcatcttggctcaattttaggttagcttccattggagtagtgactagtttgcaacctaaatgaccaagatcttcaagccattgtaattcataaggtctttgagatatgaaaatccctttagcaaatctagccacttccaatcctagaaaatacttgagatttcctaggtctttatgtcaaaatctgtcattcaacttgatttttagtgctttcaattctttcaaattgttgctggccaatatgatgtcatcaacatagatgaggagaatgataaaactgtccccaacatgtctcagaaacaaagaatgatctatggctgagtggtggaaaccttcttcaatcaaagcactagaaaatttttcaaaccattatcttgaggcttgctttaagcgatacaaagacttgtgagtttacaaagagaatttggtggaatctctcccttaggactaactttggaggtaaagtcatatacacatctccatgtaaatctccatgcaagaatgcattattgacatcaagttgttgaagataccaaccattgatagctgcaagagctaacacaagtttaacagtaactaactttgtcacaaga

SEQ ID NO: 201894 - DNA, 781 bp, Cannabis indica
tttttattttttcaaaatatagtattttctctcaataaaataaatttaacatatttatatatataaataaaaatacaccaaaataggagtttcgggtgtgggttttgttcgctccacttttcacatgcctatgattatgaacttatgatccaaagagagaatgttacaactccaacttgtattagcttatattgtatactaggtaattgatatatctagctagtacgtgcttcgcacgtgtttaagggtgtttgttatcaaaaaaatttagacaatatcaaattatgcgaatactcacttagaatagggagtactctaaaaatataatataaaatatatgcaaataatagacaaaaacatagaaaaatatagtgattcaacaggacttggcctgcctaatctactactgaaagagatctcttactctgtttctttattatgatcagcctagccccctttgaatggagggggtttacctatttatagagagtaggtgaaggctacaatagcttggtcagaataaaatcattacaaataataataggcctattaattgcattgattacatcgattataaaatacatttggcgtccgctttaatggcacttgaatgcttgaccttctattttcattgattggtgtttgtttgcacctcttatattgatactgcgactttattaaacacaatgaggcctctttcgataccacgaggtacctcttttacctaatattatgaggtcccttttgataccgcgagttctctagtgtagcccttctcgca

SEQ ID NO: 201895 - DNA, 1433 bp, Cannabis indica
gaatcttgtacgtattgtatccataatcataacttcaccactgacttatcttctttccattccttcatcgatgaactccatggccataaatcttgttattcttcccaatctgactctcaaatgctcttattcttcatccaaaaccaaaacccaacaaatcccagctagggacagacccatcgacttcggaaaacacaagggaaaattactgggaacactcccttcgaattaccttaaatgggtctccaagaatctaagagctcgtgattttgaacactgggctaaccttgctgatcaagtcctcaaagacccactttaccaagatcgaatccaatgggaatttgcccagaacatcttggaaggtaataataggtcgtcgtcgatttcgaaaccagtttcggagttgttattagagatgagtgagaggtttggttgggataatgaagataaggttggttggagcagagtggattttgagcttcttgggacttctaagggtggacggattcccagggtgggtggagggaaaagtggagggaaaaggggggatttgagagtggatggaaaagaagaaaggaggaaggaaagggtgaggggtagtttgggaaattcagatattgatagtattgggaatgaagtgatgatgatgggattagatgaaaggagggaagaagggaaaattggagggaaaagggagggtttgagagtggaaaagggtggggatggaaaagaagaaggggaaggaaggaagatgaagaaagaagagaagggtaggggtagtttgggaaattcagatatgatgatgatgatgatgatgagattagaagaaaggaagaaagaagggaaaagggaggatttgagagtggaaaagggagggggtggaaaagaagaaggggaagagaggagtaggagagaaatgaggagggaaagggtaatgaggttgagtactaagaaagaagagaagggaaagggtagtttgggaaattcagatgttgggaatgaagtgatgatgatgagattagaagaaaggaagaaagaaagtgaagtaaaagtttacaatccattccctggaagagaatcactcttgaaaaaggtactccaaaggagaaaattttcattgtaataatttagcttgaattttgtagacatttatgagagtattattaactacatttatgtactccaatatgacatagtttagtgaaatagagtagatttgatttgattttgaacacaataatacaagttgcaatattgttttaaatcaattactcaaattgttgataaatgaaaacattaaatgtttattacaccgtatttaaaattggaataaaaataaatgaaaaataatcaaaattaatatttgcaatatattgtttaattataacaagtttattacacagtattcataattagaataaattaataaaaaa

SEQ ID NO: 201896 - DNA, 2337 bp, Cannabis indica
ttcaagtcattcttaagcatttcacttatgagcttcctatcaacatcttttttctgaatatggaaaacactaaatcagttacgatgtcacttaggctttgacctataatgtatcacaataaaagagttgaacaaaacagaaaacataccattaattctgaaactactcctttcaacattataacaacttcctttgtagcttccctgcctaaagatcgattaacatctttgatcttaagccttagcctttgatttttgtatactttacttcttactcgccataccttaaccaccttaaatttttctccagaaaatgtcattcccataggccatgttagtccacctttaacatctttatctacaacagcagaactaattaaatttttgaggcttcccaagtcatcatcctgtaatatagcatgaagaattgaacaatatataatcagatttaacaataacaagatatttctaaacaagttttgacctattttgttccttcctttatctacttattacttttaggacaagcacaaatgagatttaacaataaagttaccgtcatcaaagagaaaaaaaatatttaaaataatttgattcgcaattaaacaaaaagaacttacagaaaaattagttacaagttttttggtgcttaggtccagcctcaggtccagattcttttcaaggcaagatatgtctctgagcatgtgatgtgcataggaatgttcaatctaaagaaaaagatcttccaatgtaagtcacagtactaaagctgatcccataacaaccaaaagaagaaagaactatatgcatattcaataatcggaaaaagcatgagcctcagtagttgataatgaaaattaaatatcatccacctggtttcctatgacaaacaaaaaacaaacttgccttgtgtggattcaactttccatcttctagtaccctacatttgcaacacataaacatagagtcatctggttgtgttgcctcacgaaactatagaaacagggacacgtgttagaaatttcatatcaattctaaggtcattttttgcctactactaatataaagtacttttacaaataagaatggaacaaatcaaacagcagtcgggaaaaaaaatgaaaagtacttatagtatgcgcctcaaaaagttaggttgagcaaaaacttacaaatacagtatacacttctttctctagtttaaatttgagtccactctctgaggcaccctcttctaatatgtattctatatatgaatcaagaatatctgtgtaaaatgaagctctataccccctcagtaattcttcagaaagtgcacaccccctaaagaaacaatcttttctcagtcatgatattatggttgatttggtcattggtctactcatacaacttattttaatagatataaatcaactgcacaaatcaagatatggtggagccatgaaaaatgttattttgttatgttaagaacactaacctgcgaaatagaactttgccaaatctaaggattatcaatggagtaaattttacatggttctgatcagactcctccattttgttcctaaaatcttcaaacgaagaatgaatgtctggtaaaacagtttctgctatgtactcccacggtcctctattgaagctttttgttagtctgttgttactttctgtgaagcaaaattacaaataaataatgaaagaaagaaagatttcaaatatcccacatttactaccaaaatttaaggaattaagtacaagaaatttaaggagatttctaatgttctccttaaattttacatttactatcaaaaaagcaacatctgtttggaaaatcataaagaaaaaagaaaatcagattttgtttttgtcttgatcgtctgaggcttgtttgcattgtgtttgtgaataataaagaacttctttcttgatcaaaagagggaagaaaaaaaaagaactaacgtttttcatttgaatcagtgttgttgaataaagctagacgctgtacgacattttcattggcggattctacataaagaggttggagatcaaccgaaggtggaaagagattacgatcatccaaaccagcagcaaaccatctgtggatatccttatatgcataaccagtaattccagcagcagatgagttgtgttttgaatttttgttgttggtgtgaaatggaggcaactctggctttggtgtgggagtgggattctgtgaagaacctttctttgaaactcgtttatggggtggaacataggccatgctaattgctcttcagttatctattcgaatccccaacataagtctcgatcaaagattgtcttttttgtttgtttttttttt

SEQ ID NO: 201897 - DNA, 1160 bp, Cannabis indica
aaatagtcatggctaaataatttaaaaatacaaaattaagaattagaaaagataaataataacaaaaacttctaatctaagagtgaagagtggatacaaagttttatcttgtatttgagatttgagatactatatatatacacatagataggtaagagttatataaagaataccaatagtttttattttttagtagaagaatacaaatagttttaacaattaataataggatattaagttaacataaataataaatattaattagtatgtcttttaaattttcttattggattgaattaaagataaagttaaattagtaaaaatagttgaaaaaatgaaaataattagaaaaactacaaattagaaaaagtagaagaatgaaggagatgaagccacctcaactctcttatactttcctttatttatatatatagatatgaaaatgaataacgtataacaattgtacccttgaaattggtagatttgaaggggaaaaaaaaagattataaaagattaataacactagtccacatatattaaaaaaattgacacgtaaaataacaaataaagtgttgtgatatttatcaatactctaaaattttgaggtctttataaaaacttaaaaaatttgagcaaattattccaataaactaattcgcattctaattatttttatttttagtaatctataataataggtaactttaattagtaatttaatttgtattttttaaacaattattttttccttatataacctataactgtaaatagtgaattcctatcaaacaatttttcatatatactagttatagatgcttaactatttttcttcttggacttgaaagcaggagacaaattcagagaaatctataagtcgtcatatatatatatatatatatatatatatatattagtcatatgcacaatgtgtgaaagattcaattttggagttaatttatataaattataagagtgacctccgaatgagggcaaaaaaagggtcccttagaagattcaattcatgtagggtaggagagtgaccaaaatcatcatatggatgtcttacgttattattaattaaatagagagattatttatatatttatattacaaagacatttcatccatgactcaataacttaaccaaccatgcttat

SEQ ID NO: 201898 - DNA, 679 bp, Cannabis indica
tttttttttgaaaagcaataattttcaataaaggaatataaaaaggcataattagtgaaaaatctgtaaatattttgctatacccgacccaatccaggcccaaaaagagcccaaaacacagtaaaaccctagctagtggtcttaagtatatattcatatttatgctggtttcataacatgctttctcgacccaagcacatatactctgagatcttggtcaagtgtagggttcagcaacgaacatggtaagctttcttcacacaatccatctcacaatttcatctttattcaatcaaagactatcattcatatctctctgttttttctcagactttcaagcgaaggaatggtggaagaaacaaacatggtcgtggccatgtgaaatttatccgctgttccaactgtggtaaatgttgccctaaggtaatcgcatcgctatctctcattcttcttctggttagattttgtatgtaaattagaagtatctttttgatgtattttttgtggtttaattttataggacaaggccatcaagagatttttggtgaggaacattgtcgaacaagcggctgtcagggatgttcaggaagcctgtgtatacgatggtacttttgttttttttttatctatttcctggtctagggctgtaattcatatttttctttcagaatgatgattt

SEQ ID NO: 201899 - DNA, 933 bp, Cannabis indica
aaattgtcattgtatctttaatgttaaaaaataaaataaaaatcattaaaatctattggcattccttacaaaattggtgggagaagttctccctttcttttctcccttatttaatcaagttttccattttctaattttaataatgtaagtaaacaaatgtaaaaaaaaatgattatcttactattaattcgcattatttattagtaaaaaaacaaataataataataagtaaacataccattagtttttagaatcattcttcttttagaaaaaaaaaaaaaaaccaaataataataatatattttgtgtgaataaaagcttaatgacacaatgattatattatttaactcagagtaaattaataagtatacattatttattgattttttattaattattttttatgaatgtattttattgcttaataaatgtgatgatagtatttatgtcagcttaaaataatgcaaataataaaactaatcatatataaaaagtataggaaacaaaagaggagagtgacaataaattcccaatctctaatattctataaagaattatttattattttttgataatatcataaacaataatgtcatttttgactcatagacaaattattgtttgttaatcaaataaagaaagaaaaaaaggtagtacttcaaaaaataagaatataaattaaatgttagtttataacgtgtttatttttgtcatttttataaataattaattaatttataagaagtaaaaattatttttttaaaataattatataaatgaactatcaattagtaattttcactcctaacaaaagaataagtagtgaatttaattaactaaacagtttaataattctcaaagaaaaaaaaattattgggtacattctttttcactttagatacattctcttctatttgagatacatactaaaaa

SEQ ID NO: 201900 - DNA, 1507 bp, Cannabis indica
agagagagagagacactaacttgattaacaacgcggtctgttactccagtattgtcatgtcctcttttgggggcaatagaatcaaattcatcaaaaaaatagaaggcatggggctgcagcagcagctttggagaatatgtcacgaacctacaagccaacatataagtatcagctgcagaatatgcgttccaatcataagtaatattttgtaaaggaagtgcttattttgcttgccacttttaatcttggaacagatataattctcaaggtaactttaatattcagattttatttctagcatgctggtatgtaattgtgtagctaatattatgttaccattctaattccattgttttcttttatgtgaaaaaaaaaaggattttggagggcgtagcaaaaactgtaagcatctcagtaatgaaaataaaataaatcgtcctcttacagcttgctcagaagcaccaatatacttgttcagcaactcaggccctttgacagatataaatcgcagtgaacaggcagcagcggcagcaccaactatgtgtgtcttcccacaacccggaggtccatataaaagaacatttgatcgtaatcttaatggtgcatgtgcaaatatgtctgggaacttggacggcaattcaatcatctgatattaccttgaagttagtcacaatttgagaaatatcaccacatcttatattaaggaaaaataaataaacatattccgattataattcaaatgaatataaagtacaaatgatgttacagagtaataagaaatagacacctctttaatacccttctgaatctcaagaagaccaccaacatcatcccacccagaccgaccactttctggagcagatttagtaacctccctcattgctactggaaggaaatcgtgcattgcccgagaaaaatcatcccttagtaaagtgggcttttcacattggtccaaagaagaatggcaagacagaaatctaccaatggcagcatgaacagttctatcaaccaatatttcctgaaataatatgattttgtggaaaatttagctcaaaaaatgactgagtgtcatatttggcccaaaggttatagttgtactccaatgcaacaggttcaaattgactccaaagaaaacatagtcattaaatttttatttaaactatataaaaaaattatttaaatagataaaatgttcaaaaaaaaaattaattaataaaaatcattaattattggtaaatgagtaaataaaaaagatgacatttatatgcaaatttgactcatgctatattttgtgttaaatttggcccaacttagaatgtgcaatatttggtacacctcttacaacaatattggagcttcatttttttaaaatgtattaaaagatatatcacttttacatccctcaccagtctccaccagagaggctcttagcacttaaacacaatatggattatcaattaccatgatacacctttctctcaagaaaaagaaaaaggaaatggaaatg

SEQ ID NO: 201901 - DNA, 1524 bp, Cannabis indica
ggatctttgggagattttgtagtggactgggactcattgcagtctcaggacgtggttcttcggcgaaaatgtgagacaggtgaggaggttgctgtctcggcattgctaggtccattgccctttactagggagacagacacagatgatagtgtgttcccacggaacgttttaatgaagatatgtgtgaagaagcccggattgagatctgtgttgcagttcgattgtgaaatttataacaaaggcggtaatgggtctgagttcgacatccaaaatgcctattatcttcaatcttcatcagctatcagtagttcagactacagaggcccggtattctggtaaaaatttcattcaaagaatcttatgtttgtcgaataagtagcataaaagttgcatattataacaagtctttgtcccgaaatctgtatcatgccatgctagatacataattagggagaaaataacgaaagcaaaaaaaatgagtccatccgtgtgtgtctcgcactcaatctgttctctaaagatctttcatgaggaccttgttttaaactctcttcttgaagagatgtaagtttaatcatggccaatgaaaggagacgtggggtttccctctaaagtacccccggtcttcttgtgtgtcgccctcaaatgacggttttcactactacattattgcctctttgacatgggagaaatgtatcttaaacagtgtctaatcaactaaaacgaacactattttgtttacccttttcattaacctttcagttacataacttatttacttatggcagtgatcttgaccatcggctgatcggggcgttcaaggagtacttaatatcaaagggtattggagaaagcttgacaaatttccttatccttcaccttcacaaaaaggagcacagccaatacgtgaactggttaaagaaactcgagtccatggtaactaaagacgagcgatgaacaagcaatcccttctccattttaaaccttcatgaatctattctctttaactcagacaccaccaatttttgtatggaggatgttgtaggtaaaaatatgttgattattgatcagtatacaaagttttttactcttcaaatggttacagagtctcttgttcttagttctaacaatgaagcttaagctagcttcctttcatatatatttgtttgtttgtagcttggacaacatttaccaaaaatattgacctctttgatgggtttgttgatttaataaattgaagttttgatcatacataatacatattgttttgcttgaaaatttcaaagataattaatcaactaaaatagtggtgatcacatgagcattcaaacaacagaaaaatcaaaaagttaagacaaaaaattagaaaaaaggaaatgcatggaccaattaggcaccctcctctttaagcaagtagtaaaatgaggtccccataattgaaattgagttcattcatggccttgacaccttcaagcagagcctttaactcgccttccaacgcaaggagagcatcaatctttatgg

SEQ ID NO: 201902 - DNA, 642 bp, Cannabis indica
atattgatccttgaatttattggtggtgccacattggtccttccacttactaaattaattacagcaatggagtctgatctctttttgtttactatttgaattttcacgtttattagagaaattattaccaaatatgtgttttgtttttattgaaagaaaaaaaaaatcaaaggttgccaaaatcacttgcatccaaattccaaacgaatgagcaaagatttgatcagaaagaaaggaaaaaaacgaaagaatgagcaaagagtaccgaaattgtaagagcctataaaactataagtttcaccataggaaattctaatatataaccaaggttttgttaagatgtcaaagtcgaactaaccattctaatacctccaaaggtattttcatggtgctttgcctaatttagttgttatattctaaccaatttctatataataatcacataattgaaggcgtatttcttcttccatcacaataatcagctaccactgtttttggaattgcaagattccatgccccattttgagaaaaacattgcatcattaatgatcaatgtaaaaagaaagttccttgtatcatcttcctttagtatttttgtaagaagaatataaatttaaatagtaataatattaccttattaaa

SEQ ID NO: 201903 - DNA, 963 bp, Cannabis indica
tatttaggagttttggtcctgttttctcttgttttattttttccataatctcttccatttaagaaaacatcaagagaagggtctggcttttttagaaaaagctgtccgagttatttttttggtttggttattgaggaaactatttgaaaagaaagtaaaaagagataaataaaagaacaaaagtgattaatgaatgatgaaatggggtattttggaaggtctaagtgaattagatagatgggaatatatcatatatgcattgaatatgagctatgggtgaataaaatgaaaattaaggcctcaaagtaaaaacttattaaggcctaaacaaagaaaggtaaaactaggaagaaagatcaaggcatttattaaggcctcaaagtaaaaatttgtaatttcaattttgtatttttatatttacaatttattgtttacacataattttcatggtgcttcgtaaaaataccattacacaaattcgtcaaaaaaataattcataatttgtaaaaatatataatatatattttaaaaaaatggtgacaggtgtaaaatgcctattactattatgacaaaaagaaaagaaaagacttattgggcataagcacaattatagtgggaaatgtgcttactgtgaagctgtacctggcaatggcatgacacaacacaagcacaaggcacaaataaaatctaaaaataaacagatcaagatcaaaatcaatcaaatgtccaataaatatctcaccaaatctaaaataaacacagaaattagagggtataattaggggagaaatcagtgaaggttgtacaaataaaattaataatgtactcacccatgcaagcttgagaccgagatgagagtttaagagcttgagatcgaaatgagagttttagagattgagttgagccgagtgaatgagagctgaggagaaagaagagagtggtgtgaatggagaaagttctatt

SEQ ID NO: 201904 - DNA, 613 bp, Cannabis indica
atgtattagatttttggacaccacatttaccatctcatctgattcaaatgtatattttccaatttgatccgatcacaattaaatatctaatatttggtgatcggttgtaattgaatcgatcagttttcattagattgaatcgatcagttttcattagattggatcgatttatacacacccctactcgcgacgataatggtaatacttttacttcaagcttttatttctcacaagattacaagacaatgaactaagggagaactctcacttacaagtctagagagagagactctaccttatggagagtattcaaaatgtaaaaacaacacgaaaacaaaaaagaaataaataaataaaataaggtctaaaaagaaagactctgacttttacattcaaataaatatttttatatatttttacagtattcaataaaaataatacgaaaacaacaaaaaaattatatgaaattaatataaaaatattatacaaataataaaaaattaacaacaaaataacacgggtataccatacaaataacatgataacataaaaaaactgtatttaaaaaatatttaagattttatacaaccatattattataattttttttttg

SEQ ID NO: 201905 - DNA, 1315 bp, Cannabis indica
tgacgactttgaactgagtttccttatatttaaattaaaattcatgaacgattttgaaagatgtgttattgttctgcactatactcctactcttgtagttggaaacgaggagaagccattgccgtacctattatacctacaaggtggacctggatttgagtgtccgcgcccaaccgaagctggtggatggttaaaggaagcgtgtgaagcatttcgtgttatattgatggatcaagttagtactatggttttctagaatcattcattatcatttcttatttgatcaattgtactggtagttgcttattcttttctttttcttggactattagcgtggtacaggtttgtcaactccattgacatactcatctctgctccaatttaagtctgcagaggatttggctgaatacgcaaaacattttcgagcggacaatatagtaaatgatgcggaatttattcgtatttgccttgatgctggaccttggacagttttgggtcaggtatgaatagtttccatttcttgcttggttaggtgtgcgcatatttaagctttctgttataatatgccatggtcttacattttctcctcgtacaattttgtatgtttttcttacgatgtgttatctatttttctctcttgaatgagattgagttgaatggcatcttgttctttttcttgtgtagagctatggtggtttttgtgcggtaacctatttgagttttgcacaagagggattgagacaagtccttctgactggaggaatccctccaattggaaatggatgcactgctgatgctgtgaatagagcgtgctttgaacaggttatacttcagaatgaaaagtactacaagaggtaccctgaggatgttgagactgttcgagaagttgttaactatctgtcagaatctggaggaggagtaagtaaagtaattactttgaaatttattgtgttagtagattttcaaatatgttaatgaagtcttagtctttggaatctcaattttcgtaggttgatctcccttctgggggcatcttaactccacaaggcttgcaaactctaggtgtctcatttcttggatgctatgctggttttgagcgtttgcactacatgtaggtgtttagtgttcacttatagatgcctcagtttataagaacttaagtttaacaacagtttggatttatttttcccacatcgattagattggagagagtttgggatcctgtaatggttccaggagcaccaaagaccattagttataacttcttggatactgtaagaaaatcattgtctccttactatcttgaattaaactt

SEQ ID NO: 201906 - DNA, 1095 bp, Cannabis indica
aaataaaataaaataaaagatttggtagactcccagtctaacacactggtctaaaactaaatattctacttttgaaacttaattaatagtactgtaatattatatcctcaaaagtcgtaactaaattagcattaattataactagtttgaaaaataaataaacaatattaaaactagtagatacattttaacaaaagttatacatacatgtttcctttaagatttatttaattataatttaaaccatgggatttattacaattatctaattatatctttttaaattatgtagcttgcactactaaattttttttattttttaatcaacaacaaaatttataaattaaaagtgaatttattacttaaaaagtttgtaaactatagatattagtcacaaaattcataacttattgtaactaaatttacaatatttgttgtgactaaaattacattagtataataatttgtatttaaataatattttttaattacaaataaccttttatattatgactaaaattcacatttagtcaacaaaaaaaaaaatattgtgactaaaatatactaaaatattgtcactaaaggaattttttttttttttaaagtgccattttaaatcaattcataatgttgaaattataggattttttattaattttattgatgtgctaacaaaatgatgatgtaatgaaattaaaaaatctatgtaaattattagagcattaattaccatatagctaacactaaggttgagtacgatccaatccatgtaatcactgtccatcttccattattatttatagaccacaacgtgtatatatatataaatatatataaatatatatatatatatacagcctccatgtacgaaacaggtggtcttaactagtagttatatatttttatatgtatagtcaagcccatctctaatcttcaatggattaatcaagacaattcagcacataatcatttggataatctaattctaaatggatgatatctacgttttattaaaaaaaagggaccaccaacggtcatgtacaatgctcatattctattctatatgtctaagtagtagttgtaaggttcgtggtg

SEQ ID NO: 201907 - DNA, 657 bp, Cannabis indica
attttcaccgtaaattactctatgtttatatataagaatgaaatgaagaatagtagatgaggtgagtgagtcacatctgaacttggaaacaggcaccgccggtaagttgctatcattatcattatcaatttatctatcacacacatgcatacataatatatatatatatatatatatatttatatatatatgtattatatataatgcagcataatatttatgagtagtagtagctcgtgtgtgccgtatctaatagggcacactcatcctcactctactgtatatatagtacctacaattaatacaaaaacaccctccaccacaaatatacatatataattcaatcaaacaatcaaccccaccaaaatagaagagtttagacattttatattgagaattttaatgacttatttaatattacactgttttttttttgttaaatatttatttatattttgtttttattaataatcttagtaattaaatatgtaggtgtatatatataattatatgtttgatttaaaaaaatacttacaagtaatttatattagagtcgtcctaatatagttttttcacaatagctaaagctgtaaaattttgaaaaaataattaatagttcagaaagagttcaaactaatgatatatataataattttt

SEQ ID NO: 201908 - DNA, 1669 bp, Cannabis indica
gagatattcaattaatattttctccaggaaaaaatagagttgatatagcaatggtgttctctaattcgaaattacccaccgaaataattgaaaatatagtgtcaagattagatgtgaaatccttgttactgctcaagtatgtgaacagatgttgtttctctctaataagcgatccaagtttgatgaatgtcctccacaaaaaccagtaccttaaattattcttctcagttggtagctcggaaaacttacatgagatttcatctgatatatcccccaatgttcatgatcacaaggataagacgaaggagttgaggtttgtaggttgtgataatggtgtgatctctttggtacaagaggatcataattatgtttacttttggaatcccgcaatacaaaagcataacaaacttcctcaaaatgatttcaaacttcctacatatatgtatggtggatttgggtacgaaccattgaccaatgatttcaaagtggtggctataactatgtgtggagttgagccaatttggttgtttggtaacttctgtccaggaggtaacttctgtccaggaggtgaaccagtttcagtttatagtttaaaaaaaaattcatggaaaattattatcatgcctgacttattctctatctatcaacatcatgatgatgagaccatcaatctgattactactttggggtataaggtggtgtctgttgttgttagtggctctattcattggccaatgggttgtactcggtataatcgggggaggcttaaacaagatattaatgcaatagttgcctttgatctagatagtgagaaatttaagctcatcaaatttccttcatctttacacaataaacggttaaatgatacaagtgtttgtaacttgggtggttgcctatctatagtcactcaaatatcatcatgtattgagatatgggtgatgaagaaatatggtgtgtgggattcttggactaaactcttttccgtggattccattaaccaatctgttggaataagtatgttcaagccattaggggtctcacataatggtaaactcttacttcaatcaagatatggtgatgagaaacatgagcatattctctacttttatgatctcaaaactaagaccatccaatatatgagtaaacaacagcgttatctctactttgctacttatgctgagagtatctttctaagttaagaccaaccacaagtttttgcctttcttctacttactagttttcttcttctttattctagtggtaattagtattttgtttaaactttgtttttttagtttataaagatttaattctattcacatttttattattggttctctaaatcttcaaatactttttctatatttttgttttgtatcatacgaaggaatgtacatgtaatgatgtctagccaattttaatcatagaattaggccaacatcatagtatgactacagaagtagatgattgtgatcttttatcattgtcttgagattcatatttgcttaagatcttttttatttaaagtaaaagtttattatataaatcagaaacaatgcaatacatttcctgatttggactatatgaaaatacttgcttatcatttaacacatttatgtaattagccactctctatcccatgtaacacaattaagattattgattttag

SEQ ID NO: 201909 - DNA, 1348 bp, Cannabis indica
tcgccccactaaatctgcatgtagctttgccctgtcactaacccttcaaacttagtggatcaaatataataaatcaatgtcacaactcccaatatgaaaaaattctctccccaaaaaaataaattataacagcaaaatttagaacaactccaataagaatgttttgaaaaatatttaatgacatgaatatattgttgacatcttttaatgaatgcttactaataatagagtaaaaaagaatatcaaaaaatgtcattatatagcattctttatatcttttctttattatttctttcttattattttgttataaaggaagaaaatttaattatttaatatatattaaataataatataatattattttaatcaattttagatgtgcctactataataatattgaaatattttagaataaaaaatgttaaaaataatataaaagaaataaaataattatatttttagatgatgtacaagtttttaataatggtattcttaaggaatcaacaagaaacataccaattatattatctatctttcgatcattttccatataccaactagctatagctagcattatcacctttactaaaggatccttaggttatcctctcctctctctcaaccattcagtttctgatttggcggtgtgtgacatactatcttattgtcttaatccagttgtatatatatatatatatatatgtatctatatataaaatatattcatagtcccaatttgtcaaaaaataacaaataaaaaaaatatattcttattggtgccagattttcaaacttcccaagaaggtaatccgtgagcttgaatttatttatagagtctttctttggaaagggcaatatatgatgcagggagcatgattagtggcatgggaaaatatatgccaaccaaagattgcaggtggctcgggtattaagagaactgctcaaatggaattcaacagcatttttcaagtatgtatgggctttaacaaacaaggaggataactttcgggttaaatgggtacatgcattgtatactaaagaagagaattggtgggagtatcaagcaccaagccaaggaagttggtattggaagcaaatagttgcagccaagaaccaaatcaaatgcctcacggatgtacaatagcttgctcaaaaaaaaaaaaaaaaacaatacaagatttctgatggctgtgcaaaacatagcatagtttcaacacaccaaagcatagttttatactttggttggctatgcaaaaccgcctcaagactaaggaataagactgcagcggttcaggatgcttgatgatccgacttgcagcctttgtatgatgcaggctgagacaca

SEQ ID NO: 201910 - DNA, 978 bp, Cannabis indica
cgtggacaacatacctaataattttgtttaattttttttttattttaaaaaaaaagtacacccaataatttctcataaaccaagaattctgttatataactacattttatatacacaatatatacacacaaaaatatatataaatatacataaaatacataaatatatatacgcaaatatatatttatataaataaaaataaatattaatcaatttcagagaagaaattaacaaaaaaaaaatacacacacaaatttaaatctaatctaactattaattcttttttttttttaaatggactaattttgataattataataacctaaatttacatataaattaattaaaaatacttttcttttgcaaaaactgtataaataatcatatatattctctttatcttataaatatatatatatatatgactaaaaaatattaaaaaaaatacctattgttgctctggtcgacgatgatggtgggattctggtcggaggtgctgcggtgcggggtggtcgttgatcggaggtgcgccatgcggtgtggttggtgatcggaggtgcaccgtgcgggggttacgcttaacattagggaaatttctttttgaaccccttttttatgtatgaaagaaacataatggtttttttttttttatgaaagaagaaggtttagggaagaagaagaagaaatggttgggaaagaggaagtgtgacactcttaatgtgcacaacattagaggcgacacttggggcgacattatcacccctagtgccttgaccatgtcaggtggcagggcattaggggcgacaggtgttgcccctaataatgtgagcggaaaaattcccgtctaataataacaagtggattttcaacttattatgggcaacatgtgtcgcccctaataagttgtttgtcgcttcaaaatgtattaggggcgacacatgtcgcctctaaaggtcttcaatttttttttaaaaaaaa

SEQ ID NO: 201911 - DNA, 1024 bp, Cannabis indica
tatattgatattgattgattatacaattgtatcaatacataatcatattgacattaaagaataaataaattgatatgattatgtaatatagttaggtctactaataaaagcacaatattaaagagcaaactaaaatatataattatatcaatataagaaaattggaatctaataaaagtaagatattgtaatcaatagttatttctgtatatattttattaaaaactgaaaaaaaaataaattctaaccatataaaaaaaatatgaaaaaatggtaatagattttttttcacatattttgtaattaattaatataaaatatataaaaatgtaaaattctcatttattaattagttttgtttaatttttaaattaattatagttgttaatagtgattttatgactaatagaaatgtacgttatctgatataactattgaaattctttatatgaggttatgttgttgtgttttaacttacaaatatttaaattgaaaagaaaagaaatcatgcacaagcacaacacccttttggataaatatatttgcaacccaattttcctatccaattatttttgttcaaacaatcccctcgagtgtacggttgtgttttaattcctcacactacacatatccatagatcttatgtatgtggttacatatatattcaactcacaacatacaataattgagtcaaactattgttctcattattaattgtgctataaatgcatacaaataaaagtcactccacaaaataatttctcatgtgcgcaataaaaacttgtttatagaagaaagtacaaattcttataaatggaatcccatcccacaagccacttgaggctagctcaagtggtcatagggggtgcgtgtgtgttggaggtcctgggttcgagtctcaggttatgcatgttgtaatatataaacgcttaaatcaaaaaaagaatcccaacccacaattatataatgagaattgttattagattttagtggtgtttaataatactaggtgattctagcacgt

SEQ ID NO: 201912 - DNA, 912 bp, Cannabis indica
agtaataggatatgtacacaaggaacaatcttttatagacattgagctttatccctttatttatgttcccatcatctttgacacttcgcaaagctacctgcctggattgggacccactttctagacttgttctcttttgctaatatattttttttttaaaaaaaaaaacaagaaaaaatatattttataaatactacacgatgattacgtggagtaatgatgtgtacaaaatgctcaccatcagcttttccacgccacctaactggctactcctcagttgtcacatggatttttctaattttctcaattcttctcctttattttttgtaatgaaacaatcaatatccctcttttattaaattatcactttctattaatccattttcaagtctatttctctctatatacatatctctatgtgtctatatatacttacatgagaattttccataccaagtctcgttgagccctaaatttaaaagttgctctttcttctttttttttttttttttttttcttattcattatatatttttttcttgcttctctctctttgtgcacttacatatattgagttaatcaacaattaatttatggctataactgagcgtgagggtaggattaatattaatagtggcaaagatgtgcccggaattaagctgtttggggctacgatcattttgcaatatggtagacaacaagaacaagtagtaaaagaggaaccaataaagttcgaagcggagcgtgatcatgatctaacggttgagatgaagaggccagaaaagatcataccatgtccaagatgcaagagcatggagactaaattttgttacttcaacaactacacgttaatcagcctagacacttttgtaagggctgccagagatactggacggctggtggggccctgcg

SEQ ID NO: 201913 - DNA, 637 bp, Cannabis indica
tggctgacttggtgtatcatttattaaagaaccgaaatgatattctgtggaactcaaggaagcaaagcactatgaacaagtggttcatgttacaaaggaagatgtgaagagtagagtggtttgcaattggcctaaaaatgtcaaaccgattgatgttgtttggttttcaacattgtaactcaattttttttattaacaaagttaaatgtatgattatacattgattttattgtacagatagaaaaaatcagatcttcaattaaagatgctagtaggttgtaaattgaaatttttggagtaatgaattttactaattaaccaaaaaaaaataaataaataaaaaagtaaattactaaaaaattccgtaaatgaaatacaaaaaactccattatcatttgcgacaataatatacatgtattatgtgataataatgttgaaaacctaaaagaaaaatataataaataataatgaaattatctttttaaactatatattgtatgagattacaatgttagaaaactaaaaaaaaaataaaataataattatattaccttctataaccatattgtttcacgttgatgagtattgagtgacgaatgactaatctgaagcaattaatatatatatatggaacact

SEQ ID NO: 201914 - DNA, 823 bp, Cannabis indica
agtgtttatgaacatgtatactggctgggatatgggacattgtctatctcttttgattctgtcactttcagaaaagtttcccgattttcttcaatacaataatatggattcaactaggagaaaagtaatgaactctttcaatatatctttattgtgttactgttttagttcacacaaaacaaaagactgcatataacataacatgtgttccttccaggtgagctaaagtttctcttcaatgtagggaaagttatgagaccataaaacaagttggctaacattagcagaagttgcaaactaatatgtttttttgtatgttcctcaaaatttctatatctaaccaaacaaaaaaattgaaaataacaatccaacatgaaggatttctttaaaaaggatgtattttattttaaaaggatgaatcggtaaaccaaaattacataaactggcttattacaactgtacttcgttgatatcaattgtctatgttgaaggtttcaatacgaaaaagttaaaagaaaaatgaagggaagaactaacaaaatcaatccaccaatgcctattttaactagaaaaaagaattgtaagccacctaccggagttttacccagaaatgtaataggttcagcttttggtccaagagcaagagaaaaaacacacaacgcataagctgatttatcctcgtacgccatcagcatattgttgagacctagaaagagacataaaaaaaatgtcattcacttttcgacccaagtaaaagattaaaaggcataacaaagaaaacggaagagaaaggccgggcaacttcaacctgcatgaccaatct

SEQ ID NO: 201915 - DNA, 1211 bp, Cannabis indica
gtaggtaagaagttgagctataaacttgtgggtgtgagtgtggcaaggcaaataatgaaacttttattttcttttggatttttttctttttcttttaagaaacatttcttttggatatgatattccacatatgattcttggtttccaattgtgaataaatgacatgttaattttttaagatacatgaaagcttctagccatgaataaactctctaccacttttcttcacaatgtgtaatttacaaaaaaaaccctcttctttagcaaacttttggctatagaaacaaggtcatattggtctttttatgtaccaaataaggataaagtgaatgttacataggatcccacaaaaacatgatagattatcctttgattaaatagaacaatatttaacttgagtaattattgtgtttaacttgaagggtgcatgtgtagcattggatgagccctaaaccaaaattttcaattttaccatattatataatatttattaataaggttgtggagtccaaatgggttatgttaaagtgtcaattataattgtaagtagttatttctcatttattaagtgaaaaagaagcttttgatatataatatttaatgtacaatacatggctgagattgacattgtggctcaaatattttctcattgtcgttcactaattttgtcaatggtggagccttgatattggcccaaaaactgccgactttgtgggcccattgtgggccctgaatttgaatagagaaatggaagatttttataaggattattcatgcttagggcttgtatttgtcattttcataaacaatggcccaacttttgtttacaaatataccaaatatatgggatttctttaagttttacactcaaatacattttggtaacctaagagcattaacatcaacttctctactttattttaaaaatatatcaacaaaatctcactttatctattttacctgacacatttacattacaatatattttccctgtattattttaaaattatttaatttaatatattttttaaataaataaatataataatattaggcacacacatttctaaaaagatttgaaaaactaaaataacatttgagcacatgtagctaagcattgttgttttagctataatacctcatttgaaggagcactatttttcacctcttagttaaaattgtgtagctattaactattttaactactctat

SEQ ID NO: 201916 - DNA, 825 bp, Cannabis indica
ctagcagtgaaaccagagggcgtgcaccagattatgatgaagatgacaattacagccatggcagtgaagaagaagatgaagatgatgatgatggcggagctcattcactcggtgagacagaagaatgttttttgaggcagctggatcacaacaaagctgttaccataaccagctccgctgatcaattggtcggtgatttgcaacaaaactatgctgccaatcatgctaaatcttgcactccctggagccacatggaggactctggtgtatctttcagtgaaagcaaagaggaaaattcaggcttgactacatgtgagggggaagaagtagaagactctggcaaaagcttggtatgttttgaaaagaggattaatgataaagagggatcatcaatagacagcagcttcttcaaacatgaacaaaatcaaaacattgagactagtaggagacaatgacaaacgaccatagtttgcatttggtgagaatctttgatctgacccaatgctgttgacgtctgaagaatggtagaagaattaattaatttgcttagctgtctacttttggtttgtttctgtaaattaagaaatgtgtgctgttgttcagcaaagaggggttgactgaactaagcatgcatttccattaagcttgtgattggtctgtgactcgtgagaaattgaaaagggtttcagttttgggctgaacccttactttaccaccttaaggttcatgatgtgtgtgtactaattaggaaggaattttctagccatcgacattattcagattggaatgaattagtgttaattcagtttctctaatgtatgtagt

SEQ ID NO: 201917 - DNA, 848 bp, Cannabis indica
aatccaaattgggcatcacctactcgacctaatagtcaacattcaattgtattttctccatcagtgagcttaattctattttacaaatcctaccaggttcaggtcagcccgagaacccaactccttacctataaaaaaggctaggaacccttcacgcaaaggattggatttttataattagaaatttcgaggttagaaatttaaacaagaacgtacttgtaaaatactccagaaccaaatagcttaatcatattgactcgtggactaagactcattgatgtccaaaccacgtaaattctcatctcacttccttttcaaacacattttcgttagctttttctatttttaaatcaattttttaaaaattggtaaacaattataattttcagtaaatattataaaaaatacaaaaatataacatttttaaaatagaaattagtagtcaaaccccctgattttacaatctcttgcaactaaccctcaatttatttatttatttatttacgagcaaacctcccaaactacacttctattagcaattttactttttcatcaaacttctaccgtttatgtgccaagttggatgtccacgtgacacaattatattatatattgtgcgtgtattttttaaaaaaatattatttaaaaaaattatttatttattattaaaaataattttaaaattaattttatgtttttaaaataataataatagatagatcaatataactgtgccatatatacattgtgtatacatggacaattcacctttacagttaacaaaatctaatggataaaaaaattaattgttaacaaaagtgtgatttgagaggtttcaccttaaataa

SEQ ID NO: 201918 - DNA, 1485 bp, Cannabis indica
aaaaaaaatgataataaaatatttataaatgataattttaaataaaataactaattaaactaattaaggttggcataagaatttaacatacttggagtcgccttcaatgtctgaaacatctttacataaaaataaagctgatcccattgatttaacaaaggctaggatagaaagtaaaaggaggactgaaactcaaattcaaacacatgatgagatgttataatacatcaaattttgataagaatcgttcagacaaagaaaaaaaaaaaaaaaacaaaagtcgaattatcccaatgaagaaataattaaaaatcattttacatgatatacctcattaatttaaattggcaactattttttaaattaactttttatttttttagtaaaaatgaaaatactttttaaaacatctttataaattattttcacttttttaattgagaattaaacttttaaaaaatttgaaaataaaacaaaaaaataatcactttatccattttttaaatggttttttttttcttaatcagtattttggtcgactttgaccccaacttagaccttggtacccaaaatccggccctagccccagtcgtggactcggaccacaacctcgacctcagacacagatttgaattcgacttaaataaaaataaaattaaaaaattaaaaaataacagtggttatagagaagatttctaattttttaaaaaaaaaaattaaaacacaaattttacttttatttttatgattaaaattaaaaaaaaaaacaaaaagtattaccaaacgttcccttaatcgctaaaatttaaagtgatcattggaataattttagttagtctagaatttgattaatttctcattttccatgatttttattttttaaacaaaagtacatgattcttcttttattttaacctttttttatttacttcaaaacaaaatctttcatatattctcaatatttaatttaatacactatgatgactttttttttttttttctttcaaaaattatgagaaaagcaataaaaattagacttaacaaattaattacatcgatagttgtctttgaatatttttggagtacaaatattgtaatcaaaatgatggtagtatttatttttctattttctttagcttttttttattgtttaattactaacaaatttattgatatgtgtaatttttattggtattaatttgtggtagtacccacctcatctcaaatggtaggccaaaagctgctctgctagcataataacatgtgaaatttacgatcaccagaccctgcacagtgttatatattttaataaataattacctcatattaaattgatttcttttgaaaaaattaattaattaattagttatagaaaaattatcaaaagttacagttaaagataagaagtagtaaacgtgcactaaaatactacttttaataacgtagcagtgttgctataatattttgtgtaacattcattaatta

SEQ ID NO: 201919 - DNA, 689 bp, Cannabis indica
aatcatgtaattaattaccaaatgaaattttttgaaatttactttgttagaaaataacatataaataccaaatgtatgttaaaatcaaattggaaaatttaattaaatacaatttattgaatttattaacaaaaataaggaaagaaaataaaattccaaattaaatgaaaaatacaaatttttgaattttttttttaaaataaaataaaaaactgtcaatgaaaaacgacaagtcgtttggggttacattcaacgactcgttttctgaatccgggtcatgcagactcaaccccaaaacccgatcaaaaatgcaattctgacaatcaaaataaatgaaattagttccaaaatgatttaaatttcaaaattgagagattcataaatttcatacattgaaaacacgtgaaaataagactttaatttcacaaaatataattgggtccgaacaagttcctaaagcaatttcttatatttttattattttcaaaagtatttagcatgcatagattaaatgtataacttttttattgaatgtgatcatacttaaaatattcaaaatatacacagaggaatggaaaacaaaaatttacatacatcactgacagatatcgaaagatttcatacatatatacacagttatatataataattatattgcttaaaaaaaaaagaaaaatatataaaataaa

SEQ ID NO: 201920 - DNA, 2040 bp, Cannabis indica
tgtatggaaggctcataatgatattttatggaatggtaaatattgtgtaacatcagatgttgtttggctagctcgaaacactcatcgacaatggagctttgcacagtcaaatcgtttaagtcctatttccctggtttccaatcttgttgacagtaagaattgttggaccaaaccaagctaaaaattaatgttgatggtgttgtttttccagctacaaatcagattggtacaggctttgtggctcgtgactgtgaaggaagattagttgaggctttttcaaccttgtctatcagaagctgtcaacctgctgttgcagaaattttgagtgttaaagaagcacttactttaataaagcagagaaacaagtcgaatgtgattattgagacttaattgcatcttagtggttcaagccattcttagtttcgtctcaatgccatctatatttggtttaattgtttaagatttgccggtttatgctttcttcattaaatagtatttttatttgtcatgttaaacggtctgctaataaagccgcgcattgtatggcacgtggtgcttgttattgatccgaccgtctttttactaggagcaatgttcctcttgctctccaatctattctattagcggagttatctgtctaataaattttattttccaaaaaaataaaaaatttccttacaaaaaagccatttttttaaatagcaaaaccaatcaattcttattctaataaaaatgtccaataaaaaaagggtaagactttaaaaaaaataattatacgattttaaaaggtttttagttaatttaacgttttttttaatagttttccagttttttttaaggtttttttaaaaatttttatatatatatatatatatatatgagtttttaataaattttttaatttattatctgagaggatttatcgcatatttttctgatcatatttttgtaaatatcataaagtagaaaaaaagttaagaagcctgttgggccggtgagctgtgggcaacggccccacccactgacgagcctatgtttaaagttggttacaataattttgttttaaaaaaattaccacattctttctcttgaatatcattcatttgtttttgttgatcctaagacggttccaaattttttgtttatcactaaagaaaagtattggcaaatcatttttcttggcgagtttgtgaatcggaatccactacacaacattccttctgagtttatgagacgaaaacattggaaggcaagtaatcatctttccattttttgagttcttgaacatgattaggaatcttactctcccttgattattcttagtcttattgctctctttattactctcccttcattattacaaacaaaggagttttggaataaaagtaggaaaaaaaaaacggtttgtttgttttcatccaatttttcatttcatattatgactatgcatatatttgtctcccacgcatttaattacttagccttaataaaaattaaaaaaaaaatcagagaaaggagaaaaattcaggagaaacttgaataagatgagtttttttttttaatcattgataataatcaaaatgtcattcatcccttctctcaaaaaaaaaaaaaaaatgttattcatccctaataatctaaatgtgtctaaaatattaaatagttatattcacatcttttagtttttttttttttaaagcaataatcaatatttttgataaaggaatccgaaagaagggaatgtcacgaaagaaccttgcactctcaaaacgttttgtgccagtggatgtggtgaagcaaaaataataggtatttatacttgtctactaaagaaaattggttcaagaagataataagaatcaaatgattatttttggtggtccttttttacatttggtaataatttttttttttgttgggaaaaacataaattgattttacattttgcagtccttctcaatatggttgtatttatatatgtagagctattcaacatgataggttgtctaattgacctatttctatattgagcactcattc

SEQ ID NO: 201921 - DNA, 1164 bp, Cannabis indica
accctctgaaacctccacctgtgaaagccctgcttgactcgtgtcgccaatgaggagaatgactcaattaaagtcgcggcccctgaaaccttcaatcgatttttcaacgagattccgataagattttggacagtgaatggcacgattaaactcaggatgtaatattctggaaatctaattgtgaataattaggatttattatatattatgatattaattagagaataatgagtaggattataatcttgataatctaattcaacataaattataaattttgctacacgtggacaaataagcttcatttattaactgcaaagatttatttggaatatgtgggtataatgtgagttatttatagaataaaaatattttcaaatttggctactttgaagacccaatcgtctcattgaaagcatcaaaaaatttattgagatttttagaatttgattataaaataaataagcttaagaaagaagaagagatcaagattttttacgtggttcaagtgttaataaattatagtccacgagtcaattttattgagctagaaaagcttcaaagtatttattacaagtgtttatgccctagtcgaagaccctaaatcttagttcttctctgaagaatttaatttcccaccatttgcatgaagggataatgttctatttattgggaagaatcgggtatgggcataccaaacccagtaggtttttaaggtgtcaactaggccctttgatggagtaaaatacaatatttattgactttggaccaattgagtgaggcccaattcccgaggtaaggcttgtccatacaacagagatcgtttgaggatgccatgtgccatacgcagccaagtccttatcgagaatgtcagagtatatggcgttggacaaaaaatgtgacattctttaggtggtgtacgcactctaccattttgttgtgggagacaaataatgaaccgcgtggccctgtatctagagggttccatgtaaggagacgtctggatgtaatctagacgactctccgattacccaattctggatctccccttgaaggtttctggatttgtcttggtagagtttttgtttctaggtcgaatggtcttttttggactagggcggtccgaccttggcaggtcaataaattgggctcatgtccgaatta

SEQ ID NO: 201922 - DNA, 1170 bp, Cannabis indica
gaagagagagagagtttgtgaaaggagagaagatagagagtctgtaagaaaacaagcagaataggaaaaaaagaaaaagaaaaaaattgaaaaataaaatattttttattttaaattagtttattttttatttttaaatatttatttatctgggacaatattagtgtgtcatgtatacattgtgtctatgtggacaatactctatgtacacgtggacaaccactttgatagttaactctcaaaaacagatggaaatgactaaatgctaacagaatgtgagttttgggggttttgtagtcaaaatttgagttttgggagttaaatgcaagtaaaataaaaatattggggggttttgctgcaattaagccaaaaaaatgaagattggtttggactggttaacccaaccaaaccgacgaaattattggacgggttaagccttttctaattttgaattaggtgggttacaactaaatatattttacaacccgatatttatattgaattggtaaaaatatgttataacccgactaaattgactaaggtaaatttaaaatagttttattttttttatatatttttacgaaaattaacatagcaactaatggagcaatctaaatcgcaactaaaatcaacataacaacttacatgaaaaccaccgaagcaatcatcaaagcaactcaaaccgtttaaaaaaaataatatatgagataattattctgtgtctgtcatcaatacactaaaaatttgaataaaataatattttggaattcaccacaagacaagaatggaaaaagaaatgaagacaatttgcaggaaaggacctacagcctctgctatttttatgttacaacaaaacctagttagctaggtacatttcactttcatccattaaagaaaatcgtttgttttatcccttttctctcttacaaaattagcacgtgcatttattgatttagatagatttaatagctttcaacgattgatctatatgcacccacgtagccaatttatccatttatatatatcaacaataaaaattaaataaaaaaaatacttctttaataatgtgaggttctctgtcttaattatatagtctaccacacattaaaaaaaagtaaataaatgattgtgatggaataatattattgtaaacatgtatcatgtatatta

SEQ ID NO: 201923 - DNA, 1869 bp, Cannabis indica
aaaggaagatcacctccaaaaagagacaggagtcagaagtgtatgactgaccacctctcaaataaaatatttaataaatataaaaagtttatattattattttagtacgtctataaaaaccaagaataaagtcaatcagatcagatccaggaatggtcaaataagtgaatatccattcaccaacctgaagagccataacaccagaggtcaattgagtcattggatgagctgtaacaggtagagcatcaatggccttgtagacatagtctgcaataattatatatgcatgagatacagaatcactatactagccatagaatgtaactgagcatcaacgtgactaaaataaacatgtatatgtgcagccaggcaaacaaatgtaggacacaaaaatcttcagcgaaagagaaaaacatacattgattctagttttacttttacaaaccaaaataaaacaagtacaattgaacaatatagcatacattgaactcttttacaatatgcagccacatagctataacctgataaccaaagactatctacgtcgctgaacaatctttcaaaacatacttattagtttacaaccaatttctccaaacggcagtaacacattatttctggttatatgatctaagagaatgataagctgtcaaggcaaaatatacaaatgctaaaggcatcagtctttaaaagattctatgaattctcactccaaacagcaaataaatgcgaccaacctgtaactgtatatgaaacatacactagcacaacaaattctgaagttctgaaccatgtatgaaacatacaatggcactattacattaaaacagtcaagtcaagcacagaccacagtgaataagaatgtaacagtgaacagaaaaataagatggcacctggaacaactgcacgtgctcgcaattcttttgataatgcatctacttgctctttgtttggtacctgaagaccaaaagggatgtaaaagaaaagatagaaacattattggaatacttgtagatgtgacagcaacaataatttgctatgtattgaaggttggaatacaatattaagcacaacatttgactagtagaaacaattttcacaagactcaattgaattggagtaaacatgttttgtaatgttagccactaacaggtgagtttttcgccttcatttgctattacactgtccgaacatgcttcttaaattgggagaaacaaaaaaacagcaaaggcatacctttccagttaaaaggagccagagaagaccctcaggcaaaggttctccatcaggcttagcagctggtaaaactttttggcattcaggaatagacaggcccctaaaacggataccctacagaaacaaacatacataatgaagaaaggaaaacattatatactctgactgcatcacaaccagagtaaatatgtaatatcctaacccagaatttcaagtgtatacctcatccgggtcaagtaatgaggtttcccatagcagtccagtcattcctctcattccaccaattaccttcaaaaatacataagatgtaacatatgttagtttacattttacacaagataccctggcagcgtgatactatatcttcacttgtaaagttctatgactataatgaacattcaatattttacactaaaaacatagaaacagaaaacagtatttaccatatcaacagtaatattgcccaattgaacctttccatgttctgactttaattttttcagccgttcctgttaccaaacaaacaagcagaaaatttaaagctccaaataatacaaaattcagtaaacttcttagtttggttcttaaaatatctttaaatgttcagcataaaggaaaaaaaaaaaagaacta

SEQ ID NO: 201924 - DNA, 1338 bp, Cannabis indica
atttcaacatgtattttcgaacacgaaaataaactaagatgtttaataagaacttagagtaacgctcctcttttgttattgagtgaaatatttccacatgcaacattttctttcgttttttttttttaaaaaaaaaataagccattttgctatgtatttttttttatttcatatttcatattatatagtagacatataacttaatttttatttttaatttttctttttaaaaaatgaaaattgtattcttaaaattttcaagtaggttgcgacataaatatttaagtttaatttccagttgcagataaatatttaaatataatttttgacgataataaacctaagttatatttatagaatttctacaagtatctagttgttaagtgtcacattaatcgccacgtagcagttcttgattggttcaaataattaaatttttattttttatttaaaaattaatttaaatataccaataaaaaaataacaagtggataatgacttgacacttgactcccagtatctacggaagttttaaaaatataacttcagtattaaaccgtcaaaaattaaactcaaatatttaagtatttacgctgcaattactctatttttagctctaactagtttttttaagataaaataaataaaaatcagatactctaacttttatttcctttccaaaatccaacttagagtaaatttcaaatgatgtttttattttttcattctcatttatattttctaccaaaacttggtagttgtaagcctatttgcatgtggtcctcaatatgactttaatttataattttaagtgtgtctaggttttctataagtgtgtaattattttaacacattttaataaaaagaggatgttagatcacaattttttggtttatgagctagaatgataattattaaagttatatagcatggacctaaatagctaagtttattagggtataaatgcaattttttttataaaggtattatattttaaaattctaactaaatttaaattgtttcactattattattattttttaaaaaaagctttatataaattttcataagtttcggacaaaagttagcgtacaaagattatttattttttattttttatttttttgtaaggagtgtacaaggattataataaaatactgaagataattcaatttggtaactttacatacatatccacgatcaaaattaaagctaattaatgctctaaaaaaatattatatccattttttttaatatatatatatataattcattttttactctatttttcctatatttatttttttagactttatacattttgtaaactagaacaaa

SEQ ID NO: 201925 - DNA, 764 bp, Cannabis indica
atattaacacatacatacatccgcatattcatatcacgtattatacatagttcttacatcctttctgaattcaagtgacttggccggcctaaatagaaagccttgtgctggatggatgccctaataacataacacaaccaggtaaatcacacatcaaaaccctaatctaggaaacccaaacatacaacttagagttatgttattactaatagggagtacaatatcctaggaggtagggaaacacccaactaatccactgaagtggacatgaatcgagaaaatgagttgttcaaggaatctgccaaaatcgattaaccatttttacaggtcctagcaaaccgattaaccggtttgcaccaggtttcccaaaacaactcaaaacttgtccaaatgccacccaacttttcagaacacctaaaatgatcgtacacaatatatttcaatcaagagcacatagaaaaatgcacaaatacaaaatatgttatggatgaaccaagcttgagttttcaaattcaagcttgtgcatccatcacccgaaacaaccaaaccaactgcatgtggctacttccaacttaaattaaacttaaaaactgaaccataacccaattaaaaattcataaacaaagagtgtctagggcttacatacaccaatttcaccttgattcttagcttaatttctagaaatatgttgaagtaatgctagtttctctaaggtttgatggtgctcgaagagagagagagagagagagagagagagagagaga

SEQ ID NO: 201926 - DNA, 560 bp, Cannabis indica
acccttgcatagaagacaccccatatcaaagtctttcattctctccataacttataagaacactatcaaagcaaacaaatcaaatcataatataaaaacaaccaatcgtaataaacaaccaacataacatattcaaattttcacaacttatcaccaaatcttttttttagatcccagttataaaaaaccaaactacatagattaccaaaaacttcaagtttaattgccaataaaattcaaaagcaaataaatttcagtaaaataatttttttgaaaaagaaaaaaaacaacaggagattcaaaaagaaagctttttcatctaaatttaccagtaaaccaaaaaaaaatgaattttaaaaaaaataaggcatgagttggattagttagggttcttgataagactcactgagatgagtttagcagcaatccgcacaatctggttagagagaaacagatataataataaatagggaatataggtaccttatattttattaaatatttgtttggtaccttatattatcaataatacttaatgggtaccttatattatgaaaatt

SEQ ID NO: 201927 - DNA, 925 bp, Cannabis indica
tgtattgtattatgtttaatatgttatattatatagagtattgtatattgtattaagagtaaatacaattttaaaatttgtgtttttgcaaaagttaccaattagattttttgttttattaaatgacaaaataaactctatattttttaaaatagtaaaaataagaccctgagcttaattttcaataattttatttttgaatataaccaacttcaaaataatttctaacacgaacagatacagaaaatgtaaccagttttgtcataacatctttagattagattattattaaattttatttttgacaaaaaatcagttcagagttatatttgtacaattttaaaaaatacaggatccattttgtcatttaacagaagagatggtccaattagtaacttttgcaaaacatagggtctaaaatggtatttacccttctattaatattatttaatacaatactatatagtttggtacttgtattaatagcttatgtaaaattatattatattttccataaagtacttgaccccaactccggatcctatctaggtctagggccaagagccaggtccgaatttgggtccgagtcgagatccgaacctgaggctgaattgggattcgagttcaagtctgggtctaggtctagttcgagtttggagccagatttaggtctgaagtttgggaccggggtcgggttcctaaccccagactctttgtaaatattttgttatgtattaaaatttatggtcataataatttatacaatacaatgttttatctaaatgtaatattacttattatttaatataatacgattcttatacggctactaaacgagcccttatattattaaatagggatcacatcacttttagttatatagttaaaatttaattacagattattatataggtaaaaattgagt

SEQ ID NO: 201928 - DNA, 1210 bp, Cannabis indica
tattatataggtaaaaattgagtataatttgagggtgtgtcaatcatcactcttaaaatacatgtataattatattaatatacagcacatagatctatatgtagttatatttataattaagtagacaataattaatgccaaaaaatactattgcttgtatgaatgtgattactatttataattaagtgcttttttttttgaaataatataattaagtgcttgcttactatttttactataattagtgcatgatagtttgcgtgtaataatatcatttgcataaatatatattatgacagtactactaatcctaatatttattatatatggaaaaaaaaatatcacctaattatgtatattgtcattgttcaattaataatatttatttttagtaagtttaattcagagggtactataattgtgtaatttattaaaaatgcatacacacatatttaataataatgggatattgtttcaaaaaaaaaataataaatgggatatttaacaattatttttctataaacatttataataattacaaagaattattggggcagtgagtgattaattatactaataacagtatagtattttaaaaatgtattaagtactaatggtactttttagtaatttttttttgaagaaatcttaaatttattattaattattgttattgttagaaattgtataatgtatggggtttatgtggacttaagaccacagatgcctagagccagccttaagtagctcacagatcttattttttcctttactttttggatgaggctcttttgattagggctgtacaaaaattttcgtaaactgccaaacccgaataacctgattaaaccaaaccgacaaaatcgataaaaaatacaaaccgacataactcgacaaaattttaaaccgcccaatcagtaaattgggcgggttgaaaattgatccaaaccgcccaattaaaccgcccaaaccgatttaacccgattttactttttattttattttatatatatattatataatatataatatatattaaaaatctaccacaacaatactttaaaatatacaacataaatttcctatatatatcaaaacctgattttacatgcaccactcacaccgctaatcaagcacacgtttacactctctcttattatttttctctctaattcttcttgttcttgattaattatcgggtctttttcga

SEQ ID NO: 201929 - DNA, 1386 bp, Cannabis indica
tgtaaaaaattccaacactttataagttgagaaatgctaagtggcaagtggtgatatattattgtaatattagtttctatacattttaattcaataaatagcatgactaactaattagtaattacaaaacgttgtattattgtcaactaatattataagtacatttgtaatcataaacatagtaatttcacacccaaaaagaaaaattcaagttcaaatctcctaacgtaatattaaaaaaatatatatatattataggtgcatttatcatgtgtcctaaccactacataatacatattaattatatataataatttaaatagtataataatattcatttatcttattattatattagcttagagtgggttcctggcatgcaaaactgaaagctggttgcaagtctagtggggtactggctaccatggtgatggtaggtacagaatttgattccctaatttaattgaacaataatacctgtgttgatatgcatcctcttgagttgactttgtttttttgttttttttttctttttggtacggtcaccaattatattgttataatctaattagtggtttgagcaatatcttatgaagtggagactacaaaatgtccaaaataaacatggtgcggaataatgacaccaacgcaagtgttaaattaactgtgtaaatcatgttcgatatatataaatatcaaatttaaatcccccacttcaatttcgaccaagatacatgaaagagaattaggcctgtgttgagtgcaaaatggggcactaaacatggagaagcaacattgtgcctagctaagttaattatggggcggcactgttgctcactggctacagctgcagcgaaacctcggtttacaccactcctgagggcagtcgcagaacaagctgtcctccaaaaacgctgcaagaacagacaacagtaatgagttgaaacgatacatcttccagaaaacacatgaaggttggccaaagatgaatgtttagaccaaattctgatagatgcagtaactaacctcttcacatagtaataacagaaatcggccaagatgaaagtttgaacaatttctgagataagaaccatagagggccacagtccgtatcctagagctacgagcaactggcctcgggtatctaaaacctgtttcatattatggaaagaatgctgttacagaatccaatcttaaaacaaacccaaaaagtggattatgatgtatagagatatcttcaatattattataccattagttgtgataagcaggaaacttcagaaatttaaatagcaattaatttcattattagcatcaacatcaagctggttgtgtaaagatgcttcaattattgcaactcattcatcaccaaaaatgtcactccca

SEQ ID NO: 201930 - DNA, 1377 bp, Cannabis indica
taatgctctgattgttcctttcttgtaaagtttccattcgttagattaggtttcccttgatcgaacggtgaccacctctcaggtataaatttgaaattgtacattatttttaccatttttcagctttcaaaccttcaagctttcgacaaaatctcaaccaccttttcttctgaatttgcatgccctcattatctctcacattctttttgtgtattttgtctgattgtatctctctacttagaaatcatcaagacccagctttttgacctttggtatttcaagcgcaaagttcttccctacccagaatttctcatcaagacagtaagtgacacactcttttttattgatttttccttttgttcttacaatttttatttcttggtatgtgttttccttgtctgcattgctttgttgcttgggtattttgattttgaatgtttgcataaatctagggttatacaagtttaaggttatacaattcaaaaaatttttggttttatttgtaccctgttttccaaaaattaagacattattatatataaccatgtcccaatttatctcagaaatcacaatcccaaaattcttaaaatttgtttgtcctcaactttctgccataaaatttaagcccaaaaatcaaagatctcaaaccattcttgaagtaaatgatgagaaaattagggatcacctcgttaaatttagtcaagatgaaacttttagtcgctataggcaattcttgcaagagattattgagggtaggcatccctatttgcgagaagcttcttggcctaaaccttctaacttaattgatattctcttagcgagtccaatgtttttacccttagtcatgattactttttcactaggtgacttaaattttgaaataatggctcaaaaagctcacaaatcaaagactccacaagatcctactgtcacttttgagactgagttaattgagtccaaaatcagatccatgggatcttaggtcggggaagtcttaaggtcgtgcgacatcaagaatgaataaggatgtcgcattaggtctgttgccgagggggagttcaactgttaccctcttgaacgtatagccggagatgaggattgcagcaccagcgaaccttataggataggtgcttggagcctagagcattctagagctgggtcagttcttcctcttagggactatttcaaggacttctgcaactatttttgcattgctccattccaattggcacccaactcatacatgataccagcctgtttaaagtctttatatcatattttgaagtgggagtggccgactccacttgagattctttattttttattccgtcaaagcctgctctgcaaggaagcaaggtgcatgtggtttctactacc

SEQ ID NO: 201931 - DNA, 1115 bp, Cannabis indica
aaatacatgtatatacttatagtgcaaaaaaaaaaaaattgattgagaatatattaaaataaaataagaaagctcaagaagtgaaaaagctggggaattgtcaatcacatttgtagttaatttaccgttttcacaattgttgaaagaaaagctataatcgttttcaaatgagatttattcgcttgatttagtatttgattgagagtctcggatttttatccattaattaattatttatatgattccaattccaactttaatttatataatatatatttcatatgtataagatcttgcaaaccttaaaacctaccaattaatataatataatcaaactctactaattacaacatatttgatgtgttcaagtgggatatatattcgaacctcacaccatgtgggatcaaattaaattacatatttttgttttatgttgaatttttaataaatatgaattttcttcaagatgaacacatgattgtcaataaataagtacaaaacatcatcatcaacttcaaaggatcactattttctgaaaaaaaacaaatacttcaaaggatcaaaacacataagtgaaaaaaattcattttattattaagtattcctttgcaattttattattattacagtattattattaatacatagctaataatatattgctgcgtatttttaagtgcgggcttaattggcatttaaagagtttgtttagtacgtcttattatatcgtattgtactatatagtattatattgaattgtatttcatataatatttttatgtaaaactatccatggtattgatttttatagacacctaaatatatatatttttgtataaattaaaatttaacatagtattatataaaaatatgatctatataaattaatttaatataatataatacaatacaatctaatacaacgtaccaaacgaacccaaagaatataactataataaaattaaaagataagaaatttttgttgccattttttaattaaagtcatatgtgtaataattataaatattaaagtatttcactgtcaatattcttattattaataaataagtgatactatactactaatactatactaaactcaaaaaaaaaaaaaa

SEQ ID NO: 201932 - DNA, 1170 bp, Cannabis indica
ttttttgaaaaagaaaaaagaaacaagcaaaacatgattattctagagaaaaataataataattattatgaaaaaccaagtctttaccgataacatcgcatgtagaccttggcataacaactccagtattgggtctaacacaatactttttcggatttgtggtcttaaccttaaaaaaccaccaaattaagtttaaaaaactttgtgggtcacataaatcaataaacccaccataacccacataaaagtttcaaaaaaaaggtgaaattataatcaaataccttgaaagccacataattatcggtcttatttaggagttgcaaagagcaagagatctgcttcctcaattcaactatttttccaccccaaaagaaaataatcagaaacgctataaacaaacagaaatatggatccaaaaacaaagaatgatttttctgatttatttacttcattttctttcccgtttgaaaaattgaaaaagtgaatctgagaggacttacaagggaattggagctcttggggttcgatactgagaagctcgccagtgctcattataaagcgatcggcgagagaccgctgaggcgacggagtgggagtggtttccggcgaggagaagcggtttaccggtgaccgaattagataataatactacaaagtttgaaacttcaacgtcttcaaactcaataagagagagaaaacaacacaacaacgtgggacagtgttcttttgtctctctttgacctcggcttacggttttaatcaagtactgagtactcctttagttttgtggtttcgtcttctcagggtattttggtcctttcatactcaactactcaactaattaaatgctattcactaaaaaattataaaaattaaatgctatttattacaaaatttaggtgggagaagtaatacattgtatagtttctttctaaacagaattatattagaaaatgacagaaattcaactagaaaaaggacataaatggagaaattaactttaaccaaaaaaacctttgtttattaattcattgtcgggttataattaaattcacataaatatttataacaaaactcttaaatagcaagggtggtcttttaatttaggcatgaaaagaaattattagttagatcatctctaataataggcttatttgtgtggcaggtcct

SEQ ID NO: 201933 - DNA, 545 bp, Cannabis indica
accccaggataccgatcaaaaaaatctcttaggacattctcattagtttttctattctattcttcaaaatagattctcaaaattctactttctctattttacttcgtattgttatattacaccactatagatattttgatttatttttacatcttttaaatataatattttaaacctattttattattttaaataatagaagtgataacttaaatttaattattttatatatataaaaaaaaaacatagattttaataaaatatttttgatgaagcttcattctttctttaaatgattttgaagcatctttaaatgaaaaaggttataaaagagttgaaggtgctcttagtttaaataaatagcaatattaattaattaataaaataaagaaaaaagctgccatataaattcagtctgtcttcttctgtgttatttatgttcagcagaaagtactcagagtaagactttattgcacctttcaacaaaaaaacggaaaaactttacagcaacaagaacatcatctttgttcttttgggtattgatt

SEQ ID NO: 201934 - DNA, 772 bp, Cannabis indica
tatatatatatataaattgaattgacacatgatgatgatatttgattagaaatggaaagttttgaaaaataccaatcaatatattttaaaaatatctcaattgatatatctctttctcctttttccctagctatataggtcttaatattttttgagttatttaaatatattatataagtaaattattataaccatgttttattgtattgataaatcttattttttttagatttataattttgttgcccataatatcttaaagtcgtctaagtttatggttttttttccgggtgagactagagtggtttcctgaatttttaatgttatttctaagtttctaaaaaaaaaaaaaatcttattaatcccttatatcaactcttaaaacaattaaataatgttttgtgtgtttttaaaaattagttggaaaaaataattaatttaatttagacattattttatgtgttcattaaaagtgtgtttggaagttaggtcttgtttaaggtttaataatattataaagtatgtttggatataagatagtaattagatatgaatttttattattgtatttgacaaaagatagtgtttacacaataaatttcaaacacactttcgaatcgataattctaattaatcatatttatttaagattgaaacttaatattatttttggttgtgtgatgttataaaattttaggatatgtggcgagcgaatactggtcataacaatagtggaaatttaatagattagaggaggaggaagaagaagtaa

SEQ ID NO: 201935 - DNA, 1081 bp, Cannabis indica
aatggcgagcccatgggtgagccaccacaaaggagagagaaaagagatgaatggtgaggccatgggagagccaccatagaggagagagaaaagagatgaaaggtaaggccatgggaaagccaccacaaaggagagagaaatgagaggtgtggtgagcccatttgtgagccaccacggaagagagagaaaagagaggtgtggtgagccaataggcgagccaccatggaagagagaaaagtgagaggagtagtgagcccattggcgagccaccatggacgagatctttatgtaagaaagttgagtggttatgaagtgagatgagtcatggggagttgtgggagctctttaggtaagtcttaggctacttcggtgagtctcaggcctttccaggggtcccgaattccttgggcgaaccctatatgggcaagctcttgggtgagcggacgagcccttgatttttattgtgccatccattagtattttagtcataacttgctcgctataaatcaaaattaagtgattcaagatgttttagaaagataagaaaaagatctataacttttatgcctagctctgaatccaattctaactttacaggtgtcttaagccattaacaattcacgccttctaactcaagtcaccaattgtttccatctctaccaataagtgtcaaagacacttaaattgacttgaattatgtgattagcctccaaatatcatcgtcaagtgatgacctcttagtttttgactactccgctcatcatagttacaagattatactttgtgaaatcttaaggataacattatattacattatgtttctgcaatgttaaaacattgttgttttttagaaaaatataagttaaaaacttgaacagtaactcccgtaaaatgtaagaaataaaaaacaaataactaaaaaaggtctgattttaggtgtttggtgtatgttttattttttatttatttttgaagaaaaaatgcctcaaacaactagagtcgacaaaaaaggtcagatacgataacatgactcgaaatttgtacaaaagttagcaggtttgggtcgtatttaggttgactt

SEQ ID NO: 201936 - DNA, 894 bp, Cannabis indica
tatgaattaagcacacgatttaagtttcaatccattgcaaaaataaacaacagcggttcaatcaatatattggctcaattatcaacacatggaaaaaaaaaactaaactaattaacccactaaaataaagacagtaaaatcataaaaattttaaattcctcccccaagcttaagactcacattgtctcaaatgtgatataatatttaaggtgaaaaagacttacctgaacccccatcagaaggggttcggtggaggtggctggtcataaggataaaattaggtagatttggcaagtaattaggctcctcaatccggatattcattctggtgataagtgaattcggctaatgcacttaattctcatcaaagacactcctttgcgccatgtaagtttgcatgtgcatgtttgctgaataagataattcagttggtcatgtgtatacttcatggttggatcaatagggccaacaatatgttgtggtaactcctcaacatgctcgtcttcaggaggaggtcttggggctctttgctgtggttgaggaggtggctggccatatggatgtggggccttaagtctaagcaccgttccaacatcaatcatgcgctgtggaggaaccttcgtatcataggaatattgcgcaccccatatgcctcacacaaattagtgataatattagctacaccaagcccacccctagaggctgcttgaataatcaagttaaagctatgcctaatgatatcccccacattcaaattaaagcccttcataacctagcactcacaaaatacaaccaagctttagccactcggttcaactcacacccgtacaactgatagggtttctcattgtactcatgaaaccttaattctgggaaacccaaagtctcagccat

SEQ ID NO: 201937 - DNA, 1690 bp, Cannabis indica
ggctggtatgagttagcaaaaataccaaattcaattggggtaagttgaaaaatgcttctttattaatcaattaatcaatttacctctaatttatattatttgaacttacctcttttatatgtatgtacccaaatacccttacataagagaatcacatggagagtatcttgaagtgataagggcaaaattggtacaatatttaaaaaagaagtaaaaatgatagattttaaaaagaaggtaaaaataaaagaggacaatataaaaagggtatagagtgtaatttcctcacttcaattctcttcatttggtatttggggacaaggcctgatttttggacttttgatagtaaattcaaatttattttattttataatttttgctactttttttattttatttgtagaatatagcaaaatatgctatatttattgttattacaagaaagatcatgttaaataaatataaaaattataatttcaaactcaaaaatataacttagtaatttcataaaaaaattatatagaggctaattattttgctattttatattagtattttacattttttaagtattcacaccctcgaaattattaataatcttcaaaagcttttaatttctaggtaaaagcatatggtgttatagacttatcactagatgaatcaaatgaaaaaataattttaaatatttatacaccaataaaaaaaatacaacacaaatatagttgaaaacataatgtataataaaatcatttaaattatttactaatttatttgaattgaagtatctaaaaacaagttagaaccctataatttactcctcaaactttaataaatttcgtaagatattataaattaattattagttgattgaacgataaacgtaaaagtaaaacaatttaatgcaatatatctttgatatatattgatcgataccattgaagtgataaacggctaatatacatattagattagaataaaaataaaataaaaaatggcaattagaaagaatttaaaatattaaaatgattgataacaaatgataattaaatacaaagtataaaagtggtattatgtaaaccatattttataacgatattaaatcgatatgtaattatatttgtaaaatgaaaaatagtactaaataaatttcataaaatataatataaaaaagatgaaaaataaattaaattttatatgtaaaaatgaacttatcaaatatggaggacggggaaaagtattaaaatagttaaggggaagggaatgagagaacattctaattatttgtcctattttcatctctaatacataaactctcaatagaaggggaagattggattattttcatctctaatacataaactctcaatagaaggggaagattggattgagataataggcattaaagaagtattgagttggattgcaactcattcgtgggatagaatcagtgacgaagccagaaatttaattgagtgagagcttgaataaatattaagtcaaaactaataaaaataactgataaatgtatctttcaaattttcatcttcaacaaaataaaataatactattgacaaaaagaaaataaaatattgtcaatagtattattttattttttaataaagttattatttttttattattatttgtattgaactacttttaaaatgggcttgattagaataagagtaag

SEQ ID NO: 201938 - DNA, 1094 bp, Cannabis indica
atttttcaattgctaattagggtttcagtatatataaatatatatatttatagaactgtatataactcctgcactatgatctattatatatatatattaatttatttatatttataataaatatgtatgattggtcttttcttatatgtatttttttctttttctatttggatagatacagataacttgtttggaaatatatataaatattttttaaattataattattaatttgtttttaatttatcatgatcatatttctttgccaaactcttttttgggttatgttaattatttaattattataattaaaagttaatgtttatgatatatattttggctagctatatattaaatattaatggacctgagctctttatttaattattataattattttggctagctatatattatttaattattataattaaaagttaatgtttatgatatattattttggctagctatatattaaatgtttatgatatatattaaatattatttttcagaaaagtagaaaggaatgattgagtatgttattacttataaataaatgcccaattagttaaaaacacacaaaattaattaaattttttcaaaaaataaaatagaatagaattaataaacttttgttccataaatccggccttaataataattagggcaaaactaacaaagcctcacagttaagatgatgaccaaaacaacaagcgccctaatcttattgttttggtttgaagtctatcgcaactaatttgttaccttgtttggtaacgaatattaatggttaataaaactacattttatattaaaaagattgttcttgggttttgttttttaaggataattgtatttgttaattttgaaattaacatatcattgaattatatatatgcaacaatattggaatgtatggtgtacatgttctataatcatagaatatatatacaatatatatatataattttgggtcaaagtttttggcatatcttgtaattatttaatttgtttggtcatagtaaaactaacagtaaaagattgtttgtttcaaaatgtgtgccgctcaatgcaaaaaatttatatatatatat

SEQ ID NO: 201939 - DNA, 2772 bp, Cannabis indica
ttacataatatcttatagaaaaataaaaattataattatttagcaacttccaaaatatacatcatattgctcatatattaatagttatcatactttaaaaatattttattgataaggtcaactatattacttggtgatgaaacaaaaatctaatatatattattctctttagatatttctattcagcctgcactttctttttagattcacaattggatcatttattgtaaggtatgactattgtcccaccttaatttttttttttttgaaaaattaaattcattccaactaaaaaggaaaaatgagagcaacaagaggtgctctctccccttgataacacttagcatcttggctaaacatcttagcactcttagctaaaccatcaacaaaagcaataatactacaactaatgtaaattaaacggcaacttttaaacgacttaatcaattctaaaacttttaaagataaattctaaaatctccaatcaaggggacaacttgaatcattaagtgctttaaccacaatttgagcattcgataaaatagtaacttcttctaatcttttactttttgcccaaagagagcttgaaagatagcttgagttttcgcttccatggccgagatcggatctctcttaagcatcttgacttcccatttaatattgattctatcaattaagagtacagcgagaccaacaacgtttctacaccacgatgcatctgtcattaaataagttttgacaagatcgaaatttattgcaggtgaactcgagcctaaaatatgacaaccccaatgaacctcatcctgactatgcgaaaactccttgaacttcgattgaattctgttgataagacttttaatagcctcagtttttcctgttaatctatattgatttctttgtaaccaaatctcagtgaaaacacaagcagcaaactttaaaaaatcaactttaattctccttggcagaaaatccttcaattagattttccatgaaattaagcatatttgtacctggaaaatgattcaaatggcacggaaaagaactggagaaccaaagggcctgagccagagggcactctttgaataagtgcatacaagattccacttcagcatcacagaaaaaaaatactctttatcattcaaaaaagacaacttcgacttggtaggaatagtttcattgattgtgtgccacaacatcaaaaccaaacgaatcctttacatcttctctttcttattttttttatcattttatcataaagtaagaaaatttatatatttaatatatattaaataataatataatattattttaataatttttagagatgcttatcattagaatactttgaccattagcagaagacccactaacattaacatattggtatctctaaagatagttaatagcccaaggaccgactatactatctgagagatcaagcttatgatcatgaccaaaagtattatgcctatgccaaatgtgtcagctaagggcaaggaactcctctaatttctatttactcaaaatatccacacgacccagtaacaatttataaaaagaagagtcgttctttaaagaatcgagacctttcaaaatccaatctaagcgaatagacttaagcgaagggaaaagccaaagaacacgaataatagtctcattattctagaaataaataggacaaaccttagacgctttcatattatgacgagtcaaattggcagatgacgataagaaattcaaacttgccttccaaacaaactttttaatctttggtgggaggttgagtttccaattagcttccaccaacgagaagtccctgagaaacctgaaacttgtcaccaacccaaactcgaaattgtgctccagtaaccattctttaccgaataaatattgttatccaagaagtgccaaataggcctatcttgtcgatgaaacaaagaacaaggatagacaagataacactagcttccatattatcaaacgaatattgaactaaagaggagttccaacaaccaggatcaagcttgagatcactaaccacttgaagatgagagctaccagagaacaaataagaccaacccacacagtccttcgaaatccaagcatcctctctaacttttacagattccctttaaccaacaatccaacaacatccttttttcaaaaaatcacgaccccataaaatacttttccaaaagaacgaggctcgcttcatctcttcaacatccagcaaaagaaccattactataatagaagcccttcataatatgttaactttttataattatatttattaattttacaaaaaaaaaaaaaaaaatattctaaaagctatattaagaaaacaataatcaaacactttttgttatttgaaaactacaaaaatcgttttgtgtttgcattttttaaaacaaaaattaaaaataaaacatagaatatataatgccacacatgcctgtaagcattttttcattctcatattcactaggtctcacttatgttaagaatgtcgagtgaatcttaaatatttcttaaatattacttcgcaagttcacacttatttggaagttgtaagaacaatttggaagacttatgagtcactcacaaatatagttaattgcaccaaaatcaaaatatcaataacattttcttgttttatctcaataatcagttaccggaatttgaattatattcttaacatattaatcaaataaaaaatcataaaacttcatgatttcaatagattttaatcataatgggagagcgctaatc

SEQ ID NO: 201940 - DNA, 799 bp, Cannabis indica
tgtgactaaaaatgaaatattttatagtgactttttacaattaatggtttataaccattaaatttagtttatataaacttcttgtacactatatttatgtattgatataatatatctaaatgtataactacaatatattctagtattttagttattttttaattaattattaatgtattaatttttataaaatattattaatcaattataagacgtgacttgattaagagataaggtactggtaccttcttgcaatgttttttttatatgtatttagatatatgtaatcttgcatataaattattcaagtgactcccattcatgcaaagaaaaataaaaatctttgtaagggaaaaaaggtatatgagaattattcaaataataagtggcctttgaaaccgtttttttttttttttttgtgaacgaatggcttttgaaacttggaagagagttaaatttgaatccaaagtgggtgatcagtgaaaatagattctttctttggtaatcaattctcattaatactagttgaaatctctattgtgtggcatgttcttaattaatcatgtgttgtttttctaagtaatgtttgatttttgtcattatatatataatagttcataacttctatatatgtttagctgttattatttattcttgtaacaagaatttgggactttaattatgtagtttcaattgttgtacttaagatgtttttataaaaatttgaaataatatatgacatactttcatataattcattccgtagccaaaagttctcaatgtagtttttttttttttt

SEQ ID NO: 201941 - DNA, 589 bp, Cannabis indica
gttctatgaaatagtacatcctttccttctctgaatttattaagttttaccataaattttaaaatttaaagtcaaaatggttttttttcccattgaatctcatgcaaaacgagtcatattatattttataaatgatgttaatagtgtccccctcttagttgatgacataatccttcatgatattcttataatgggaagtttggtgagcatgaaaaaggagactttcaactaatactatataagccagccgttttgaaaaactataaataaataaaaagcattgctttcacgagaaaaagaaatagtaatgtattttgtaataataactagtctatattattgttattaaagataacaattattgatggaatgttagtttcaattcaagaattgaactttaatattaggagaaagtaaaataagagaagtttgaccatatccagggtgaaacaatatgtttcattgttttagtgaaggagaaaggtctaatatataaaagttagattaggaaacggcacttgaaaaggacttgttgtttagatttggtcatgggaagcttcgtagctttcaagtgctgtaagtatgggcc

SEQ ID NO: 201942 - DNA, 1008 bp, Cannabis indica
tcgatgttgtaaacgtaccgttgggatgatgaattttccggttagaaggcaaatagcaggaatggtgcaatagacaagtaaaggaattgatgtccaagggtagacaatggtgtttgtgtaagcaattctctgaagcaatttgagttttcctccccaaccataccacaatggacaatgaccactaagaaagatttcaactgatccaagagccctttggaaaacttggtgtaaccgatctgatagatttataggagatgatcccttgaaagcaggcctctttggcatgcaatacactgatttccatcctctacaatgaatcttgaaccctgttagaatgtcttcactcactgaaccataaatccatccaatctgccaacacattttataacatagatcattattgaattttaatgcaacctataataaattattgcaaaaatttatagtatactttttaaaaatgaacttaaaaattcttctaaatgccaaaggacgatccattagaatggttctcacctcttttccccactcagttttttcctcatagccacaactaagaacatggatagcctccttaatgagtgttatactatttgtccctttgggaagaccaccactttccataagagtagaagcaataaaaacaggtgattgcccaaattgtttctctaaattctgctgtgaccacaacaataatttatctaacttgtcataaccctctaacccttcttcaatctcttcaaaagtaaacttgtttcccaactcatcttcataaccttcactcccttcttcaatctcacatgttatctttgaccctttttcagatactactggatcatagccgtacaaagcttgcctattgaagacacatccagttccgacatacattggtccttggatcccatcaagacctttcatgttgatctgtaattaaagtagaaaaactagataatgagctcaaaaaaataacaaaaagtaaaatttaaaattcattgtacaaattttcct

SEQ ID NO: 201943 - DNA, 1147 bp, Cannabis indica
gaatacagagtagtattggaactcatcaaggatttcctttactaattttggtcatttgtcgaaacacaaattctatctttatacctcaataattcacttggagtcacagtgaaatcctttgtagcaccaagctcaactttctttctgagttcaatcaatttaggatcattctgttggccaatctttatcctttccagtaaatcatactacaatgtaatatttgccaacttcctgactacaaactcaatctcagctttggccatattatcggccaatcttagagagatttccctcaactcgtagatttgtcctggacctttctggctaagtgcatatgccactatgtttaccttgttgggatagtagaggatttcatagtcataatatttgactaactctaatcaccgcatttgcctcatatttagatccttttgaatgaaaaagtatttcaaactcttgtagtcaatataaatctcacacttatcactatataaattttatttttacttccatttaatttatttatttatttatttagaataatcataatactatggaatggattgagaattttaatggcaaataaattcttattttacagttatgaatgctttttttaatggagatgatattctaggatgtacataatacttaaacagattttaagtagttatgacaaattaactatttattttttgaattttgttattattgtggaattactttataatatagtaatttatttttattatggtatggttcaatatatatttattatttaaaatgattaaataataatttgtgactaattatgtaacatatggaagtattatttatgatttaaaataatatttgattatttaaaatttaaagtctaaattgggtgataagataatgagaatgaatatctatttatcagttattattattattattattattattattattattattattattattattattattattattattatgaaaaataaaatggacatgtacgtgagaaaataatatttaagggagtaactcgttcaatctaatcagttattattatattatttattctttatttatactacgattacacacctactttagggattagaaaacgtaccaagaggcgattaggagtgagtct

SEQ ID NO: 201944 - DNA, 1043 bp, Cannabis indica
taatttgctgtgagaaatgcccttcaacttttcatccttcttgtttggaaatggaggtcaagatttttaattttgatttttttttttcaaattataatgaagaaatatgtgaagggttttttttatttattttttaaaattttttgggattgcagggagttccttttggagaatggtcatgtccctattgtgtatgcaaatattgtggtataccaacaggagaggatcttaggtattgacttctctaaatgcatgttgtgtgataagacttgtaagtcttaattttttttagaaagaaaaaaaaataaagattttattatttcttttttaaagttaataatttattttgttttgtagatcattgggcatgttatgagcaaaaagagctgaatctcaacaacaatacaagcccacaattttgtggagatggatgttacaatgtaattaacataaataaccatactattaaatattttgtttgataatttttggtcacttgaatttgaatctgtgttttctctattgttgttatatgttggaaaaggtttatgagaaacttcagagaatagtgggagtgaagaatgaaatggaggaagggttgtcgtggacactcatacgacatgctgatttgatgtcgtttgatataaaagatattgaatttttctatgaatttatggagtgcaatgctaaaatagccattgcttggagcctcttggatcaatcttttgagaatataattgatcgttacactggtattaatttactcagaagtgtcgtctacaatgccaggtatgtatattaacactgtgttaacatatatacactatatatacatgtgaattttgtaaaagaacttaagaaaaatatatggtacaccctctctataaagaaatggtttggtatagttttaatatctcaaaagatcttattagttcattttttataacatagcctattatatttatttaagactaaatgtctatttttaaaaatttcgaatagtataaaatattaaaattaagatttgaatatataattttttt

SEQ ID NO: 201945 - DNA, 704 bp, Cannabis indica
aaaaatgaaaaagtagaaggaaacaaaggtcatttgtgtttgaattttgtatgtcgtctaattaattttattctcattttactttgaatttgtagaaaatacatacaaatgtcaataaaggttcgtttttggcattacaaattggcaaaatagaagaacacaataatgatttaatttgatgtgatcgagtacaagaggaaaatatattcatcacatgatcttttgatttaatcagaatcagaacaagaagccattgttactacttccacgagaatttgtttatgtgtgaaatatgtacgtatttgtaaagattctattattattaatttaatgaagttaaatgtttgttttcaaaacctcttcgttgatcattgctcctaaatttaggatgctgtaaatttaacacctaaaagaagaaagggcagaatttggtaataagacatgaattaatataaaatgacgtagataattaaaggcagctggcgtagtccttacaagtattaacatttataaagaaataaaaatggcatggcactttaaaaatcaaaactccaaacttaaacattgggatatgcatgcacataatattattagtaacgacttcttcacaaacaaaatatatattagcctttattaaaattctttgtaatggaaatcatatccaaaaaaattataatatcgttttattaaattttaaattacat

SEQ ID NO: 201946 - DNA, 887 bp, Cannabis indica
atatatatatcatcttgggtttgtgctctcactttaattgatcaaaaatatccatgtttagattagtgactgtgacataattaaaccagtttttattttattttattttaatcttaatataagatttaattgtcacgcagacgcaagttggtttgtggtttactaatttgccactatatgatttatatatacttggaaaagtattcgccaccttttctacgcctgtttttgatttaaaaacatgtgttcatatttatgtattatatattatgtgtatatttgattataaattaaggtgtttttatattgttccacccaatataagtgcaaggcttttgaagaatattagttattgggtaatataatacagtcaagtatatttactaattaattgaatttcccaaagagattaactgacagtgattattaggctctgaaaaaaattatgaatgtgtataatcttatccatttgacatacataaaagaaaaaaaaaatctacaataattaatgtagttgtaaattttttgattctccaaaaagaatgaattgagcaataaagattattaggagttaatgaaatttcaattatttatttatttttttccatagggtatcattaaccctgccttaaaattataaattatttgactataacagaaaaatgcgctttccaatttctttgtgcattccccactcataaattggtcatgtggaggacccctcagaaaaatgtaaatatatatattatatatattgttttttgaaagaaaaagttttcattaaattaaatcaaaataataataaatattcatccaattagactctaccaaactagtaataaaagttgctagtgcatgatgagttatatcattggtagaacgtgaaa

SEQ ID NO: 201947 - DNA, 1142 bp, Cannabis indica
gtactttatataatgtcacctctctatcttatttataaatttcctgcaattccttaaaaaattatatttgaccaaaatgacattatctcttcctcttccatctaaacaactcatgattaatttttgggagctaatgatttgatatggtgtcattttgcatcaaattatgtattaaacatacatatttcaaaataaaaaataacaaagatattgatcataataattttttttagttgtgatatatttttatgcaatagttagatttttttttacatcaaaatatgattaaatttgataactatatatactgacttaatatctaaaaatagtaaaatatatagtttctttaaggattcatatttttaaaagaaaaaacaaatacaagacaataaattacaaatagatttagagtattggcataaatttcttaaccttagagatgttttcacacgagaatcaatcttgatgctaaaaattgggtaatattacttgttgataggagaaaattcagaccaacaaatttttaattttatttgtaatatgtaagtgagtgagtttaatgttatatatcttgtgaatgttggattgcgtaacatttattttgttttgattaaataaataaattacaaatagaaggataaatgtctggatgattttgtaacaatttccacatattttattaaatttgacttggtacaaaattagcctttttataaaaaaaaaaaaactaaaataaaaaaaaaataaagaaaataaaatatttttggggtatttttgttttcaaactttaaaacagttgtgttttttttttttttattatatatttttacagaattctacatagaaactcatatacgaactaacgaaggaatttaaattgccacaaaaatccgtatactttccacatagaaacaatcggaacaactcaaactttaaatttgaaaaaagaaacaaaaagttgaaaaataatatatggggtagtgattctccaatattttttcacccttatttttttttctttataatattatttctagctacacccataatttattaaaataatacagaaaaatggttcatattttaaaaaagaagattttaatttttaattctcttaaatacaaaataagaacaaataatat

SEQ ID NO: 201948 - DNA, 1786 bp, Cannabis indica
aaacactctgcaaaaaagttcatttggaacaaaaaatgtatgtaaattaagaatttcattttgatatcaacaatgtttagtctcaatgtacactctccaaattaaacatatgcaaaacacatacacatactagaatagaatcaatattttagaacttgttttgttatgctaatttcagcaccaactgcaaaatttatcagtactttattgattattgtacaagggactagtctcttcatgacttacctcaactacaggcttggcaactgcttcgtaaactcgcctttgggaggcagtgtctgtaaaaacttcatcaaatctataagattccgaactccagttgttttttctcaacttcaatcgcttaagctgcataagaaaaagaacatatagaatcatggtgctactctaaacattcttgtggctgataaaagaaaattatgctttgttgatttgattatggaagaaacatagacagatatagtagaaagattgaatgcaatatagtagaaataagaaagaaagaaaaatatctacaaaaaatgtgtttttaaccatgaaaaggccttttggagggataaaattacctcaggctgcaactcaacacaatcaacaaaatcagaatctaaaagatggtcctcagcattttttggtctaagtctgacagcaactctcactctttcagaatctgtagtaaatgtacaaaataaaaaaagtgattatgactacagaaaaaaagaagagaaaaagttgtatgaatctctaaagagatggtataaatcaaatcatataatcatcaaatactcttgtttcttttttatatacaagtaatatattaaaagttagaacttcagaaaccgatgatgagtctgaaaccataaaaattactatttgaacaacaaacaaccatttctttccaaaaaaaaaaaaccatttaattcaaatattaaaagtaaaagataaaaaaggaaccttgtacagagtcgggggtagaacgaattctggaattaggagtgacagaacgtctagaagtaggagctttaggacgattggagaaatgggtttgtcctctgctagaagaagaaacttgttgctgtttttcagacctgccattattaccattatgccctcctcctcctgctgctgtagaagaagaagaagaagtagaagttgttgccattgatgaccttgaagccgaagaagtcattaatttctgagtctcaacaacaccattcctatatctgacatctcaaacaaaacaaaaagagatttttctttatttttttactaatttcattacaaaacaacagagaatgagaatgagaaacagagacaaaagggttgtggccggcacgatcctaagacatataaaaaatgtttctttttcagtgtctaatttttattattattacttttttttaatcagaaacttgttcccgcgttagcacattatatggagaacaagatttcatttttaaatactttttagaacgtatcatgtaaaatgaatcttcatctttttcttttattttttttctatttttattacaaaaacaataattgataatgttttgaggattgagacggcaaaatgaaaataatgaccaacttttcacacttcaggatatttgattcatttggcttgaatatcgtaaagccaaaacctttttacttgtttttttcctcatcttttaaagatttgaattttcacaaaagcacctttttcactctggttttcacttttttgggtttacttcttgtaatgaaaataactctctctctctct

SEQ ID NO: 201949 - DNA, 565 bp, Cannabis indica
cattaagtgaagagttcattgccattcacaactcaaagatgtagaattcaaaaggtcaacgctttgcaacaccccgtgtgtcctcacaaatcttgaagggagactgtaagcctctgcaactctcaagttctagaagcttaggggtaaatgttattcgtatttttggaaaatggacatgtatacttcaaagacccaattcagtcaatgcaggaccaaccacgaggccattcaagataatggctacactcattgtaagagtcgatctgcaatttttgattggaaacaaggcgaattagcactagagtcgggtcgctaggggttcggaagggtgtcttacccagaagaaggaaaaaaaaaaacatactcttatcttttccaaaaatatgactgaaaactttaaaaactaaagaaagaaagaaaaaaaaaatgaagaagaagaactgaacaataaatgaaaaaaaaaaaaaacgtatatgttagtggagagatagaacttaaggaagaagagggtgaaaagaaataaaatagataactatggacttcgaaataacaaaaaaaaaaaaaa

SEQ ID NO: 201950 - DNA, 1701 bp, Cannabis indica
ttaggccaatggatacggatctcggttatctattccaagcaagggttattcacagacaattgatcattgtgggacaacaagggactacaaattctctacaaagagtaggtcaccctcaagatcctagaacagaatttctagccctgcctgctccaccagctcatgctgcaaatgcaatattggttctgagactagggaacccctatccactaggttcagctcccctaccggttgacggtcatgtggccactatctctgggggaccacacattgcatggagcacaaggaattcccaaaagacatatttgagggaattaggaaatgagggggagatgtgtgtcttagtgaaatcaccagcgcaacatccacaaacattaatgaacctacccattccattcacaaaggatgatgcccgccgtgttcattcccccacaatgaccctttggtcataaaagcccaaatttctagaaaagagcatctcgagtcctggtggacaatgggagctaagtcaacgtactattcaagttcccatttcaagtaattgggctaatagaggctgatttgtcatcttgtcccatccaactccaagggttcaatagagatgcactcatgccaatgggaaagatttagctcccatttagagaacaacatttctacatttaaacattataccttcgttgttgtacattatcccacagcttacaatgctatactaggatgcccagtcttagtcgattttgggatcataactacaatcaggaacttgtgcatgaagttaccttgtggtaacagaagtgttggagtggtaagaggtgagcagagaagtgtaaggatttgttataatgtttctgtttggtctgtgtgcatggtctgggaggaaacgagttttgctcctagaataggtattcaggtggaaattgaagttgtctgagaggactatgaacatgtattagatcttggggttgggataaaaagaatgatagaaccgctagaggatgtggaaaagatcaaaatttttgacactgaccccactaaaaccatcaaagtgggaaaaaacttacatccagtgatgagagaaaagattgtgacaatggtcgagaagaatcgggatgtgctagcgtggacccattctaatatgacggggatcaaccaaaacacaatttcccatgccctaacattgacaagaatacaacacccacccaccagaaaagaaggccactagatcctgtaagggcgaaagcagtgaaggcaaaagtcgataagttgacttctattgaatttctacgagaatcattatacttggtggggttggaaaacccaattacggtcccaaagccaaatggtacatggaggatgtgcgtagacttcaaggacctcaataaagcctgcccaaaagattattttcctcttctatggatagatcaaatggtagatgccacatcaaagtatgaactattgagctttatggatgcctcttcggctacaaccagatcaagctgcatgtcacggactaggaagacaccagcttccaaacggacaaaggtgtgtactattacgtggtgatgtcattcaaattaaaaaaaatgtcagagccacctatcaacggttggtcaataagatgattaaggatcagcttaggaggaacatggaggtacatgtagattacatgctcatgaaatcaaaaacttccacagagcatgg

SEQ ID NO: 201951 - DNA, 575 bp, Cannabis indica
gtgttagtctccatattatttttgattaaaattgtagatgaatgtgaagccaattataataatacaacctttgacaataactatgtcattacatatggaaatgatcatttcattcaactcaaccaaggacaagaagttcagcttacaatggacaatacttcaggttcattttttcatgttgttcaaatattaatatatttaattatttatttacatatatttgataatttataataatatataacttttatataggaacggggttcgtacaaaaaaaggctatggttcagggtattttgagatgaggattaagacaccacaaagtcagtctccatcaattgtcactacattttatgtaagtattttctttcattttttttctcaattgattaccatgtataatattaattagtgttagtttcaataattgattaataatttttcttattcttattgttataattattattattattttgggaaacgctaaccggtgactagctagctcttttatgtaaaaactgtattgtaactcatgtaaaagaaatgttaaaatgtatgagtagtgtttagta

SEQ ID NO: 201952 - DNA, 610 bp, Cannabis indica
aaactgaaacttgtgcgtttggtaagaacgcagacagggaaaacatgatgaaccaaagatttttagggacttatagtcgggttttgtggagaaaatgacttcatatggagattttccatggtgtacaccagtagggagacgattaataaggtgtactgcagtatgaaatgcatctgtctagtacctcagaggcatgtgtgcctgtgctggaagggtgaggccagtttcgactatatgtcgatgcttacgctaagcccttccattttgttctgaagtatgggggcaagagtgttggaaagcaatggcactttgattgacaatgtctgtaaccgcttggaattcacccccccccccaatcggttcttaaggctttaatcttcctatcaaattggttttccaccaaggccttgaatctagtgaaggccaagagagcttcagacttatgttttaagggaaaaagccaagtgtaacggctgtgatcatccacaaagtggatttagaacctgaatttgtgtgggaattaacaggagttggcccccacagatccgtatgaatgagatctaatattcttggggcagggctggtttaatttttaaagggcaaacaatgg

SEQ ID NO: 201953 - DNA, 750 bp, Cannabis indica
ggttgcagcctcgatcttccatcgaccacaacatacaacttagtctcttgatcatgactaagtttacgagctttgcacgcacatttccaaatatgaccagccaatatctcataggaactatacttgattttgttatcttcttcttcattgttaacacaattggctttcaatgttttcaattgttcattgctcaacttataaatagcaatgtcaatgttgtcatttgtagtagttttcttagtgagtggagattcatattcaacatgatcaaatataggtgtaggtgggttatgtgcacaaagtatagttctatctagaaatggtggagttttgagttgttcaataccacttgctatgtcagaccatgaatttagaaaatgaatagcagatacaccatctatcacatggtgttctatcgcaacaccaattgatactcctccacatttaaaataagttatctgcaaaaatgttaaaataattaatataacataatttagaagtttgaattttttttggtaaaggatattttttttaagaaaattacttcatatattattttttaaccttttttttaatttacaaatttgagttgctccagtagtttctctaatagaatctatgtgagatgttatgtggactttagttgtgatttaaggtgttccgttagttgttatgaagatttttatgtaaaattttgtaaaaatacaaaaaaaaaaattaatttaaaatagtaaaaataaaaaaactact

SEQ ID NO: 201954 - DNA, 1046 bp, Cannabis indica
agagagagagagagaggctttcacgtgtagcttaggccttcttatgcaagtggagtgaattggaatgacttagtctgacttataaagacttagggaatgagagagacctaatgccctttatatagtgtagggcttacaaaagatctaattcaaacaggtagagatatcccttttagatagggatatttacatccttttatataatatttaagttacaaaaaaggataactaaatccctagaaaataggactaatatctcgagagaaaacccctattttgtgggttgttgggcctatctcgtaactttgctcagctggttggagttatatatgtagaagtttttcgaccaaccctattttgtagggtttggtcggcatatgcactcatatggctagccaggtattattcctgcagcctgaggaagtgtctgccagctttctatgtgtcttccagcttttccatgtgcttgtcaactttggtatgtgcctgccatccttggtatgtgctaggcagccttagtatgtagtggccaaccttagtatgtgttggtcggccttggtatgtgctggccagccttagtatgtgttggtcggccttggtatgtgctggtcagtcttagtatgtgctggctagcctttctagcttctttgtatatctttctatgcgaaggtcaagcttccttggtcgtacaagccctttttggtctgacagtcacctcattggctggccagcttattctcaagacatggtcagcctataaccttcctttggcgagccagacatgattggccagggtctcattagcatgcttaactccttttgcttattgcttgatagtttacatgttgtgtaaggagattttgtcttattattgacaagttgagtcttgactatgccatgtcaagtggacaaaatttgggataatatttgccccttaagtccatgttcgaatgtctatttggatagggacttttcagctcttatcttgactgtaggagcctttgacaagcaaccttgttttgccaaatattgagctttttgaatgg

SEQ ID NO: 201955 - DNA, 647 bp, Cannabis indica
aaaaagattatgctttacttgttctcccaaattccactagcaacaagtccaaccataaaactcaaaactgtgtggtccacttcgcattctaatttaaatcatatcatacatccaactatataagatctaggcacgtaattgcataatattgatatgacataatgtgtatggcaatgactctttagactcataaaatgttgagatttatatatttatataaaagattcattatccactatttatgtatttattatattgctgcaagggccattgtcaagcatgagatattgaaaagtgagccgcctattgccattgtccgactcccagcagctgtaatcctaaatatctggcaaaaagcttttctttgctttaaagtttctatatatttattatgcaaattgaagctaatgttaatagagcgaccaattcagatttcagccaatacaacatttatattatgtgtagtttctacgaccaagatacatgtcaaatactataatggtttcctgatatcatttaaatcagagatgttatgtagtgtagtgtacagcagcataaagccctagtatgatgataaactgttttattgtgattcatccccctaaagtaagtttttcttaatcaatattaaaataaataaattaatt

SEQ ID NO: 201956 - DNA, 723 bp, Cannabis indica
ctagtgttcaatagatagaaaacaaatgtgtcaaagagtgagtcataggtactcatttatggtgtaggtgacctacatttgaacctcacacctcatgatagttaccaattgaatttaggggagtaaatagggcttagaatgttggcattgatgctgaaaacgtccccatttaagagagaaacattttgcaatgttttattagaaattgggagcaaaaccattaagcctcttcaaatacgtttaaaacatcgaaagccccataacatcacttccaggtgacatatcgcctggtgccgacatcgcccgatgcatttctagccaactcaaatttgagttttgtaactcccctcccagccaactttttcgcaaacattccaacactcattttaatcgtataaacgagtcaaaaacattttccaacaacgacattatcattgtttttaatctcatgacatctttgtgtaataactcacatatttacacaattaagcaaatgtaattcataagttacaaatccatttttcttatgttacaacttatatgaattattaaactatatattatataatttaatcaccaaacacattatatacattaacatcacataatatttcagatttttaccttattataacaagtgttaataacaaataatagaattttcaaataatatctcatcatcatcatcatcaagactttactattttcttacccttttcacct

SEQ ID NO: 201957 - DNA, 1010 bp, Cannabis indica
taataccaacattgatttgccgaccctcgttttccaacacatcacaagtaaattttattttaccagcgcaataccaacttttgccagcacaaaaatgtgctggcaaaagtgacatttcttgtagtggtgcttggaaatttagtggtgttaattggtggtgattgataaataatgttgtctgatgattttgattttatggttttgtggatttggggctcagcaatgacaatattaaacggtggcttcgacttaattaggtataaatatagattttttatataaaaaaaaataccatgtcttcagttatttaagatagatcctttgtatgtcttcaattttttcacgacctacggcttcgtctcaattatattcggagcgaaattttatttaactgaagataaattggcttaaaaccaaaaataaagccaattcttctagtaatatctaaacaattatatatgtatatgatcaaaggacgtttgcattctatatcaagggaatattcaccaactaatggactcaaggccgactcaaaggtggggtagtaggggcccacgcctaaggctccctacccaagcccaaaaaatttttaacaaaaaagctttaaatttatttttttaaaatacagtattttgtattttaactattatttattaaaaaataactatttaataaaaaaaatacttaatttattttttaagatattacatttaatattttattgagataaaatgcctattatttttaaaatactatattttagttttttaccactatgtatacaagaaaaaaaaatataaaacattttatataaaaaatgctcaattaaatttttttggctcaaggcccccaattagtttgagacgggcctgaatggacccaatcacaaacttttttaaagtaaactagatagatcgaactcttactgaactactatatttatgtgtgttctttacttttttcttttgcatagttgttgtttatttaaacagttttttttttttaatttt

SEQ ID NO: 201958 - DNA, 554 bp, Cannabis indica
taatataaatatgtgaggtaaaatagaaaaattagagttttaataaagtattttaaagatagagtagaaaacctattttgtgtgatctatctaagattgtcgtttgtgtacatactagtagaatgtgtcaagtgcaaggcacatgttgatttcaaatacacgaaaattattttattgttcgatttgtcaaaacatagaaagctgaaaatcttccaagcatgatgctacacattcgattgagggtaatcgatctcctagcggtgtggaaagaaaaaatgatgttgtcggtacagtggaagagagaagagtggaacaaaatattccaccagttgttagtcctatggtggttgatgatggaatggtgcagtctgcggagcagacttgccagccccaatgagtatcttatgctgaaatgcatggggtctaggaaaccccgatgtagtaaatgcattgcggactattgtgcgcaagcattctccaagtttggtcttcctatatgagattaagctttacggtaatttgacaaaaggtattcgaagacatatcaattttac

SEQ ID NO: 201959 - DNA, 542 bp, Cannabis indica
aaaaaaacaacaacaacaattagaaaaagaacaattaatcaacaatactaaatgaaataaggtaacaaaacgtatgtcacgactcacaatttagtgtgtgaagttatagtttgaagctattgattacagggtttctataacaacaattaagttatctttcgagtataacttaaaacgcttatatattgagttaattgcacaaataataattgttcaattgagttatttcgccatgcctaaatatatattcccatttaaagaaacaccaatatactttcatgaaacctcacattcactcctttcaaaagaaaaaaaaaacctcacattcacattcataatccaaacaaatggaagggggaattcttgaagtacttcttgtcaatgctgaaggtattagacacacaaatcttgttggtaagccaatctacttttttaactttttttattctttttttcatttgcaatgtttttctaattatcaactggtgaaaatcgagtgactaaaaattgaaagagttattgtagggagaccagactattat

SEQ ID NO: 201960 - DNA, 1357 bp, Cannabis indica
gatcatcctcttctcaagaaccacaccttacaggttttttcttaatttctatagttttgtcaattaatatatatacattatgtggttttcaatttcaggaccagcttattagtcaccgctcagaccccattttgaaaaaataaattagtgaataaaattaaaaaaaaaaatacccaaattattaaatatattttgcagtgagtcaaatttttatttttgccaaaatatataatatatagggtcggccctggtgggttcagtagtttatggtagaacctagctaagattagaatataatgcatattttgtatgtatatatacagccaagttcaattcaaataaatcaattaaaattgggagaaaaagatgatgcactaaaggcgttacagggatggcgtaagaatggagaagaatgcccagtgggaacagttcccatagttcggataccaacaatatcttctaagtatggtccaaaaacctcccattttcaatctcattatataactcaccctaataggagcctcgccatagctactgaaacgactccaggtcatgaggtaccattaattaattatctccatgccttgtgttgtgataatataatataaatatagaaattattatatatacagttatttttggtgtggcatctatgtagtatgctcaagtatcgatgttaggtggtccattctttggaacaaaaacaaatattaacgtatggaatccagattcaaatggaacaataagtgtttctcaaatttgggttacctcatctcaacatgaacaacttaatgctatagaagccggttggattgtaagtgatctactccactatatatatatgtacttacactcttgaatttcatatattcatgtgtacatgcccctagacaataataataacttaattatgttaaggtgtaaaaacgttttcaattaatttgggcttccttggcaggctggttatcgtcatgatccaagaacacgattcttcatttactggacagtaagttattatatatatatatatatatatatatatgtataggtatttaattatatctaaattttgatcgtgtgactctatatatcagagtgatgggtatagaagcacaggttgttacaatcttcattgccccggttttgttcaagtaagcaggaaaatcgctctaggagctctactaagacctctttccacctataacgggaagcaaaaaatcataactattgtcatagaccaggtatatatgtataaatatatatattataaataaacaacatagatataataatatatgtattaattattatttgtatctatgtatacatatatataaatgcatgcagcgacacggag

SEQ ID NO: 201961 - DNA, 1336 bp, Cannabis indica
atacacttcgtacctcgattgtactagtgctagtagttataattcatattatttagcatgtatactatatgcacatgtgagactcaacatactataagtttttggtattgccaagcctactttcgctgctacaaaaggtggaacatgtcagagtgctgaatatttcggatgatagtcgactgtggaaactggatccgtatggggttttttcttgtaagtcagccttttattggtttacatcaatcctgaatggtggtggattgtattgggcaaggactttatggaaaagctatgttccatcgaaagttaaagtatttggtgggcttgtgtctttagataaagtgaacgcacatgataagatgcagaagaggaaaccttacctatacttctcccctggttggtgcgtttgctgcaaagacaacggggaagacattgggcatctgttcttggattgtagctttactcgacgattatgggtaaggttgataaaggaatttcagctgacatgggttatgccaagattcgtaccaaaaatgatagtcagcaaattaattggcagcaaacgtaaaacaaagctatggagaacaacgacattagcaataatttgggttgtggtttgaaaggaatgatagaatttttgaaggggttggaagttcaggagaggatgtgtgggagaaagttaagttctggacagctactttacttgggtttttaaaactaaactttttgaggatttgtcctttttagatttatgtagagaatggaattcactgtcgtaggggaagtacctcctctgcttagcttattttacttcagcaccaccgtgtgctaactgttctaggcgatcttttgtaaccaaggcttccctccgccataagtgaggattcttaatacataacggggagggtcctatctaagacaagagaaccctttaaacttttacaaaaaaaaaaagaaagagattcctgcctaaccctgcaatatttggggaccaagaaactctagcaattgctatgtaggcagtaggtacccaggagggagtcgaacctcagaccttgtgggagcaaaccccataactaaaacacaattaatacagaaagtttccccaatatacaaagatctaggaaagaaagtacctcaaagtcttttgttttattaatccaagttgctatctagaattttaccttctcccataaatcctctattgaagtctctttgcccgcaaatattccgccatttttctcaagcgagaccccccaaaaaactggctagtatatgctcactaggttagttttgaggcttgcaatgtatcaccttggtagtcattgttggacat

SEQ ID NO: 201962 - DNA, 1901 bp, Cannabis indica
aaacaaatttcattttaattgagtaaattaagcaaaacaatgtaataacttttctcttaaccccaccaaattattaggccatattgttgtaatttttaattgcattgcaataaataatgaggtgtttagttaattattataattattgttactaatattgtttatttatttttagcatttttcaaaaagtattttctttaaaaagcctgatgtaccatgtactctatacagctacatttgatacttagttgacaagtgttgaaatatggtacttttgtaagaatttttcaataactttatatttcaaaatgtaaattttgtcaattactccttcaatatttaaatcaactattcttaattttagttactagattaaagggttaatctaactttgttcagttgttgtgttatgggaaaaaagtccacagaagcattgcaatatggcacaattaatccattccaattgaatttaaagtgtataagttaggattaataattagttaatgcaatggtacctttcttttaagtgaactattattatactccaattacttaaataaaaaaatgcagtaagataaaaaaaaaataacaataataataataatagttataaagttttatctttgaagatcttagacatagttttgctaaattttattctgctactcttttttctgttctagatctactaatgttgttatttcttttttaactaaatatgatttgtcggaagttattaacaaggtttgatggtccggttactcttcttgaatccatgatctcatttttaatgagatgaatgaatataattaatattacctccaccttttctttaagctttttgcttgaattttgggttttctaaaaaaaacatgaaaattattgtatttttctaaattgatttcaacttaaataatataacataataatatttttatttataaaaattataaattgatatagttttgataaaatatttttaaataattgcaagtactatgtatagatatttgcattaccaatttgcctatagatatatcaattatttttcaaaaaataaaatgaaaaatatcatacaatttaacatgttttaatttaaaaatagcattttatattataaataaacatacaatgatgaatggatacaataatataagcatgaaacaaatcatacatgaattggcatgataagattactaaataatgtatgatgagacacttgacgcaatccaaaatatcaataaattaattaaaaatatgtatagtgatatcatcattgtgtatgacttagttaacactaccaatagtttgaagagtggtactaatttactaactttcatttttagcaacataaaaatcgactttttggtatctcgttttggctaaaaactaaataaatatataaataaatacaaataactaagtatagactaaaacattgaagcaataacaacaacaacaataataataataataataataataataatagtagtagtaaaattgctttaatggtataataataataataataatagtagtagtaaaattgctttaatggtataattggtgtttatcatcttcttcagtgtcatattgctattgttgtaattaagtatcggatctcatataacttaaaaaataattttaaagaaatatcgctaaccaattatagagcatcacctataaaaggtgctcgggtgcccaatagcaatgctctaataataataataatagtaaataattagaatttttttttttaatttacacttttaaaacaatttttttaatagaatttaaataacaattaacttaaatcgcaattaaaatctatataacaattttatataaaaactaaaacaggaaattaaaaacaaaaattaaaaaataggtaataaata

SEQ ID NO: 201963 - DNA, 1087 bp, Cannabis indica
agtttatctgcatacgtacatagccctagaaggctccaacaaagagcaacaatcagatataaatatgtgagttcacttaaccatttccttaggaaaaacacagcacttctagtactgttttcctcttcactaattcctccaaacatcctatagctatatatatatatattagtattgtgtgtgagcaaaatggtgaagctaagcaacttttatgaaacctccaaaccctactttgccatgatctctttacaattcggctatgctggcatgaacatcatcactaaagtgtccctaaaccgtggcatgagccactacgtccttgttgtttaccgtcatgccatcgccactgcggtcatcgcccccttcgccatatattttgagaggtatttatatgtacttaccttatctttacgaaagaaaatttgctgtccccaaattggtgtttcttctctgtcccactaattattttattacatatcatataattcatataaaataagtataaataatgtgtcctgaaacaattggtgggaacaaaaaagacacatcaatttgggcacagctgatttttttctttattttactagctatagtacctttttcgcattaaaaatttattatttttgttcatgtaaaaggagaacatgatcatcactaaattttttgtttcctcttataattttcaggaaagcacaacccaagataactttcccagttttcatgcaattatttatccttgctcttctggggtaattaatttttagctctaatatatacttctcttgtctatataacaaactaattaagtttaattaatcaattaataataattagaagaacattaatattaattatttgttgaaatatgttatatatgtacagtccggtgattgatcaaaacttttactacgctggtttgaaatttacgtctccaactttctcgtgtgcaatgagtaacatgcttcctgcaatgacatttgtaatggccctcttatgtgggtaagtgtacaaaaattaaactaaaaatctggtatatatgtgtgatattatatataagttaataaattattttctttttttgtttttt

SEQ ID NO: 201964 - DNA, 911 bp, Cannabis indica
aatatatatgatttatttattttttgttatttgataatctaagtttcctttcttgggatagaagtttggcaaaatgagtgagagcttgtgcgttggtgccctctccttgaataggttgatactttccagtttccaaattaacccttgaaattggcttctctaatagtttatttccaatctcaacaagtctttgaagattctcagtagtggctacatctacggatgactctgccccaaccaatgtatcatcctatatattataaatatataaagatatattatatagagttagatatataaaaaattaacatgtacatttattatttattactattattattatcataattaaataatgaaatattaggtagctaggtatacctgaatacgtagataattgtttctatgacgacgagattgaaagtgagtggagacaagaaagtcaacaatatcagaactagcatcaccaaaaatatcaatgaggggtgtgttgccattgtcgaatacccaacttaagagaccccattgggatgccctacttgcattgtacttctcttgaacctttgctgatcctgttcccaacgatagtactagcatatttttcccatccaacctaggagtcaacggtggagtagtcgcttgcccttgttgatcatcatcatcctcgcatctcatcaattcccctaatgagttctttttctttgtcatttctctcaacatttggcttatggccaacatcgttggattgtttgccgccactgccccatctataagatcgaagcagcgtgtatttcctttgcgatcccttgtttcaaaactgtgtggaggaagaaaggtaggagccgctgaggtacttatgcatacatctgcgagtcgagcgtttttcaaacgctttgcttttccctgataat

SEQ ID NO: 201965 - DNA, 980 bp, Cannabis indica
gagacttttatattatttttcagtaaaatagtcttctaggtaagtcaattattgtcaacactctaacactactatgagttagacattatactagtgattatcaactttttaaagtaattataaaattaaaagatgtgaaatttgatattaaattatatagtacgacaccattaagtagttttggacacaccacttacatcgttaaacaattctttaaagtcgcatgttagattatttgggaataaaagttatttatcattgacttgacaccaaatgtttttactcaaatttcttatctttttctttttatgtatatatatatatatattttttttatcatcatattgactttgtacagtagttattttaacgcacttggttcccactttttaagtatgtgacagcatgcagctgtataccttcgttttttttggctagaaagaaccgttcatctcaatgactagccaagcgcaataactatcacacactagaaggagatgtaaagaataatacgtactatactgaggagtaactcagggcactccgtgataaagatgagctaaagtagctaaagaccatctctttttaatgtgtgatgataaagtgaaaatatagcataatccgtttacatgccctataaagggttgtattgtattcgataaaaataacactatgcttggaatagacttctgtatttcattatttatttaatacaatataaattattttatttacaatacataaaaaatagaacattagcttatattgtaatatttataaacttaggttgtactgtgataaagttaagacaaggtgtcaagttcgaggccgaagccaagattgggggtctagggttcaggattcaaattgtctttcgggtccagagttggggtccgagccaagaggcaagggtcggggttgaggtcccaagcatggtccaagtacgggtcaaggttggggtccatgtccaagttgaggtc

SEQ ID NO: 201966 - DNA, 912 bp, Cannabis indica
aagaagcttacagtccagtaggtgaaaagtcttgtgttgttatcaccatatagatctgggctgacctgttgtttgtgtattgattgtgtcatcaaaattgaatttagtcaaatataaaacacttcttttttaactttcaattttagttacttaaaagctagttaagttagtacctgccaaccagcttcaatgctgttaagatcttcaccaaaagatccaccaagaatccatagctgagacaagctaaactcatttggttgttgaatcttaggttcccatacattaatagttgcttttgctccaaagtacttgtctccttctacataagctattgcatgctgattcaaaccagataaaaaaacacaaatatcagaaccacaatgagataaataataatcgaaaaatctttagtacaccctctaaaatgagctttttagtctaatttttcaattgagttaaaaaaaactttactaaataccaaaatagatagaagtctaccaaaataaacttatagacttacccaataatgataataataataaagaacaagaattaaagattgtatttttattaatgttataattattacctgatgaccactctcattgacaagatcaggatctgcagaccttggcttaggaatagatctatgcttcttcttaccatatcttttaactgaacttgctctcaaaacatcatcttttctagttcttctcacaggaatagtatcttcaggacatttaccattcacatgccataactgagtcattgggtttgtcttttccttagccttttcagagaccttattgtcttggaatagtccttctggatggtaacttggcctagtctgaaaattcaaccaaaccccatttgaataaaaatgaaaaaattaaggaaaaaaattaaaaaaaa

SEQ ID NO: 201967 - DNA, 722 bp, Cannabis indica
aaaaaaaaattaaatttttatgcacaatgttatttctgattagttgtaatattatttaatatttttaagttttaaaaattttaatttgtggttcgtcagaaatctcaaaataaagaatattttagaagttttggatgatgatttgaaaactgaagttttatttttggaaaatttacacttacacacattggacttaaaataattatatatttgttatgcattttttaatatatccatattctaaaattatttagcataagtaatacattcacaagttagttatctaactttattatacctattctttcataattcaataagatatatgaatctagggaaatgattttgtcctgttattgtactttcacggattataatctatgatgtacgacagccgtcagataatagagttatttgatctgacaactgagattgatctaggagtaattagggttaaaaactagcaacgtaccctaacactcatttaatgtaccctgagatcaatctaatgtaccacgaaatacattctgtgaaagtacatcacgggaccaaatcatatgaatctattacttagcattttaattgaatcactttatttactaaaagaaaaagtttaatttattttcttatatatttatatgtataaaaaaactagtattaaaaatgatgttggtgatgtttatgataactattgtctttattttatttttggatacaattta

SEQ ID NO: 201968 - DNA, 1980 bp, Cannabis indica
catttgtacatctctgccaaagatcggagctcttgtgacgatgaatgctcctgtcgtttgttacgtttctgagcatttagacgatgtcgttttaacgttattctttccaatcaactcctccctcataaaatactaaattaacaaaaaaattgggaagtctaaatttgttattattatatagaggagctgtcgtttgttgttagtttcacaacgacatgtcgtactctttatagaggagcattatcaactagtgcggatcgggcttttcgacacgacacgaaactgtcacgagcacgacccgacatgaagaaatatgagcttgagcgtgaccaacacaatgctgcaaatttatacgagataacacaaaaaaagtaaacttaaacacgatacgatatgatacatctaaaggtacgatacgttaaaaatttttataatataaaaacaattcaagccgaaaaaaataacatataatttagtaattaacttacttattattaaaaaaaataaagttttaatttgagcttatacaaaaaatctaagtaacctatttatcaaaaataagttgatcctgctctattttgaactttcaacctcttagttgttaaactaatcaaattaccactaagctaccacacatatttagtattaaaagtattattatttattttatttaattatattttaatattttcgaaataggagcctaagcggttgggggcctaagatggtcgcctctttcgtctcacctcaggaccggccctaataaaacacgacatgaagatgaatttacgggccatgccagactacttttaaaatattagcacgatacgatgtatattattgtaaattttttaacatatagtccgagctaacctcgacccacacttatttacaactattttatcaactaacaacaaaatagtaattaatagagcatacataattcaaataaaagaaaaaaaaaacaatgaaaattatagttgaatcgaatgtgaaaacttatgaaaataacatctcatctaagaaacaagcactctccttttaaaacttgtcttatctcatcttgtatttaacccatttactagtgtcaatgtgtactgtctactattcgattaggaatcccataaggcctcacaccactacccatcaatcactatacaattaaagctcatcactagaccttatttcaaatgagatttacacaaccataataacataacatagattttgtgtgtaaattcttgagtgaaagtgtttagctcaacaaagtttaaattaaacattgactcgcgaccatgaaatttagtgttataaaaaaaatatttttaagcccttatctaaagaaaaatatagtatttttttaaaattaaaaaaaaaaattactccatatactattttttaatttatggtttgggtttccaaagtggttgcagtgctagttgcaataagagtttctatacgattttttgttgcaatttaggttgcagcactagttgcaataggagtttttatgtataattccgtaaaaatgtaaaaaaaaaaaaactaatttgaagtgtaaaaatgaaaaaacccctaaaaaaatatttttttaaaaaaggaataatttttttggtgaccctaaggtaggtaggctctaggcacaggcttagtaccttttataggtgacacattataattgattagttatatttcctaatagttattatcataagttatatgagattaaaaacttaattacaataaccaaaggcaataaccaaaataacagtcaaactaactaaataattggagtaacaaagatgaaaataaactaactaaaataacagaattagttaggttcattaacacaacgttttgaacgttgtttgcttgatcggttccagctctcatcatgtaacacctaattcaccttaattaattctatgagcactcattaaagacctcttaatagtcatgggagtttgtgatttgaatttc

SEQ ID NO: 201969 - DNA, 960 bp, Cannabis indica
tacttaagttataattctgaaacttttataggtacatctaacagtgtggtacttatagagttaccaaaatatcatttaagtattcttaaccgtaaaaattaaacttacgtatttatttacaactgagagttaagttaaatttaagtatttataccgcaaattactcttcaatatatgaataatgctatatagtatagtgtgataaattttaatttgacatcatttttgggacgaagcaattttttttaagaaaagtgtgctctattttaatgaatatggtgtttttttttttttttttgaagttaaagaaaattttattcaagtaaaaaatcaaattatataaataaaaccactaaaacaattcgaaaactacttaatttagagttaatgacactcttaattctagtttaagacagactaacagacacaacagaattacaaatgaatattagcattggtgatggagtctaccaagctaccaaacccacaactctaaacaatctgatggccaaccagattggccaagccacaaagtcacttcagagatctccttcttggccaagatgcacttaaagaagaggtgttgattgatggttcaagctcaacttcctatcatataacatgtttgacattgtataaaaaaaaggtaagcatgcaatttattatttgaatcttatttttaatattataaattattatttttaaaaaaaaataaaaaacaagatggtagtataactacaatataattcattatataaaaaataaattataatttatttatatactgaaaacaaaaatacatctatggtatgaattatcctaatttgccactgcttaaaaagtttctaataatgttatattatacctaacaaaatatttagagttgtgaactaatttaaaaaaaattaagattttctgctcttaaatttatggctacaggaggttttttttttttttttg

SEQ ID NO: 201970 - DNA, 1539 bp, Cannabis indica
gtactagtgatgatcaagaacaagaaggagatggaagaagttgttcaagcttttctgatattaataataatcatcaaattaatgatcataataatgtcattaataattatgatcatgatgatgataattatgatcaagttcttcagatagatcatgagtttttttctaacttgattgattggtagtaatagtaattagtgatgatcatattgatatgtattaattaattgcagcattatattattggatatatataattatatgtattattattatattattgatgatgatagtgttaatttgtaatatgatttatttttattattggtcccacaaatttaatgatattgttgaaatttttttattattaatataatataatataatttccattatatatatacatacatatggttgaaagtaattattaacattatataattaattgcactctgttttggattagtcatgaagtgaaattaatcatgtatattatattagttgtaccaaaagaaaattgatgatgaaagagatatgcaatgtatatatatttattttttatgaaatatgggcctatagtattaatatatttagattaatatttgtatatatattgacagcactgtatgtaatttatattattattttaacaagagaaagtgtgttgcctataggaatagttatacacaaaagtatgttggtcaaagcaacatttattaattattattattatttaatttctaagctttctattcatgaaaaagaaagtttagtttcaaggcttagttgaagtagttgttagggtttttatttgggattttcatattatatattgactttcttaattgtgggacggaattattttcaaacatactttgcattttttgtattgtgtattatgttaaattttcactgttattttaattgttctgttttgttgttttacggttgttttataaaaaaacagtatttttgttaaaatttttatgtagttgtaaaattgtaaacttttatctaaaatctagtatttttataaaaatccctttttattttgcaccatcgagttgttctcgagtggtatatgtttctttttttcattttcattgaaataatgtattttttgtggtgttggctttaggtcgtttattgttgtctatttagtttggtcatctttttatgtgatttttgcaacttgcttccatctcacttgttggactttgcaccttgaaactaagagtgacaatttgtgtttacgagttattttcgtatcgtgtcaagacttaaatattacaagcaaatataaatttaaattcagtataaactagttgacatgatcgactcacttaacatattttaatatgacattttttatgagcaatttaatatatttatatcctatttaactaaaaaaaatataatttacatgtaataaatataataattttaacataaatcattgtcatatcactttttaagattaagtgtgtcacctaaaaattaattaaaacggatcagccgtatcaacttagaaaatgaccc

SEQ ID NO: 201971 - DNA, 921 bp, Cannabis indica
gatcaggctcatctgaaaaatgcggcctataagtagagaactactctctatttcaatttgaaagtcaaagagagaaatctgcgagtaggggatttggttctgcaaaaagtcatgccaaacgggaagaacccgacacatggggttttcggtgacaatggggaaggaccataccttatccctgaaaaaattggccatgcgacttatcggcgctcagaacacgatggtactacgattcgaagggcttggaacagtgaaagtttgaagttttattattagtagtactcgccgtgtatttatacttagtcaatttatttgtacaaatatcctaagtatagggggtatatggcctactttgtactactgatttcttgtaataagagttattgatttctcgaagtttcaaattttttgccttagcattttttaaaatttattacactaggctataattgaaaaaacagattacgattaagtctgtagattatgcgagtacccgtgtaccacgaaaagcaaacagataaataaatatccttgaagggatatatgctgttcgaaatagaaagaaagcaaagtgaagtttgtccaagtacaaaacgtgagtacccgtgtactgctaaaaaagtttaatagctatagaaataaaaacattagataaatcaagcgtttggagcagttggagtagtggagccatccgcgaccttgctggcagcctcatcagcgacctcttcagtattcgcagtctctgcgtcctcgggaaaaagattccctccgccaccctgagtttgagtaggcgacatagcgcgaaaagcttccaccatctcagctgcttcagctccaagaattaagaagttgaaatctggcaccttggacaaggtagtatatatgtagttggagaccacttggtcgtactgcttcttccca

SEQ ID NO: 201972 - DNA, 1316 bp, Cannabis indica
aaaaaaaaaaaaatactctaatattttacgaatatctttatctatatattttctaattatttcataaatatgtgtatacacaggctgttccaagcagtttgagggtatcgaacaaaaaattaaaattgaaatttttatttaaaaaattgttaatcaatatttcataaatttaattttttttaattgtattttgaaaagtactatatatgtaaattcttttacatttatttagtaaaattaaatatacttttaaaaaacatactgctattagtacaatttattatcgaatgatattcttacttatttaaattaaataaataatatgtaaaactgctaataaaaatatcttactgaaatttgatatatattttgagtaaactaatgttataataaaaagtaatttgtggccaaaccttttagactttttagtttggtacggtttacgtttgaagttctcaatttctacaatcattttggttaacactctttctgttggactggcttcgttatatgtgtcagttggctcttacatgatgccaagtcaactttaccctatcacataaaaccctccacatcaaatctaagtataagattaacaaattaaaactaattaatgaaattttgttaagatgaaaattaaactataaatgaaaataaaagaaaaatgcactacaacattatggttattagaggcggactatataatatggttttttagtttttatggctaatgtgctttttggttttgtaaggcaatatgtctagttttgtaaatggtttgtttttattgaatttgtaaggccaatatggcttctttttttatatggccaatgtggctagttttctttatacggccaatgtagctagtttttgttttgtaaggccagtatgactagttttggttttgtaaggctagtatggctagtttttggttttgtaagaccagtatggctaattttaattttgtaaggtcagtatgactagttttaattttgtaaggttaacgtgactagttttagttttgtaaagttattatatggatagttttaattttgtaaggtaagtttggtttaataataacacatcaaatataatagtgtagtcaccgtcagcaatggagatgaaaatagataagtatttacaccagagaattttacatgactatttatataaaatttcatatttttttttttctatttattttgcaggttgttttactagtagttcagaagtgacaacagttttgaggttttcttttctgatattatggttttattgtttagttctcctagaatatctctgcgtgcccttaggat

SEQ ID NO: 201973 - DNA, 572 bp, Cannabis indica
gttgtcactaacaaaagtgttcataatgattttgaaacacattgaattgaacacagtagtgtttctagttttgtttttgtttttttaattaaatgagatataacctgacattaataacacattgttatagctattacctaattgtgacatcaagtggggtatatatattgctatatatatatatatatagtagtatatatgtattatgtatgtgtagatattatgtggggtcttgtaaataaatcagaaaaaaacgtgacactaaagttgttcatgattgtttagtggcctatctttgactaacatcataacaataaaggtaaataacgggataagtattcaaagtttgaaattcataagtaacataaatttaatatttatttttagtggtataagtatttaatagttataaaattataatttttctctaattttgtcagtaaattctagatcattaggtctaaatagaaatatatattattgtcttaaatatagtacatataaaatcgaaaatctagatcattcgatctagatagaaatatgtagcaccagttacttttaaatattctttt

SEQ ID NO: 201974 - DNA, 1441 bp, Cannabis indica
aaaaaaagaatcccttaaaaaacacaaataatagagtactacaaatatcggaagtggggaccctagtctactctaatccaggacctaaaattaaatgattgaatgtgatcctgcccaaattagtagaacttcggtcaattcaaggcccaaaaaattcattgttgggctacaatttttggtattctctaaggggcccaagaagttgacaaaggaaaaaaagtgatgaagattgaagatcaagttgaagagggattggcattgaatctgtgaggtgtgtgtgtgtgtgcaattatttaatggaccaccaacttgataatccaagttccgtgaaagttgtaatggtttccctttcactctaattttgtaggactctaatttccatgcaattcaaatggcaaatttctacggttctctcatattattgttcttttcctattcaggggtgtgaagtgttaatcactaataattgagattgagaatagcaatttgttttgtatttttttgttcatttctccatatttagagagtcaaagttctttttatttaatttttctttcaattataacaaattatttgaaagaaatgctataaaataacaaatgctatacaacaaactagtatattattcagtttcaaaaaaaaaaaaaaaactagtatattatttatatatttaaaaaattcttttttagatatagaggcctaacttaaatttctattgtagggatcaattctctagttttagcttataaataaattacaattcaatttatatatataacaataaattataggcatccttttctgtttttggaaatttttaaataatttatggtatcaaaaataagatttaaacatttagttgtatgtgtatattttttgttttactagtgtaactaattattttgaattttatttttgacataattattacaattttttgaaaacatgtgacatttctgttataattatgatttatgatattattctaaaaaaaagctataatttatgacatcatataacaaaaaataggatataatttctcaaggtaatgcccccacttataaatctctctatatattaatatatatgaaaaatactagtattttacttctgaattataacttaaagaattgcatcatgcaaaattgtatactatttacttagataagagttagtagggcctattgcacatattttcaattttatttttgtttttttttttcaggaaaaatatttattctacaaaaagagaaactatcaaacagagagggggtttgagccagacaacaatcttcagccaacctaagttacaatcccacaaaccactcaaacaactcttattacttaagggagtaggctccaacaagatgagccaactcattacaaatttacaaggagagaagcaaatacaagaaagatgacaactctatatatattttgc

SEQ ID NO: 201975 - DNA, 965 bp, Cannabis indica
atctactcggtttccttgcatgttcacaatggaaagaattctgatgtaatagtatttaagccaacagacattcatcaatatccaatataataccaaatatgttgataccgctattctaatgtaatctaagaaacatgtacggtaaacatgtaatcacatatccatatcattatactaatcttatctcactttcaaattcaggtgtgccggccaaccagagtggaactactgctcgacgatttacaggcccctaaatcaaataatttgtaaaactgatgagtgacacgctaaataacttttcggggacttaaaattcaaactaaaagttttcctggtaatggataacatggcaataccctaaacatcacaaaacaagaaaaattagggttcccaaaactgcccaaactggcaaaccagctcgctaacctgaaaaccgattctatggggttcttagggaccaacccgaattccagttcctataggtcccactgaaccggtcgaccggttcaatgcaagaaacaatcaaaccttctacacacctcaattcaaccccaaacttcacaataacttctagaacacctatttacaccgtaacagatagaaatcaagcaataaaatacaacatacaaaccagaatttaaaaataccattgaagagtaaagctttgagttttaaacataagcttttctcaaacaccacaccaagcaacaaaaaccacctagatcagcttgcataacactaatatagcctcaaaaaatagaaactaaccacaaacaactctacaacacctaatccatagaaaaacatgctttagcctaacataaaacataagaaataacaaaatagaagggctagagattttatcttaagttggatacacataaaacctgctaaattactcagaatcatgctgaaattttccaaacccttactggtttctgtggagcgagagagagagagagaga

SEQ ID NO: 201976 - DNA, 1010 bp, Cannabis indica
ttttttgaattctcaaaggaattagttaggttccttactacacttccagaccgtagcactggtggtgtagtatgaataccctttgcaacaataagaaatttaattagcttgttgtgtataacatatttgacattcctaacaataatttctcttttaatcattttattatactctcaaaaaattgtatttttagctccctaaatcagatagtagcttctgtataataaatttatatattttttttaatttttttttttaaattagagaattgtattccaaggagccaaataaatatatcctaacagcacctttgcaaaacaaagggtataatctctcaaaccattctctatctccattgccaatatttttttggccaaacaaacatattaaagattatcacaattgaaatgtatatgattaattagttaaagaaatattatctcgatatatataactccatattttacttaattaggaaaaactattctatatcttttctcatgccctcataatacattctatctgtcctccaagtctttttataaattaaagaacaaaaatatgagttacataaagtagcactaaaaaagtttcaccattagtcacaatatatttatttatttatttaatacatgcataatcacaagttgtattaatatactttgagctaaaacttttttttaaatatatattataataatattaatgtctataatatattgtcactaaagatatatataattgaaaatatatataattttgagaataattataatttttccataaagaatacctaatttttagtattacataattataccatgataaattttttaatcacatattgatgatcgatccgatatccattttcaacttttttttcttctattttaaaatctattagctagctagcaagtagcaatgagtagaatagtctatgtaatatgggactatctaataattgtaaaaatatttcaaattcacattgttcaacaattaataagtttgcc

SEQ ID NO: 201977 - DNA, 572 bp, Cannabis indica
gcacacaggtcagtaagaacccattggtggcattccataaccgggcattggaggcatccccatccctcccattggcattggtggtgggggttgagcaaaccctgctccgcccattcccggtggtgcaggcaaggcaggaagcaattgggcgtacatgttctgcaaaagatttaaaatgaaaatagaaaaacactttcagaacttttaatgtatacacactttataaccaaaataaataataggacatctcattgaagtttgcatactatgattatcgcttggttaaattaacccaaggctggaatgaagaagataatacggccttatagcttttctagtttcagacataaaatgcattttccgtaggcagagtgatatgagtccaataatgtaccacagaaacagagtaaaacccaacgtgtcttatgttaataataagacaacttatcatatttatgtaatatctgagttactaatcatatgtttatgatgagacctaaaacgccagcagagtagccaaaacctactagttggtgggttcatgcaaatgtcaggcacttagcacaatttat

SEQ ID NO: 201978 - DNA, 1183 bp, Cannabis indica
cgaaattggcattatcgccgaaaaaattaccagaaaaatcaccaagagaaactagtttctcagtaatttttcgatgacaatactaattctgacgacttttctgacgtcggcagcaacttcaacaacttttctagcaccggcagctactccggttattttttcgataccgacaacatattctggcgacttttccggtatcagtgacaaataaaactgcgtaaacaaataaaaacattaaatataagatttgaaaaccctaatttatatatatatatgtcatatcaaataccataaaaatatctaaaaaaaaaaaaaaaactatatataaattaattaaacttaaaaatagtcacgtttaaataaataagttgtaaaatcgtgagtataatttcctcatgataataagcaaatactagtatactactatagctttcatctcacaaagtgtacttcaatcaaaacttacaagctcataatggttagttttggtatgtgaaattggtagcacatatggtatatatctatatatttaattagttggacttccaaaacaaggatcgatcatggtgatgataagacatgaaaataatactaaaagaaagattataataattaaaaagaacttgaagaagacgttttgaaaataatttcatcttgtttgatgaattagtttagtggggtagtactttcttacccaagtgtttggattggaatccttgaaaatataaatacacatacaaaaatccaacaaacgtcaacaaaatctaggctgacttttatttaattatatatatatatttatttatatactttcccaacaagtagagctgacttccactcttccactctctctctctctctcctcaatttatattttttaaaactataaaagcatcctatagcaacccatctttttggaccataaattcttctatattctcagtccaataataataaaatatcagtggggttcaatatctttttataattgttattttatgattgattaatgatataaaatcgtgctacaaaatttacattaataatagtatgacattaaggaaaacgtcatgcatgcactaaatgtgtcctttagcaattctctaaggaaaataacaaaggatattagtagtgcctagcaccttcttacatatcaacagagtcggccctgagctaagacgaa

SEQ ID NO: 201979 - DNA, 2045 bp, Cannabis indica
atagctactctgtgtaaataatcttttttttttactattgtgtgtgatacgcttaagaaaaccaactcactcttagttaaattcattttcaatatcaaatttatatttaatttttcttttatgttggtgaaagaatgtaactcaatactctagtttttccttttttttactattccatgaattacatttatagcaaattattgaatttcagttttgaatggctttttgtatttggttgctatcctcgtattcgtatattacattcaattaacctttataataaaaggaagtatttatttttacacttcaaagtattttttttattattattattacgaaaaatacacataaaaatctatatagcaatcaatgaagcaaccaaaaaatttatagcaacccatatagaaactaacagagtaactcaaactgtaaattacaaaaaaaaaaaaaaaaaattaaaaaatggtatatgagataatttccctataataaactaatacttttaatatattctagttaatccaataaacttgattttaaagcaaaaccttaaaaaaatgtatacatgtaaaaagaaaaatggtttggatttttgttgaatttgttcattcatactaataaaatgagaggagaattatcttaatctaattatatatatatacatattattataaatcgaatttcaagcacaattggtatagatattcaaaataatccttagtttttttttttaaaaaaaaaaaaaaaaaactaacaaaatcatgatacaatccatcaatacacttacttgtaaaaatgaattggttcgttgagtataaattaagtgccaaacaaaaactcaaattgactagaaagctattccattcaattttaacagattggcaacaatagcaaaggttcccatttctctgttgaaagaacttaacctcaattaatttgtgtggtgaattaaactcctatccaatagatattcttttttttttcttttttctttttctgaaagtcaatagatagatattctttttattgatttattctggggtttatcttccaaatgattttcatggttggtaattattgagtggtccaatatttataagaatagggtgtggctgataaaaccagaatgtagcaaacagtgacaattgtaacaactctaaaatggatcaacatcagtcagatatctttaagttgaaagcaaggttcatagaaacaaactgataaaattctctgcttgaagaattctatgtacaaaattgaagaaaaatggcctttgctcaactcttcttcttcttcttcttcttcatcatcatcgatcctcaccaaccctcctttagcatccgttccttctccaaaatatacattccttctttatatttttggcttggttcataagccttctcctaaaagcaaatatcagaatcagtaaacagcagacttagtatcaacaaagatccccacctcaccaaccactatgtaaataaggtacaacaaatttgacacgaatgtaaatagttagtgataacaacaaataactagatagcttgcttgtcctaacccagaaaaattaaacaacaggtaaccagggttcaagattcaaaataagatgtcaattacagaacaagagtccattttacaacttatctttagagcataacaattacttcattgtagactactttgaacgttcattaaacgaagcaaagcattaaaaattactccaaattaccaataaaaagtaacatatacaactaggcggatccagaataaagttgaggggtttgttttttttttttttttgttagtgaaggggtcaaaagtaagttctaaatattacaaataagggtattcttcctgtgtttgaacccttgacctttaagttaatttaaccattatacaaaagctagtgctatgtttatatgtatcgtctttaattttaaatatatgtgagtctgcccttgtgtacaagatagtgaaatcatatcttctatggtctattcataggaccgaatcactcatgccatcgagtggcgtcttagagaagc

SEQ ID NO: 201980 - DNA, 1401 bp, Cannabis indica
atcattgaagcaatttgcagggcattccttttgaatggtcaggctctcttctatgggcctgggtctgtagcatggactaatatttgtcagcctaagtctgcaggtgggttgggaattaaaaaccttgaacattataataaagctgctatttgtaagtatgtttgggcaattgctaataaacaagagaatctttggattaaaaaccatgtgtacatcaagaaacaggaatggtgggattactctgcctcgattcactcaagctggtactggaagaagatggttcctcttaaagatcagataaagagtatgactatttgcaatgtatttcaaagaaaaccttatactattgcagatggttataatctatttcaccttctcaaaccaagcaaaactggagtaatgaagtgtgggggaggttcaatacaccgaaacacagtgtcattctttggttggctgtcctcaataggatgaagaccaaagataggctccttaaatgtgggattccggttcaatcaaactgctgcctatgtaattcaaatcctaaaaatgggcagcaccttttctttgattgtagggtctctaaccattgtttaacagtgataaaatagtggttgaattggaatgcacacaccagtagcttgccacagctgattaagtggatcaggagggccaaaatctagagatttagaaggaaggttctggctgcagctgttgcaaccctggtttacaatgtttggaaggctagaaacgcgatcatatggcagaaaacataatttaatgcaggcagaatacttgaagacatacagtggatactcaagaaccagattaacatgtttttacctagaaaaatcaagactatagatagagattggtttggtgctttgtaattgatttgtaaagaggtaaaaaacaaaaatctgcttgtatatagattttaggcccttgatagggtgctactagcttgtaaataccggtttgtgcaataaaatttattgatttatatatataaaaaataatcatttcttttaatctatatattttattaaggaaaattacttaatttaagttgatccaaaattaattttcaactaaatttaattttcaaacaataaaatcgaatatccatttataattaaatacaaaatatcgaaattatataaaatatattaaaataaatttcttaaaaatatctaatttaagttgttctgaaaaagaaaaatttttcaacttaaataattttttaatatttaattaaatataaaattaagtatcttgaactaatcaccttaatttgaaaaatatccctatttaagtttacccaaaattaacaaattttacaacttaaaatattttaaagaatatctgaataactaattttcaagaagattctacttaattatt

SEQ ID NO: 201981 - DNA, 1491 bp, Cannabis indica
cgaaaaaaaaacatagcatctttaatggtctcaatcaaaaaaatgaaaatggctctaattctcacttgagttgttagctctggttctcggttgagctggaccccaatcttgattttatttttctaaaagaggaaggtgtggcagtgagcaatgaaggaattggtggattggtaaacgagttatttcgaaagcaccatggatttactttatatgaattggggaattattttttgttataaaatgtaaatttttgattgaatggtttgatttatgatgctgagaatatttaccaaatgcatttggttgaatcgtttgatttatgaaaacttgggggaaataggaaaaacatattgcaaactctatagagtcacgtatagatgtgccctttgttgctttggaaattatagcagtagcaacaaataatttttaaacttagagaagggtgttttatttttctaattatcctttccaagtgattaatctcaacaccaaatactcttgcaaaattgagatttttttttttacattttttggctggaaaaagcaagagcgtcgtaattcacaccaccaatttcaaaatattattatttttaacctgtgttctaaaatattattaaaaaataacaaaaattaaaaataatctaatacaccctaaatattcattattgttatacactcattcatttatcatccttagatttttaatttatggctgtaaaaatatccctaccatagagactgttatcccaaattgtgtacaactgacgtggtatgtccacatagtcaaaatagaagacttgtggaatacagcctgtcaagaattggacatgagtgctttgtatggtttaataattttgaagatgacaagactgccaagtagggtcaaataaggaagagttaacaactccaaagaatcttggtcggaccatcctggccggtcggtgaaggttgtatgctggctaggccctaaaaattcggttggctgactagaacgtgcagaatacccccaaacaacttaacaagttgcggggtccacaacaaggcttctagaagattctcaagctgacatacagttacgggataggtccaacaacccatgaagatagagatattccctcaagatattagtcctatattttagggatttaattatccttttgtgtattttcaaataaaagataaaaaaatgttaatatccctattttaaagggatatctcttcctaataaaaattagaatatcttgtaagccatacactatataaaaggcatagggcacacgttaaaaaggatccagacccccagacccccttccacatgtatataacttctctttctcgaacctcacacaccacttaatgcctcttggatattaagtcaggtttcttcataagttcttcataagatctcactagttctttatctgtaacacattgttctcataattataatactgaagaaagccttagctagaaatcacaaagttttaacct

SEQ ID NO: 201982 - DNA, 1816 bp, Cannabis indica
atctgatagcgccgaaggtcagttagcttcaaatctctatcaccattaaaatttactttctaatttttcaaatgttgtcgccatgtttgagtggtaatttcttgtgtttggggtttaatttttttatttttttgacgtattttgatttaatccaattttggcagcgatcgtcctcaacttcgtgaacgaggtaacttttattcatctttgttcttatttagtatatgtttttctctgattgataacgaagctacaataaaatctcgtcaatagggtgaaaataatcattcattatttcatttttcttttactttctatccaaacaaacagaacacaaatttctcttttcatattagtctatttttttctcgtggttaagctcaacgaagcttcttttgcaagccatatggttttggggcttcactttaaaccggctttattttcagatgattatttccagggaaacaagcacatattacttcaatcatccttttaaatgttccttaattttcttgtttatttctcgatctgcagcaaaataggccgcttaattcacaaaatgtggctgatgctttacaaaagtttaatctcaagaaggcttcaatacaaaaagccctggataatctggctgatggtgggcggatttccttcaaggagtatggtaagcagaagatttatcttgctcgccaagaccaattcgacatcccgaataccgaagagcttactcagatgaaggaagaaaatgctagattgcagaagcaacttgaggaagaaaagaaagccattggcgaggttgaaggaggtgacccctttcattctctataaccctatactcaaattttgtaggagatggtgattatgtggactatttgttttgcagaaatcaaaagtttgcagtcaaatttgacactggaacaaatacttgcaaaggaagtaaaactaagaatggaggttggttgagatagaccagtccttgaattggaattcgtttcactaaagagatagaaaatttctttgattttaacttggggagcttttgtaacgatgtgttaggttaaggaaatggaggacaaactggaaaaattacgtggtggaattacaatggtgaaaccagaagatcgtgaggctattgaaaaattgtactctgaaaaaataagtcaatggagaaagcgtaaaaggatgtttaaagatttgtgggatgctattactgagaactcaccaaagaatctcaaggaattcaaggttatcttcatgccatttaagggtcattgttttgacttttgagaagtgttttgcaatgaagaatttgataataaatagtgaggtggttaattttgcaggaagaacttggacttgaatatgatgaagatgttgatgtgagtttacagtcattaggtgagcttctacaacgtggtaagaagaggctgcgaggccagtgaatttttgtttgaagtcttatcttagctaattacacagaaacaaatatatagttctttttttgcttttttcattagtgaaaaatgcagattctgcgttgtattagcttcatagcttgtatattggagtttcagaatcctatatggttaaccttttatgtatgttagaggctcttaactgctacatgattaatgaaaatggtttaccttttatgtatgtttaaggtaaaacctttacagtcaatggtatatactatgtccaacagtttatccaattcaaggtgtgtaaacgatgaattgaggtactagcagttgcatgaaactacttgttttcagtattgttcttcgctaaaggaaatatagctaagtttattttagat

SEQ ID NO: 201983 - DNA, 2194 bp, Cannabis indica
ctggataaggagttttcttcattgctgtgacactgatatcattagcttggaacaaatactcacgttgtagttttaacttttactcatatgtacatttcttgcacttataatcccaagtagttgaaaaggcgaagcttattttgttggtttttttggtgaaggttttcttgaagttgtagatagaagggcaaagcttgttgtcagtgaattggcagaagatcagcctgattcccagatttcaggtatttccttctttagttatttagtttcttggcatttctctgggtgggtatcagggagggaaaattctaatgatagttgactaaccttttctttttctttttaactaacctaaatgaaatatgtttggctaatacctgaaactttgaaagtaatattaatggcaaatacgttaccttgatatttggttgggaatatgacaaatgcaaggatttcatagtaacaattaaaattgcatgtcatgaatggatgaactgaactgaactggacagcctgcaagaactagatgcccatcaaatatgggagagtcataatttataatgctgctctaaggttctttgggagacggtatctgttgctcacttttgtttcttctttgtatgatttagcttctaatgggcaaggatcccaagccaagcaaacaaagtcagcggccagggtattttccactttagccatgtcagctttacttatttggatatggataaacatcaaaattatactattttattcacttgcccattttaacttcagtctcaaaatttgatgatttcagaccaaaactactgatattgctccagagcagactgatagtattacatcacaagtagcagtaactcctgaaaaagataaagacccaaatttgattaagaatgatgagacctcttctagtaattctatggttcaaacgacccatgggaaccaagatgattttaataatagctccccattgttggagattcctcatactgacaaaagtgaaaatgatactaacctcatagaagtctcagtaaataatcaggaagatgtcacatcaacctcgaatgtagagcttctcaatgagagtaatttggaagttcgtgaagaaatctctttgcctatgcctgccaaacaaattcaaattgtgaatacacttgatccagtggaaactgatccacggaccaaatcaggagacacagatttttctcaaaagattgatcaagaaaaatctcagtctacaaataatgatgtactaaatgatggtgaaactctatctagagttgctgatctaaagattgaacctcgtagcaatcaaaagaaacaggaggagcaaaaggctattgcttctcctaagaaagtacaggaacagcttgatgaggtaagtatcttataacacaggaaatcttctctactcccaacttttttattgtcccaattttttctttatgaacccttcttgctgcaggctcaagggctacttaaaactacaatttccaccggtcaatcaaaagaggcaagattggccagggtaagcttcaatgatctttatagcatagctatatgttatttaaattttcatgtcatttccttgtttgttggaaaacaaaatggatattcatgttctaactagcttttcaaatacaagcatactcaactgtatatcctaggttgaatgtgataaaagctagggggaaattgtctctttggacgagtttacatactggctagacagttttgttttggaggtttatttatctatcagttattcactgttaggtctgtgctggacttcaaaatcgactgcaagaatacaaatctgaaaatgcacaactcgaggaacttcttgttgcagaggtgaatgcttcactccttttctgcatgggttaggtttcctctatttcaataatttgacatgttatacatttacttttttgtcgtcagagagagcttagtaaatcatttgaggcacgcataaagcagctacagcaagacttgtcagaatccaaaattgaagtgacaagagtagagtcaaatatgggtgaagccttggcagcaaagaattcggaaattgaagcacttgtcggttccatggatgcacttaagaaacaaactgctgtgtcggagggaaatcttgcttctctgcaggttcaatacattttcattctatcttgtttttatttctctctctctctct

SEQ ID NO: 201984 - DNA, 709 bp, Cannabis indica
atatatattttaataatattaattagtaaaaaaattactaaacttgtattattttacttttaataatacaaatatatattatagagttttattttttccaaatattttaaatttaataaacaataaattttaattaactaagccattctagatatatattattatacttagttttcaaaatgtatttaataaattaaatatgaattaaaaatatgtataactattgataaacttattgaaaatttatcattatgattttaaaattgttgtcataactgtatcacacagttcacactacattcaaaatcgttgtcatcattatatctcacttgtagttgatattacatttaaaattattttattaccttctcacttgtagttgacaccacattcaaaattattgtgattagtatcatatttcacttatagaattgtatatctaatcaaatttaaattcaattctaagttttaggtattaacttattcaatatttaattatttataatcatttaattgaagatatattttaaacattattatttaaatgaaaatataaataatgatcttttgttatctctaaatcatcaatttttttacaatagtatatctagtggtaagtgaaatatttgatctgcaagaataatactcataattataaaaactataatattcaccatcatataaaatatatgctaaattattattatta

SEQ ID NO: 201985 - DNA, 1917 bp, Cannabis indica
aagctaattcaattctctataagatcatgtatcacacctcaatctcaattctgaaggtatcgtcatcgaatttcacccccaaaggaattacgaaaataagctccgagttacccacagcgggactcgccgggctccaaaaaatggctatcaccaccaagagctaattttcaccatatcatcaaccgtcaaaaatatcttatttgtatttttcctctatttttgtggctccttcacctataaaaggagagctccataagctcatttttcacattcaaaaaactacccacaaggtcagagcatctctctctagtttctctctctagaaactatagcttaaacacttaatcttttctgtaattcttgtgagacattaaaattcaatgtagacgtatctccattatcatcgtgatatggggagtaaactactatgaattttttgtgtatctctaaattatttacttacattctttatttatctcgccaatctagcgagctggtgttggccacttttccgcgtcaacatatccttatctacttctatccccttggatgagatcacatggcccaaaactatatctttgatttaccataaaatgacatttttctcaattgatcacatggcccaaaattatacaccgctgaaggatcaaagtgagattgtgaagacacttgtcaaaaaagtcaccataaacactaaaatcatccgtgaagactttaatgatgttctcaatgtattcagtaaatatgctcatcatacattgctgagaagctataggagcattgcataaccaaaatgagatacgtcggaaagcgtaccaaaagggcatgtaaaggttgtcttctcttgatctttaggagcaataccaatttaattacatcccaaatatccatcaagaaagaaataataaggatgacttactaacctttccagcatccaataaatggcaatgggaagtgatctttacgtgtggccgcattcagcttgcaataatctacacaaactcgccacccggtttgcattcttcttgatactaactcattatcttaattcttcgccactgtaataccaaatttctttggcaacacttgaactggactcacccattgactgtctgaaattgggtaaataatgtccacaccaagaagcttcaatatctcattttttactactttcatcataagggatttagcctttgttgtatgttagtttaaatccttcttcaatgagaattgtggatgcacgtagaagggctaattcccttaatgtaagtaatggaccacccaatagtcattttgtaatcccaaaacactcttatcaacttttcctcttgcacttggttgaaatctctagcaattatgaccggtaaagtctcgttatcctccaagtaaacatatttaagatgctttgaaagtgtcttcaattcaattctaggagcttgtagaatagaaggttgtaatttctcagttgaagctggttactccaagaacaacacctttatataaatcttgttgaaatcacttttaagtgtgattgttacatccaccatctcatcaaaaaaatctcaccttcattcaataccaaatgttcttgtattgttgttggattttatggtccatatcagagttagaaaatcataagctaatttgattaaaaattaatttaatccaatataaaccataatcccaaggatctcagcaaaatatatatatagattaaacgtagactaataaaaagagaaaaaaacatcttgtagcctatcatgggatcctcgctatctttttgtattattatcgaacatccaatccaagaacttgctgaagagttcacaccacgatattccaagccaactcaacactcaggaatagagtgggctattagattcaattagatgggtataattttgtaatcatagtata

SEQ ID NO: 201986 - DNA, 685 bp, Cannabis indica
aacccgaaatcaccctttaccaatgggaaagaaaagaaagaatggctctaattataaataaaataagattttcttttcttttaaatatgaaaaataaaaaaaaacctggcctggcttctattaatgtaatgttaatgtacttaaggatctctcattttttttttaaaaaataaagcattttatagatagagaaaaatagatctcgcggtgatcataaattgttaactggtattggcgatatcacaatcatactagttaagttttaagtaaaagttcagctagccacattataagctttaaagttacacagacgagaaactttaaaaaaaattacaacataataaaagtaagtctaagacaattactaatatagttatcgaactcccagcatgaagaacgacctttaagagcattaatgacaacctccggatcgctcttcaccaccataaaattgtagctcttggctattgcagtctccactgcaagtaaacaggcagtcgcttcgccaatgaggcgatctgagaaggggaaccttttcacagccacccacacagtcaaacccatatggtcacgagccacaaccgtcacacacatggtcttccacccaatcctcacatcataattaaccttaatccaatcgagtgtaggtggaccaaccagaaacatcatcagagacagtggatga

SEQ ID NO: 201987 - DNA, 1818 bp, Cannabis indica
gtgtagcacgtggtaagcatcaacattaaattgactcgctgtcggttggccaaattgaggtcaacagtttagtactttcattgagagcgagttgataattttatataatcagacgtcatggtttaacacgaggagaacttttggctgcaacattttgcctcatcgggtcttcctgaagaccctatgactacagatcctgatgtttgtgttccaaacgaaactagaatctccacgaacaccaaagatgtggccacttctgccatctcgacagacaccacgaatctggccaccatagctggccaggtcgacacattcatttcggtggatctaaataatcggcccatacctcagagggaggaccctccactgacgcctcccactgaaggaaggacccacgtggagcagcccctaggcacaacaattgaacctcatgtttggtactatgctggattaacggggctaggaatcggtgagccccatgtagaattgggagaaaatctcaagttagccagacttagagagaccgtttgccaagttggccaaactgaaaaaccacacgctattgattgcagtgtattcgcacagcagagacgtcaatttttgagatggatggatgaccatgagtacatcctccgatcacactagcagagctggactgccacaacagagaagctagcgacctgataaggcagtttaataaaagaactactgggagaggccacaaattcatcataaatcctctccaaaggagactagtcgatagattggggagggtttatcgactgactgtccaacttggttcttcaggaaccgggacagaccttcccttaccagaaggagggaaggccttgccgtgaatgttagttggcgagaacaatcagatcccaaaaactagtggtctagtgggccgatcagggatctcaggctccgcaacacccccacttagacatcttgtggccgaccaacctcttggtggtacacctctagctagccagcaatgtgaaatcccatcctaaggcctccgagagcaagtaacccagaggcctatcttcaaccgactaggtccaggaacgggtggaaacacccaaaataataacttgagaagtgagtgcagtcactttagatgtctagatcaacctaactccagtaactgatacgatctagggttgaacatttcgagcgggttcgacccgaacccgagcaacccgcccgaacccaaaccggtgaacccgcaaatttttattttttaaatgttcgagcgggtcgggttcaacccggtacccttcgggcgggttcgtgggttgagtttttaggagtaccgagtttcgggttgaacccaccaacctgccgccaacccgcaatttaaatatattatatatatttttacttttatattacagtatatattaaattattaattaaaaaataaaaatcctaattttttttttaaatataaactctcagattcttttattttaaaaaaaattgacttgtgttgtggtgctcaggtggagttatttgatccgttcctatgatttttttttggtaaagttgatatgttcctatgttttaactagttctaaataataaatagagataatagacaaagtaaatgttattattcaatctaaattattgcttaacgagacccgtatagtgttcatacgtaggaattgttgggcttgtgaacaattgatttaataattcaatttagtagttaggaacaaaagttcaatttagttacaatatatacatatttttaaggaaattagttacaatatttaatttaatttaatgttatttttattagttttgaat

SEQ ID NO: 201988 - DNA, 519 bp, Cannabis indica
aaaaaaataaatcaataaattttggaaatcataagtttaaaatagtattaatcttaaaatgaaatgaagtaaaaagtgaaatagaagaaaatagaaaaaataattcactaccataaattgcatgggagaattatagttccctatcaaacagctatttttcttgtcaaaaataaaatgaaaaataaatacatatatatatatatatattgaagaagtcaataccacgcgcgtatacgcacgtgaatgaaatgacttaaaaaattggaatggaccgtaaaattacgcgcgtatttagaacgtgagttgacgttttcaaaaattaaataatttaattttgattgtatctatgtgtgtatatgataatgaaactatttcatttattttggagcgctttattctccagctgcactcccttcaacatttattaaataaataaataccaaaattataaattataatttgctaatgtgcgcctttattcttttttagaagaatttttttattgtatataaaaatatt

SEQ ID NO: 201989 - DNA, 849 bp, Cannabis indica
aaagatagaccctttgtcaaaaataaaatgaaaaataaagatccaagatatgtggcgatgcatacttataggaagtaaccatgcaagtagtactctactaatttgtcattatttcatgaatcacatctacacttatgtcacctgttttttatattcttttccttttttaacttctttctttggatgtctgctgataattatttttttggtacaattattataaatacatatgaatttgttcatggaatcatgttaaaatcctcctttttctttttttgaataagctaaaatccatctttttagaacatggaagttagtattttttatttggaaactcctgaccagactaaataaatataatacaatataaattggaaatcaataactttccaatgttgataaactaaaatattccaagagtgatatatatatattttaatctcttaatcatgatgattgtggggtcatacaccatgtgaggtgagtcccacctattacctaaacactctattatttggtgttatctttaattacaccatttaaaaaaaatgaaaggtacaattagactgtcaaaataagagattaacagttatagtatgtagctttgtgtttcacattaggcttgattgattattgatcattaattagatcccattcttatccgtttggttatattggtttcgtgcaaaaagaagcatgcatcgtctttatcacttacgtttggaaaagaaattctaaatattggacgccgtctgtgggaatcgaacccacgaccacgtggttaaaagccacgcgctctaccggctgagctaagacggctagtgctaattaattggatcagtcttaata

SEQ ID NO: 201990 - DNA, 781 bp, Cannabis indica
gatatagatgaaattagaacatgtactttgcgtttacgacaactaatataaagtcatttgtatatatatatacgtggaccgtggtctctttccaaattacacgcgaacattcattcaaacacgtaatttataagttatttttttaaaaggaattaatacgtaacttcaattgtaatatccttgtctttctatttatttcgattaatcagataactgtaatctttatgagacaataattcattttattttattttgagataattcgttttattttattatttgctactaattaaataatggactctttttttttttgcacaaatacacaaataatcaattgcatggaattgatcagtgattcacgtgcatgcgtcctttactaattttctcttacagcgcgattgttatgctcacgagttattaattaaatataaatatggacatatattaatgataatcaccaaattcagttgtgtctataaattcaattaaattttgtacttttatcaacaacaaaaatattgtagtgattttcttcacgttgatggatcctataaataatatgagcatcatgttaatgggtattagtagttttcaacatattttataagttagtcccatgattagttaccgatatttctgaaagttttttttttaaattatatgagtcccgatatttaattacaccaataacaatatgacaccgaaaaaaatattaaacatcaacaatactttttaacaattctcaattaatatacatcactatatagtttcttaaaat

SEQ ID NO: 201991 - DNA, 1556 bp, Cannabis indica
ttttttaatttttaattttttgagtattatattttgaattgaagtaaatataagggtttttaattatgaataacacaattatatacactacaaaaacagaaaaatattaatatgatgttcaataattttgttatcattattttttgagtaaatactagtttagatcttacatattttgtaaaaattaccgattgaacattttattttgttaaatatcaattcaaattttataattttctaaaaggtacaaattaaatatatagccttaatctcaatttttatggaggtggtatgaccagcttcctgtgaaaactttttaagaggttagacatcttctaggtcaaacacgcttaactttgtggttcttaagtgatgaactattaaaaatggaaaactattatttagacaaaattatacattttccaattattatttttctagcaagtatcttatattaattcacttagattttgctttaaatggaaaattattataacatatatattttaaacattttgtaaaattttaaaaaattcaaaattatttacagtgacaaaaataaaattccaatagacattagcatgcctacttaatttatttaagagtaaaataaattatttgaattcttctttgtataataaaaattattttaaactttttaaaaatttatggctgattttaaatacaataaacactattttgtcaaagaaaaaaaataaaataaaatcaatgaaaacaattttgatagaaacacttatttattctgttaagtgtatatgtgtcattttaattgaaaagttcaaatatacataatttagacaaacgttttaaaattttattttattaactttttttattctataattaaaaaattgtcgttaaaggcagtttttttttttgggtagtggctcctaataggaatttataggtttgacagaaaattataaagattaatgaagtagaaattacaaactttatttttctctaaataaaatttacaactttttacaatacaattgttagaaactgaaatctacaaatacacaactaaactaagtttatattcataatataatgtatggttagaatttggtaaacattttgcagaaattattattattatttgttcagtgtatatatatttataacttcactcgtatgtaaagtcatgctgtattatatatatatatatatatatatgatctcaaacctgatgatgatcaagcaatgttaatcccagaatctatttgtcaagaactcaaatgtgtcgcctttggagatgatgaaggatattacatctttggtataggccacatataatgtatgtatatatagaatatatatatagtgatcttatgtaacagctgccatatatatatatcaataaatgtaatatttaattagctagttaggcaaaattaattgaactacaacgtatattatatatgtacaaaattgttgactagatcgaatcaatttcacacaattattggtcagttgctcaaacacttttgaaaatattcaagaaacaaagatactttttttttattattatt

SEQ ID NO: 201992 - DNA, 963 bp, Cannabis indica
gccgaccctaataatgtaattatattatgctaataatctcatgaatttttacaccaaaatttattttatttttcagtgataattgacttgaaaataaatgtattagtgtagtgaagactaatgagtgtagtggaagagttccaagcgttcaaaactattttaagttttttaaaaaaagggtttttaaaaaataataataaataattattaacgaaaatagcaaacaagatcctattaaataaaataatatacattaagacagacaaacaatatacaacaatatttgaactataacataaataaataaataaataaatgatgctaataatagtgtcacgtaaatgtaatatgacacgtgtcaggtgtttcaatatttaattaccatatatgtgatttaaaaaatattgatatatatatagctataatattatttaagtaggatatcacggttttcattaattaattttttaactttaaatgaacataatgtcccattttaaaaatggaaattatattataatgtatgtattatagggaagtttacttttaaaggagtgtttgagtagattgtatttgtttcaacacttcagaaaatttttttagttttttttttttttattattaatcgcatatattgtatttatattctcatgattgaacgcataactattttttttttttattaagtatagtttaaacttgttcaaaccttataaattatttagaattttttaaaaatttacaaataattttaaataaatacaatatatgcaatcatgaaaaaaaaattatactaaaaaattaattctaaatcctaaaacatataaaatatttaccaaaacaactctttaaagattgtaattcaaaaatctccaatgttatatgtatatatttgtttaatgatgaagatcgaatatatttaagtgatctattattattattataataaaagtagaatcttgt

SEQ ID NO: 201993 - DNA, 1020 bp, Cannabis indica
ggtggaatgtgctctacaaataatagtacaaccaaaactgtcaatcaacgactattataactgagcccatgatgttccgaagatctgaaaccttcaggtctaattgtcctgattttacaattttaatggagctccaaactcactgcttaggcagtttttgactttcctttacgtacacataaagcatatatctgtgagtcgatagactcggtaagaaaagcataaaacatagcataaaaatatgctttcgtaatttaggctcccatacaccctattacaaagtattagcaagcgtccaacgtgtatgagtctcgaacattcttgacaggagtataaatagtttgtaccccttgaatatctactaacctctttaccacatgcactcagtacctcaacatactagtgttggtagggttagttcaaatctcctaaccttgttacacatgtacttagtacctctaacgtagtagtaccggtagggttaattcgagtcactatatgcactcagtacctttaatgtactagtattggtagaactagcttgactcactatacccatgcactcaatgcctctaatgtactagtgttggtagagctagcttaaccttcataacacatgcatacaccatgtatatatacgtgcatcctttatactaatcttacctcactttcgtaattacgtgtaccaataaaaccgtgttgaagtattactcaccgattatgagaccctaagtcataatcatacaaaataggtaagcgacccgctaactcactttcgaggacttaagcatagaactagaagttttccaatcgataaatagtgtggcaataccctaaatattgaggaaatacaaaatcctaggcacctaaaaaatacctcagtcggtgaatcggaatcccaaacaatccaacgtttcctagttctgcctggggaaacagttcactatttctacaggaaatggtggtgtaggaacggtggactgtttcatagcagaacaacccaaaactcgatttctccta

SEQ ID NO: 201994 - DNA, 1833 bp, Cannabis indica
ctaaggcaaggagacccaatgtctccgttgctctttgccctgggaatggagtaccttagtagaatcatgagcaaagttggtgaaaagcatgatttcttttttcatgacagatgcagcgagctcaaactcaatcatctcagttttgcggatgatgtactcttattctgcaggggtgattataaaagcatctaccgaatgcttcaaggcctgaaattgttttcaaactcctctggtttggtgcgaaataagtctaaatctgccatttactgtagtggcatggaagaaaatgaaatcaagagagtagatgacatgtctggcttcacgagagcagagcttccattcaaatatcttggtcttccaatttgtgcaaaaaggatctctaaggaggaatgaaagctgttagtggacaagatgattgcccgaattaaggtctggagcactcgaaatctgtcatatgctgggagggctgttttgattaattcaaatcttctcactattcatgcctattggagtcaagtaatgatactccccaagagagtagttgctgatattgaagccatgtgcagaagttttttgttgaaagggcagagtgttatggctggtgctgggagtattgcatggaggaatatttgcaagccaaagaaagctggaggtatagggttcctgagtatacatgactggaacaaagctgctgtgtttaaaaatatatgggcaattgcatcaaagaaagataacttgtgggtaaagtgggtgcataatgtttatctcagcaaagaatcttggtgggactatgaggcccctacccatagcagttggtactagaagaaaattgtagagctcaaaaatgaatggaaagatcagatcaacctaactcagttggttgctggaaagttcaaaatatctggtatataatcagatgaaggcagaaaatcaagtgtgtcactggagtaaacaggtatggtcaagaatgaacatcctaaagcatagctttttaatttggctaactatgcaagacaggttaaaaaccaggcaaaggcttgtcagattttagattgcaatagatgcataatgcattccttgcaatgaatctgatgaaacaactgagcatttatttttctactgcaagttttcaacggagtgtcttgatcaagtgaagatatggcttggctggggagttaaaaccagatcactgcaagagatcattaggtggacaaatagagccaagaaatccaagttcaggagggctgtatatgcggctgctactgcagctatagtctatcatatttggcgaacgaggaactgcattttatggcagggaagcaacacccaagtgtagcagacgattcaagaagtgaaatggcaaataaaactaggatcacttgtgtgatgcctaaaacagtagcccaaatagattatgactggtttgactctttgtaattagtatgtagatacaagtgtatagacactttacagatttacataccttttatggtctttgattgtattgaaaagtttgttagagcaatgaaatttctgattcaccaaaaaaaaatatagaattacccaatagtttgtgtaacatgtaataaattttaaaatatttttttaatacacctcttaaatagttattctggcgtatcactatctgtttcggtatatctaaaagaattttttattctattttatatttatgttagtgtaagtttttaattatttaacatcatcttaaaaaaaatcaaattacaatgtcacaaaaaaagattataatattatgctgcactcataatatttttctcctatatacttgataataagttgtttaaactttatttt

SEQ ID NO: 201995 - DNA, 814 bp, Cannabis indica
aaaatataaaaatttaaagaaatgcttcgagcaataatggaggaagaaaaatacttgttgagtcttaaaataattctccaacccctatcacatttgagaatggagtattcataggctctaatggactgggatacacttgtggtcaacaaaggacaagatgatatcatagtgttgtgagctgcaggtgcaggaggtggtcttgcgccttgcacctttgtctggtatcaagtgatctcggattgcagaggtggtggtcatcgtgtacacttggtcaggatgtcagggcttacaagtgtggtgtctccactacttgtaccctctcagcaaggcatggttgtactccatttgcatgcacaccttgttctttgtatgcatgcctcgtccttgtgatcctacctcatatgtattcgttctcaacacttgtaaaatttcactaagcatagttgtgtcatagagaagagcattcccaagtaatttaaggtgaatgctttgcctagtggctcaccatgcatggggtcgagtgacatgcccatcatggtggccgagtgacattcctatcatggtggtcgagtgacattcccatcatggtggttgagtaacatttccatcatgatggccgagtgacattcccatcatggtggccgagtgacatgcccatcatggtggttgagtgacatgctcatcatggtggtcgagtggcttaccatgcatagcatgtataaccatacatttgcagtgatctttcaggtgcatgtttgttgatcttatagtgaaacgtcaccttatctcaggagttagccttgttaatttttgg

SEQ ID NO: 201996 - DNA, 811 bp, Cannabis indica
tttgcatctactggatgagaatttttcttcttccttaaagtgttgttaaaaagattgacaaactttgtaggaattttcatggggtaccaaggataacaggtaaaagcttcactttgcatctttggacaagatttgtcttctaaaacaatatggaaggattggctttagagagagttctaaatggaataaagcaatggtcagtaaatatatttgggataattcttctaaaccctctttgggttaaatgggtgcaaagtctctacttgaaagggtaagacttttagcaacgcacaactagaggggatcctagttggtattggaagaaactcctcaagcttagattgatcatctctcagtccatgatatatggtgctattgcaaatgggaggtttaaggttagtaaattttacaactctcttcttcatgttgagaaagtagattgtgctcatgtggtgtggagtaggctctcaattcctaaacgtagatgtttgcaatggcattattgagagctatgatcacttttttgtttcttcgctcctctgttgcgctcctgcgcaaggttcatggatgggtggcatttacaacttggcccattgtgtatgcgaattggagagtgtggattgtggtttattttttctgggttaatagaaatctttgttttttgaatttagttcgctcactgttcagtatgttaatgatatgattaaacaaggaataaaagcccattttggttgtttagataaaaggaaaatatcctttaaagataagattatacctagtgttgtgaatagttggtagtgttatcttgagc

SEQ ID NO: 201997 - DNA, 1925 bp, Cannabis indica
tttttttgaaaaattgcttcagtaaaacttcaagagtaaatccaatatgaaaaatctcaagagaaaaaagagtgacagaagaatttcattaatcaataatagtctggttgcgcagcagaaatataatcaggataatcaaaccaccaaacataatgatccatcaagaaaagagctaactttgccaacgagccaacaatactgttgataatcttaggacaatacatgaaagagatcatcaaccgtatgattaagaaggaagtgataacactattacaattaaatttcgtaaccataatatcatacctaagacgaactgtaactgcataccagaacaaatactcaaagctttagcaatagccaagtcaagtccaagttccaaaagcaatgaccaatgctcaaagtccaaatgctaaggctagcatcacaattaattttaaccatacctgatgacgatttgcaccactttacatcatggggtttctaaacactctctatatcaatggaattctttcattttttagtagaatggaaccgattcaaataatctttactccaatcaaacaagagagtgtcattcaaatcaactttctgattgacccatttatttcttatataccatattctctaaaaatgaactatgagtttttcaacatgacaataggcataaaattcatacatcataaacattctaacattgaaaaataagtacctggaggttatgaataatcatctcacgaataggtttaagctaatcacacccccaaataccatagaaagaacacgacttcagattctccaaaacctcgtcagaatccacacctttggtgttcggctcaataaacttacttaaatcaatgaatccatcgccattagcatcaacctccttaatcatcttgtgaagctcctcttcgctagaagattcccctaagcttctttgtaactttgtgggactgtagaaagtttcttgtctatttgttggagggtcttgttttgggctaacaagttctctgtttgccatttgaggacgacctcaactagaatgattttctttaatgttcagcttctcgaatatttggattgaggacttttggctagtgagtgatttttcctgttcatctgtaaagcttgacggaagtggaaatctatcattgctactgttgactcagaaatctagactagacttctaagtcacacctgcttgctatattggcgagaataaataagtatttaagtaattataagagagacaacaaatttataatagttcactctctgtatcgtgacagtaatacgtctacttcaagtttttatttctcacaagatggttattatagaaaaagactaagtgtcagaaactccaatttctagagagagaaactagacagagatgctctgaccttatgagtagttttttgaactagaaaaataagcttatggagctctctttttataggtgaaggaggcccacaaaaataggagaaaaatacaaagaaaatgtttttgaccattgatgatgatcttatagtgaagattatctcttggtggtgatggctatttttttggagcccgacgagtcctgttgcgagtaacccagagcttattttcgtaactcccttggggtgaaatttgacgacgatagcttcagagttatgtctggattgtgagacataacttgatagagcattgaattagcttcgaaacgcaaatcgcattaatcaaataaaaattgattgagtaatggttgttttactgaaggcagttcatgactcagcgcccaggttaatatccagcgcccaggttgaaatctcagcgcctaggttgacatatgacgtcaacatatgacatcaacctggatgctggtaagtgtaaaaacatcaagggatgcactttaaggtgactaaatgatattttaacatcacttagtc

SEQ ID NO: 201998 - DNA, 1084 bp, Cannabis indica
aaaaaaaaaaaaaattggccagtcattggtaatgaattttgcaatgctattttggaggttttaaataatcaatctgatatgtctttacttaatgaaactattttagtttaaatcctcaagaataaaaatgctactaggattatagagtataggcctattagtctatccttaataatcttatttctatgaatcaaggtatttttctttgtgataggattattttttataataatttttattgctaatgtggcgatcaatgctattaataattggaaaagtgaaaaggttggttgggctgctcttaaattagacatgaaaaaaacttttgataaagttgaatgaagtttcattgagcatattcttcataaatttggttttcttgctagttttgtctccttcattttgaaatgtatttccactgtttcttttaaattatgtattaacattcatttgtcttctatttttctaggggcatcagtcaaggagatcctttatttccctatctttttattcttgtggttgagggtctctcggctggcattcatgtcaaagttcagtctaagcagtttaatggtatctctatctgtcgctctgccccttctatttctcaccttctttttgttgatgacagtttactgtttactactattaattctcacaattgtagggctattagggatattcttaatacttataattaggcctctggccagactgtgaattttgccaactcttctgtttttttttccccaacattagttcccaagatatgtttttttcaatagttttttgggtttggatgataagccttttaccaataaatatttaggttttcatcaatgctttagaagatttaagaaagcctctttctattgtctcatacaaaaggctactagtaagtttaatgtgtggaatagtaaattattttcaagagctggtaaagaagtgcttctcaaggctgctatccaagctatcccttcgtatgttatgtcatgtttaggatgcctctatctatttgtaagaactttgaaaagcttatggataaattttggtggggctttataggaaatcacaaaaaaaaaaa

SEQ ID NO: 201999 - DNA, 968 bp, Cannabis indica
ataattatgattattagtaatatgcgatgagaacgattttaaatgtagtagcaactacgagacgatgatgacaataattttaaaatagtatgatcaatttttttattttattagatgtattttcttagatctttattttatttaaaaattcttcaatcttttctctttttcattataatatttgaagctatctcttaatttgtttgctttatttgtttatttttttagtaaataactaactttatttaaaacaaaaacaaactaaatggaaatattagttacaaagagggttacttcctttaaactgccaagaggaaaccatcttctccactctagcgcaacaagcaagaagatcaaccacaagattcaaggacgaagaaatgaacataaccttaacatactcaaagttattaaaataattcatacaataaattataaatttttctacaatatataaatttattttctgagtaaaaaaaaaattagtaaaatggtttcttatattactaaaaagaattattactaaatataatataataatagtattgttattaagcattagtggtgattaacatcatgtagacgtttcattttgtaattggttagtaatattttctaaaaattattacaataaattatattatatgagatatgatatttaattatactattaattatattgacacctaagagtattagtattttttagtttttcaattgcttaaagaattatctgtagattagatgactctatgttcccggtacttgcatttttaattattttgtgatctattttcaattgatgaagtaaaatatatcacaatatatatttcatgatgtcaaacgtgaaaattgataaaattagtagaataaaaatatatatattgctcctagtatatatttgacaacggtgctgggttgacttagttttgagtaacaaataggagccagctgagctgatatgtaac

SEQ ID NO: 202000 - DNA, 748 bp, Cannabis indica
cactagtcactactaaatgaacttttagaatcggttaatgcctaaaaccatcacaaaataacaaataacaaattaaattttttttaatcagtttgggactgatgctactttgcgtcgatataaactaatatttaattgacacatgttaagcgaaaattttaaagtagaatattaaaatgaatacaaaacacactttcgcttatgccaaattcatagcacaagagtttattaattttaaatttgaccctacaaaaatcatactctttaatgaggaaaaaatttgtcaataaaaagtagttatttcgtcagtaatgattatcaatggtgacacgtcgttagtaaaaatttgttggtgataaacttgttggtcttttttttttttgattttatggactgttcttttttttttagaaaagaaacaactttatttacatattaccacaatattatactatatttactcaatgtgaaaagaatattttttttaggactaccaaaaaacaaccgtctctaaaatgtaaaaaaaaaaggtaaatctataaaaatctttactttttgttgtttatgggtatttatgaaataatctcttatggacaattttattattattgttttaaataataaaattattaatttttatatttttaataaatagtaaattttacttgaattttataattgcgtattgatcacaatactaaaagttgatacaaattataaatatatgacaattttttttttttttttt

SEQ ID NO: 202001 - DNA, 633 bp, Cannabis indica
cccccacgagtgaaggatgagaactaatgataaaagtggcttcacaattttatttatatacacgtaagggaggccattgtattacataataaaagtgggaaaaaatctctaaataaataaaaaaaataattaactcattatgaattattagggatggccatgaccacatatggactccgcttctcccatcattaattgtagcacaactcatttctcaagcttatagttttttattttttattttttaaatttatatttacgtgttatctctttacgtgttatgtttatatttaatatttaaaatatgagcgtaataaatataaaaaaaattatttattaaaaaactaaaaaaaataatacaaaaattattcataaatactaactaattattaaaataaatactaactaattattaagtaccacattaatatagtattgagcatctttaaaaaaaatattaactaattattaactacccattagtatttcatcaaaaaaaaaaaaaacaaacccattagtatattattaataacatattaaagtacacgtagcaataatagtaaaaaaaatccttacaaaaaaaacacacataaaagactttatcaaaatctattcttattatagagtatagat

SEQ ID NO: 202002 - DNA, 505 bp, Cannabis indica
tttgatcgtggagaaatgattgaaaagaaaaataaagataaaaaatcaaaataaaaattaaaaataatatggagaacatgtatataaaagatagggaaatatagctagagtgtcattgtagtataataatatcattgtagaatgtttatgtgtgtgcaaatagtattttagtaaattaaatatttgtttcaaaaaaaaaaagtaaattaaatattaaaggaggtacaaaagttaacccatgagtgtgagggtaaaattgtaataaaagttactttttaaaattttcatgtaaatttaaggggggaaatataatactttcttaaatggatgtttcacccctatctatttttacattcaagagagttttttagtcttatttgtttaatggtcatataagttgtaatcatttagggctacctataaatttttttaaaaaatataaatcttttatcgtgctaaaaatgataaagttcaaacaactgcttaccatgtatataagaaaaaa

SEQ ID NO: 202003 - DNA, 553 bp, Cannabis indica
gcgcgcttagacagaagagagagaaaaatgattttttttaattaatattctttggaattgggcatcctatttagatttttggttccaaatatttgaaaatatttgacccttttgggaaaattatttggtgcttttatatttctattttcaagtttttatattacgagggaaatgtaatgggcaatagagagtagagagttcacttttaacaccaaaaataataaaaagaaaattataaatagattaaaatttaaaagatataaaatactttaacaacaaaaaaaaaaaaaaattaattttactctttgaaatttttttatttatagaaatatctcttcagtaaaaataataaattattttttggttgttttatagttatattatagttggcataaagttatttttttagttgtttcacattttatttgtggttaatttatagttgtcgtgaggttaatttctagttattttttagttggtttcttactttttgttgagaaaaatgtatttttgtaatttaaaaactttaaaagtgcatttttgtaaataaata

SEQ ID NO: 202004 - DNA, 1745 bp, Cannabis indica
ctataaagtcgtattttcataatattttagcatttattagtaaaattatgttcgaaattataatgtcttattttcataatatttttgtctttcttagtaagaaaatgtgcattggacttcggccttttcatcatctacaaatatctttgggtatttatttaagaatgtacagtatatggccttcagaaatgtgcataagccaactaatttttttatcctttctaaaatatattccgtaaaatggtaaaaatgacaaattttgacagattttcatttttacaaatttattatttttcttttacaaaaatacaaaacattaaccttatttgttactctacggtcggaaaaacaacataaaaccaaatgaaaaactataaaaaaaaaataacaaaattataagtgttttgggtaaatttatcattctaaaatattttctgttttctaaataaattaaggaaccacaagagcattaaaaaagtgagcattatttctttcttctttccttatcttatctatcaccttttaatgttgaaactaatcatatcttatgttaaaggaagaacttccctattttatcactcttaagttcacctatctatttcctaaaaaacatgtaagaaaatgccaatactaaataaaaagtaacttcccaaaaacatttctctatacttcaggtgagaaaagcaagcacaaaaattctcaagataaaagtttgtcttgatacatacctatatatataattatatatatatatctaatcttgatgggagcactatttaattaggttgaaaatctatacttgggaagagaatagtacttgtagcattgttttcatttacatggagtgaaattgaaagatcagtcatagttgtacttgtagtagtagtagtagtagcagtagccattgctgtttttttactatttgtattagaagattccactagcttccttgaacggtgacgccctctatgaatgtgtctttcacaatacttttgatgaggaagagcttctttgctacatctccattttttcccatctgttcttctacatctccatggttcattttccatccctttccttggatccaaacacaatattggcccaactattcctagtcctgtaaccaaacaaaaaaaaccaagaaccattaatactactaattagagagcatagacatattaggaaggaaaaactaatgtgagagagctaatgaacccaccattattgttgagaccagtactagaaaaactttgccaaatgggctgaacaagatgataaggcacagctaatcctgcctctatgtacttgtatattaaagcttgaagctgaagctcatgtagttgaagtatggtaaatccatgatatgatgatgaacatgatcccttgttctgaaatgctcctcttccaagctcaagatttagccctatttgagatgacccttcttctagtccaaatcctataacaaaataacaaaaagcacattattattctaacacaaatataacaaaaaagaaaatgtaaacagttctaaatataccagaacttgctaaatgagccatgggtgaagctggagtttgagtttgagtatgagagtccataaaatttataagtttgaagtgaaaattctaaagtatggattggatggagtcagtgggagaatgacatcctctggcaaagcacagcaataataggatttatatgacatataccagttgggttttgtgtgacagaggagactaaatgca

SEQ ID NO: 202005 - DNA, 975 bp, Cannabis indica
ataatcttttctacataatatatcttcattaatgcactcaactcatttcatatgtatttgttattatttttctatatataagcctgtaaaataaattaaattgtatgttaagagtttgccaaaaaaatatatattatttatacaaatataatattgcattataatttttacaaataccgaaaacagaaattcttttgcagggaggacgattacgatactcatactgaacattaacaaccatcccgcgaggattcatttggtgtgtactatattagatcgtattatattaaattattttttatatcacatttttatatataatactatattcattaaaattaaaatatttatatttatatccataaaagtcaaaactaaacgtaactataatttaatgtaatactatacaatataatataaataaataaacaaacccctattacacatacgaaagataataataataataataataataataataataataataataacaggataagagggtaagtagattggtagataggtaggcaggtaggcataggtactaactagaggtgttgtaacttgtaacttgtaacttgttaggcaaatttgtagtgtttgtcaacagtgagagagacatcccaagtgcaactcatccctttgggaaattccaccaaatctccagcctcaatctcttacacactccttagctccctcaggagtcacctttactttcccttctagcaaatacatgtttcttttgcttcatatgtccatggaaatttgcttggaggacaaccccatctacattattcattcatatattataagaaaggaatactaatacactctaattaacacaaaataacaacaacaaaaaacacttactggccaatttctactcccatttgtgtaagtttcgactcgggaggatttttctcgattttgatacctaatttctctgtagtcatagcatggctatacgag

SEQ ID NO: 202006 - DNA, 937 bp, Cannabis indica
tagcattagatgcagcttcaacttgcaattttaattttaaaaggacaacttgtctttttcttcttaattagcaacatttggtcattaccactaactctattttattatatgattgtttgtataacgttaattgtcttgatattcgttccatgagcattggtgaacacaaatgttagagttgaaaactataaattaataatcaagccttttatttgataagactaattgataaactaacgcaagagggtcagttttcacatgtaaaattattggaagtgtttattactatatacaataaccaaaagggagggtttaactttatacacagtattgtatttttgtagttagtaattggtatgaatatgaatatgaagatgaagttttggacgacagtaatagtagtggtagtgatgttgtttggatttggtgcatcggttaagtgtggtaataaaggaaagtgtaagaaaaaggcagtgatattcaactttggtgactcaaattcagacacaggtggattctccattggctttggaatcatcttcggacctccgagtggccgtaccttcttccaccgcccaactggccgattatgcgatggtcgagtcatgattgactttctctgtaagacgcttacttaatttccaagcaccttttattcgctttttatttaacacacttcattttccttattcatatatacattgttaataaaaatgatgaatttgtatatattataggcttgttaatttacatttagtcatgttttaattcattcatcatcctgaatagagagaagagagaattagattaataaattatatgcttaaaacaaaaatgaaatttacatatttatatatccaatatatatttggtcatatgtctgatatcagatataaaaatgatttttgtttaaccatataatttaaaaaataattat

SEQ ID NO: 202007 - DNA, 538 bp, Cannabis indica
ataaaaaataaaattataataaatgttctttgagcatgaaattatccctctaataaatatcatgtcttaaattctaaagatatgatttcatcaactcaaataatcaataaaagattaaaatgtcattttttttttcaactctcacaactcaccaagaaatggaaaaattttaagcctaaaatttttctcaactagttatatgaacaaccatcttaccatatgtttggaacatgcattaaagaactcaaaagatcacttcttaataactaaatatatcaaaaaccaactcaaatcaaagattttgtaattatgctttgagaaaaattggcttagaaattcaacacaataatgcaattctcctaatgaatgctcaacagagctcaccaccctcaactaaaaattagacggtgtcttcaatatctaagtaaataagcaatatgaaaaagtcataaaaagagagcacttggatgatgaatatgtaacaaggagacccacaaagtgacctatcataattctccaaaactaaaaaaaaaaaaaa

SEQ ID NO: 202008 - DNA, 768 bp, Cannabis indica
atgggttgcataattaatcttcgtgtaaaataatcccaccaataattaattcactgtttgtttttacaaatgaagttcaactttgttccaaaaattacaaaaaaaaaaacacaacaagtttattaactaaaataatacatgataggattataagaactcaaaaataattttaattgagttaagtatataaatatcaattaatgaaaaaagcttattaaaaatctaaattaaacaaaaaaaatcaatttttaatcttaaaatcaagaaaaaaaaaatagtcaagtagaagaaaattaaatattaatatatatagttaataattattattacattagttttaatttcttgactattagaattatattttttatttgttttttagatttttatacattaattaatatttttgaatagattttaattactttttataatgatttaaattaaaattatttttgacccaatataacattgcaattgttatttttggtcaaacttaataacactatttaaaacaaggtatgaattgtaaaatttataagttttgtcttcaaatattttacataaaattatacataaaaaaaaaaattaatttagatatcgagtttcgctactatatatcatatccccaactctaataaataatgtgatagggtgattacttaattgttacattttttttttttttgttaatcatgataattacattttttttttacttgtaatagcaggttataggtaatttttttaaaattaaattaatcataa

SEQ ID NO: 202009 - DNA, 1307 bp, Cannabis indica
attatgtttgggctaattgtgttttgcagattcatcctggggatattgttgaagacaaagaatgacaaatttataagtatgagttggactgtttggtcaacttatgttccatacgattggtacttgaattttcatgagaaaacatatataacatgattaaagaaaaattatgtatattagaaggctaatatgccaaaaaggtgtagtaaaagtaggttagtgaatgttggaatattcaagttttgttgtgataaaatctctctctcatagtattttattataccatgtagacattattcaattatttttatgttctgaaaatatcttttatatgtataaaaaaatatagatagtttgtgggatagttttatttttgggtattttgtgggatagtcttacttttactttttttttttttttttataaagaacgtagaatgataataatttagtgggccttttctctttttgaaaaaattattctcattaacgagaattaaacatcctcgtcaattttgattacatccaagcttaaaagaaaaataaaataatattgttcatcaaatctaattcatattattttatttatattatagtgtatatgatctgcactaatggcagatttaaaatttcatatattaattaggttggttactttttaatattaaattatattatattcaattaaaaaaaaatttcacataactaaaaccaaaataaaacatgtctctaacaataaattaaaataataaatgataaattcaaaaaaagaaaaaaaccgtgtagaaaaaaatatttaattttcttttaaattatatgtagggaaaaaataaattatatataagaatgaaatatattaatattatctgtattaaattttaaattatatttttttacattaaaatattaattgtatatataatttataaaaatttatataaatatgtgcagattgaattgaatcggttacatgttaatagattggattggatcgtgtgttgattagattgaattgactattttataaacactctaacttaagataaattttattttttaattattatttcataaaatttatttttgtattgaatttatattattttatttcatacttatatagttttatttctttactgttctcatgctattcatagtactatttttcatatattcatagttctattttatattttaaaagtggcaaatattagacagaaaacaaaatctaattgtttagtgacactcaattttccttgtattgaacccaaagactaatgttatttgatccactcaaagtcaaaggaa

SEQ ID NO: 202010 - DNA, 2001 bp, Cannabis indica
tccaacgagccagcatgatctctcgtaaactctaaccccaagaaatagtgtaaagagcctagatctttaagagtaaaaagtttgtgaggtcagaaatgagctaattatggggtttaaatctggacctgtaatgagtatgtcattaatatacactagtaaatagataatatttgaatatcagagccatgaatgaagggtaatgcatcaaacttacgagattgaaaaccccactatatcagactttgtcttagcttgtcattccaagctctaagagcctgcttcaggccatatataactttctgtagatagcacacatgagtagggtatacttaggatcctcaaaaccttgtagttgtttcatgtaatatgtctcttgtagttgtccattcagaaaagtattgtcaacatcaagctattttactttctacttaaaagaaacaaccaaggtaagaatagttcttgtattatcaggtttgaatacttgggaaaaagcttcttcatagtctattccaggagtttgtaagtagccttttacaacaagctttgatttgaatctatccaatgtactatcaactttgcagcttttaaggcataaaactcatgttgcatagatgctagccactgtggatcttttaaagcagctactatggattttgattcaatgggaagaagagactttggtagaagatattaaaccctatataatttaatattaaaattttaagaattattgctaaccaatcacaaaaatatatatccacaatgtactaaaaactgttagtatccaagcattaagaagctagacgattttagcttttcattttggtgttgtcattttggtgttggctaaattatataatgtttcattttattttgttaaacggtcaactaatagagtcgctcatgagtttgttagagcgtctttattatatcttaattgtatttttagcttgagaaatattctaactgagttgttgcttaccttgattggtgaatgtaaaggttaataaaatttgtatttttttaatttaaaaaaaactattagtatccaatagcaataattatatattcattcttggtgagaaacataaaagattccatttatgcatttttagcttccaaataaagaaagttaaaagctgtatgatgagtagtggagaacccagatttgttgggatacatttgtattgactttgtaattataaaattctaagaatattattgaccaatatgcagctggagatcctagaaatcttggaaaaaaatagacttttggataacttataaattaaggattactcttatcactagttttggctgtgaacacattaattgcaacataaagcacatgcgaacttcctaagattactgttttaatacacaattgtatgaagtctttgaatttagtttaaaaaaaagaaattaatagctcattgtctaactaaaagacacattatgttaaaatataaattattaaaaacacaataagacttctacgtgatacaattgtcttaaaaaatttagacaataaaactatacaaaagacataaagaaataattcgagcaactggaataagagtattcataaaatattcaatttaatctgttggatatttacacttgtgtagattgaattggaatgaaaaaattaaaatttcacttgtgcaaatcaaatttgattgacatataaaaataacgtatcaaatctgtccatgtttatatatttaaaaaaaaatatatatattaaaaatttaatgcatatcatgatacaaataaattttaaaacttaatagatcaaaagtatattttatttttatttataatgaaaatataatctaacacaaaattacacatttcttatacatacaattttttattttcttctctttgaattttgttattattttatattatttattttaatttgttatttgtgacataaaatgatataatttattttatttgttagtgttatgtgattttttaataaatattaaataa

SEQ ID NO: 202011 - DNA, 1471 bp, Cannabis indica
agttacaacagctgtcataacagcttagctaaagacaagaaaatactaactgaaaataacagaattgtaactaacttaaacctaacatccccctcaagttacacttggacaactaagtgttaacttgtcccttaggtacaaaaattgctgaactaacaggggtttggttaaaacatctgcaatctgataactcgaatcaacatatctaacatcaagtttgttgtcaatgactttgtccctaacaaagtgtaagtcgatttctatatgtttggttcgagcatggtagaccggattagaagcaagggaaccagcaccaaggttgtcacaccataatattggacagttggacagtttgatggaaagttcattgagaatggactcaatccatactagttcagatgtagctaaagcaagcgcccggtactccgattcagtgctagatctagctactacactttgctttttggaagcccaacttatgagattttggccaagaaacacacaataacccgatgttgacttcctatcatcataacaaccaccccaatcggcatctgtatagccttgaagatcgaattggttggctggtttgaaggaaagtcccagctgtgatgtgccagcaagatatctcaaaactcttttacatgctccccaatgatctgttgttggagctttgagatattgactcaatttattcacagcaaaggcaatgtccggtctagtcattgtaaggtatcggagagccccaataacacttctatattgtttaggatctgtaagaggctgacctgaagtgagggacagtttggtgttggcacacatgggtgtcgattgaggcttggcttctgtcatattggtcttgttgagtagatccctgatatacttttgttgagttaaatgatatttagtgccatttttgaaagcctcaaaccccaaaaaatagttcactgacccgagcttcttcagatcaaattgctggtgcaaactattaatgatgctttgaacttgcttggaatcatgacctgcaatcaatatgtcatctacataaaccaaaagcatgattaatttgccatttttgttgttgtaaaagagactgttatcagctttggagtgctgaaaaccttgctgcaatagaaagtgtttcagctgttcaaaccaggttcttggagcctgcttcagaccatatatagctttattaatttgcacacataatcgggatgttcttcatctacaaacccttgcggttgaaccatctaaacatcttctgtgagttccccatttagaaattcattgttgatatccacttgctgaatgtcccaattgaaatgagctgcaagtgtaaataaaatccgaattgtacatggcttcacaacaggactataagtctcaaaaaagtcaattctatgagtttagttggaaacccctagcaaccaatcttgctttgtgaatgttcacggatccatctgcatta

SEQ ID NO: 202012 - DNA, 613 bp, Cannabis indica
aaaaaaaaaaaaattatttacataatctaatactgtactattattataaataatgtgttgtgtctatttacataatcaaaaaaaaaaatgtgttgtgtctattaatacaattaattatagaagttactatatatataatatatttaaaaaaataaacatcatttaatattaaattgcataatatttatatggggtaatttccttaaaaagtctttaatatgttatattaataactaatcaaaaataaatcatgtatattaagactatttttttttaacatgaatcctaatgtagttgaggctttgaaaataagatttttgttgtgattaattattattaatattattaaaataccgtttttattaattgatatacaataaatataaacaaaaatgtactatataattatataattgaaaaagtgattaaattaaatatatagcttttaattattataaataaattaaaacctgatttttattgtattatatatgatttataattaaacaaaatttgttaaaaaaattcgaatatgtaattgataaaatttttaaaactgcacaaaacgtgaccctattccttattaattatgcgctagttgcaataggggttt

SEQ ID NO: 202013 - DNA, 2412 bp, Cannabis indica
gtcccagaaggagtcttgtggaatgatagtcgagtctggaagagagttcccgaatgactaccatgtccgctcagggtccagtcttcaagaaagcttaccactctcctagagggagttctagttggcctactgtccctcatggaatggtagttctggatagacgactcatgcaggctctatcctattcggaaagcgtcttcaacaagtgtccttggtctgtgagtccgggagctcatatatattcttggaagctttgatacttaagatgacatggagacatttctcaaagaggagttggttaagttagttatttctaactaacttaacaacctcgtttctcgcagccactgactttaagatcttgatcgtaaggctatacataccaccttgagtagttattttagtatatacgagattaagaacttagagagatgagattgagagcttgagagagaaaagaatgagaggtagagagaggtgcagagaaaagagagagattgagtttgggttttgtaagaagaattttatgtagatgaagaagattcttgggtgtaaacacttagtgaggacttccctgccaattgaataattccctgaaatcagctatataagatctcacccaaaaaataatatcagtgtaatgtaatcgagatttgtcaaataaagtatcatttgactttctcatatgacccaaagaagagcaagtaataaagttaaatcatccttggaaaatacttcaaaaaaaaaattaaaataaaatggcttaaataattatagattgttttctttgtttgcttgctctaatagaaagatacgatggttaatattaacatttacagcagtacaattttttcagcgacattttttcgttgagcaaaaaaataaaagtgagattttcatattttattatgctaaaggaggtgagattatttatcctgagatggatttgatttgacgacgacgtgtcatcgtgtggaagtgacacgtgtgcatgtggtttggggagattactgattccaggggttcggatctttggcagcaaaagaaaagagatttgtaattgtcacatgattggtccattcccaagtggccacgtctccacccctatatcactatgactatgactatcactactactaccataccatggctgaatccactcacttttaccattttgccctctccactctccacgccatttctttgggaaattttatttacaccccaaaattttctaaagtcaccccattttaataatttttattttatataaaatttatatctttaattgtactaaatttttttaacttttttttttccaattcatattcttaaaaaatatacctatcaaacaaaaataaattatattttaaatattatgagaaaaaaattatataaaattttcttagaaaaaattaaaaaaaatatatacatgagttagaaaaaattatgaaaataaaatcaaaataagtattgaaattaacataaaataatgtgagaaattttttttaaaaaaatattaaaagtaatttttaaaaattatttaagtttatatttttttaaataatggggtgtacttatcattttgtggggtgttccactctccacgccatttctttttgcctgtaccgtactatgctgcctgaatttaccataatacccttgcagctcctcgtttggtttgtatccacccgctcaaacattgagcgcgagtgattgttgttattttttttgctagactagataataagcttcgaaattatatgtaaaaatattaattaaacaataaaatatatcaaataattttaaaatatatttttatatattattttaaaaacaatgataaatttataaaataacttattgtataaaaaataaagtaacaaaaaaatatatttaaaataattattacattttcatttgtaatcatttgatattatcaccgtatcccacttgtaattatcacaatatccttacacaataaattagctagatacataaataaatcaaacaataatggcaagtactcatttttatatataacgaatcattctgttataaattaattaaattaataatttgttactatatggttatatcaatggcacatctaaaaattaagttgaagggcatacttgtttttaagtgaggggcatatttcttttcttctacatgatataacatattaaaaagtgttatgaatttatactttttataatattaataaagtttaagtaagaaaagtaatgataaaaaagttaaacttcaataattaagtactaaatacaaattttttaaataaaagttttaaaaaaacttaaaatatgaaaatttaaacttgttagaatttaaactcgtgatctccactatgtgtataagataatttaattattttcttttgaaagaataaga

SEQ ID NO: 202014 - DNA, 1197 bp, Cannabis indica
tagatgttagtgtatgatagagaaaaaaacactcgtgatttttgaaaaaaaatagaaggaattttcgagagaaaaaaatcacaattcaatcacaaacacgtattctttaagaaaataatctacatataagagtctgacacaattttgtttttattaaataaattgtgtagtattttgcttgcaatgtttcaagcataagtgtgtgatagtatatgcaagggaacattgcccatttgacaagaaagtctttttctaaatgtaaaaaattgtaacctatgaagacgctgtcacactataccagtggtagatagcctttttctatggtagcatatcctcttcataactctgaattacaaagtaccaacttactcaaaagacgactttcacacactgatgcaggtagctctattcttatataggagcttcaaacaatgctacacaaaggatgctcaaatattaaccattgattgattgactcgaatatgcctaggagaaattaattatttttctctcaagaaaaatacctctagaaactcaaaaacacaagtcaatttatctttcaaaacacaaaacaaaattttcaaaaaagattttcagatttttaaactagaaataaacatatttgattaggcaacaaaaataaaattttgagtattaaagagaacataccccgaaggattttcaggaaatcaaagcgaaccgaatcaagaaccttagtgaaaatgtcagcattttgtttatgtgtttcaatgtatttcaggacaagaactttattttcaactagttctcttatgaaataatgtcgaatgtcaatatgtttagttcgtgaatgttgcatagggctttttaaaatattgattgcactagtattatcacaaaagatagttaaagtgtcaagatcaaacccataatccaacatcatttgcttaatttataagagctgagcgcaacaactttagagctcaaagcctataccctttagttccttctggatatcccaaaagtacacactttagagctttaggctctaactttctaatactctagtgtgtatatgctgcaaacccaaaaacctttaagtgggatagatcaggtggtttgtcggaccacctctcttcaagggtctttaactccacagcacttgatggacttcggtttgtcaaataagctgctatgagaactgcctccccccaaaat

SEQ ID NO: 202015 - DNA, 1028 bp, Cannabis indica
ttggggtcgtggtcgacgggggtgagggtggtgatcggcgttggggttgacgtgggtgggtgagggtgggcggttggggtgagatagagggagagagagatgatgcagagagagaatattgtgagggggtattttggggttttgaaaaaaatgaatagttttttaggtttaaattttggtttagggaaaaaaaattttgattttctaagtatagaaaatcaaattatgaaatggattaataaaattagtttctttaccaaaacctccaaaggtatataattaattcttctgtatcaaattaataaaattaattaataatacatctacaattcaatataaaatttatttaattaaatatattatataataatatatagaaaaaaaatttatattatagacaaagaggaaattacaaattcaagaagtgagctggttgcctctcttgccaaatatcatcaaaattaatcttgatggtgcagcaagagatagctccaaagaagtaaagttgtggtggtgtttttcgagattccaacgatacaattttgggagctttcaattccttggaaataaaactccactcaaaagtggaactatatggagttatgaaagtcatacatattgtatttgtaaactagtaatattgtgtatgattggaagtcgactcaattctcactgtgtagatgataaatgtttcaagcacaataaaaaaagagtagttgctgactatacaacaaattcaacatatgaatgtcacgattttacatttgggaaaaaaataaagttgctcatcaactagtaatttttcactagagataactttagttggttttcactacctcttggtgttattataaatgaagaagagacaatggtccaacaagattaagaattaagatttaaaatatgttccatagtactctacattgattttgtaaaccactcataaaagatatggtatttatttttgttgaatttctcattgttgataattatatgtgattcttccactacaaaaaacttcactttta

SEQ ID NO: 202016 - DNA, 2099 bp, Cannabis indica
ccttcgcttcttttcttcaattttttccttttttttttttgtttgttttgctctgagcttcaatggttagggtttcttgaacgcccttcttctctttctctttgtatatatatatatatgtgataataattgtaattatatatatattgtttattattatatatgtatattgctaaaatagaagagaatgttgcagataagccttggttttctcggtgaatttctcaatcataacgtacaacgatgttctaggtcaaccatggcttgattgtttcgctctttctatcttcactggtaattacttctttccatttttctctctttgtttacttcacttttaacttgcttcgaattaaggttttccctcttactggtttgctttttcatttcagcttattatcttctgtttcgtttagtttttttggcgttgagtggtgtttcaagtttttgggttttttatttctgaagttttattcgtatttctcaatagtgttttgtctttctgagattcaatcagatctaaactctattaggtctcggctcttagttgggtggttttagttttcatttcagtctgactcgattttgcttggagtttgctcatttatgttcctatatttagtctctgcttgctttttttggatgagagctattgacgtgggtatggagtatgggtctatactatatgccctattttctggggtttgcttttgtgtttgctgacatctttatttgtgtaatgcacagtggtggcagtacttttgtggaaatgtaccatgtgccaaggaatggaaatgatgagaattatatggtaattccatagttttgcttgcccattttgttttttagtgttgttttcttttaacttgagctggttgaatttttgagtcaaacatttttagcaatattttggttttgatatcttatagagcgtttggggttaatttgtagattcaaggtatggatccgaacatgcgtttgacaagtccttttgaacaagttgaagccatgtacaatgaaggagcccctgagtttgttgttgatcagggtttagtatatcctgctgccactggttatgggtattactgtacaggtgcacatacatttcttttgtctctgtttaagttaacgattcttagctatgttcttattttattcatgctaaatgaatattttaggatttgaatcacccggagaatgggaggatcagcgaagaatttttggtgttgatggtcctgaaatccaatatacggtgagtattttttttttctcaccataatgagtgtgtaggaatatagttttcatcctttttctagttaaatttgtggttattctcaatatctgtttttcttccgatgcagggtgcacaaaatgagagttttccttatgtatattatacacctacttatggatatgcacagactccatacaacccatacaatccttacataccaggtgctgtgatgggagctgatggctccttcgtaggggcacaacaatattactctgtttccccatatcatcagaatcctacttctccggcttatttcccagttgttcttcaatcagatatgattccaagtaacacacctgagtctatggttgatactggagcctcaattaggcctgatgtgaggggatcgaaacataacttcaattcaacttccggagcgttttctaactcaactaaatctacatcaaatatgaagaattcattgacaattatatcagaaggacaaaaatctagcgtgggacctagcaagcatgccacaagtaagggtgtttctaatagtaactatccatctccagcttcatcacatgttcttcaggtaatacttccatagatttttttttttctttctataaagtttattgagatgatatatttcaaaacaaatacaatttttgcatctttttttgggggcgctggaggtgttatgatggggcctagaactgggattcttgtttattctttcaagtctattcttaatggagtgaggattgattcctcctacccatatattatttatttatttaaaagtgcttatatataattgatatgctctttggagtaaattcacatcttttgccctggaatt

SEQ ID NO: 202017 - DNA, 920 bp, Cannabis indica
agggtatggccttctttatgctaactttgtccatgtgcatgtagaggggtgggaattattgttgaacgtattgacagagatacattggtcaaggcaactatcccaggttgatgcggctatcgaacccgatcgatggtggcagaagctgaagctattaggcaagggctgttattttgcatcagaatgggctttaaagaggtgatacaacaacaaaatttagatgcacataggctggctaaagaaaggttattgcagacagcagcttgtgtcaaatatttgctctatttgagttctggttttttcttgttccaatgaagtcttaattcctattcaaactagaaaaaaaaaaatcccaacactgaataatcaacaaaaaaatccagcaataaacaaaaataatttggaagttgatttactaaaaatgccaacaaagaacaataaacaacaataatttatattatacataatgaattagtgaagcaataatatgaatcaccacgatattaagttctactttaattatttacaaaaaaaaaaaaaaaaagttctactttaataaccattgtagctggaataattatgatggtatagtatttagctaaaactcaatagacaaaaataaataatatttttataaaggaaaaaatatattcgttttagatacctaataactcatattccatttacaaagaataccatatttgaatatctgaaataagaaaaataaactaaccttgtgattgaagttggagggtctccaacttcctaaatagtaccaaagaattttcatcaaaatgcaataacatgcttagtgttacacaaaaaatttgaatcccaagtataagctgagaaaatattaagaacttatgtacagtttgtaccaatcagcctaacacgcttacgtttaattaatcactcta

SEQ ID NO: 202018 - DNA, 719 bp, Cannabis indica
agaggatgatgaagcttgtaaaggtttcggagcgaccgcaacatatgcgagaagtgatttcaagaaggctgaagatgatgatttttttgggtaatccactatagcgacagtttaaaatcgtcagctatactataggccacgatttaaaactactgtagcctatagtatcgactatagctgatagttttaaactgtcaagaattctttttcccgataatttttcaccgttgttattctacccagtattcgcgacgctcgtatagacaacaattttatagtatgtcaagaatatttctttatccaacagtgtaaaatccttgagaattttgggtttttttagtattggtaggaagatgatttttccatggttcttcattttttttttttttttgaaaatctctatttaaaaggagttattggaattggggttgaggccaggggagggatccgggttggggctgagttcaggtttggagtcggggtccgaggtccggtcagggcttggtttaggtttggcgttgcagtctgggttgggttcgtgtcaaagtcactagttggggtcgaattggattcaagttcatatcgaggtctcaaagtactggatttgggatccgtgtcggggttggggccggggtcgagtccaaatttcaagttagggccggggtggggttcggggctaggtccaggtccgggggcggggtgggtccgggtcaaagtca

SEQ ID NO: 202019 - DNA, 674 bp, Cannabis indica
cttcatcttaattactttattatactcgtatactcggatataaggttgaagtatatatatatagttcttgttgtaataattatatattgaagccaaatatgtagtttttatatatttttagtttgggctcatgacattgacacgtacgtactcacatttacatatttaaccatatataataattactctgtttttatctttcttcacatgcatgcaatgcaaaaagataagagagagagagagagagagaaataagagatcacatgcaaagagagatcgattaagatttgagcacaggcatcgagttgagtgttgtggtctgttataggaaaaagttaggagcaaattgggaaggagggacaagttcacttttggaagctacgtatatatatatttatataattattttcttattatctttacaggttttgctcgtgcatgggaaactaattacagctatgcattgtttggcttgtttgaaaagtattaagagagttatggtcctgtattgtatcatatatatccacatccactactgatgacattttaatatgtatataataaagatatattgtcttttggcctaagtatgagaaaacaaatagttgactctatctgagtattaattaagttgtccacagctcagctggcttggttgttggcatatattcatt

SEQ ID NO: 202020 - DNA, 1060 bp, Cannabis indica
gtaatttcaaaaccatatataattttaaatagtatcaaatgtaatacttattctactaaaagtgtatatataatatttagttatttattagttttattttaaaattgaaattaagtaattggaaatggtcttatgactcagagctgaatcatttttttcatttttatatatatataaaaataatcatatcttaatatattatttggatgcaattttgacggctctaataaatcctttgctcattgaaattttattaaaaaataaaaatcttctttagttgtgttgaggtatgaaaaagactaattttgattagaaatatctttaagataggctggtgaaaaaagaaataaaaagaaaaagtacaataatagggaatgattagaaaagtggaaattaatatcaaccaataatcatataatgaatagtaaatttttgtattggagtaacacaaacaaacaatatactttctaagcttttatcgataatgaatgggtctccacaccactagggttcttgttatactaattttttttgttctttttcttttttttttttcttaatttcttttgaataattattttattagtgataattaattaaaataatagtcttcaatccaatcaaaaaatctcttttgttagagacaatgactaggattaaaaatagaaaagagacaaataatcttcctaatcttagatcatttaacaaaaaaactaaaattaaattaaattaaaaagattgcagcattatattaattaaccttaataacatttgatgtcgagctaatcaaaaaacaaagaagaatcaacaacgaaataaaataaaataaaagtatatcacacagaactaaaacactcaatatcatatcacaactagacaaaactaatcatagtagcaaaatcgaattgcagtaacaaaatacaaccccaatcaagctgcacttaaacccaaaaccagagaaaaaaaataactttctatagctatagatttaggaatgagaaaccctaattttttcctccactattatctaactaattttttttttcttttaatattgatt

SEQ ID NO: 202021 - DNA, 1070 bp, Cannabis indica
tattgacagctcatacacggtctaaataagaccacatctcacaagaaacttctctgaaaaacatcttcaatcagcctatatgaatttctgcttctgtacctacaaaactgtgagcaatacttcatgtaactttacttttgtagaaaataaaatcttaattcaattttcttcacaaaaatctaatcaaatcaattcggaaactcatatatagaatttgattaatacaactggaaagatagaaattgatttattcataaaatttattatatatgacgaactttacaaatataagaaagttgatcactttttatactttatataaatcaattaattgaatacaaatatacgaaaataaaaatacaaaattaaaattaaaaatcaaatttataaaatatttatgttaatctaatgcaaaaaaaaaatgaattaataataattaatcaaattattaatattttaattatgaagttaacaaattaaataaactacaagttattgaaattttttgaaaattatatacagtactatatataaatatataatgatggttggacagtgtgacccacttgcatgtgtttcttatatcaaaagagaaagacaaaacaaagaaaaaaaaaaagcaaaaaaatctaatattaaattataccaatatatttattatattttgtagtaattagcactttaaagcactacttaatctttttcatatataaagagaatttaattaatgcatatataatatatcaactaattatttataaaaaaaaaaaattatatttcatcaatagctacacatttcatacttggaatgtccttggacgtactccatccatatatgtgttgtcatgtatataagctgtaatgttttgagtggccccggccgggtacggtctaattaagatactaagccaccatctgtaattttttaataaattctaaaaaaaaataaaatgatcaaattagggtttaaataatttgttgttgtgctctatctactttttttcaagcacttaaaaatgactatttatacgaatatagtaaattatgaacattatcataattataataat

SEQ ID NO: 202022 - DNA, 1794 bp, Cannabis indica
gttgttagtatatttgtactagaacttcttatttgtaagaggtagtgaccaaggacggaagcggaaaggaaatatgggagttaatatgtaaatttataaaataaaaaattataagtaaaaaaattgaaaaaaaaaaaatagaccctcatatcacctatcacaattttctctttaaaaaaaaaagaatatttaaaattaattaaacaaaaccaattattttttttaaaaaaaaaatagtaattaaaaacaatcattattttatttacttacttattttttttttttgtaaaaatgattatattttgtattttatcaaagaggttttattatttaactagaggtcataacacttgaataaatttagaaaaataaagacaatgtagacttgtcaaaggtgtgttattagagttaaaagcaataaatgtatgttaacaagattgatgaaaaacattaatgggaaatttgcttgtgtgagcataacatggttaatatgagattaatgttcacacataaagatgttagaaaacttattatgttacaagagtagagtagagtagagtactttgacccaatattttcaacttgggtatataattacacgaatggtttccaaaaacccaatgcttcattttggaatagactatcaatagaaaaaatgctaaaaggaaatttgtaattagtatcataatcggtattatattgttattagtgtaattgagaattagattttatataatttaagaaaataaatttttaaaaaatatcgctaactaattataaggtgacacttatcaaaaatgttgaataacatatttagtactcaatatgaatgctcacaatcaatataatattttatggaattccactagattttggagtccccaattgctaaatatttgactcttgatttttcaactatttattaatggcttctttgctttgttatccatatagcagacatgtttagcaaactcatgtgattaacaattatttaaagaaaaaaaattgcatcaccaatttctatttatagttattagctagtggtttttgtttttgtttttgtttttgtttttatttagtttgtattgtaaaatgacaagaatgtgcatggatttaattgaccagcacagtgtaaaaagattggtagaattgttttttttagtcataaatggaagtaaaaaagttcagctgagtccatcaccactggcacaaatgcggcatcttaaaaccgatgaaaattcaatgcggtcttaaaaatcaagattttcattaaaaaaaattttgctcgaagaaactcgataggaactctatgactacttgatatcattttttacaaaaattttgaggttgtttctttcttttttcctttctaaattttaagtatttttttttttcaaaattttacatgtgggtgatatgaacataatatttgagaagtatatataaaaacttatttttacataaaaaaaaaagtatatattgtattgaagtttattatttattctaaacaaaatgtataaatttctagcaatacaacttttttgtaaaacgtttacaaatttgtaagtatatattacaattttgtaaaaactgttccaaataaccttaatttatcatagaggagcttgttaataggtctttctttgtaactctttccccttttataggtcattttattttgagttttggtctaaaattttgatatatttttcatattcatgaatcgtgatgtcaagatattatacaccaaagcaaagactttagtagtattagttgaactatccagaaatttac

SEQ ID NO: 202023 - DNA, 3026 bp, Cannabis indica
ttgatgatgctttacttttctttgagatattcgtgttccgaggaaaaacacttgcactagtactttagatttataactcaaacgtaatattcttgtgagacctcaagcattaatattgtaacagtgattaactgtggcatgcaaatagtttgtaagtgcatttgttcaacttaatgaacttaccagcacttgcaataccacttaaagattaagaaactcgattactagggataatgtcaacatttcattaaataataataatattgactctggtgtgtagaattcttgaatgccactgcaagccttggctcctatataccatggtaacacctggcttccgtataccaaagtgtatgtgacatatggctctcatgtaccatgattttctatgaatgctcatgtaacgtgtatagctcatgtatacaatgtcttatttctcccccaacttatcaaagaaatgccttcatgggtaacttgccatacaaaatcccattggcctttcttcatcacttctttcattctcaagatctccttaagaaatagtaggggactcgtcatcactatctccccgcttaaattaatcttgggaaacaaaagaggagtctatttcagtgaacgtattaggcattaactcttcttcactttcttggtcaatgtctattggagactcaggaaatattgtaagcattataactggttgcttctggttgagcaaatcttttgatcttcttgacagcatcttcgagcttgataaaactgtcaactctatctagaaactcttgaattggtccaattgttgtccccatgaccttggcatcttcactgagtatctttatttgcatggtggcctctaggaatcgctgaaggtaatcctccagaggtttatcttcttgttgttgatgcagaccaaatcattgggctcgattggtctatgccttgatggagacaattagtcatagaatactttcttgagtgtctctcaagaatcgatagatctcaaggcaagcttgagataccactattgtactacttctaatagcgttgttggaaagactcaacaataagaatcatctcgaataccttccaagttagtttttactttgatgttgtggatgtgagagagatggtcttttttaccattgtatggatgccacaccggatttctgaactttgaggggatctctaaagccttgatttgatctgagagaggagaacatcgatctcaatctaatccatactttgttggcttaggagtagtcatacccttaacaagaacagcaagggtgtcaaattcggccctacacactgtggtgatgtctgtatcaactggcgtcttttttcttatgttgttatgcatgctcttttgtcttccaagtaaatcaaaggcattgattgacctaggctttatggctgtgtgagttgtcatgtggccttgatggcaactctaaggatttatcatacataacaatagaatcgtctcttaagcatttacttcgtgaggagcttctcatagaaatatatcgactatttctttcaaaatattcatccttagagtgacatgtatggatggattcggactaattgcttaagttcaacacgtctccaggcaaccgtagaaagtatttgtattattgtccatcaggaccacaggcgaagtacctgcaccaagcacctcatttatcacaaaagtatttttaagggtggagtagttcattgatcttcaccctctgaatctcatactcttctctttttgtggtagagcttcaggggtctttccccttttccctttgcacggtcacaggttagtctagaatcattagacatgtgaagagaatcctgtaaaggagattggtttctcgcaatgttcaaatttctttgaggagaattgtagttggtcctacactctgtgtgtggtggacttgtaggcctataatcttgagtttgatacattttggatgcttattggtagcaagtttttcaaacacgtaattgctcaatatcatgtaaagacccatagatccacgttttttattttgagtctttttagaagctcgctcgtaatctgcttccttatggggaatctcaatgcctattgcttactgagtagtggtgtggctaccaggagtggtagtgttgctttgcatgttcatggttgattacttgcttgaacatatggattttctatggaacaaagattacaacaaagaaatcaaactttagtctgggaactcaagtttgggctctcaaataaaagcaaccaaaatattaaagctgaaaaattggccaacaccagcatgcttgattggcgagatcaataatgaaatgtaagtataaaaatttagagagacatacaaaatttatagtagttcactccccatgtcgcgatggtaatggagttacgtctactttgagttttattctcacaagattataattaaagaaaaaggcaaagtatttaagctttggtttctagagagagatgctttgaccttgtgtgtatctttctgaatataaaaaaagagctaagggagctctccgtttagaggtgaatgaggcccttgaaaataagagaataatacaagttggctatttttgaccatagatgatgatctaatggtgaaaattaacttctaaagttgatcatcaatttttaaagcctgagtcacgacggcgggacctgctccaagtattttcataactctctggcggtgaaatttgaggttgatatcttcaaaattgtgattaaagtgttagacatgacttgataggtcattgaaatagcttcaaaacgcaagttgaatcacatcaattagatcattattttagtaagttatggccatattttaagattgttctaggcacaacgcccaagttgacatctagcgcctagattgacatatgacgtcaacctcgacgatgggtgagtggaaaaatgtccaagggatgtattttttgatgcctacgtaatattttgacatcacttagttcatttttgtattctgtcgaagctggtcaccagttctcaa

SEQ ID NO: 202024 - DNA, 650 bp, Cannabis indica
aaaaaaaattctaaaaaaaattaagcccacgtcttgtttatatcattttaaaaaatataagatttattttattatttaacaaaataataatataatcagtaatttttataaaatttaagatttaaaataatatttattcctaaataaataaatagagaatcaatattggaatatacttgaagtgttatgtaattctaacttatcttgtaagggaggagaatacaatcatatactaactaatttcattatttttttaaaaaataacatcaaacaatttgaatatctttgactttcttatctacaagtacaattttttatacgagttgttgagaatggattttataaacttaaaatgtttatttatttattttaattgggtcaatggtcttcacttaaggcgtgttgtggagtagagttaaaatgattgttaaacggtgtcggttttgatttttcaatttcataacatataaaaagctacaagttactaactaatgaattatgaaacacaattacatatgaatcatgtgccaaggaacatcaagcttgacccttctttaataacttatttcatttcaattttaacgtgtccaaccaccatctattattataattatattacccaaaaaaatatattaaaaaaacaaagaaga

SEQ ID NO: 202025 - DNA, 1580 bp, Cannabis indica
atatgtcatgtttaagatattaatactatgtattggcgaaattagacggaaattataattttaataatattaggtacttaaattgctaaaaaaattatttgatttattttagttataaaatcaaaattttaagcacttataatgcaatcattccataaaaaattaaacaatattttatcttggatttgcaactagctaaaggttgtcttaccttttgatatttttaccaaaaagaaaaaatagtaattagtggtaagtaaatataaaaagggtaaatactattttggaccttgtgttttgcaaaagttaaccaattggatcatctttttttttaaatgacaaaatggaccttatattttccaaaatagtaaaaataggattttgagctcaatttttaaaaaatttattttttaatataactaactttaagataatttctaacacgcacagatacagaaaatgtaacaagttttgtcataaaatctgtagatcagattattattaagtattattttgataaaaaatcagttcatggtcctatttgtacaattttatacttaaacaaccaagagcctaatgatatctacccatataaaaatttaaatattttaggatcaaaattttatattatttattttaacaaagaaaaataagagttttaattttaatttaatacacacttttttaattgaaagggaattttcatatacttaataataatatttatatattgacattaaaatttttatacttaaacatgcgagagcctaatgtatattatgttgtgtataaagactgacatatgttatgtagtagaaattgttagtcattattacttaaatcctagtttagaacaatagactgcaataaaagtgttataaccaaaattcggttgtacttcaggagttgacaagtgtccaacagaaggaatatgaatcaattctgaatgacataataatattatatcaataaatacatattaaataactcgttattattaaataaaggttaagtaaataatgttcaaaactcgttaactttatagtcaaaggtgagaaggataataattattgaactgaaattaacaagacatatgcttgcctcagaatatacaaacaagaaggggatattcatccactcaagcaaaatgaatatgacaacataactacttcgcgttatacatagcgagaagatcaccttacattgctagagccgataaaagaatatgacgagatgaactacttcccaacacttagcattttttttcttaagatggacaaggaagaaaactcatatcaagtgagatgtaaccttccacgttagcaataaccgtctagaggaaaaactaaaaagttgttggggattattatcccatatgtgattaaatgaaacgtgaggattatccacgcttcatgagcagttgtatttgaatcagtcctaaaaaagggtaactgtcagcctatatcctataaatagggccagattccatggtaaaagggacgaaaaaatttgagagagaattattattattcaaattctgagattatattttgtactcaatacatatccctaataataca

SEQ ID NO: 202026 - DNA, 908 bp, Cannabis indica
ggcattcttgtcagtatttaacaactctgttaaattaggtaccaacggacttacgaaaatagcgaccttagggactaatgccgccaattttcgaggttgaggattaatctacatcaactctaaacttttggggacttttgccgcaattatcccttttaacaataattttttattttttcaataattttttttcctttccgctagtttataatacataaaaaacaataaagaattattatcataagtttcttccaaaaaaaaaaattaagtatatctaaattaattataaggattggtttggtttgaacctctatcggaatttttaaaatcgtgaccgaatcaaagaattttaaatggtcttgaccaaaaaaattcatatcagattcatttggtccgatctcaaatggtttggtccgaatcgattggtttgaaatcacaaattgcgaattatatcagcacccctaatttttatactatttttccatcttgttttcaatttttcctattttaagaaatagtcatatttttgcataaaaaatgtgtaatttccactcaagtatattgaatttattaccaataaatattcactgtgagaaaaatacagaggctgcccatgtccaactattgaaattatttaattttgaattatatttaattaagacactaacctctctcattctcattttcatttcctttgtacatgttgtggacgagggagcagtgcacctcagtttgtcctctcttcgtccatttgctatgacaataagaagtttagagtaaggatttcagtgtgtttttcgtgttgcttagatttagtgaaattcaattaattaatgggcgattacatatatttgaagctaataatgagtttgaaagttgatgttgtaaaaattagaaatttttacatg

SEQ ID NO: 202027 - DNA, 891 bp, Cannabis indica
gtgtatctcttgacaatattatataatgtttatgtacttatcaacactccacttaatatacttccacaaaaataaaaataaataaataaactccccttattagaaattaataacactttttatgttcctcatcttcattagaaatactaattaaatgtcagtacttcaccataatccactaatctctccgacccacatttcatgctgaagaatgcaaaacaaacaaaaagaaaattagaagtcaaacttctaattaatggtaagattaaaaattggcaatagtgcatatatgcactatgttaactttttctttttgtaggcatgcgcactcaaataatttatttagaggaggaaatagttgaccaaaaaatcaactgaagacatttacaaaagaatgattaatttcttcaactttctataacctcctaaactataatagctatgtaatcatacctcttatgttaaattttgtaacttttactcttaaaaattaatatttactaattctcataaaagaaaattattaaaaaaaaacatgataaaagtattaatttgataaaaaaaaatattaaagaaaaaattaatttttttttttaaaaaaaaagtaaataattttctaaattttattttaggtaactttttctatttttactactttaaaattaatttttttttttttttagtttatttttattagtaattcttactatagtaaactacctacttgtcaactagcgttggtaagtgtaaattagtcaataaatattgtcccccacctagacaaaactaattgtaccttttaaaaaactttaaaattagtaattttttaaaattttagtataattatagatcaaaatacgtaaaaagaacctccataaattaaataaatct

SEQ ID NO: 202028 - DNA, 1088 bp, Cannabis indica
ctttctttcttttttctagattatgactaatctaaattctatttctgcccaaggtagttcactatagctattttagggagtgggataatagtattgaatttgagaatttatttattattgatgaatattgcgcaccacattttctatattgtgaattttgatgttttcaacgtgagtacttgcatcaaatattgtggttacttctttatgtctgtggactaatactttcctgcctttattttagtgttcattgatgttttcacagttttttttttcccaggtggaagaagtggtgtcttgtgctgctgatgggacttctatggtgcaagatctagatttttcatctttacgcacccaattaggtcctttggctgctgtaggttcttgtattatattctttatttcctctgcaagtggcagagcgttttgatatagttataactacagtttctacttagttatgtagtaaaattgtatgcttttctcgccagattcttctttgtatcgatattgctgctacttctgcacggtcagcaaagatctctcagcagcttctgaatcaggtaattactatttttcatagatggtcataataattttactcatttaaaattatacaaatgaatgttttttttaacaaaatgcaatgactagaaatgcaatgacacagagaaagttaaagttctgcaacttttctttttaagagaaatggtttctggttgtttgccttttcaagtgtgtattgattgcttattatttgcactatgcagacttaagtctttttattttgtaatcatgtaggctcaagttatgttatctgagatttacccaggtgtctctcccaaaaaaggctctacatactgggatcaaattcgtgaagtaggtgttatttctgtctcacgaagggtccttaagcgtctaaacgagctcttagataaggtattaaaatctttatttcctgcagtcgaattaaaaactatctaggctggcgtgactttgatagtgtcatttcacttgtaaagaataaaaaatgttcaaaaaatattcgaggacaatgttggcttaatagtttcagttcttagagttct

SEQ ID NO: 202029 - DNA, 1493 bp, Cannabis indica
tcaattaattttgagatgtatcgatacatcttacattctaacaaaacttatcatctaaataacattactttgaaaatattactttagaataataaaaaaaaacaacttttaaacaattaatacgtatagataaatgtttagaacactattgaaatttgaatttatggtctccaacaacatacatagtaattcttgtttatattcatcattggtaaacataaaatttgaatctccacatattctaccataagattaagaaaaaaaataaaaagtaaaaaaatgttaataatacaagactttgattattattaatcaaagaaaccattctcttcatcttcttcacttttttttttacaaaatgaaatttctaaaatctaccaattaaaaaacacacaaaatatatttcaagagaaagagagagtaaaagagtgtttttactcatgtaattaatcctttaatatcttccgattcatgacattttggcttttgtcgattattacgatcatttttctccttagctttggatattaagtcgggtacggataccgaacccgacccgggacccggatccgaaaaagcagacatgaattgatccgcattatcattattattagcacgtgtttttgatgatcttaacctcgacgatccacttactccaccgacgccgggattagattctttagatttcttccggcgagtttttttgggaatatcgggcgagtttctcaccggagaatcaatcgctaaactcgaatcagaggatcgtctcggactatccgttgtattttttgaagatcttctgtgcttcgtcttctccgttttttctctcgtcggagagtcggcgccgattccagccgctgtcgccgtggatgtatgacgcgatcttgatgatttaggcaattcaggtaagtctctagccggagaatttggtagacgtgtagttctccgattaggatcttcgccgctggtgagacttaatggtccgttggcgaaagcagtgggtgatttgaactcgttcatctgtataggatatggcctaattaagtgaggctttgtcataaattcgttaattggcgggaaactcacttatatatttttattttattttgaatttttggcaattatatcatctcaattctcaaccaccacttcattttcatttaatatgaattagtagtaaatttagggctggtttgtaacgccgtattagattgtattgtattatattaaattggattatatatcatatttttatataatactatgctaaactttaatttatactaaaatattatatatttaggtgtccataaaagttaataccacatatagttttatgtaaaaatattgcataaaatacaattcaatataatacaatacaatacaatacgacttagtacggcataccaaacgagccctaaggtgtgattaactgtgactacaatacacctaatatcatatttaaaaattattttaaacaattttaaaattaa

SEQ ID NO: 202030 - DNA, 939 bp, Cannabis indica
taagggacgggttctggtttcagatctttcactgttttcctcgagattcgaagatcgctccaaggtccgaccacgctcaatcaggtatctctcttgcgtttcctgttttgattggaaacttcgtttcgtgtactgtttggttgttttccgagaaaattattgaagcttacggaaaaatggtggaaatgtcgagagtgggaagtgggtttgaatttttctttttcttttaatgttttgtttttgttcattattataattggatttggtttctcgggttagattggaactacggaaggccggtttgacccctatagcaagcattggtttataatttatatatatatattgttggaagtatatgtgggattctgggtttttgatatttgttgttggaccgcttccggctttgaattttccataggcttggctttgcctaaccaaacttggtatcctttttttctttctacatgtttgattctaattttggttcctgtggaaaaaaagcgaatgtgacattaaatatgaattggagataaagcagttgatgcggggagtcctttgattcatatggaaataatatgaattagatgtatgttatactcgggttcttattaatcgaggattttactgattaatctgtgattcttatttgcatattttggagtggtttcttttcattgtgagtttaccatgtaggatttgctttctcttaaattacaatttctgatttttagggaaataattttaattagatgtatgttttactttccttattgatcaagggttttgttaatcaatttgggattctcgtaggaataatttgaataaatatctttccattatgagtctttattgattcttaaatcataccgtaaaaatgtaactatggttttgcatgaatgaatcacgattccttttttatattattattttaagaat

SEQ ID NO: 202031 - DNA, 609 bp, Cannabis indica
tttcttgaattttcatgttgccagataaattttatgtgattcagtgtgggatatttctggaccgctacctaatcttctgtgctgttgattgcagaattgttcctttagttgatagctgttagataagcatcagtatcatcttgggataaaaattgtgatgcatttattctagatgaagacaactcaggctcaggcgtggcgtttaggcatgggagacatgcagatcttgcctgggcctcgccaccggccacctatgaagaggccattatggattattgtgttggtttctatggtcagtgtcttcttaatatgtgcttacatctacccaccacatagtagtgccgcctgttatatattttcatcacgaggttgtaaggctataatttcggattggctcccacctgcgcctacaagggaatatactgacgaagagattgcagctcgtgttgtaattagagagattctgaatgcacctctgcctcctgttcaatcagaaaatcctaaagtagcatttatgttcctgacccccagttcattaccttttgagaggctttgggataaatttttccaggtattaattatttgacccaactccatctctctctctct

SEQ ID NO: 202032 - DNA, 883 bp, Cannabis indica
aattatttccactctaatcacaacgctaaaaaatatttcttaatattatattaatttattaaaagtaccataattattatatctaaaaaataagaatgtgatttctagtgcgtctaattttaattttaatgtgtgtttaaatttataatatattttttaaaaaaattgcaaaaatgtaataaatttttacttaaattataaataaaaataaaaattatttatgctactcacatttaaatttacacacaataaattaaaatgtgcttctacaattcacctttctaaaagagtcacgtgtgcaacgaatagtttgaactttgttttcggcatattaaatttttctgaattttttataattttgtcgatgtcttaaataactataatattcacaatcatgaaaaaaaaaataaactaaaaaaaaaaaaatcgattaccgaaatagataagagtacatcagtacactacttttaaaagtatgcattataatttcataaatactattaacaattaaacatgtataaatattaaataaatataaaataaacaaaaaatagtgtattttgtgtgcgctacaacgcacaacacgcgacaatataatgtaggagtgacaaaacctgtcatcgtattgagttcgtgtcaggcgtgtcaacccgttttttgacttgtgtttaattttttcaaccctaactcgacgcgtaaaaaattgtgtcgtgttcgtgtcgatccactgtaacctgttttgctaatattgaagctggagttgtagagaaaaatgatagatttagattccattagaaaacttatatacattatatatagtttgttatatatataataaaaatataaatttttaatatattttcaatttgatgttaaaaaaaaa

SEQ ID NO: 202033 - DNA, 1156 bp, Cannabis indica
atatataatatttatataactatggtggcttgttattcttttggtatatgctccaaatctttatcctcaaccctggccaaaggtgaagtaccttataactaatcttttagaatcaaaatctttgtgtctcattagattgtcgaccaatgatttcatgatatatacataatggtaaaacatagctagccaacctcaaaattcttgatccctcctcctttattttctttattctaatacattttatttactttaagcttgtagctaggaaaaaaaacttatgaaatagcttaaactacacatctcaaagtatctttcatatataaatatagagtaattttatggtggtgacatcatttttgtatctataagaagtaatgtttatattttttactcgtggaacaataattataactcaatattttttttacagatgattcaaactgatctttgagcctttcgacattacctaaaaaaattgaatttaaatattatgttctattttctttattttcgttgatgactattacacgttgttttttttttttgtcattagtcactcttttcatatatatatatatataaatcaagtttaagaattttgtgaaaaaagtgtttggtttatctgtaaatttaaattgattggatggtgaatatagaactttcttacgatgtctcaaagataagagtatttattttcaacatctttgtccaggaactcatgagtagtaagtggtgctgtagtaggtggagttgaacgaccactaactacaatgttaatatatgtgataaaggaaaagacattataaaaggtagttgtagaaagggatgactgctacctgaggaggccataattgcaagataaaattccttttgaaagaccacatttcgggcttatatacattctaaccatttttgttttcacaaaaatagcctttgtgattaaatgactaccctagaaagatatattattgagatttgaagtccatattgaaggagttgtagaactttaagtgagaaaaacaagtcacacccacgtggtttaagaatgttatagtcaaagatagaatgaaagaaagtctctataaggtgacatgttgtttaagactctcgtgggaggtctattaatggtagatacaacacaactaaaggcatgcca

SEQ ID NO: 202034 - DNA, 558 bp, Cannabis indica
gacacttaaaagataaaaatagaccaaaaaaaagtggagatcaaaacataattgaagtttggagagtttcgttcctaaaaattcacatgggattgatcgtaccaaatcttaaagttcatatagtttagctgcaaattacccatcttgatttatttactaagttttgcgcctagttttagtgtagcagtaacttaaaattgtaatttattgattaaattggtctagttgtgtataattgagaatactaataatttatgagggtcgtactgtattaaataataaataatactaatatcatgttgtaattttggggataagatgaatgaggttacatcccaaaaccaattggcaatgggaggagtagcccattcatcttatatatcacaatttatttccacacattagcaatgtgggacaaactctaatagcaaacaaggacactcttgagttgtattgaccttagaaaaaaaataaaaattaggaagtttataataatatatatttttcacatttaatttacattaataaaattagaattaaactcacttaatttgtcaa

SEQ ID NO: 202035 - DNA, 2150 bp, Cannabis indica
ccatccttagatgggacctattattttgttagaatttgaaactatccatttatcaatgacgtgttcttacgcattgaatttcttactcagtggggtaacaaatcaggtttctatcattggtgaatctattatgtgaggaattttagtctcatctctctagatgtctctcttatgtgaagtgcctcaactttctctcaaatgtttataaatggatctattatcttttcacataaaagtttgtatgattccatcatgaatcaattatctcacatagttggtcctagatttatttccaggccttctattatatatgactttatagacactagcttaagtggtttcagtacactatatcactcttaatgatatatttctagaaatgtgtgttaagaacgtccgacataccttttggtctttttgccattcactaggtctattaacagaaccactttggtatagtgtgaactacatattagtttcttaactcgtgagaaactactcttccttgagtaacacactcaaccaatagtggagattattgacgctggagaatggccaacactagctcgctagattggcaagatgaataatgagttaagtaaatattaaagagagataaaaaatttatagtagttcactctctatgtcgcaatggtaatggagttacatctactttgagtttttatttctcacgataattacaagagaattgactaaggaaatagctcaaatttctagagagagaaagtggagagagagatgctataaccttatggggacttagtagaaggttaaacatgaactagagaaactctctttttataggaaaagaggtcccattaaaatattaataaaaatacacaaaaaatatgaaaaaaaaaatcactttgagttgatcttgaccattgatgatgatcttaatggctaaaattgactcttgatgaaaatcatcaatttttagagtttgaatctcgtccgttggatcgtttttggataataggcagaaaaaattgcaactttcttaatgacaaattttggactagaaatctttaaaattgtgatatgggcgtgagacatgacttgatagatctttgaaataggttcgaaactcaagttgaattgcgtcaatcaaatcaatattgagtgagttgtcattttactgaaggttgatcaacacccaacgcccaaattgacaatccagcgcccaggttgacctcaagcgcttaggttgacatgctaacatcaacctagacactgggtaagtgaaaaacattacagacttatattttttgatgcctaaatgatatgttaacatcacttggccatttttttagatttggtgaagttgttcaccagttctcagagatattattttttggtgaaattaggtaaactcaaaattttttgattttgctaatattccaccttgttgaaagggtgaaacatcaaagtgaattttacttgtcagaattcttagctctcgtttactacgtacaaatactcagatcctcgagacagaactagaattcgataagtagaacccaatcgcaccaagacatacgtcaacatggcgttggatgcttctcgggtggcttcctagggctttttgatacttttaagaaatttgagattgcgaacgaggtctctaccccatttttgacaacttgggcattgggtccctgttttgaccctataagattttgtttgctccctaaaatcacttgtatctttgttatttttgaaaaaaaaaaagatgcatgaaacacttttctagaaaaatgactggaaatagccaagttgacatgtcaacttgggcgttgggtccagttttttttccaccaaatagttcatttaattctcaaaaacactcatatctcagttatttatgagaacaaagtatgctaggaagaattttcaaaaaactgattagaaaggcccaatgacaaatgtcaacatgggcactgggcccaacacctaagtcaacctgagcgctaggtcctagttctggctcccagatgactctgtatgtttctgaaagcacccaaatcttaactgttgacgaaaacagagaatatgcacagaagacatcttgttaattatttttggatgcgctcgaggttgacattatgtcaacctgagcgttgggtgcc

SEQ ID NO: 202036 - DNA, 2610 bp, Cannabis indica
taattcaatacgtattgacaattatattagcatttaggaagatgggaattaatatttaaatctaaagttttttttatttaatctcatgtgttaaatatatattaaatcaattaatatatatttttaaataaaatatattaaatatataaaattataaatgtattttgaaaatatataaatataattagatggccattagatgataattggatcagtttggtcggttatccattggatcggatgtccaatctaacaaccgatctgatccgattagattttcaaaatttacatttgatccgatttaataatgatcgaaaatccaattctattagatcggtttggattagatcggtcagttgtaattggattggatgactttctgcacacccttaggccgcacccctactcttgtcaacaagccagtaaaaacaaaccacccatcctctcaatctctccccctcactgagatctcaccatctcgatctatgatctttcaccctctctatctcactcctgtcgttatcctttggatctaacgaatcgcaccaaagttttcaccatgacaacaaggtctttgttcttccctggctctgacgaccacgacagcaagttctacattcgttgccaactccaacgagtttttgactattgattcctctatttgaaggccaaggcagcaccaccgactttctcagtcgaaccccacatttgcatttgaatcttgagtaatgggtttgggttttaggttttaggttttagattttgcgttatttgttgttgtgattatcattgattgaataagggattttgactattgattgtgtttagggattttcgattatgagatctttgttactgttttttttattctcaaggtggtagtcttgccaggattggagtctcgtcagggtttgggtttttgtcggtggaggtggtgttgggtttggagtgggggttagtagatggtggtttttaggggggtggtttctaggcatcatgaagaagaagaaagaaaatagaaaaaataaataatttatttagtttttttttattttgaattattttcaattaaaattatgattatgaccaattatatgttaacacgtgtcattttaaattagtaaacatatctgttagaaaaaaatactaacataattacaaatatggttaccttggagactattattgctaattttggaagttaaggacttatccacattaaattgatatttttaagtacttatactgcaatttttccaaataattaatagagatttaagaaaagaaaacataacactaatttatatatatatatatgattaattttaagaaatccccaataaaaaaagtttttagaaaaaaaataaaaaatattaaccttttgcttttgaataggtgggatatctatgccagaaatctaaattaatccacattgtaattttatttggataggtgattgaagttcacaccattcatccatgaaaatgtacttgaagaggttgttaagttgaattagatctaattacctcaaaattttagacccgtataaattgagggtttctagaagtgtctaactacaaaatatacatagaggcatgttgacgatgagaactcgtcaacaaaatattaaaaaccaaatgtaatattcaaagattttaatggaagaacaatcaaagaaaaatcttagattcttaaactctttttagaaaactacttgtttcattgatcttttttccaaaaaagttccctttacaattaccttaaagaccttttttatattgagttccctacaattttgaattttatcagatcccttagtttgagaatgtcaggtcactttcatactaggtagactagtacctcagatagtctgctatcccaggcatcctcattagcacaaaaactctcttccacttgtaccttggatggggtaaactttgtcttcattatccatacttattgtgtagtctctatcttgtttgtaattttcttgcttaaataatcctagtctcgatattttctccttacttttatttgtatgaggagaaagtaaaaggagtcgaaggaggtatgaggaggttgggcgcgtgggagctgggcacgagcaaggagagaggttgggggtgtgcaaggagagaggatgggcgcgtgcagggaggggaggctgggtgcgtacgcagggagaggaggttgggcacgtgtgtggggagaggatgctgggcgcgtgcgcgaggagaggaggctgggcgcgcggggcttcacagggggagaagaggctgggtgcgtggactgatatcatagggagatgtgatgaggggacaagaaaaaaaagtgggggcatcctttgtcccttttatttgttttgagaatcttacattattcatcccctgtatttattgtccaaaagaacattcatttattgaatttttgtagttaacacttgcccccagttaaaaagagcacttttaagtgatctttttgacttcagttgagccatcctttaggccctttgtggcgcatctcgtctggtagagtatccgacatgacttaccgaaatattgatgagatcattcaatgaggtaagtgggtcacatgttgcttctcatgtgt

SEQ ID NO: 202037 - DNA, 442 bp, Cannabis indica
aaaaaaacaatcttagaatgaaaaagtagctagcaatcctcatcccaaccgtcacagcaactagccactcaaaatattactcaagaatcttcttcagtgttactaaagaatgggatgttgctggttaagcagggaaagaaccaaactcagaaactttctaatgcatgttttcaaaaggtttgtgcagaaaatgccaaagaaaaaaatcattaaaatgatgactcattttcttctttttgactccataaaagcataggcttgtgctcaaaacatatataaacatagcgagtataaaagagtagcggattaagaggaaaaagaaggaagatgagcatgatttcaacttcatttcttgcttacacaaccaaaatcaccaaaaagccaaatccatactcaatctttcactttctcctatcttcttcagttgccaataccaaccaac

SEQ ID NO: 202038 - DNA, 1086 bp, Cannabis indica
actttgtaaagaagtatataattctttatggtagattatattgcatatccagtatatatggatatatatgattaaattagtcctcacgtgatcctctttatccttttcatgtattttattgtattctctaaacaaataaataataataataataataataataataataataataataataatgtgtactgctttatctttattgattgcgtacacttcaatttacgtacctaaactctagttaattataatactattgctatttgctacccaaccgtaaaagaaaatcaactctcacccacttactttgataaatattaaatagtatatgtagagattatattgctacataaagcaagagtatgcagatattaaaaataataatttttcttttcttttaaatattatccttgaaagtcatttattttttaggaatttgtccagtactaattaatttaaagtgttgtaatgtagtgcttctctcatattaagttgcaaataacaaataaagtgatgagatgtacctatttatattattattaatttggcgttatatgtacaatttaaaatcaaataaaataaaagtatgtattttaaaaatataattaaattaaaaattaattaataattaaaaaaattgaataaaactaaattaatagaaaaattaattacacatgtgtgttgatggatcaatagtttaaacattcacatcatcaatttatttatcagaatgactacaaaacactgtaaataatttaaaaaatatttttaatgggctaaaaaattcattgacatacataaagtttccaaaatcctaaataaccattatttaggaacagtttaataaattcttatatcttatatattaaagaagagttattttcatattaaacaattaacgtgtaaaaaaaaaaaagaaatactttattaaacaattcacatgctgtaatttagtgtcacatggttggacagttttttttttcttttttcttttttgagaaaaatcatgattggacagttaagacccaactacagaggttactaaacccagtaccaacactgatacccctctctgtctctctctct

SEQ ID NO: 202039 - DNA, 1014 bp, Cannabis indica
accgaccgatgctcagccctactcatatgtaagagtatttagggaaaaaaaatgaagataaaagtagtgattagtgaccagtctcaaatcaacctacttctgactgtccttggcattttaaagttctattttggaaaagagggctcatgttcaacgacctaaagaacaatgctttcagagaatctaccactttttaccacattgaaatagatattgctcctatatattttgctcttgacagctccatgcctttaattctcagtgaggagtcaaaaactgtagtagtgcgactgtatgaataattcagagaaagaaagaaagctaacagtaacagtttattgtcttttctagaaagtcgtgaacaaatattttataattgcagcttgctaattatttgttacattattatttatcgatggacgatctgaaattgattggagagaaatataaggaaaagtaaggagaaaatgtgttgtagtggagcagtacgtactagagactataataaagaatcaaaggcatatattaaactagtatatatatatatgatgggataaggaagaaggcaagacatatattctattcgagtgcctaatccatggttggtcctcctaataatgcttcaaaaagaagcacgtaaaatggggtccatatataatccaaaagtgactgacccatctgaaacgcattttgtagttcaccaaagaaatatgcctcttgttccttgcttgccttggactatgaataggcagctgatgcttaaccctctttattcttaactcttaacccgttttcttaattagtagaatcaataacataaaacagtgggtcaaggtggttggggccatgatgtataagttcaagtcaaggtccatgttgggtttttttgttactatttatgtatctatatatgtgtattgaaatctgcagtttatataacataaaactgatcctataaggttatcataaaagcattctaatgggggttgctattagggtgatcttagttttttc

SEQ ID NO: 202040 - DNA, 581 bp, Cannabis indica
tccgtctatccttaaaaccgaccctgattttatgggaccagttcttggttatggttgaagaggtttttaggaatattatgaattgtgtcgtaatagattggaccatatgcatataaagaatatagttcaaaggataaagattggttggaagctttatataaagctttgtaagtaaactatttgtatacacttgttttagtttgtgatcaatatacaaattcattttataaaaaacaatatatttttatatatttatataaaaatatagttctaactaatgattgattactttaacacacttatttattaatattttttttttaacaatttaacacacttattaaaactccaacaattcaggatggatttcaaagtcatcccaccagtactgatgatctggctgtgattctacatcactacaacatccactcacaaatctcttcactctctcacttatcttcgtacctccaaaagtaaatatcgactccgccatctgcaataacacacaaaattaacaattaataatcataattttctcgagaaacaaacagagaaatgttaatatattaatatatatatat

SEQ ID NO: 202041 - DNA, 941 bp, Cannabis indica
caccaaaaatatttcaatctctcatttttgattagattgccccagcaatatacactttgattgttcttttctacccaaagaattataagtcatattgacctaattgatatcatcatgactacctaaagaaaacactctcatcaaaaaccttagctcgtagcttctttccactggccggtagaatttacaacaaacaaccattgagtgcacagacaaaagcgttccgttttttgaagctcaaagactccctctcaacttttcttgaccaaaaatcacacaataatgtggttaatatggtatctattgatcaggcagccagtacttcgtctctcggtggtctgaagagggaggagaattggttagaaaagatgatgcgaatattttaatttgttcgaattggtgtaacttttgattttatgagattgattttggttaatgatattgatggacacaaaagagggggatggagtgggtaagccaatttgggcgagtaatccaccttatatttctaatgaaaatataatgacattgatggacacaaaacagtaggatggagtagaggtttattaacatggcctcctttgagcgtgaccctaatattctatcattgatcaattcctcaagttaacctgtatacaaaactaaaaaaaaaaaaaattaaggagagattagaaagaagtatttagagtgatttttttattaaaaaaaaagtaattttatagttaataaatatatatatatatatatatcaattatcatgatttttagaattaataaatagatttgggttttacaaatttatagggatattttattcaattaataattataaacataataaaaaattaaaaaaaaatgagaaaattaaggagagtagaaaaaaatatttttagagcagttttaaagtgctacatcactgcctcatacttcttctttatata

SEQ ID NO: 202042 - DNA, 676 bp, Cannabis indica
tccgccgctgagattaagacgtagcgataatgatgcctcattataacaatgagaaaaatgtttttatttatataataaggacaaaatgcttagacgatttattaaaaggaatatgatgagaagaggtcatcgacttatccataattatatatgagtaggtatattaattttttgagttgttaggttgttgtgtttatgacacattttacatgttatagctagtatttttttcttatttttttttattaatattataaatatatattgtctcattagagtagaagatataaatttaaaagataaaatattttaaagagagctaattaaatatgtttaaagcttaggtaagtcaacaatatatttagcaaagaaatatgtaattatttttacacaaaaagagaaaaacaagaaattgtaacttgtataaagactgtgcatagataattataatcaaaatttgaaaattgaaaataaatcggttaaggcttaagaataattagtatttttatcttttgaatttttgatactgatcatactccttaaaatatacagcttaataaattttttttctaaaatataatagttacataagtatatgcattccgttaggcgttaaaagttaggattttcaccttttaaactttgaataatattaaattttgcctctttttattaa

SEQ ID NO: 202043 - DNA, 2147 bp, Cannabis indica
atccaacatacatgatagtaaatagatcctgctaaaataatttccaacagctatgccacaaagaaaaagatgacttatttgtatctgttacatgagtgtgacattgaaaacttggttcttggtgagctggaccgagtttgagagatgagtagacacacttggaagggaagagggttgaaacttgtagagaccttgctcaaggttcccagccaacaagatcctctgagtagggatgtccttaacacaacaagagaaagggtgaaactcaaagaaaacattgtcatcttaagcaaattgggagacacttaggaggtttttggtgatagctggtacatgtaataaattgtgtatatgtagctgctgtgaagtgaaaggagataagagataggaattacctatactgtcaatgcttaagccaactccatttcccacaaacacttgttcattgcctgtataagggctgctgttgcaaagattggtctgatctggtgtaaggtggtgagtagccccagtgtccgtatactaattttcatcaatgactgtgtctagtccagcatacatatatagcttgcatctcagctatattggccacaggaggaaagtttgtgaaggactctgaacccatgaatgacttgtcaaatcggtaaaagcattgtttgacagtgtgccccaatttatggtatagctaacattgcacttttagacccatattgctattgggaccacggctgtaggtagggggaccacctttggaattagtattagggggaccacgattgtacattggaccacctctagccatgctttgttgatagtgacctacattattgttagcagtattgaaattactagaacttcgaccatatgagaaattatggctgttaaaacctggtggagctgctggtgcaggatagggggatcggccatagttgaatccagagtttcttgcttgagataaattggctttagctttagagacatctaggttcttgccatttttctcgattcggacagattgagccattaaaagggcttactgctcttccctggtggtgactgaggttacaaagacatcatactctggtggcaatccattgaatatggcttctatatgatcttgagtcgattgattgtgacctatggtggcaagtcgatccacaagacctttgattttcagtaggtagtcgtttaacgatccagtcatcttggtattcctgagttgagtcttgtagaggcttatgtttcctgcatttagagctgtgtaatatacagtcagttgctcccagatctctactgtagtttcacatcctaccattctgtttgttgtcttctccgacatcaatgagaggagccatgaaatcagtagattatcttgctattctcagtcttcatactccggattgataatgttgtttctttgatctgcagcagtcggaaattttggtggcgctcgagtgtgatccagatatttttgaagtctactgcctttaatggaagccaaaacttggtgtttccatgggagatagttgtcttcatctagtttgatggatagagagtgattgaatgaaacagggtatgatttcggtagagatacttgttgattgttgtttagttgagcattgttcaatcttgatgctgcaccattagctgtagtaggaatctccattaacaaacgagtctagctctgataccatatgataatgcaatcaagaaaggaagaagaagataacagaagagaatgactgtcttatacaatgatcaaactgtacaaggcttatatacatagcaagtatacagaaaacagaacacaacaacttgtaacagaatacagtaaagagagtcatgacagttggagttagttacaactaactaacagaacaaactacttatcatccttgacactgagataaaaaatttgtcattgttataagcttctagaacaccctctaatacatagacttgtgcactaaaattttttaatacccgaaccatgtaaaaattttattcttctttatttctgaagttctcaacattattatttcttttatatttatttagttgcagaaaaattacggtcaacagataaaatacatttttatccatctattagtaaagcaagagagacgttgcaccaatacaactttgat

SEQ ID NO: 202044 - DNA, 1711 bp, Cannabis indica
tagtagtggtggtagtgtaattactgttgttctctatctctaccatcatcatattaaggatatataagaggggtgacatccaatccaatctaattctttttttcccatctaattcaatctcatcaataattagatttcaaaaatcatcattcgatcaaatccaattaaacctcaaaatccaattcaatccaatcaaattagtaattagattgcattaattttttaattagatatccaattacacacttaaattttaatattaacttaaaaatataaaaaaataagtagaaattaaatatcaccttttatttaagtttcatacttcatacatatactatcgttacaaattaatgtagccaaaaattttaaataattaaacaacaacatttttaagtaataaaataaaacaaaacatcatgaaaataaatatacaaaataaataagtgttacaaacatttcttcctggtatactttcggtgcagctagctgaggcagcagcaattcggctggggcttttattggctcacaaatagtcttttcctcagattattattaattctgactgtttgagagttatcaatagtttgcttactgctacagatatctcttcggattggggcatgatgattaaggaaattttaactcttaagcagcattttatttctgtaaagttttcttatgttcctagagtttgtaatgttgtagcaaatgccttagccatttggagtcaaacgactcattcttcttgtatttggacagattttttgccctcttgtgctgctgtccctttattggcagataagcctagtgtggctgcttaataatatgattcattttaaaaaaaaaaaaataagtgttacaaattcaacgcacaaaaaaaatctaataaaaatctaataaacatttatatatatatatatatattatttttcaatatttattatataaataattttttaacatatataaatgtaattggattggatcggtttttaattaaattttaaaattgacatccaataactaatccaatctaattagattcaactttttgcattcaatttaatctaattgtaattggatattcaactttttgtaattagattgaattagatcaatttaattcaattaaattagattggatgatgtccaccctaacatgtagacacttattctattatagatgttcttcatgaagtgtcttgagttgaaaaattataaatagatttgcatatcatttacattttatgtgctataatagtaacatgatattccaataagaaaaacaaatctcatttacttcaaaaaacgacaatattagagacatacattaattgaacaaaatggtaaaggtttttaaaaggtcataataatctaaagacagatatttattatagggtatattatatataagaatagataggggccctgccctggttagtggttagaaaatggaacccatattggggtagggactggaagggtgcaatacaatgcaattcaaatttgatattgagaccataacaaagaagagtcattgggggaacacataattcgaaagaagccagatttggtcagaaactcttttgttcatttctcatttctcatttgcacctcataaaccctccactcttacccactctcatatccttcattcagcaattattgattcaaacaacttttatttgtaaccaaaaaaagcattaaaaaa

SEQ ID NO: 202045 - DNA, 735 bp, Cannabis indica
tcagatttgcagtggatgattccccaattcgagtgttcaaaaacttatcatcaatgggaatcgcatacccatatactcagccaatgacattatactcaaccctaaccaccttcaacgacttagttaccggcttcagcggcggcggcggcggcttcctccaaacagactggagccaagctccattcaacgcctcataccgaaacttcgatgacttacagtcatgtgtttggaataataactcttcttcttcttcttcttgcaataacaacaatgccacgtcatcaccaccaccatggctttctgatcagcttgactcggccacccaagaacggcttagatggattcagaataattatatgatttataattactgttatgaccttcaacggtttcctgatggtctaccacctgaatgcgacgtcgtttaacttaatgatttgtaatttcattatatttattattacaaaagaaaaaaatattataaatgtgttttaaatgctttcacgttctacaaaaaaatatagaataatgaaaaaaaatatatatataattatttgaattgatggatttttatagtattaatggattaaattagttccatggaaattaattataaaaaatgttctgtttataaataatttggaacgaaataatattataatttttatggaaaaaatggtaagacatgtaaaaatggcaatggacttattaagacacaaagatgggcatgtaatc

SEQ ID NO: 202046 - DNA, 790 bp, Cannabis indica
aaaaaaaaaaaaacaaaaataactagtgaatctaacagcaaatatattattgaaatgaatatgctcatgtgtagagcttacgatgtgtaataaatggttggtgcctttttcttcttgttctttttatttgcaggagactctgcaggtcctgactcttctgattctatcccaccttatatacattacacacacacatatatacatatatatatatatatcaaagacaaaataacgaaaagagaaagtaatttaaaagaatttacgaattcaggattttcttacttgaaggttcataatcgggaacaaatccaccgccatgagccagaggatcagccatagcttgggggtcgggtttcgactcattctgatacttgagcttacaactttgctgccaagaaagcgtggagcaaagaagagaaagagatttaccagttccagtaggagattcgaggagcgcgtggcaatggccttccctctgtgcccgatcgagagtggagatgaccctacccatgaaggcaagctgtgttccgtatggcttgtatggaaactcgaccggaactcctccgatgtggtacacattcttggctgctttggggttagggtttgctgtggacggaatcgcagtgaccattttggggtaatttccggcgggaaaactttcagaaataataaggagagttgtttccttttaattagttctggaaacggcgggaaagaaaatgaatttcaggttaataaaattcaataataatttaaagatgtttatgataaaatagtttacatttttttt

SEQ ID NO: 202047 - DNA, 994 bp, Cannabis indica
aataacattgaattttgtggaacccaattcatatacgaaaagtaattcaatatatattatatacaaataaaaattccaattaccttatgaaaagaaaggtttttgccaaaatcagcagcgagttctttaactcgttcaatagcgatttgagaagcgttatcaagattatcaacaacaacagtattaaacccaccaagcaaaagttgaagaacagtatgactaccgatgtagccagctccaccagtaacaagtatactcttcttcgccattaaagatacaaactttcgagttctgagaagttgtcgttatcaaaaaatcgttttctcggatcgcaacaaccaaagattgaagcagaggagtatttatagcgattggtatcagaattatgggtcttgtgaatgaacacgacgaagacgaagaaagaatatttataattaaaaattttaaaaaaaaatcctaaaaattaaacaaataaataaaaaatgaataaataaaaaattctttttttaaaaaacaagaaaaaaagttataggaaagagaagtaaccacgtgaggcaacgtggcgcgattttgtgagctgtgatttgaatggacttggacacgtggcgctattttgtgagctgtgatttgaattttggcgaatgacttggacacggtagcatctccattatagattccaccgggtgaagggatgaaattactaaaatgcccttgttctggttcttgcttgaattgaatttgcaatgccctttgttgtctttttcaccgcctataatataatggaaccttctcaccgcaacttttggaatttcggttaaaccagtcaacttcttataacttattaagactatttcttaattagtttaaactaattacttggttaatgttatcattggcttttttttttctaaattttaagttttttttccttaaaaaaaacgtaataatttttttcctttaaaaaacataataatttttttttaaaaaaaagttt

SEQ ID NO: 202048 - DNA, 932 bp, Cannabis indica
tccctcccccccccccctcccccctctctctctcatattttcaagtcttatagtaatgagatattgaggaaaaagattcaggttcagtagttgttattactctataacaaaaaggaataagaattagattactgaacagaatgagatattatattctactgccattagtgtaagaaatcctaaactattatgtgttatttgatcattttatgtattgcatattttaggatgttagattattatttaaataatcaaaatacatgctagcaaattaagatcttggtaaaataagtttcaacaatttcctccaataccaactcacatcagctttagcttcatgaggacatacatctcgaccatttaagtagacacaattaaaccattttacccatagaacatcttatttcatcagcaacaacatttttccatctctctcccatataccaatttcattcaacatggcatccgcactccgtttcatgtgaatcagcagagccggtcttatgaaggggtcaacctttttaaaaataatatgccttgaagttatgatgggattgtataagtatttcgtggtaaaggccacaattgcttttagtgattacttatcgagatttttagaaattgatttattatatgtgaaagttaaagaaattgatcaaagacaaagaaaataacatcgtggatttttacatggttgaggcattaacaagcattagtccacgagtcaatattattactttaaagctgaaaaagccttaagttttacaagaatgtctaaactctaaaccttgcctgagcaattgaggaatgagtttctaacctttgcatgaagggttcttcatatgtgttagggttcttgctcattagcctttgcccactgatggggtgaattcaaagtaacatattgacatgggcttatctggtgaagcccg

SEQ ID NO: 202049 - DNA, 647 bp, Cannabis indica
aaggttgtctcaaggtgttgagatgcataggatgaaatttaaaatgaggctttttctttttacaaaaatttaaaataaatattgtttaaattttgatactatatcgattttaactcttttatcttcatataataaataatttttttcgtcacgtaagctaactcgataatgtaatatttaattactataacatctctattaaagtgctatatattttagtattttcgtaaaaataataatgataaataaataaatagtatgtcaaaattatgtcaattttgtttacatgtttataccttgaaatgctaatttactcttagaataatttcatataaatatatatattaattactaaatataatatttgctctaaaatattacatttttatactaaataaataaataaataaaacaaaccttacataactaaaatttaaactaatttctaactatgtatgtatgtaaaatatttgaatttttaaaatgatcaaaaagtgactgaaatttgaaatgagacttttatttttacaataatttaaaataaatattatgtaaattttaactacaatatcgatcttaattctttattttctatataataaataattttttttgtcctacgcaagctaactcaataatgtaatatt

SEQ ID NO: 202050 - DNA, 1516 bp, Cannabis indica
attacaaattaattaattaaaatagctctgttcatgcatgtatgtaactccatcgtcaaatatattaatatatattatcgtttgtattaaaaccaaaagttaaaactagagcagaccctggtttctgagcctatgctagttaaatatggtacattctcatattataacttagtttattttataaaagaaaggaaacagacaaaagtttcatgcattatttgttaaataaggtttatgcatgtaacattggttcttttcttttttcttatttttttggctggttgttgaagagaggatatttcttggaaaatgagtacataatatttttcttgttgtaagaatctcttttatttttacccttgtaatatttgtactctgctcaacatatataatatacatatagtaagtatatagtacatacgtacgtaaaataaaatatgttaataaaatttaatcacgttgtcacactaagaaataattaattcacctaaaattaccggccgatattgatgattattatattgtttgttacaaaaatcaaatcaaataaaatggtcttagtgatctgctagcttgggattaattaatgacgatcgattaggtagtgcaataaattttagagaaaatgtttaatttgtttttttttcttacagcaaaagttaaaaaacaacttgattttagcttgaaactgaagtttgtgccaccttgtaaagaaaaggaagtaatcatgtgcttcttaactaaatggttattaagtcaaacacacttttaaacagtactacctaagagatatatatatatatatatatataaatttattgaaataaatattatatatatcccacatgagatgattcccttccctacaaggatccaaataacacagcttcatattctgatttaatttgtccatggcaaaacatttcatgagaaacaacccaaaatacatcaaacgcatatatcatattttaatttcattttttttttacagaagacgattcacataatattacatattttcatttgtcatcaaatccatattttgatttcctgacttccatggtggaagtactataataacacatgtatgttatatagtgtcctattttttcttccaaataataatctagatttaattttttttgaattcaaaatcaaataaactcaaatcaacataataatctccattaatgtgtatttaaacccaggaaacaaagcaatgtatttcccataattaataaagtaatgaattataggttcatgagcatgcataaaaataaaatcaataacagttataggaacatgtgaatttattaacaattgatatattttttccgattacaaatgcctccaccaacctttacttatgtagtattaatatttatgttaatgacatgagtgaatagatactttgtagaaacatgtgattctaatcaattagaaatgacctccaaaacacaaacaagtaaatctaatatacgtgaaaattaagaaatcgtgttcatagcagtgtgtg

SEQ ID NO: 202051 - DNA, 1239 bp, Cannabis indica
gtttttttttgagcaaacatcagtagcttttaattgctctaccatgtaattaacaaaaaaacactcatttttttttaaataaataataacataaaataaaataaaaattactagcatcagtagtagcgaaatctactttaaatgatatatagacatagtgcacagcgcgtgattatcacgctcggagtaaaaatattgagatagtatggtatatatgaggtgaagatgcacacataccagtcgtagacagttggagagttgggttcaggcttgtcaaagagggtgccgcctaggcctttggtagcaaggttgctgcctgggttaaacacgctcctccacacgttgtctttgctacgcgccaacgacgccgaaagaggagtcgttggtgtgactggtgtcactggactaacgggcatcgacagtgatctctggtacaccatattactcgtttccccatcgccctctataatatatatatacatatgaacatacaaaagttaattattacaacatatataaaattataagtatggatctataataatataaatggtacgtacggacctttgataatcatcaagggcgatggcctggtggtgatcttcctgagtttaccaagcccacgctcaggtgaaggcccggcaacgacgtcgtcccacagtttatctagcagaaccatattttccgatgatatttctatgagtctctcacctaactctctgttggtcttttcgaaatggggttttcaccctatgacttcaaaggttatatatagaggtagagcaagtcatcttatacggccactaaaatatctcctttagtttttacctcttttttgttttcttcgaagcgtctactcttttgcttccaagtgtacagttactgtataataatgtttttaatgcaataatgctcggagtcatcttaattacactcccattttcttttattttatataaaatatacagttttaattatactgactttttttgttttcaaaaaaattagtaatttaaaaaaattcttcctatcaaagaaattgttagtattgctggctggtaatatcttaactaatttaggcgtgttagcgtgatttttaatatattgtgcagttcgttgctaatcaatgatattaatgaaaaacgtgattaattaaaatttgcttatttaattagaaatttaaagtaatacatttataaaatttcgggatcccgtttacaaaatgcatttacataaatt

SEQ ID NO: 202052 - DNA, 672 bp, Cannabis indica
cttcatgctatgcaaaaagacttttagccacataactctaattctgtttctggacaaggctagtttcaagaaattaatgtgcaccgcaagtttttattgattcatttttatttatgtaagatgtgaatatatatgcaataatcatttgtcaattggttatacaaattcatgttcaccctgacatagtggaaaatagaaacttttagaacaaaattaacgcattttatttaattctaaagggaatatgatctggacaaatgccataggcaaacatgatatatgttaaagagtagcaagagaaaaagtgatgcaaacttcattcatgggaaactaaattgcgataactcttaacattgctcaaagaacaattacaaatgacttacaacacaggaggaaatgtggaaaaaatgcaatgctaatcgtataatttaatagaagaaaaaaaaaatccaatcagtaatcacctttgtttcattggccgcttcgcattgtatacagaaatccaatgggttgctggactacctaatcgtactttcttctttggttgctcgtcttcttctatattaataggtgtccttcctcgttttttgccccatctatttttaaaaagactaaagcttcaaggaatagaacataaaacaaacaaaacagattaaatatattttgattacc

SEQ ID NO: 202053 - DNA, 687 bp, Cannabis indica
ccaaatacaattttcactcaaattctgcctcctaatttcgttcttagtcctaacactaattaaatgacatgcctaatctgatgaagaagaaatatatacaaacaattaaatattaaaggcatcaagttaaacatatttctcatttcaaaatatctccacaagtaggataagagagcaagagttaaacaagattgatcaagctaatacataaatattcaaaccacataaacaacataaaacttgtttgacagtacaatcatagagaaaagcttattaccgcatccacagaggcctcagctggtcctttaaagtaaccgatagatccatcaatgagtctcctgtaaccttgctctggagcaatcaaatgaggttgataaccatcagcctctgaaacaactctctggacatttttagttgagagatgtcgatcaaaggggagttttttcaaagcagccggtaactgatgatcaaaaactccatatattcgatctccaccaggtcgcctgaagtattatggcacagttagtttgacatatcaaccagttttaattccaattgctatgtgcattatggaaggactgccttgaaaagaagttatatccaattagttaattttcatttactcaagtacaaacgttttatcttaaattttaaggttattgtcggacagttgcattggaaccattt

SEQ ID NO: 202054 - DNA, 948 bp, Cannabis indica
atatatatatatattcttttgttattttacaatatatatttagtcagaaattaattaatgttaaaccttttactagagccaaatgattatatacttgaattcataattattattatccgaatatgaaacaaatatttgatatgactgaatctgtcgaatggccatgtgtaatatctattatcattgttttatttgcaatattaaaattttcaatagctgagttgtaaagaataattctgtcgttgaattaacaaaattgcattaattattatttttatgacaacgaatcaaaaggccacattgcccatcactagaaatgttacatgggttttctagaatgggcccacaataaaaggaaatgatcatttcgccccttctagtaggcccaaataagtattcatttcagacctacaaaggggcccaaatgggtatttcaattagagaaaattacctacaaatacgtattttctaaaaaatttataaaaatagacttcaatgttttaatgttgtataaagtaccgaatttttttaataaattgcttatgcgcgtataccgaaaacaaattttcctgacattaacttcactctccacttcactaattattttacttatttttgtctttttgtcaatgtattacttcactcttttaggtttttttttataatgacattcagtttttttttttgaaattcgatataaattttttaaacttcacgagcaagagctaaaaattatatccttgtaatttatttttttaattaaatattgtgatatgcaataaaaaatagtttttttttctttttattcaattaaccaaattttaaaaccaacaaatcatttgatattaagtgattactaaaaagtattttattatgtatatattaaaaaaattcattagtaattctaaataaatcaattttatcgaaccatttaaataggttttataa

SEQ ID NO: 202055 - DNA, 609 bp, Cannabis indica
ttttttatttgtatattatttttcatattattttaactattttattgttgtttagttttgatgttatttcattatttcatgtagtttttttgtatttttatagaatatcataaaaatataaaaaaaacactttgatcatataaaaaattatcctttcttgtatttcatgtatttttcttgtattttttatattttttaaaaatagaattttattaaaaaattaaatcatctaatatcatagatataaatttaacaaaaacatcatttttattaaaaactcattatgaaaaagaacataaaattttaacaaaattacaagctaccattaatagaaggatatataaaacaataaggagaataatatatgttttgtgtggatatattataatgtatttgtttgaagcatatccttactacaagtggaaataagtgagtcataaattcacaatcataatatatatatatttattaataataaaaatatataatatactcctaaaattatctcatctaccttggacggattttataattccgcatataatatcccaaccattttggaatggtcaatttttttaattaaaaattattattattattatttaaaaa

SEQ ID NO: 202056 - DNA, 938 bp, Cannabis indica
ctacttcttccctttaccagccttcgaagaattgttctgcttctcatcctcattgtttatatttttgtcatttttctttgaccattggcaaacaagagggcagcaaggcgagtgcggtaaactttaatgtcaaagtcattagggatatctttgccatggatgaagaactctgcaaaagcaacaacaaatgcgccacaatcactgtttgacaaaaatagaaaaacacaacagttaatcaattattatgcaacacacaaaaaaaaaaaccaaaaaggaacaacacaaagaaattcacttttttcgctgaattagaagactagcgatctccaccactattagtgaagctttcaaattagaacccaaatcaagaacattggacctattcttccaaaatccaagaagatcaaataataatgggagcacaataaaatacgacttcattgtattccttccagcagcattcatttcggtagttctcaaggaattagaaagaaatataagcccctcgttcaaatccagacgcccaaacacccaatggatctctttcctaagatttacattgaacaaaatatagttggcttcataccaaggcttagaacaagaaatttataaacttttgatataatgggctattgggtgagcaacatgatatgaggcatcttcctttttaatgacttcgccttgtagaatttttggtataaagactggatagaatcatcaaaaggcagtctgttatagcgaaattctcaattacagcagaagaatactttcttcctttttctaaaataatagaaaatagtattcacgtgttgaaacaatacaaattaaaaaaatagtaagaacatggacacacattccaagatcatcaaaacaaatgtaaaattgaaaaataatcaaccaataactatataaaaaataaaaaatgtacaaatagattt

SEQ ID NO: 202057 - DNA, 669 bp, Cannabis indica
atggccttcgcccagatggccataccttaagtactctgcttcatgggctttgtatggaaggctccatggttgaagccctggagttgttccacagaatcttagacaaggaactcccatgtgatgagtttgtttatggggtcatcattaatgggctttgtagagccggagaaactagggaggcatttaaggtgcttaagcaaatttaccaccatcccaaactcaatcccactcttgaatgtttcaatcccatcattgataatctttgtaaagaagggaatgtggttaaagccagaagcctgtttcaggaaatgatcagttgtggtctgacaccagatgttgtagcttataattcgttgattaatggattatgcaaatttggtgattgggttgaagccaatggactcctcacaaacatgattggttctggaatttcaccagatgtatatacttatggtatagtgattgattctctttgcaaagaagagaaaattcagaaagcaatttcattgtatgaatctatgactaaagaaggtgtagaacctaatgttgtcatatataattctctcattactgccctttctaagaaaggaaaaacaaaggaagcatttgccctcatgggaaaaatgactaatagaggtctaaagcctaatgtctttaattacagttctt

SEQ ID NO: 202058 - DNA, 628 bp, Cannabis indica
ttaattgttttaatttgttgttggagacataacaaaataatgttattgctagttatgtgaaaatagtttatattttaaaatattcaaaaaaatcatcaatccaaaataacttaatcaattcgtattatgacaggttagataggttctaaaactgcagttagtgtagattggattagataattacctcctctttgtttaactttgttggacaataaaatagttgtataagattatgaatgaaccataaaatttcttattgttttgcaaaaagtcgttatgatttttttttattagtaaaagactatagttgcagtgtaaattcaatattgttattttcctaattttagcatgaaaatttttgcttatttaacatttcggatgttaatttggcaattttccccacaattcttcctttaataaataaataaatacataacaatagtttaatctaatctatcgaccgagaaaataagagccgacagcatagccaaactatcgacatgctttctgttcaagattttatcaaaatacttacgaaaaatcagcgagttattagctgcgctattgacaaaaagtttgtgttaagaacttcaatataatattagttaagttaattaagatttttgct

SEQ ID NO: 202059 - DNA, 749 bp, Cannabis indica
gacatttgttagctctcccactactattgaccacacagaagagaatcaaatgcttgaaccaacacaacttttcctccttgaaaaggtaactttttcatataagatatattacataatctatgtaattatgcatcttatagtgtcatcaataataatgcattgttttatttttcagattgcatttcccaacttaaaagtgttagttgttgataattgtaacaatgtgaagtatctgttatcatctgccatgactcggagtcttttacaacttgagcttttaaaggtggttgaatgtaagatcatggaagagataatagtagtgagtagtgttgatgatcaagaatgttcatcacaaggaagcaaaacaataataacatttgaaaaacttgaatatcttgggctttggagtcttccaaacattgtaaagttttatggaggagatcgcattgaatgtccattattgtctagactacaaatcatggagtgtcctaaactaaaggaatttatgggtggttctagtattattggtgaagaaatggatatggtgggttgcctaaacaaagtctcttcagacacaacaaggtactagtattttatatgatgatgcttcttttttgcaaaaattaaataattgaacttctaatccttttgttttatttgtgttgtaggtaattttcctatggtaaaggattaaggcagactggagtgaaggaaataaggagatatttgagatgagtaattcaataata

SEQ ID NO: 202060 - DNA, 983 bp, Cannabis indica
gatgcttcaccaagcattataggcaacttaatcattcctttaactcaattgtgaatccaaggaacccatagatgtttgaggttactggctttaaatccttctcgtatagttcccatctactattaaatgcctgtagattcaaaaggttgacagaactaccattacccacgataacacgatgtacattatcacctccaatatttgtgactattactaatgcatctgtgtgggggtggtgcacccatctcgtatcactttccatgaaagtgatatcatcgcactcctttttgaacaatttcattggtctgtcacttaagttgttcacatttggcaatggcttctccttggattcctttgcatatcatcttgagctttcttcaagtccccaccaacatggggtctaccaatgatggttaaaatgttgtgaggtgccctaaagccacttgcctcttttatgttatttgctccagtcgcttggggattttcctctccgtccttcttatattgactgaaatatcctcagcgaatcaactcttcaaactcatcctacaaaaaccagcatttgagggtagtatggccaatatctttgtgatacttacagtatttttgcgagtctcttttggatgtagttgcccctaattggagctaatcttctaaagacgcctttatgttcttcaatagcatatatgtggtcgcgaggaacattcaactatgtacaattatcaaattgagggcttcccttgcactttggtgaactttccttcctatttggggactttgcagttttaggcttcggcgtctcgttgagctacgacttgggctgcgtcctctcaagcttttgcatcgcaaactccttgatcgcgccctagaaactagagaccattattttctttggcgttctcgaggtctgccatttagttttcaattcttttatgggcttatgccatggcaaagaacttgctaaacgtatcaggatgtcgtgc

SEQ ID NO: 202061 - DNA, 684 bp, Cannabis indica
attttttttctacctaggtatatgttattataagaaacaaaattaagacaaaaaataactaataattaagaattactcattataatagaattaattaggaattaattaatagaaaatatgagtgaataatttagatttatttgggctattaacaattttatatatttaatcagtaaactaagccttagattatgattttcataatagttaaaaacaaattgttacctataatttcttttttccaatcactattaaaggaggattttatagacatgcacattatattttaaaaatacatacagaatcaaattatggcagctttcatttaaaaaaaaatcatactatagtcttaattgtcatataaattggataataaaacggtagcaatatcaatgaatatgtacagtttcatattctcgcattttgaatatttattaatgttcttctcaaaaaaaaaaaaataaatacaattattaatgcataaattggatttttttttcttttgtatttgaagttaaacctttttattactactaatatttaataaataatatagttttatttaaaaaaataaaataatattgttaaaaaattaattaatataatttactggcgtgttatttttcattcccacacgcaatcgttattccattaaaaaaaaaataagtaggtttgtaaaaagtt

SEQ ID NO: 202062 - DNA, 1688 bp, Cannabis indica
tatagtttttttattgttttcgtgctacttttataaattactgtaaaattattttagacgtaaaaatatataaaaaaaaaaaatctttgaacggaaaaatgtaaaaatttcacaaaaaataatgttttatgtaaatattcatttcttttttctcatcaattttccatttactctttttattcttctttattattttatttatttattattaatttttttaactcatataccttatttcttttttattttccatcatttttattttatttcttcttatttttcttttcttctactttttatttcttcttatttttcttttcttctactttttatttcactaattttttactttactttatttttatcttagtatttttctaatttttttttatgtttttttacttattatttatattatatatatatatattaatatttcttcatatattttgcttacttcattatatctcttttctttttcttccatttcctatatctattgttttttttttttttttcattttttttcttcataatttattcttttattttctattttttcattcgaatttttgcacttattttatttattttccacttttcaaatatgtatatataaaattacataattgaatttgaagtactcaaaatgatagggtagagagagacccaaactattagagaggatttagttaatcctttggaaaaaccacattagctatatccaccacgaaaatacaaaactttaatctttcaccaaacattataacatccatttgatcaatatatcatatatacattataaaagtccaaacataaaattttttttagtagtgaattagtatcacttgctttgatcaatactaactaacatcgaccttaagctcatgagattcaacaccgatctttgagctggcttttaaggagttttttttcttcttcaccatgaaagagagaaaaacttcgttgcacgcctcttaagaaatgtagaagatgccgatagagacctctggcgatattttattatcagaacaacatttagtttatattttttaaaatttttattttaaattacacatttacacatcacatcaaccaccaaatatctagttcaatattttgagcactatgaataattcaagacatgttttgtttcacgaaaaacttcaaagagaattaatttgagtcgaaaaatccttaatagtcatatatttattaccttcacaacccttattcacacaattgagaatttgagatgcatgatcgagaaatagaacgattttgaataaattagtttaggagaatatatataatattagggataattataaaaagtactattttttaaaaaaatttatatttttacgttgatttttttatatatttttacataaaaaaataataaaaaactacacgaaattaacaggaaataacatccaaacaacgacaaaaaataacatacaaataataaaaactcaataaattaacaagagtataacataaaaatacatcaaaagacagtatcttccataaataaaatacataaaaaatacgtaaaaaatatttaaaaattaccgtgtaaagtcgtattttttatattttttttttttgagttttgtgttttgttgttttttttaaatttttaatttccttactattatatatatatatatatatatattaagtta

SEQ ID NO: 202063 - DNA, 698 bp, Cannabis indica
tttcaatcagtccaggaattttcatttatgtacctatagaatcgtgggtagtaaatacaactttccttttatagaaaaggaaattttagctccggttttttcttcaagaaatctgatttaagaaaataggaaactcacacaagatcagaatatacagctggttagataagaaataattgagtaaccaaacttaccatttttacctcaatttctataaataggaaagctagacaactttcctttcaaatttgaatacacaaaataagaaaaccattttaaatactccagctaaaaaataataataaataagaaaatatttttatcaattaataaaaatgtaattaacaaataatatcatcacttacatcattcttttgagtatatgccctacattctatatattatatttaatgtcacatacttcacacaataatgataatcaatacaagttgacttaggagagagtacaagtatataaattacaatttccaacttcaataatttatttgtaataacaacttatacccatcaatatgcctccataatacatttacacaattacatattgaccataaccctatatatcataacacatccaaatatttcatcatcaattaatatcttatcatataacacatgcatatgtatatcaatatcagtatatgtcatgatcaatatctatatctataaatcataac

SEQ ID NO: 202064 - DNA, 663 bp, Cannabis indica
tctctctctctctctctcatccggagacagccgcccaaccacgagcctccatgagcaccaccgtgaccctgtccctctccttcgcgacgaactgagctccgtctgaaccaaactctcatatctcagactcacgaattcagatctattcatcatttcttttatatttctatattttttttgttcattgattttcttatttagtattttgtttggttttattatggatgtgagattatttttgcttttttatttttgttttatggatctgcatctggagttggatctgagatgatttggttttgattggttttgtggttgattgaaatctaataaatgcaaaggcggtagtggtgcggttgcgatggtgtgggtagcggtgttttcatggtgggggttggcaacagcgacggtggtgttgcagtggtagttttggtggtggtgacagtttaaaactgtcacttattataatataggcaacgattttaaatagtcacctatagtataggcaactattttaaataatcaactatcttgctcagtatccccgatgattatgcacagttggaaaaaagtttgcctgaaagttttctaccattgtctattcaacccaatttttctgacagtctaataggcgtcggtcttagaaaacccaatttttttttt

SEQ ID NO: 202065 - DNA, 843 bp, Cannabis indica
aacgaatgcagttcatccaattagagcagagctgagtaaacgttctgatatgagatcagcgattcgaatctctttgttgattggtgtcatcatttacttcgcgatcgggttcttcgggtaccttctgtttggggactcaatcatggcggacatcttggtcaacttcgaccagaattctgataccccaattgggcaattgctaaacgatgtcgttcggttgagctatgcgattcacctcttgctggtgtttcccattatgaatttcagtttgagggtcaatatagacgaactactcttcccaaataagctgaatttagcatcggacacacccagattcgtgtctttgacactgattttgctctctcttacgtacacagtggccatagctataccaaatatatggtattttttccagttcatgggatcaaccactgttgttttcacctcattcattttccctggtgctataattctaaggtacgtataagaaatccatccctaatattatctttatttttattaatttataacttcattattaatactttagttttttgtattttttttttcttttcaatcacatttggccattaatgatcaattcagtaattgagttttgttagctttggccatttcttttatggtttttggatattttagtgttaattaatcaagtaatgtatctgtttatgggtcagggatgtgcctggaatatcaacaagaagggataaaattgtagccattctcgtaattttattggcaattatgactagtacgattgcaaatatctactaatctgttcagttcatcaaagaactgaatcccattgattgttcatacccc

SEQ ID NO: 202066 - DNA, 1445 bp, Cannabis indica
gcccctgtcacttcaagatactcttcatgtgactctcttatgtcagagtattttgggtacaatacatataaaagaggtatatttcaattaaatataaaattaaaagtaaatttgattaattgattaataaaagtggtgtttttcaacttaccccgtcattatcattgtgtttaataaaaaaagcccttttacattctcattctcattgggctacttacacttgtacacttccaccaaacacctttgtatttccttttttttttttcatagaaaatgaaatatcaaatactctggtcttacttttcaaaaagaaaagcacttgtcattctgttgattgatttacatggcataaagaatgttgtattattgttctggaaataataggtagagcgaagaggagttgcatttcataacttggaatttcctgtaaatcttaagatggggtatatatacttaacttctacataaattcttaactttttaattttttttttttttgttgtatttactatatattttttatttgcatatataattttgtacatataaaaaagagttcttttatcttctttttagccgccaaactagctttatattatttacttgtcttatcatgaagatatagcctgggtcgttagaataaagttgaactaggtaagtattgagactcagaagaatacagatcacagaacagatgatatgcatgcacaacgatcaatattcgatatctcagtcaaacattacaattacatcataaataaatttactgtttattagttttattgggagaagactttactagacaatgtacagtatagtgcagattatgtcaactccaataacatatgcaaaagttgaaattcttcttcaaaattaactcaactataattaattaggttatttactatgtcctaattatttatgccaaaattttggcttctaacatgtcaattgatttccctaaaatttttattttctgcatattattgatcaaaagaaaaaaaaagagttgagttaattattaaatggtgattgttgttcagggacaagaagaaaacatttggaaggtagaaaatagaagcagtggcattttgtctccctttggaaatgtactatatccaataaaaataataataatactatattacaaataattccaaacaaacctgggcacaaaatagaggcattcgctggctgttattaagattcaaagtaccactttcctactactgttactactactatacttcatcatcagatctatatacaattcatgataataactcatcacttttttattactgtaattatatatataaatatatttttctttcttgggaaatggtatattaaaaaagaaaactctcaccttagtcagctctgctggagcagtagaagatatatagttaggtcatcaaattcactcatttaaaaatttctattaa

SEQ ID NO: 202067 - DNA, 1200 bp, Cannabis indica
gttaaattttaattaaagtgaataaagatatgtacatattaataggtaaaatactaagaaagatagttaaacatcataaatgatgacatattgtcattagagcattttaatatcgactctcacagattttgatttagtaaataatatgagaaactgttaaaccaattataaattaccatatctgtaagtattaggcatcttaaggtgcacataataatattctattagtaataataaataaataagacaaaaactaattgtacaaaatattatttataaaaaaatcaattacaataaaaaaaaaagaaaaaaataagatacataaaaaaacacaaaatgacatattgtcaaatctatttctatataaaaaatttaatataatatttgttaggatgcaaaattcatatcatcataaatctaaaattttattatttacttttatgtcacttttattattttattagtatatttagttatagcatttattatgaaatatttatattctactcttattattttacattaaaaaattaatgataaaattattattttttatacttgtaataaaaatattaaattttgcatcaagttttgctgtttactgaaattttcaaaaactaattaattagagcttaagtatgatataaaataataaataatacacacataagtttttacgtggttcagtctgttgtattagtcttacaagcgtgtgttgaatttcacaagtgtttacagtatgaacataaactctctattcctttcattcctcttgaagaagaagaagaagctcatgggaattttaacagaggttctctaggttaaaacatttccatcccatgtacatgaaaagaagggacatttataggaggcttcttgattaacatcccctcagggcgaaccctactataggatatccgactgtcgatttggtaggtggccactctatcgtgcggtgtatagaggtaatgactagtattatctggacttacaatacatatcatccaaaggtctttcctttaagaatcaccctcttgaatgtttgttgggcaatagacaagtacagtggtaggcatgcatcgtgctatggcctgacaagggggacaaaaactggcattatacaagaaaaagtatcgtcgtcactttagtgtctgacaagtgtaggagatgaccttctgtgacactgcatgggagtaaaac

SEQ ID NO: 202068 - DNA, 780 bp, Cannabis indica
ggaaatcgtggggagcaatttttggagaaaaaattggtttgatcatggagaaatagttcaaaaagaaactaaaatgaaaaattaaaaattaaaatgaaaactcaagataaaatagaggacatgtatataaaagattggaaaaaatagttgaagtgtcattgaagtataatgacatcatcatagaaggtttatgtatgtgtaagaagtattttaataaataaaataaaaaaagaagtataaaacttactctactcttgtaaagataaaattgtaataaatattaattttttaaatttttatgtaaaattttcaaattttaaataccataaattggggattgcgataaacataaatttttgataataataaataaggaattaataaaagttctacaatacataaaattatagagttttccttcttgtttttagtttgatttatttattttttacaaaaaagaaagcacacttgtagatacatttttttattcaatttttattaaaaatttaattgatcaagcagtacccgaaattcattaatccaatgactctacacattatccactctcccttggtttatattatcaggtaaccaaccagcaacactatctattaaatcagtcactacagcactaatatagagcaaaaaattcataataatgtgaatttagaagtcgaagattttaaaaaaaatcataataatgtgaatttagaagtcgaagattttaaaaaggtaataaaaatcataataatgtgaattttgaggagaggggagagtaat

SEQ ID NO: 202069 - DNA, 1352 bp, Cannabis indica
tataatagtactattacaacattaaaaactcaacaaagactactactagctgattgagaaatatgaaagtatgatgatggtgagggatatattaagatgtatatagtttcatatcaagagaagtaattttatattttgtatatggtattgtgggggaactaaacctttcaccatatcaaaccgttaccgttgtgattgtagatattattagatatagtctactaagtaatattacacattttctctcagaaattagtcttaagttacaatcccataattctcaaatctcatactattatatattgtggtggctggttgattgaaagagtaaatatattcaaaagaagaattgtgctagctactctctaattactctcatctattaatttatacagaaatataactttgtgaatgataagtatatatagttaaataagattgaaacttgaaattaattcgaacactattaatatcttagtagtatgagtttgcagagattgatattgagaagttgaaatttcggatgaaaaattgggaatatgatgatattagcatatttatgtttgtaagtaaatggtcattacatgattattattattatcacgacaattaatattataaaagagcaattaatggtgggtataggggagggatggggtggggtttgtagtaggtacattttatattaatattcttaaatatatgcaaaatttgaagctgatttatagctgccatgccatgccactgctccgacataaatcctctcctcctccactccagtattcgcatgcccatgggcctacaccatgttccaaatgggcctacgcctttttttttttttttttttttttttttttttgtaataaagcgttagataaatagaaaaattagacctcacggtcattacaaaggatagtatcatgtattgaaaagggctccacaaaacttgagataatctgggcgaacgcctaattaaccacattatgggcagcaaaattacaacaacgagaaataaactaaaaattacaagataaattttttttagagagttgattacataaagagacataattatcaatattccaactagagtggagtcctttaagagttttgataactatttcaaaatcactccccaccaagacatagttgtggttcttgagtctagccgagtccaaagcaagacgatacgtcgccgccttaccaatcagaggatctctgaagtagagcatgttaacagcaacccacacaacagttccagagtgatccctagccagagccgccatacacatggaatctccaccaaccttgacatcacaattgactttgatccaatcttcaggtggaggtgt

SEQ ID NO: 202070 - DNA, 2189 bp, Cannabis indica
aatctcggaattttaccaaccacacgtaaaatagataattttatctataatataatttcttgtctattttaaattttgaaataaaatatttaaatatcgagtacgtaacagtaatacattcgatacagtaaaattattgatatgcgcataaaatctactcataaatacatctattaagttttgtaacgttatgtttagttgaacggttatcttaaccgtatattcaactaataactgtcgatttacttgcataattaattacaacaatatgtacaagaataaatacacgtaacattcacttagattaataaatagttctcgacaaatcacgtgtatttaaatatttaaatatcgagtacgtagtagtaacacatcccgatgcagtaaaattattgataatgcgcataaaatcttctcataataaatacatgatctattaatatcaagtaatttgtaacgttatgtttagttaaacagttattttaacattatattcaactgataactatcggtttgcctacataattaattactacaacaagtacaaggatgtaaatacatgtgtcactcacttacattagcggatactcccgacaaactacatttagttaaagagtatataatattgagtatgtaatcgataacatccaatatttctttcttaattattccatttaggtttacatatgtaaggaaataaataagtgtgcatactaaatattcatcaattatgttgtatttgaatgctaattattgtataattattttgtcttttgatatatatatacatttaaaatctattcataaatacatttattaatatcaagttttgtaaagtaaaatttagttggacaatcatcttggtcgtatattcaactaataattgtcgcttttgcataacaaactagaatataaaaggaagcaatatgtgagtattcacttaaataatcgatactcgaatctcgagaaactagatatgttctttaaataaataacatctatagagtatgtaataaatcggctatgtagtaaaaattgattactaatttctttccttaattatttcgtttaggtttatatctgcctacaaagatatattatacattatatgatgccgttacgttgtatttcagtgctaattactgcaactattttgactattgatgtacgcataaatctattcataaatacatctcttaagatattaatgttgagttttatatgcgttacacaaagtttagttaaactgttatatatcctaacagtttactcaatcaatattattttcttgcttctttcgtttcacaatcatgtttaactaaattgttaaaacgttaacgttggtatatatttactttttctactgtgtaatatatttgtatgttaatctcctatttgttagaagttaaattcattataatttatccattaaaaaactaagtcaataccaaattacgatgtatgcatgtatacaagtcaatataatatgagaatttaaaaacaaataaattaaatggttaaagttttctatagctatctatttaattactatattatttttataatgcaatttaattaaatattaaattaacaccatattagtgagaacttccaatccaaacttcaaatcacacacaaaagaattagatgagagttcgttgtgatagtcatttttcacctaagtcaataattataattttttttcattattataaataccataaaatatgtcacacattttaactttttatcataataaatttatttttaaaaatttctattataataatataataaataaatttttccgtttcaaaaaataaattatattttgtaaaaaaaaaatctaaaattagaaaagtcaatactaaacttaacggtgattttataggttaagactattcaaaataaatatagccaaatattccgaactaacaaggaaatgaaataaaccaaaaaaaaccgccattttcttgtttataactatttattttcccattttgcccctgactttctaaataattacaaaaatagtattgcttctttgtttagctaagcatccattccagtctcaaaccgcgtggcgtttttttttttttttgtggttttcccgctttagtaatttataattttcggcctacgcgtcacgaggatttaagttacgtcgcttctttcgaatccgggctttc

SEQ ID NO: 202071 - DNA, 639 bp, Cannabis indica
acaacatattccaaccaaaaattcccaaaaaaagtcacttagtcaaattatgtcattaaagacctaaacttgagttccaaagctcaagcttactcaattctatctccatacaccaaaactagtatccagagcttaaaatcaacttagaaatcagactacacaaccgctaaaccctaacaaatcctaatttccaaaatcacaagttaaaaccaatacaaagctttaaaaactcaaggttagaaattctagaacttacctactccaattactcttgattcaatggttgaattcttagaaaatcagatgaaaaagctgctgagttccccctgggttgtggtgtacgaacaagaagagagagaaaagggttctcttgattttttttttcttaatttcttgattttctttgcttttctctaaaaggttaactaattgaaccttattgctactggaattaacccaaaaggacaactgccacaacaccaagcagccacctaggtcaccatttgaaattaccaaaatactcccttacttacaacttaagtaaaataaagcctaggggtaaaatggtcaaaaatcataaccccgctcaaactcggtattctattttcttcaataaatatcctactaagaaataaggtt

SEQ ID NO: 202072 - DNA, 1596 bp, Cannabis indica
ttttttttttttttggtagtatttacatgttatttataattatagacattagattgcatagttatgctcaaaaataaaatcctatagttaaaatgagtaaaatattaaaaattgaagattgtgtgtttttgggttaatgagtatttgagttagtttggtattgaagattgtttggaaggtgtttgatgaaatgcaacactcatttttagactcaatttgtgttgtgtgtgatgttatattattgttagaataaatatggtttttaatcattgaattatgaaaattgtaaaattgttagattgtatttcagtaaaatggcacactatctaaactgtccataactaccttaaaccctccacacaagcctagtagttatggtttttctattctaaactgtagtagtgtttgatatgatatgttactgtattattcagcttgggtgggctattttgctgctgttaactggagcagtgtagcaatgaataagaattgtactacttgctcttctctataattaactaatgtatatagaaaataagatttatttttttagctgaaaattgttgagacattgctgctgaagttggaagatagctgaaatatgtaacgaagatttaggacaaataaattttgcgattaactaaatatagatagattatgacattggttgacttcctggtatctaaatttatgtaaatgtaaatgtaatatcaaacattaatcaaattcgggttggccatggatgcagaagaggaacaatacgtaaataattacgatattttggaggaagatgataaataagtttaatttgattgcgattttgaccgagtatctgacactgataaatctcaacgttatctctagcattattattggagcgagaaaagaagaacacatctttgttgtcgggatggagagcaagtatagtgaaccgcaacaaattcatacaaccaaatcttattatcatttcgtcatgattgtgcactaaattccaactccacatgccctcattatccaggtaattattatcttcaggatcaacaagctcccatactttaaaaacataacattgctttttctgataccaaaaaaattgagccaaccgcactttcccgtgaaccactcctacatgtaccctagaatttgaacaacgccaatcatgacctaactcttgaggcaaaccaatcaaacgatatctttttgagtaaagattcaatgcaacaatgccttccgtcttcactgaaccatatggcatgtatattattgttctattgcttccaacaatggtatttcgaagataacatttacttagaggttccgctagaaagttaacagttgaatcactccattgtccagtctcagaagaaaaaattaataagtggaataattttcgtggtgggatacttgaaaaatcatctctcattccgatgttgacgacattatacttaacaaggttattgtcatcataacctaatactactaacgcatatctacaataatcccatctatatggggaatcaggaactgcaacaaacttttttgtaaaaggattgcaaatgtataaaatttcacgtgcatttattcccaccaacaaca

SEQ ID NO: 202073 - DNA, 1694 bp, Cannabis indica
tgttatgactaaaactaaatcagcaataattaattttttgttgtgattaaaagttacatttaatcacaaaaaatttatattgtgcttaaaaaattatcagtaactgcatctttttttgtagtgtgtaccattatacaaacaacacttcagtttgatctaagcaaagccaaaaaccttccattatttagataaaattaatttattaaaagtacttattattttccatccatatagtagttttaatttcttactaggatgagttactactatttctcaacataaatgctaattcagaaaatgctttagtggatgaaccatcttcaccaagtgcctttatagcattatccttaagctcattcatacacttcccaatttccataccctcttcacaactcttctccatcaccaccttcacaactctagaaatttcatcacgaccaacaatgttattttcattctttttcggtcgtaatgccacatgtaaaccatccacaagcataactgcattcatcttctgttccgcgaaaagcggccagacaataaatggtactccattcacaatgctctcgagaatcgagctccaaccgcagtgggtcaggaatccaccggttgagtcgtgggccagcacctgaacttgtgggacccacgactgaaccaccaaacctctctctctagtcctttctagaaacccatttggtaagaaatcaaaagcatcatttttttggctttgatcactactctctttcaaatatgcaccatttgaagatttattatctggctttctaacaacccataagaaattttgaccactcatctccaacccaagtgccaactcattcatttgatcactcgacaaagttccaccactaccaaaagaaacatacaaaacactgccacgtggcttctcatctagccaagtcaaacactctgactctgccacatcacttaaacctgcttgtacaattggcccaactgaaaaaacacgtggcactttctcattagcttccaaagctttcatagcttcagattccatttcccaaaaactgttaataattataccatcagccaaatacaagcctttcgagatttcaaaaaatgacttgtaaattcgactttctcgatcttgaagtggctcaatcatatccttacccgaaagaggtacacacccgggtaatcggatcgggtcgggtaagtctttcatgaaccgaacagagtcaggtaattcactatcgagctttggtaagtataagaacaaagccaaagccatggcgttcgtaaaaaagaaaacaaaagatggaatctttaaccctttggcgagctctaaggcctcaaaaccaaaagggtcagcaataaaagcagaaaaggaatgagattccaattcttttttgagagaagaaagggaacgagttatggtgagagtgagtttaaattcagaaactgaatcttcagaaaggtcatcaaagttgactggagaaagaaagactgtgtggatggaattgggtagtgagtcaagaatggctttttttggaggtggtaatggagagttgtgttcttccatggtggtgagaagaaaacatgtgatgtgaaaatttgggtgaagagctaagcgtttagcaaattcgattgagggaattaggtgactaattcctggtgttggcataatagctatgtgggtgattttttgatccatttct

SEQ ID NO: 202074 - DNA, 738 bp, Cannabis indica
aaatatacagaagttaaatacatgttagtttattagataaaataaataattggtgcattaaatagttgaagaataggatatgctatgcttcgtaatatattttttaacggctgtttcgtattattaaatagtttaaaaaagaattaaaataaaaaaaaaattaagaaaagagaagaaaagagtaacaattataaccaccaatcacggactaagaaactgaaacatagaaaaagtacattgagcggttatgattttgcggagtctccttccgattttattatttgaatttttttaaaaaaataaaataaaaaacgaaaggctttggtgagaaggcagactgctgaattgacacgtgagtagcatgcagtcctaattacaattacatcagactatgcagtccaaactgtaacttcaagtttcaatcacagccgcccatccaattctcgttggcccagacatagctgcatgtgagccacgtagactttacccaacttacgaaatgacaataataccctccttaaaccattgttttcatttacaaaaatctcaaaaagtgcataattggtgttattatacaccgcatcgataggtaataattacaagtatcaccgtacttttacattaaaaaattgctgcctattcagagctagtagtgtgagtttaaggattcttgaatgattgaaaaggttgtgattgccaatgtaatgtgttgattcggtgatggtgtgatacacctaa

SEQ ID NO: 202075 - DNA, 1796 bp, Cannabis indica
atattattattataatatttatatgagtcatcatgtacgtatacctagggtttgaatatatatgtaacacgaaatcaaataactctaagactatagatagattccattgttgtgtttatataaagtccaaataatatatttgtgtatatatattatacacataacacatagagaatttagtacgtatttaatttgattgatatataaatatattggaaagaaaaactattattctgtaattcctccacaagcaaactatatataataaagatactttatgagacagtatgtataagtacatatataatcttttccagaaaaactaaaagtgataaacccttgtcttataaattaacgactcatatatagaatatgtatatattaacaaaataaatcgaggctatagaagttcaaaatcaaaatagtagaatcaaaagatcttctcaccttcatgaatcatgatgaggtcaaaaaagagaaaccacatgccaaaagaaaaacatataaatatatatataatgcatatatatgctgtatacatatataaatatatactatatacactcaaaattccaccaacaatgactaagtataacaaaaatggtttgtttataggaaatcagacaaaaaatccaaacatagaataacaccaataatagctttaatgggaatgtggtagtcactataatgatataagcctagtcaaaaacaaacacatacatatccctttaccttttttatttttacttatttattattataaataaataaataaataattttcaccattgataaagtaataaagcaaaaaatagcacacactacacaaaaagacaatctcaaaacacctaaatgaaccactactataaggaagctgcctaatctctaccttattagaacatacatacatacatatatatatatatatatatatttagacaagtctcatatatcattctatggaatcaagtctcttatatttatacatatttgttgcttataaaagaccatcatttgaatcaagtatcttctattgatagtgagacaggccccaaaagcctcatgtatgtattcaaagactcttataagaaatgtatgcaattttagcaaaaaaaaaagtgaagagaaaaaaaaagtcacaaccaacctgaaatagaccacttagctgaaataaagactttacaaagtagttaagtgagcaattttactttggtttctctggttaagctttaataaattatatattgattaaggggtccactctttttttttcttcattttcaattttctttcagttcaagatggttgaattttttttttatatatatatatatttagcctacatcaaataaatgtcaacactcatttatggtaagaaatttatgtgtagtatatttggaaaattgatagcaccaaccatttatttatctttgttgttattggctaattattattattgacagagagaacaaaaattacaagattgaatatgccaaaaataaagataaactcaaaaattgatacttgacattataattgagttgacataattatatacacaatacaataggaaagtacaatgatgagatcaatgatggttaatagcccatataacaacaacaaacaatttatataatatatatttatatatataggcttaatataaattactatgttcaagagagaacaaagcttaaactttggtaaaattcatgcaactttactacaacttgacatatataacataaacaatatacattttcatttttaatatattatatatatacataatcagt

SEQ ID NO: 202076 - DNA, 1479 bp, Cannabis indica
ataataatttttttttttataaattagatggaagatttaaatttttctttcggttaaaaatggaatctaaatagtgttttaaagaaacttacatcaccagtcataaacataatttattaaattcagaaacgattacttatttcttttattttcttataaaaatacatgtaattttttgttccaccatttttaatatttttcacaaaatagccatctttttctatattttaaaaataacaaaattatgtttttcaatttcaaaatattatattttaaattatatcacttaataagtgcaatatatatatgtatgaaaaaattataaaatttggcgttaaaccataattgtaagcacgtaaggctctccctttcatttggtcccttcgatttggacgcttcaaatcaaatattacacttgattagaacccaaatctctggccaataacggagcattgttgctatatcctatatggtccataccaatattccataataaatacttgtttggcacaatttcttttttctttttaaatgtagtgcttgtggtcgaaattcactttactattaactccttatcatcatcttttcttcttcttcttcttcctcttcttcttttttcttttaaaacaaaatcaaatatagagataaacctattataatatagagaaatagagctcaaatattgtaagaattattatgagaaatttgagatgtcatttttttaaaaaaataataaaagaaaaaatagtatgcatttttgtgtcattgacaagtgacaagtgcagtttttgtacactcattcataaatagttaatatttttaccaaatcattgtccttgaatatttttatctctaatttcttttttttttttttcgtattattgacaatactgaaatcagagttaacctaagggtgggccaggctgacccaaaattttctttagaaaaaaaaaactcaatttttttttcataaataccatttttaaattttaatcagcatttacttacaaaattcaattattttctcaaaagaggctttaattttaaaaacactatatttatattggcgaattaggatttttgctccctgaacttttaaagccgttaaaaattctacaaaaactatagagattgttgaaatcaaagacttttgtccattttttctaacagaaaggatgaaaattgaaggggcacgatttggtgcatgtcaaaatttggggacagatttagtagatttcaaagtttgggagcatgatttggtagatatcaatgtttggcgagcacgatttagtacataaacagttgtcacgttaaaaaaaattgaacaaaattggacaaatgtccttaaatctaacattatcaatagttcaagaaaaaacttttacggcctgaaaatttgggggcatgatttggtatgttaaagttcacggggaaagaatcttaattagaaattttatattttattcaaaaaaaaaaaaa

SEQ ID NO: 202077 - DNA, 1579 bp, Cannabis indica
ttatttttgtaactcccttgagaattaattttaagatcgacggcttcagaattgcgattaaaatctgatatgtgacttaatagagcatttacttatcttcaaaacacaaattgaatcgcgtcaattggatcaatattgagtgggttatggctgttttactgaagacagttcatgacccagtgtcaaggttgacatcccagtgcctaagttgacatatgatgtcaactggatgatggataagtataaaaatgtccaagggatgtactttaagatgcctaagtggttttttgacatcacatagtttgtttttgtattctagcaaagctagtcactagttctcggagatgttgttcagaagaaatgagagactcgaaactctttatttctgattgagttcccatgttggaaatgagaaatgcgaagttatgaatctgacttctttgacttcaaggatcttaattattatgaaaaactagatagacggtcaaagcgaaaacaaaaaccgataagtagaacccaacgcactaggaaattgtgaacctgggcgttgggtactcattcccgagctcttaagatcttgtttttatacttccaaggttcttgaacttggggaagagatctcctaccacatctttaaccattttggattaattagtccaatcagatttggcatttaatgaattgaaagcagcacactaggttaattatcaacctaggcacttggcttaacaccagtcaacttgggagctgggccctatttctaagggctcgagttcgtggttttctcccctagttttcttgaatcttcattattttttatgacgaaaaaattgctcagaacacttttttgagaacttgattggaaatagcctaggttgagaatatatcaacctgggcactgggcctagtggcaggtggcaacttggacacaaggtcccaattatggcctttcagaagttatgtttgctccctagaaatagttgaatcttaatattttttttgaaaacagagaagatgctcggaagagttctcagaaaacatcatcagaatcgtcctaggttgaattagtgtcaacctgggcgctgggccatgcttctagcacccaggaagtcctatttcttctctaaaagtacctgttctcctatttttaatgaaggcaaagaaggtgaaaaagtcaaatatttgatctgatacttgaaagtcgcccaaattgacaaattatcaacttaggtgctaggtgcccgacactgagtgcttggggtgctcaaaaatgaactttttctgaatttgattatgatgcctcaaataagtctgtagtatgtctatttaatgtctcaatacaaagtttgaccaatttgtagtaagacgttcctaaaaactgaaactttacttgggaatttcaacttggcgctaagtgaaacccaagttggcttttagatataattgctccatatcttcatgttatagaatattgaaagatagttagttggaaatgagttattcaagtcaaaatgtaacaccctactagtttaggagcgttatcgtgattttataatattgtgcaatccattgctaatca

SEQ ID NO: 202078 - DNA, 559 bp, Cannabis indica
tgccttttccatttcttcagtactccaatcattggtttgtttaatcttttatcccttctcatcaattacagagggaggagaccatccctcagaaacaccatccaaactctttcatcaaccactttcaaaaacacccttatcttggttttctagtaaggatagttagctccttcaagcataggaggatgcgagatggaatctccttcccaaaataactccatttcctattaatctgcaatcacacacacagattgagaaacaagcgtaatacttcgagatgagactcgaagccgattagttttccaaaaaatcaagaacaccgaaacaacaaaacataagaaatgagcaagatctaaaacaaaagacacacgactacttaaatttacacgacgcaccaagatctcaatctgaataacaagataggttctgataccaaatgtgaaacctaaatatcttaatttcttctaagtatattttagaaataaaacttgtctaaattacaaaaagaaattagtaaacacatggaatttacagacttcatctgaccctagaaactgca

SEQ ID NO: 202079 - DNA, 2343 bp, Cannabis indica
gagagagagatcaattgttcatcattatagtttcttttttccaacttaatcttttatttttattataattttcattataatgactagtttggagtagtttctttatagttaggggtgatctcaaaacccaagacatgatttttaatttctatgatggatgttattttctcagtttccattatattgaattatttctatttttctattttcaatgatatgattatattttttatattgtttagataattactaaattaagtttttcttttatctattgtcatcttaggattactattcactcaatagtctaaggttttaagtgtttgtgataaattacaatttttaatattgtcaaaggtattttaattgtgatgaaaaatagaacctatgttaaaagaagtatatacttcattaagttattgcctaggttaaataaattgtatggttcatatatttattgctataaaagagttaattattgagtacttcgccttgattatttgcaatagaaagattaagataattatctgctttagcgttatttgcaggattaataatttgattggaaaattaaaataacattcgttagggtggagattaacctttaactatttattaaatttcgtagtatcacattttatttattttcttaatttgagttgttaggtttgttctaaaaaaaagcaaaacaatcccctttttaattgatgtttaattttgaataatagagtaaacataattattgtgggttcgatttgtacttgcttttatactaaaataattagaaatattagaattaacttaattagtaaatttgatacgacatacgacacacatcagaaatctcccaccaacccaatctcccaacacgcccaaaccaccccatcagcatcttggagaaccccctttaacaccaataaagcctcagcttggtaccactaaagcatcgatacacagcgagaggtcttccccaacagtcgagccaacccaacaaacaactcttggcatccctgccccacctgtggaagatgaaccagcctgaccagaagctgtaaactcctcaagaccaccctaagcaagcttcggaatcacctccaatatggaatgacactcaccaaaaaggattgaatttctgttgaaccacgtccaccatactatcgtcacaaatagctcaaaattctcacgtgtaacctcttcaaaaagagtcgccatcaagtctggtactggcccaaacaaccaatgcctcgtcactaaccagacacccacctgagaccacatcgggaccaacgctgaacaaaagaatagagaatgtgttatagtttcagaatcttcaccacacttcaaacaacatagcgataccaaaatatttcgatgccagagctgcgtagcaattggtagagctgaatgaaagagcctccataagaaaagttttgcttttagtggtttcccaagattcaaaatttcattccaccaagttgttcgtggtgttaatggaggagttgacgagggagttttttaagttaatgatgatggtttggtggtgcatttggtttgatcgaaactctatgttgtttgttcagaaggtttcaaggttagattcgcttgaggtgttgactgggaatgctttctaagagctgaatcagcagggtatgaatggggtcgaggtactccggggcgggagagtgagagattaattttgagatgggttcctccggcaatgagatgttttatggtcagctcaaatgtaattgtggtgccgaggagtagatttgtcagacgggaagggtgatccaagacggtgatggtgtgatctgagcatgttgatcgatcaggcttgaaggtgggtttcagagctaatcaattgagctttattatttttagagctaaagttgattcctcaattgtgtgtaattgggttaataatctaaattctaatattatttttcgatcatttattaataatgtaattatattaatagctagctacagttaatggtggttcttgttatgtcattttgtgttcctcataataatgtagtccacacactagtaaaaattattactaagtcatttagggatttaaatttctacaaatatttgttcttgattcttatgtacttttgtaaaaaataatctttaattaatgcacaactttagttaaaataaattacaagctataaacataaccaaattccgtccatattattatcattaataaatttttaaaatatttattatttgtatctttttttatgataaacataacaaaattaaagagaataaatatcattataaaggtctgtctgtctagaaagaaattttgtcttaactcttaattgagtg

SEQ ID NO: 202080 - DNA, 1361 bp, Cannabis indica
aagacaaagtttatcccaagccttaagatgaataccatgatttcctttctcaaaaccccaccaaaaatctctaaccattccatcaattttgtttaccattctaatcaaatttatcttggttcaggataaatttgtcattaaatttttaagaataaaaattaaactaaataaataaataacattactgtaatggaacatttggtacaaggaattctgaaaagtctgattcatgggaatattaaagcgaaaaatatgattgttaattaaatctgttcaaaaaaaaaaaaactaattgttaattaaattatattaattggttaaacacaaaaatctaaaagattgttatgaaaagttatataaaattattaatatattataaatctattgtattactattaagattgaaggattgaatcaattttcaaaaagaaaaagaaaaagattgatgagaatatttggaacccattttttttttaaggatttaagattactttcttaaataattcttccagacttagaataataaaactctataccaaacataaaacataaggatgtgaaagatcgtttacgaaaaaaaatgtgaaagattgccatttttataaaaatattacattagaccaaatagctcctagtgggaaaaaatattctttaatttcttcataatacatgtggcccacagaataatttgattttattgcaaaatttaaataaataaatataaagaaatgactaccttatactatactattgaagaaagtttaaatatcttaaaatttaatattaagtctcacacattttgatttaataaataacataacaaatcattaagcattcacaatgtatcatattaatatgattttggccaccttaaaacacctaatagaaatgctgataacattaatattagaatatgttcggttccaatcaaatttaagtcactgccagagacgacgcagtaatgaaagtgtggggactataaccccagtaaaaaaaaattaaatgttaaacaaagattaaatatcttttatttaattaaataattatacaacaaaatagtagaaaatcccacaaaataattataattttaatgtaaagtaaataataaatatttttataataattaagcccccagatcaaaaattctagatcaggtcactgctcaatataaataaaatgctatattcttgaatgatatttttagtaacttcggtgacaattccatcctaaaattattttgaatgagatcaaatgagatttttatctactcacaaaggagaacacaaatcttgaaaaacatatcctgttgttataaatagtatttgaaacttattttcgagcaataattaaatgataattag

SEQ ID NO: 202081 - DNA, 1302 bp, Cannabis indica
agaaaatagagaagagaaaatttatggcaaaagaattctcatattgattattgaaataatttatacaaattttctctaagtaaatcaagaacgaaaacagattagttatcacttgccgaactattaaataactctatttacaataataacaaaaacataatagtcaaactacctaatctgaaaaaatgaattaagacctataaggtctgatcttaggattgtttaatggaagtggccccttttgttttggttactagtttttctttttaataaaaaaattattcagataagaaaaaacatgaatgagaaatgttaaatagtgcctaacactcttatgagttgtaatatcgataggattaaattcaatatcggtctcacttattttactttaataaatattgtaaaaaaatcgctaactaattataagacgatacttcatcgtgatgctagatactatgaatgccacataacaatgctcttgtggaattagaacgttcttttctcatactcttagtaaagagcattgctatttggcaccaatggtgcctagtatctctagacatgttatcttacaatttgctagcgatactccctaaaaattattatattaaattatatgagacccgatatttagtttgaccaatagcaatattgacaaataagaagatactagacaccactgatatcctttaacatttccccttccttggtaaatgacaccaacctacctatgttctacaacaagatcatacgaataagtgatttttatttaactaatcaaatccataactatctaccgttgagtgaattatcctcttgaattattcctcaaaaatctcttaagagttgcgacgcataccgcaacgaatgcttcgcataaaatagatcaacccagttccaagttgagaatcaatgtatagacttgatttaatcaattttgtttgtttctcatatcttactaacttatacaaataatactctggattcatttgttaaataataataataatatagtcataaaacatttaattaaaatatgtattggaatgaaagattcaaaatccgtgagatgtatcagacttcgagaaacgccatggaattgagtatagaaagagtttctactattttggtcttcccatttcttgtttctccaatatcaagtcaattttgattagaactcctaacaatgagaaaaacacaggcatacccccccacaaaatccacacaacattcctaattgagagaacattattgttaaaaaaatccacacaacaagatccaacaacattcctaattgagcac

SEQ ID NO: 202082 - DNA, 539 bp, Cannabis indica
aaaaaaaaaaaaactaaaatacacatataacacttaattaagattttatgattatagcataattataatgggcagtataattatatcaacatctaaaatcacttcaccaatcatgatacataaatattttacaaggtgtgaaaataagtaaagagtaagaaatcaataagaagcatcctaaaaaaatgctttataactttacaatatccttcttcactgtcacattcttgccaataaatttttactctttcaataacaaaaaggttatacttggaattgccttgatttcctactccataaaagaatccaacatttcatataacaaaataaaaagtactcaaactcatatgataggattatttttccttaataaaatatgttaagattatttttattctttttcaaatatcatcaaaagtctaaattaaacctaaatcataatataataaacatattacatgaaataattagaagataaaataaatatagtatacgaaataatataataaacatattttctcgccacatacaaaagcttt

SEQ ID NO: 202083 - DNA, 3068 bp, Cannabis indica
gtcgtggtcgtgtggttgtggtcgtaggtcggtcgtgggtccaaagggtacagggcgtggtcgaggagggatgggctcatgtcacggtatggtatatgttgacttagaaatctaaactagacttctaagcgacactcgcttagtagattgacgagaataaaaaagtagttaagtaattttaagagagacacaataagtttatagtagttcactccctatattgccacagtaatggagctatgtctacttcgagttcttatttctcatgagatggtagttacagaaaaagtcttaagtatcaaaatctccactttctaaagataaaaactagagagagaagctctgaccttatgggtagttttctgaacttgaaaaataaactaagggagttcttcttttgtaggtgaaagaggtccacaaaaatagggggaaatataaattatatgtttttaactgttgattatgatctaacggtgaaaactaactcttggtggtgatggccatttttcggagctcgacgggtcccactacaagtaacttggagcttatttttgtaactcccttggggtgaaatttaacgatgaaagcttcagaataatgattgaaatgtgagatgtgacttgatagaaaatttacgtagcttcaaaactcaatttgaatcgcgtcaatcagattaatattgagtgagttatggctgttttactgaaagcagttcatgacccatcgtccaggttggcatatgacttcaacctggacgtcgagtaagtgtaaaaatgtccaagagatgtactttaagatgcctaagtaatatttttacattacttagtctatttctgtgttttggcaaagctggtcaccagttctcagagatgttgttgttttgcaaaaatgagagactcaaaactcttcatttctgagtgagtttcccatgttggaaatgagaaatacaaagttttgaatttgaattcactgactttatggatcttagttattgtgaaaacgattgaaacagaatcagaatcggataagtagaacccggcgcaccaggccatttgtcaacctaggcgctgggtaccctattcctgagctcttgggatctcgttttgatacttctaaggttcttgaacttgaggacgaggtctccaaccccgttttagatcattctagattcatcgatcaaattagatttggaatttgagcaattaaaggtagcgtcccaagttaattgtcaacttgggcgctaggccctgtttccaagggctcgggttcgtggttttctccccaagtttgaatcttcattatttctaatgacagaaaaaatactgaaacacttttaggtgaacttgattagaaatggcccaggttgacaatatgtcaacttggacgctaggcccagcacaaggtgtcaacctaggcgctgggtccttgttatggcccttcaaaaattttgtttggtccccaaaaatagtggaatctcaatattttctaaaaatggagaagattctcggaagagttctcagaaacaccatcgaaatcggcccaagttgacaaaatgtcaacctgagtgctaggccttgcttctgacacccaagaaatgttgtttcttccctaaaatgacctatttccctatttttgataaagacaaagaagatgcaaaagttaaatcgtcgatatggtagataaaaggcaccaaaattgtagtgttattccaaattttgtccatctaatgtggcatgtccacgtaagccaagacagagtacatgtggaatacaaccttgccaatccttacaaggcatggcaaaaccgccaagcagcaagcgaaagaagttaagcgagtcatcaaggagctgtaccaccatgtctggctgaccaaggggagtctataggctggccaggatgagcttgtatggccagctagggtttgagcacaagctggctggccaaaaaatgacgttcagaccaagagagggtccgtttgactaaggaaacttgacctttggaaggaaaaggtatacaaaggctaacctccatctccaatggctggccttcacctataaaggttggcctccacctcaaagagctggcaggaacataacctgcaagatcctggtaggcacatggctggcaagaccctggtaggcacatgaccgaccggaccctggcaggagcatggccgaccagacctcaacctacagaccttgtatggccggacaacatgtatcctgcaggtgcatggtcagccagcttttccttgcaggacattgatgcacaacttacatttgtggagtggacatcaaaccaagctgtgagttgggccttgacaacccacgaagatgctacaaaaatattagcaacttccctatttttaaggggcaatttagtcatttgtatttattaattaaatatgtaaataatagctttattttaccaattcctaaggatactaggcatgtaagctctactatataaagagtattagcctatctctaaagccctaagtttgaagtctctaaccctaagtcattagctctcaactctatgtctgaaacattaatcctctcttctctctctctctgatacaagcccaaagggctctcttcctctctctcacacgcctccaatgctctatctctctctcattaaagacatgcctattgattcatacattgtaaccttaagagagctatattagatcccacctatagtgatctgaatagtattatctctaggtattaatacaactaaaaggggagtgggtcattacccgctaactaagggggtcaaacctctataaaaatccttgtgttttttttactttctagttctaatgtgtaacacgtggaaagcatcagtgttaatataactccactattggctggccaatttttgaggtcaacagtttggtgctttcattgagagcaagtcgagctcaagtagtctaatcaaacgccatggttaacacaaggagaaccccgactacaacttcaacctcatcaggtattcctcaagacttgatggagactgatcctaatgttcaagttccaaccacaactggaatctccatgaac

SEQ ID NO: 202084 - DNA, 848 bp, Cannabis indica
aaataaatatagcaattgatcataaaagttaatgaaatattaaccttgaaaaattgaaagcttaccattacaatacaatgagatagaaattggaaagattacttttttcttataatattgtatattaatagttgatgagtgatgaggattgaggaggatagtttgcaaattgtaaattataaaggtgagttttttttttttttgagagatagagatttagagttttgagaagagagagaacttttaaagaaagagggaagggttggtgtagcttggtgggaatggatggaatattgggattgagacttgagagagaaaagacaagagagactttttagtttttttttcttcccacgttttggaaatggattggaattcggaccacctaccataatactattcaaacgttgttaggttgagctggctggaattggatgttaggctgggcctaaatttttttttttttttatttgaggaggttatatgacttgactgttttcggaccttgtgttggagtgggtcctaggcatgggctaggcccagagctgaccctcaccgtcgccaataattaagtgactgtttgaaactgatgcctataattgagaataagcatcgattttaaaccctcattttgtataggcaacagtgtattatagttacattaatttaaaatttgtgaggtttttaataggggtatacctgacggtttaaaatcgtcgtgtatactatagccgacagttttaaactgttggctatagtatacctaacatttttaaccgtcgggtaaaactgacctaaataaaaccttccattcctccccatttcattcagtctcatctctctctctc

SEQ ID NO: 202085 - DNA, 726 bp, Cannabis indica
tttttataaaaaatagtgccttacgtaatcatcttttatttttaattaaaaaataatcaaatagtatcagtttatttttttcgagttcagtataataacatcacctatttattgataatctagcaccactacaaatttacatatcaatattaatttaattaaaaatcaaattttatgtggtcagagactataataatttcacatttcttttcacaagaagatcctatactcaaatccccttttttaaaggaaatttttttttatgtattttaatttaataattattatacaataatattaattgttaaatatcactaaaccttaacaacaatactcttgatgattatatgtatgagcccagaaaacacgagcacgactaagcacgaaaaaatacaagcttgggcatgacatgacacgatactacaaattggcacgacacgacacaaaaaatatgtccttaaacacgacacgtaagtacgaatagactaacccaaaagacacgacatgcaacaaatccaaaaagtacgacatataaaaaaaattaatttattattattattaatacgatttgaatttattaattataaataagttagaataataataaaacttcaatgtaatactaaatactataattttataattaaaactattaaaacatcaaaaattaaactaagattatataatagtttctttgtagagtgtaatataaaaatttaagtattt

SEQ ID NO: 202086 - DNA, 551 bp, Cannabis indica
ttgtcacgggtagaaattggtgggtgatctggaacaggtggtgtgagagagggtgactgagaagggaaaggatatggtaaggaggagtctgtggatgtatactggttagagctgatggcagtgtttggggtactgaggttaggggagtgagatgttggaacagagtcatttgactcatgtgatgaagttgttggaatgttgactctgtaattattggtatgaggattatgttgaggtatgggaaagccgtgtatgggagtaatactgggagttggaacagaggtaatattagaggaaaacaactcatggtaaggaaactcagcttcattaaatgtaacacttctagcaacatatattttaccactagggtggagacacctataacctttttgagtgttattgtaacctaagaaaagacatttacttgatctaaaggctactttgtgttgattgtaaggagtgagaaggggaaaacaagtacacccgaagacctttaggagattatagtcaggcttgtggttatatagcttttcaaatggtgtcatatgttg

SEQ ID NO: 202087 - DNA, 616 bp, Cannabis indica
acactatatactaaaaatattatttatatatatagcatttacttttatttctatttcttaactacaactttcttatttttttattctcttatagaataacctcaactatataataacaaaatgtattttttttattaataaataataaaattaagtatagaaagttaaattttcctaataatttgataactcatttattattatataataaacttatatattatatttataattggatgtatagcaatattattgaatcattgacattcatattaaaagttgacattcatattaaaagttgacattcatatcaagtgtgttttaattatcttacattaattaattaatctcacacctatataaacatgttggaagcaggttcggcaaaacgagttgaacagcagacatgcacatattataattttatatataattaattttttaatatactaaaatataaaatagttataccaattacccatatatagtttggtggtttagggctttgagttcacaaatcacaaacttaattagggttattaggaatatgttacatcgtaaatatatttaataagagcgaattttattaatccgcactacaaaaaattttattttt

SEQ ID NO: 202088 - DNA, 577 bp, Cannabis indica
gggcctagcccgccttagcccagagtcgagcctgaaaatacctgagaatgaagtagtaacacaaaatacagatgtgtagaaactagttttacagataatcaatcagccatcatacgaggataggcattacgatgatgaaactttagaaataaaccaggtactagtattacaaaatatttttcaagtagttgatagtgtttttaattgtatcattgagaaaatacaacaaaacaaaagtaaaacagaggaagaagaaaaagaaattataacaaatcataaggttttcattattgaaaaaggagaaatttataaggagaagaaaatgtcaaagtgtggattgtatttttttgctttggtaaacaatttccaatttagaacaaaaagatttgaaccaagagagtatgtggttacttgtgtggatgaatactgtaactagtttttaagaccttcaaagttcaaacaaaacatcaacattcaaagtaagaaatatatccaatatctcattggatattataatgggagacaacaggcaagaaactgcaacatgattgaaaaaataataaaaaaagaaattttt

SEQ ID NO: 202089 - DNA, 1122 bp, Cannabis indica
acacttgatctactgtcaagcaacacatcaataactcaacttcattgactttatgcatgtggttgctaatactcttttgaatttatataatatcatggccatggatagtaaactttttgtcgtatttaattcgcttcttaattcttcttcggtttcgaaataaaacatatcaatatgttactgtggtctgagaaagagaaatgaaaaaaataataaaaattatcaatcatttacccaaaacaaaatataaaaaagaaattacattccatcgttttcttttcttctaatattttagtcattctagtacatgtttgaatttaaaacatacctaatacgattatattccataatcaacgtgtataaatattaaattaattatatatggtcactaataagaggcccactaaccaaaaattatagtttggtgtaactatttagagcacttttaagcttgaacatcctctgtacatgactcttagtgggtgttcttattgtcaaagagctccaaataaacctgatcaccaaatgctcctattcctaaccactacaatcttcatcccaaattacaattttctaacttatcattattggcttcatttcccacctcaaaacatagcattgatttaattattacatactttaccagttgaccaatgatttaggtaatgtccccacaccctatatcatggtgggaagactatatatacgtttggctatatatagatatgtagcattatgtatgaaaatataaaaaatataaaagtaccctataaattctaaattaatctaattaactccattggaggaagaaaaaaaaatcccctagtactcaattattgtttaatatgttcggtaaggtttagacaaaacaaatgggaacaattgattggctatttttcatgaagttcaaatatttgaccagtgaaactagggactttaaggtatatatggaagcaaattacaatttcactttgtaaatttaattgagcattgttactttaagcatttacccaagacaagagtatgctggaaacaatcaatgggaaaagaaaaatagaaatagtataatgggagtagttttactactaatttttattaatttttagttagtactttttgaaa

SEQ ID NO: 202090 - DNA, 909 bp, Cannabis indica
atataatataacttagaatgatacgctataatttcccgttggttgtctatgtccaacatgaccaggcctaaaacgaaaggcccactcaatttcctggaaccctagttattgcatataaaataataaatataatctctcagaaaaaaaaaaataataataaatatattatattataatattaataaatgtctcacgcggtctctttccttatacacatgcctatataaaccagaagccattaccaaaatgtttcatcaaaatatcctataatcacactccaaatataaattccctttaaagctaaaacgtttcaacaacaacaacaacatcgtccatgaatatgccgatcacagtcacaacagcaaaaacccctaacgtcttatcactccagcaaccaccattaccaccgcgatcttatgcctatcccaatttaaatttggctcgccgggggctcaacacgtgtcatccaggtggcaaggccgtttgtgctgcatttgatcatcacggctacgacggcaagcttgtggaccaggacatgattgttctgagaaagcgaattcacgaggtgaagaacgtagtcgatgatgacgttgaagatgttggaaatgacgtggcgtcgtctgattggatggagtgggagaaggagtattatgcgatgaattacggtgcggatgtatgtcaagctgtgggaatgttgcaatctcagttaatgaatacaaggccgagcttgtctcttgtgatgtttggtgtcgtttcgctcagtgttcctatctctatgggtgtcgttttgttgcgtttgttggatgcggccaaggatatctttctcggcttctcttaattagctttttaaaaaacagccgacttctaattatgaattagtactgacatttattagaatatttctaatta

SEQ ID NO: 202091 - DNA, 563 bp, Cannabis indica
atttatatatataaatatttacaacaggtggtatgtgccaaggcatcagcaccattaactagttaattatactataagttcaaataaacaagttaatttctgatgtgagtacttaattagtattggcttaattaaaaatatgtattgatatatagtagatagtgaaatcataaatatatgatatattaacggagcccatgcatgcatgcacattttgactacgtacctacaatagatttacagatttacagtatgcatattgatattggtgttaacaattagtttattataaatcatgcctaactatttttttatatatataactaattagtaattataataatgtccacacatagagtatttctaatagtgtacaattttacatggtgtgaaatttttacaccattttactgatctaatgaaatattagatatgcatcaaattagtgtaattctacactatttaattataatggtgttggattttgaatcaacaccaatttggtataaaactttttctttacattttccaacccttattttatttaatttttttttaaaaaa

SEQ ID NO: 202092 - DNA, 1067 bp, Cannabis indica
agagagagagagagcatccctttaaaattgacttataatctttatataagtttacatcataaactaaggtttcttaacctagttatatctttttcttaaccaaggctaagttacatttaaaatatgaaaataataataaaataattatttaaaagatagatatctttctaattattttttttttggctatattttcggagtagctccagtagcacgtgccctttattggtttttagggttcatataagagttgcagtagaaaagaataaaatcggattaaataaaaaaattattgaatccaatataaaccataaaccctggatctcaatagaataatacataatacaaaattaactattagcttagaagattttacctcttgttgtctatcatgatttccttgctatcttttcgtattaatgaaacgatatcatccaatccagtaagacttattaaagagttcacaccaaggtgttccaagtgagcctcaacatttcaggaatagagtggtctattagattcaattaaaataaatataattttatgatcatactcaactcatgagacactgtgattgaaattgagaaaacacacaatcaccctctaaagagagtgatgcgtgagaaaggggtagagagagaaagagagagagagagagttggaaagttccattattaattttttaacctaaaactaatctctccaaaatctcgtcttctcttctctgatatatatcttatatatagcatattattattaatatatattaatcatatataatgatttaataataaataaaacctttatttaataaaataaaaaaaatatttattttaattcaaataatttgaaacaaatatcatatagccaaataaccataatcgattatattcttttattgtgttatattatcttttaatttaaatatattatctaataacatatttaatttaattaattaaaagataatattattaatttaatttgatttattttattaattaaataatcaaacaaaattctcatgtacctttatatgtcaaccctacacgtgtgagtcatatttt

SEQ ID NO: 202093 - DNA, 1365 bp, Cannabis indica
aggtaagcctattgaatgcagcttcattattcccttggtaattagttaactaacctcagaagtcagcagtgctaatttttggggttgacaacagtgctttcaaaatttgcctaaaggaagagatgagaaagtgaactatagggttttctatcttcttctctttctttatataggcatataatatgtttaggtcaaattatttatttaattaaaataataggttaaattgttttgactgaaattaaatgtccctcgaaatctaattcaaatcaccttagatctaaacatatacatattgtatctttttaatttaaacaaaaatttatattattattaattaattatataatataattattatatatattaggtaacttaagctacgtataaaaaaaattaaaattttttatgtatattttaattattattattattataatttaattaattaattaattaataatcaataaaaaaattaagctttttatatattatatttaaattcaaattaaattctcaataattgtaaattaaaactttaaatataacattttattaattgatatcaatttatcagaattaacaaataagcctatatctctcttctcttcttaatttagcccaacttagtgaaaaattatgaaatttgacatagtcaatttttgaattctaattgattacataaatcaattaattgagtctacacgatgatattatcccagacaatgtgaggaccatgggcctatttaactaaactcctaataagtagattcaaaatttatcaagaaattttttaacttattaattcctcctgactccactacttattagtaaatttaccaagctacttattaggagcttggttacataagcacatgatccccatatttttttaggataatatcatcttgtagactaaattaattaatttaataagtcaactagaattcgaaaatagactaagtctttttgagaatttttaccaagttttgggcaattttgagaagaaaagagaaatatgggtttatttgttaattagtaaattttgtaagactcattaataaatatatttaaattttattttatttgataattatttataattattaaaataaaattagtatttaaataattagatgagaaaagtgctaaaattagaaaagacacttttgtttcattagttgaaataaagtagcgaaaatctaactctaaagcccatatgtatattttcagccctaagagaaagattcaacccatgtttttattccaagtccatctcatctaaacctaaccccaagtaaatacctatataaagaaagagaagagaatcgaaggctaatgttacttcttcctcttctcttaatt

SEQ ID NO: 202094 - DNA, 794 bp, Cannabis indica
ttgacattttgaaagtctattggagttgaccttaatattgttgttgttttatgatataggtacaaatgggacagacagtgagttttataacccaaagaagagatcagagaaagagtacttgacattcctatctgggtttaggcaattagcaccaaaagatgtggtcttgaacaatttggcattgtctgatgtggatttgcaggacttaatagccagtgcagataaggtctcatctgaggagaagaaagatgaaaagggtcagctttattacaattatgagatcgatggtgttgctgcacatagcttaatctcagttacttgtgctaataacaagctttatgctcattttgttaatgctccaactgcagagtggaatagagatagtgacatgttgaaacatgttcacgagtcttttaaaactgttaactcttcttgagtttgattggtaaatcttttcttcttctttttttggggggaaatttttgtctttgagggcatcattaaagatctcatccttgtacttggtctcttttacttgttgctgataagaggttgtgagaacaacataatatttgtcattgttgagaggtcatgaaatatgtcagatgtaaaattattgttatacatgtaaatgtaggaatgaagtgtattgggataggcatgtttgtgaattgtgacattgagtttcattgttcttgccaaagttatccaagtgtattgagatagacatgtttgaattttttttatggtaaaatggggacgaggctttaaggtgtggctcctctctctctctc

SEQ ID NO: 202095 - DNA, 712 bp, Cannabis indica
atatatattatcatattttttcatcacatttttttcatttgtagtcattttattgaaaataataataataataataataataataataatagagttattgatgtaattttggattatatacttggaacagtgcatgcaagtacaagtcgctatcatattcaactaatgatttacttccacctgtcaccatcctcttaattaataattaattattagttaactatataataagtatcctataatacatagctaattcaaaataaaagctgcctcctgatacatggcatctatatatatttataaaacaccaattgcggctagctatatgtaatcacaaccatgcaaatttaaagagtatttttcaactatttggaccatttattagttgactgttgaagtgatcaaagaattaaaatctaatttatgtatatatatagttataaattataataaacacacaggacagacatgtatatatatatggtgcatattcattgatttcatataaacgagagtgacacttgagaaaggaacgtacatgtatgcttgttactttcatacgccaaaccacaaaattcattatatatggttgttgcgactgaaataaaactataatgcataatatttttatatattatatagtattttttttaaattatatattatataggtaactaatagctttatatatatatatataaatataaatata

SEQ ID NO: 202096 - DNA, 678 bp, Cannabis indica
aatcaagttaagaatagtactaaactatatttcatcacaaaataatataaaataaaataaaaacataaacataagaaattaagaataatgtcaaaaaagtttgaaggtgacatattattaatataccaaaattgctaattttcatgggaattagttgatttgcattaaactatgtttgattgagattgcattctagaaagattacacataaagagtaatttgttttacgacataaatacatatgtttaacttcttattgtagataaatatttaagtttaatttttgatggtattaatatttaaattaaatttttgaaattttgtagctacctcatagtgtgtaagtaaatgattacgtaacagtctttgattggtccaaatcattatttcttttatttttttataaaaaaattaatttaaatatactaataaaagaaataacacgtgacagtttctaattagttgttttgcattaaactatgtggtttgatatagactcattctagaaatattatagagaatagtaaagatagtttttattattatttttacttctttttgacaaatataagattttaattgctttcggtagtacgcaaattagatgtaaatattcctttcattgtattttggacaaataagtcataccacaaagttggaaaatgatagtttgtgatc

SEQ ID NO: 202097 - DNA, 835 bp, Cannabis indica
gtgtgatctcagcttctatatatgaccagctggctttgttatgtgacagtctccgtactaactcataattaagtccaaattgagggtaaaaaacaccatttattggaaaggggaaatggtacatggcattagaaaaatggcaatataaatcacacagaatttttccattaagaataaaaaaataactaaatatgtatattgcacacatgtttgtgacaatgtcaacatagaaactctttaagttttgttattactagctacgataacataagcaagactagatgagataaatctaatgacattaatgtacgtagttagttgtttttgctatgggttggtcaataaggctttttagattgttatgacaggagtgtcataactaatttatattgtaaaggctttcttcctctcttgtataaaatccttgtggtaccataatcttttcctttctttgtagacttctttctctctctgtttcatttggtggaagtggccaaaagagaactcagcagtgaaagtgtgggagaggactaaattttgggtagcaccttggaattctaagtcaaaatatttttgaagacttgtcatttttaaatttatgcagggattgggcaaatatagtgtatagttagattaaccctacgggagagttggttcagctctaatagtagatttttatgttttatattaaaatacatatgttaccacaagtgaggcttctcaataaatttgagtggagtcagtctatgaaatgtggcctttaaattacgtcggaatggccagacactcctagtgataattatctcgagattgaagttgctgaaataacaaagat

SEQ ID NO: 202098 - DNA, 797 bp, Cannabis indica
gttaaccgggacgaacaagagaagttgttcattgtcaagctaatcaatccagtctctctccctggccgctttgaggtaattaatatgaaaaatatttgaaaactgtctctctctctctctctctctctttcttaggagtttcgttatagatcataattctatgaactgtattattttgtgctatagccattctatggagctggtggtgaaaacccagaatcgttttacaaagccttcagctgggaggtactcagtgccgctttcaaggttagtaatgtaataaagttatttgattactggtactaagtatgtaagtgtcggtttggtataatttttttattgagtattttttgttggtggtaaaaaaaaaagagagaaagagatgagttagaaaggctgtttagacaacaaaagcgagggagcatagtgaaggcgtcaaggcaacaagttcaggagctgagtcgtcatgctcaaggtagtggtggcaccatttggccgtttgggccagaaaccagatcttcaggtcctttcaatctattccgagaccatactgctcagtctaaccgctatggccgcctttacgaggctaatcccagtgatcacaagagcctccaagacctcaatcttatgatctcctttgccaacatcaccaaagtacgttacacgtatcaactcatgaacactaaactcttctcatatatgtaccattcaataatgccattaattatatataataacagggagctatgtcggcaccattctacaactcaagggcaacaaagatagcattcgttgta

SEQ ID NO: 202099 - DNA, 557 bp, Cannabis indica
aaataaataattaattaatttaatggccttagttttaatagtgcattattaagaatagcatttacatacgtgtaatggtatgttctcatcaaccaatagttaaaaagttgtgttcttagcaaaaaagagttaaaaagttgtgcatataacaaccacacataatagaatgacagtcatcgtctacataaatggatgcagttatgtcaatgagcaaactgcaatttaattttacaacattttcccctctaattgtctccctttttcattaatattcattctaagttaataaaacagtacacattacaaagatgattccttgaagatttcgtatatgcagtgtaatttctcttgtttttcataaactactataagaagaaacaaatagtttctttattttatttttcttagttccatgttatcttttttctttttctttttctctttctctttcttcccttcttaagcagaaatggaagaatgattatgcaaaacccacgtactggatcatactcgaaaatcatgttcatctctgtttcactcattcataagacaaattc

SEQ ID NO: 202100 - DNA, 1359 bp, Cannabis indica
atattaaaatatgtccccacatattctattaccaacatttacagtttttgggttaagtggtaatcagtattcccaacgcaagtgcagaaatctcaatcataatcattgtaagatgaaatttaaaagggaaattacttataagaatactcaggtattcctgatgctgaaatcacattgctcttcctgaacccatcaagccagaatgaggagccattccgccctgatttgacaggggaatccggcccaatggtggaatcagacagaatggaacaagaatcaataccattggcccgtataggaatagtcgctgctcttctagaactgctgttcccaatctgggaacgctttctatgataccgaaagcaaaagaacccagaaatggccaaaagtactccaatcaccacaccaatagaaatcccaatgatcagcccggccgactcgtctttcatctccttctaaaatcttttaccattccctatgcagttcaattctccaacacatttacacaactgcaagataaaccccatcaaccatttaagaggacttggtcaggaaaaaaaaaccaaggataaaataacaaattttgatattttcacgctgttttatcgtctcacacaagaaaatccgaaagatgatgtcaaatgtttgacgattcatttggcattcacagccataaaataagtcaactcaataacataattttccatatctacaaaccaacaatctagaattcaagaagaaaactctgatttgaaattagcaaaacagaagctcaaattttcaagtttttgaagactagattttactttttgttaaggaaaatattgttacaaaatcttaaaaatacataataaaaccagcaataattatcatcacggaatcttattaaaccttcgatgaaaaagactaatacccaacagtttttctttaacataaatctgaataagagctacataaatgtgggaattcacaaaactcagcaaccagttgaaactccattttacttccgttatagtcgacttcgttgaaaaaaaaaacgaaagaaaaagatctactcttcaaatcagagtctatgcattttaacaaaattcttataaataagatcatattttggactcccctacaaaaaaaaaaacaataaaagaaacgctcattcttaatcacaggaaacgcccatttgtggttcaagcaaactcaagaagattttgaatatgaaagcatagaaattacctttaaaaaaaaccagaaatgaaaatgttaggaaggaaagaagatgaagagctgcagcgtactatagaaatgtggcaaactaagattccatggatgagatgagagtaatgagagaattacaataaaagt

SEQ ID NO: 202101 - DNA, 1148 bp, Cannabis indica
ggacctgggccctcagataaagagcaacataaggaattactggcagcaaaaatcaccccagaggaagtgaagaaagcagtttttggcataccaggttacaaagcaccaggtactgatggctactcttgtttcttttatcaagataattgggacacagttggggatttagtatgtgaagctatcatttcttttctctttggtccctaaattgaaatgccccaacacagtgtaagatttcagacccattgcttgttgcagtgtggtatataagattgcatccaagctgatatgtgctagacttaaacatgttcttcctgatttggtggctcaaaaccaagggggattcatcaaaggtagatacattgggcacaacattatgatatgtcaggatcttattaggcattatgggaggaaatccaataagcctagctgcatgataaagctagacctttagaaagcctatgatacagttgagtgggagttcattgaagaggttctaagtgcattcaaatttcccaattagtttgtaaagctcattatgaaatgcataaaacccctagattctctatcatgtttaaaggctcaatgcatggattttttgcttcaagaagagggctaaggcaaggagatcccatatcccttttactttttgtattggttatggaatacttgacaagaatcctaaaaagagtgggtatgaaattagacttccagttccatgacagatgtgcacaacttcatttaaaccatctcagctttgctgatgatattttattgttctataatggtgactataaaagattgatatatcttcttcagggtctgaagctcttctctcaaacatcagggttgtttcctaatccatcaaagtctgctatgtattgtagcaacatgccaagacaggatgttactagagtacttgatgcatttggattctcctaacaacaattgcctttcacttacctaggtgtgccaatatgtgctaaaaagatttctagcaaggagtgttgcatacttgctgaaaaaatgactgcacgcataagaacttggagttctaggcatgtctcatttgctggcagagcagtgttaataaactctattttgttaacaatccatgcttattcaagccaagttatgctattgcctaa

SEQ ID NO: 202102 - DNA, 928 bp, Cannabis indica
gaccaacgctagtttagtaaatagcgagtaggtaaagtgaactgttgttaggtaaagtgacatttctttgtagtgaacggggtggatattgtcggtggggacttagagagagagagtttttgaaataaaaagagtaaaattgatatgttaaagaaatataaatatagtttggtataaaaattttagattgaattgttagttatagagtaaagttttaagcaaatttcccttttaaaaagaccagcttcgttcagtaaaagagttctgaagtggagcagtgtcaatgtggttgtcttctaaaaaattgtgaaaaaagagattttttaaaccatgccatacagaaaatagcattgttgtctgaaaaaatgatcgaagtacttctttattgtctttgagttggagtcatgtggagtagttactgctttttggtttgatcgtggagtctatgctgtaataagaggtacaaattaacatgatttgtcttcgtttttttttttttttaaattttttatttaagcgtttattacaatgtataacctttattcgaacctaaaaccttcaatacagacctactctcctataacaacttaagctatcctaaagtggataaaggtttctctcgttagtatggatcctcaaaggataccttttaagccaaggaaatatatccaacgtttaataatgagtcatatgatcctattaaatatgaatcacacctaacagtactaccacaacactaaattaatctcgtatacccaaacccaccacacttaacgtttacccacctttgtatccatttgacaatgtactgggaagtgggaatcagaaacagtagaagcctcacccggtaaaatttccccacacctataaattaatttgtaactcttgtagttattatagacaactaaaatttcacgtgggatttcag

SEQ ID NO: 202103 - DNA, 822 bp, Cannabis indica
cagagatcatatggacagaattatgtcgatttactcggagagatctcggccacggatccacacttgcagaagcttccatgctagctagtgcagcagagtatgctatggtaaaatctggaagggaaagataggtctttttactgtgataatgatgtggtggtggcaaattgttctaccacttgcaattcgaatcaggttttggacatcaagggagtggctgatcgattcaatagcgcggcttggttattggaagattcaaagctgagaaagattgataggaattttcaattttttggctcataatctgctaaatgggctgctgcagttaacactactggtgttcttgacttggggtccatggatgccaacatcttttcggatgttcgagaatgggccccagattaatggcggatcatcctatcttgtcacttgagtggaagtgttagactgttgttgtttgttttgacttgttattttattttctgttttccagtttttgttatatgttgcttgtggtgttttgttttgctgtagtcggctctgccgttttccttttttaatgaatggccccccctttaaccaaaaaaaaaaattaaggaagaactatatttggtgagggaaaatttattgaaaagggatcttttgatgttgtagggagagctatttatggaggttggttattaactaaattataaataattgttctaacatttatgctatataacaaggttgtaacaaaagtaaagaagtacatcataataaacattcgtttatgaacaaatttttatttatttatataatgcttgaatttaatttagtctt

SEQ ID NO: 202104 - DNA, 927 bp, Cannabis indica
ctaattttaaaaattattatatcattaacttatatatgtcataaattctaaattacttattttaacatcttaagaaattactaattttatctatctttggtgattttgcaaaagttcttgctttattggtaggattaagatgggctaaaggtactttttttttcaaacattaaagatttattatctggttttcctaaagcatctctctcttatgttagtcgtaattgtatgttgcaatgagttttcttggatgaaagaaacccctcttctttatggttgttttctttgtcctgatcaattgaagtgatcataataaaaaaataataaaaataaataaatacttagaccgtttatggtaaattaataattcttcatttgaaaaagtttagtaaataacagttcaatcgtctccacagtagatcaagatcatataatatgagcaatatactacatcaagtaacagtataaatatatcattactcccactgatctttcatgtagtattgattaacgataatgtttcaaaccttgaaactaatattttgagctcgtttaaacgtagtattagatcatattgtattgtattatatagaatcggattatatatccaatttttatataatactatgttgaactttaatttatactaaaacattaaatatttagatgcccataaaagttaatattagttctacggttccgcattatcatattcagtgagaaagagataaaatgttgtttcaaagcagtttgatccaatttgttaactaaggcatgttgttttcactcattgtagaaaaagctattgcaatacttgacaatccatttagctgtgcttattattgctggcaaaattattgaaggtcattgcaacaaaaaattatcagtttctagctttacctcaattaatattattatttgtttttt

SEQ ID NO: 202105 - DNA, 635 bp, Cannabis indica
attcactattttgaaaaaaataaaaaagtccaataatatttaattttaaggcttaccaaaatctcttttggactttgtttaaaactaaaccaaatatcatcgttcccaattctttttctattatggcaattagcatttagtgtgaaaagttcaaaataatatttaaacggataatataactggctgacaatttataactttgtttagtaatcccataataaaattactattaattgaattagttgaagagttgaatctaataaattattgtaaaaaagtataaaattattaatatattacatctaattacttgtatgaagtattctaattaacactactaatttttctagtcttaaaataataaaaccccgtagcaaacctaaaaatatgaaacattacctatacactaacttattccaaataaaaaggattcccaaaaattacccttaacttttaaggttattaaaatttactaataattatcaaattattaaatttaaagtattttgttcaaatttctatttaattttattaactaatcgtcgattgttatattataaattgtgctatctgaactttgctatctattaaattactatctttcgaatttttgacatgtatcacattgtgcctct

SEQ ID NO: 202106 - DNA, 899 bp, Cannabis indica
caacttacggtgtagcaaaaactcaccacaccagccaaaactcacctaaaaaactgtcagctcaccttaattccctacagcattgccaaacccttttttcatacacctttgagcataaacataagtgataggtggtctatcaatatccccccccccccccacccaaaacaagtctcaccttgtcctcaaggtgaaagtgcggaaattgctcacgaatgacagagaactcctcacaggtggcctccgttgcaggcaggttgcgccacttgatgagagcttgaggagctatcaagacttcctcgggttcaagcatccatttcaagtcagcagtaagtcccgaaggtagaaccattggttgttgttgtggtcccaaggccgcccgaaggagtgacacatggaagacagggtgaatattagcatgtgcaggcagctgcaacttctatgtcgttgcacccacccgagctaacactggaaatggaccaaaataccaaggagagagcttctcgttaatcctctttgcgactgtcctttgttggtatggccggagttcgacatacaccaaatcacccacttcaaaagttacgtctctccgtttcttgtcaccttgtgccttcatcttctattgagcccgctgcaagttctcctttaccaatacaatagtagcatctcgtgcttggagttgttgctcgacttccaaaactttcgtactggctggttcaaaccgaagtagtgggggtggctcacggttatagagtgctttgaacagggtcatcccgacaaagacatgataagtgtaattataccaatattcggcccaagccaaccacttaaccccatttgttgggctggcctcccacgaaacaccagagaatggtctcgagacagcgattgaccacctc

SEQ ID NO: 202107 - DNA, 762 bp, Cannabis indica
aaaaaaaaaatcaaatagtacataaatgttgtacaaatatctctaaagagaataataatactatgccttcatttgtctttgtaaaagtgaattattgtttaaagcttataatcttgctttttttatttagtgttgtcttttagtaagcatctgtgcttttttgttaatcttaggcataacatgtcaattttcttaaattggtggaattgagaatcttattttgtttttattttatttttatgaaataactgaaatttattttgttccctttctcgaatgatctgaaaatgttttctgaaagatattcttcaatatatataaccatataattattctgaaatatcttcttcttttttttctttttttttttataaagttacatatatctctaataaaataaagaatataccatataattaaacaagttttttattactataatgtcacgttaaattaattttacttgatttagtgcaatgaccataaaaagtgtgagataatattttctttaattgagatgtgagcacgtacaagttttttttacaatgcagctgctaacagattaattattaaattaaaattataaaaagagatcatatattaataataaaaataaataataataaaagtatttaaatttttgaatttataaacattataaacttaataattttttcatttcgcacaaaaaataatttttaatttatactaattacaaattcaaaattttaatatgaccactataacgtatatgactatgaa

SEQ ID NO: 202108 - DNA, 1543 bp, Cannabis indica
aaaccaaaattattttctctcattctttctttctcaatcttttaactttcttgttttattttttattgggaatacactgctgagcatcacttggtttggtcgttttttttatataaaaatttaaaattcgattttcgatttggattgctgcaattcgaaaaccgaccgaccgtattgaacctcggtctgatcagtttaaatgcctaaactaaactttttttagaaaaaaaaaaaatgatccaatttattctataaattcattaatattaatattaaagttaaaagaataagataatagttttttaacaattaatttgtatgtttgtagttgtaacaataatatattattagtaattataatacatctaaaaaaaatttaataaattaatatatatgtataacgatcgatttattattcaaaaaaaatcgaccgttcaatggcgcttttaaccgttagcggtttttttggttttcggttttgtcagtttcggttctaacggtgttcggtaagtcagtttgaacggttttttcgattttttggattttatgctcacccctagaatacactcatttactaccttgtgttttcatgaaaaatatatttagtttcaataatatttaattagtaccttatatgtttaaattgtataaatatttagtaccctaaagtaaaatttaatcgatacaattttatcaatttaaccaaatatttctcaattatatgtaatcaaataattaaatttgatttcaaaattcataaaattttagactgttaaatgtattgataaaattttatcaaaaaaaattgaatttaaagtaccaaatatatatatgattttaaaatacaaggtactaaataagcattattaaaaatacagggtaccaaatatatagacactcttttttttatttttctaatttttttaataatttgtgttttcatatcattaaattcttattttctatttagaaattattctaaatatactaataaaaaatgacacgtagacaataactaaatatttaatggccaaatacttacggaagttttaggaaaaaaaatgggtttcaaaattataagtcgggttcgggtttcattaatttaacatctgaaaaaactaggttacagctgaacctgcccgaaactcgaatgtatattatttttacttttttttttatatattttctatttagccctaaaaatataaacttaaaaaaaaaatacctatttttgaaaaatgatatatcttcttccttcatttattttcatttattttcttttcttttgttatgaaaaaatgcataaaaaattatattttcaaaaggaaaaaaggaccagcccaatccgaattcagtcaaaactcacctagacccggtccaatccacacccgacccactcgcacccaaaactcgaaaacccaagtcaggaatttggtatactaatcttaaaagaaattacactctataccttttttatgttgtccttttttatttttaccctcctttttaaagttctatctatttttacctatttttttaaata

SEQ ID NO: 202109 - DNA, 860 bp, Cannabis indica
attaattatttgatgtgaattcagtatgttctcatactctcattttttttttaaatagtgtttcccttctattccatattttgaaaaaaaaaaaacacacacatacattaaacatattttacatattattgaaaaaatatatattattaattcttattaaagtaaaaactaaatatatattactttttaaatagttataaaaaataagataaaaaaattaatacaaatgaatgttaaaaaataattaataaattaataattatttttagtaagtgactaggcagatccaattggtttcttagacaaccttgtgagttgtgagacacggataataactaataattaagttaaggttttcctaagtacatattaaattaaaacaatttaaggttttaaatatataattaatttgagaaaattctctgttcgtgtaagtaaaggtaagtaagggtgtttttattttccatagaaattataattttttttttttttttttattttttatctaagggtatacattataacactcttattacgattatataatttatagaaaatattgagtaatttaagctatcgaaaaaacatgtacagttagttcattgtctgtttgtttaatatatatataaaggtgcgattgactttcttaaactatgtttttataataatataaatttatttgcactgttatatatataaagaaattgtgttataatgttttcaaattctccaaataatcatatcaatgtaacactcttttgctatatattagtgtaatttccctataaatattatatatatatatatatacaggccggctctgacttttagtgggccatagaaaaaaaattaattttggt

SEQ ID NO: 202110 - DNA, 817 bp, Cannabis indica
tttgaactatctcttacatttctttttgctttcggggacaaggattctccttttcattaatacagagcaaatatttctccattgccgccagactttaactatgtaattactttaaatatttcaaatttacaaactatatatttagattcactagatatttgatgcatactggatgaatttactttttctaagtttagtctagcttctaaatccctaagattttggttctaacagcctggacattaggagattcactatatgcttatactttattttttattttcacaaattcgtttttataaatattttggaacctggttccaacaacctgaaccttgaaattgaataacttgtttctacgaaagtttaattaacgtatgttaatttagcaaactttcttctcttcaaatatcgtaaggtagttccttacttccatatcccttaggcttcggtttcaagaattacttcctattctcatacttggtattaattaggtttgaagccatgaatttttcttagtcagcctgaattaacttagtaaacttattaacttaggaaatatggtaagatagttgcttacttctagttccctaaggcttcagtttcagatagtactttctactaccatacataatgttaataatttttgaagaggtataagatatgctacccccaagtgattaagagtcttgactcttggtcacattgtttcaagacttggagaaaattataaaatgacaagaaaaatcccttctgattttatttaaatgattcctaccttgaggtgtacatggaaataaaacataaaataaaatgt

SEQ ID NO: 202111 - DNA, 2131 bp, Cannabis indica
cactaacatcagtggaccttattttactatgttatgcagaaacaagtattttataactttcatagatgatttttctcgagattgcctcacctacatgatcaaagaaaatcgaacgctcttgataaacgcaaaatctttacaaatattcttcagaaacaattaggatgagtcatcctagttgttcattcaaatcgtggagaaggatagtatggttgttattcagaatgtggacttttgttgagtacttacaagaaaattatatagttgcttaatacattatgcttggttcaccttagcaaaatggcgttgctaaaatgagaaatagtactctcatggacataattagaagcatgatgagtatattaaatctaccagaagcactcatgactgctacttatattttgaattgtgttttaagtaaatctgatcctaaaactccttttgagttgtggactaggagaaagcttagattgaatcatcttcatgtatggggtcttgagttgaagtaagaatttatgatcctagtttgataaagttagatctgagaatagttcgctcttatttcacgagttatcttatgcactcaaaaggctatcacttttattgtcctactcgttgtacaagaatacttgaatctcaggctgctaaatttctagaattggatgttgctgaaacattccttcaacatctcttgaaacatgacagacacctaagggaatttttatttgtgtgtctttttcaagagatgataataataacagtcttattcctactctagttgatattgctcccattgctgatgaatttattgctcctggtatcaaagatgacgaggattctattattgatgaacgacctattattgatgatggacctattattgaagaaggtattgttgttgatgagggtcctgttatcaataaaattcaagttgtagaagatgttgttgaaaataatgataaacaaataaaagctactctagaagcaccacctctaagaagatcgcaaggatacaaaagaaatcaacaaagtgtcatgataattttattgatcttagagaaggagaatatgatattggtcattttgtggatcctttcacttatagtgaaacacttaataaactacattcttcaaatgaataaaagatatgatgacagattgagtccatggagaaaaatgatgtatgggagttagtgctattgcttgatggttttaaactaatagactgtaagtggattttatgaactaaaaaggattaagggacaaattaagaggtataaaacatatttagtcgtaaaagactttactcaaagagacggtattgatgaaactttctcggatgtttccaccaaagattcattgagaattattatggcttaggttgaacattttgattaagagctgcaacaaatggattttaaaactacttttcttgatggagaatttagagagcaagtctatatgtgtgaacctaaaagcttcaacgaaaaaggaaatgaaaatttggcttccaaattgaaacgatccatttttgtctcaaagagacatctcgccagtggtacctgaagtttgattaggttgtgacatcgttttgttttgtagagaacaagtttgaccaatatatttatataaagatcagtgagagtcatcatattttttctttttctttataaggataacattttacatggcagcggtaatttctcatttctaaatgagaccaaaatttttttgtctaccaacttagatataaagaatctttgagaggcattttttttttcgaaattaagattgatagtgacaagaataaaaaaatttcttggcttatccgaagaagcttacattaattgtgtgcacaaaatgttcaacattaatttatgtaaggctggtgttgttcctattctgaaaggggacacatttactaaggaacaatgtcctaagaacaacttggaaagaaaagtaatgaaaaatatctcatatgcaagtgtagtatggaatttgatatgtggtcaagtttgcaaagagtgaatagatttatgcttgtgtataagcctgttgacaatctttgagttctcggttattcatatcagatttttgtagttgtgtagatgatttaaagtcaacttttgct

SEQ ID NO: 202112 - DNA, 753 bp, Cannabis indica
ggcttattgctaatagctaaggataatacctttggctggttatttttaagtttttttattagattatgttttacttaattaaatcaagtggtaaagcttaaaaatttagtttttattaatatatttgtctttcttttctttgtaaatagacattttaatataatttattttttagttattgttttgagatctttctaggtagtttttcagtgttacaatttacaagctaaatttttagttcttctagtatgttgtttgaggatgttatagttttattgtctaaattttaatacaagttttatctcatattttgctcgtttattttaatagttcatgaatatctgcttcataaatttataagtgattctaatgattaaataaataaaattagaggccgtttgaagagatgtcagaataatctctgggttatatagggataagttgacgaatacctcttttttgtatctattaatcaaaatacatttatattatatttcattaaaatgtacccacttttgtgagtgagttacccaatatactcttatccttcacttaagtctagcacataatttttattaacttaaggagtataataggaacatcatctataaaagtaggcatatctcaaaaaatataaaaataaaggtaaaaattaaaacatataaaataaagagtaggtatacaattgtaattttctcagttatatatcacagcagcccattattcatttccaagccaaataggcccaatggg

SEQ ID NO: 202113 - DNA, 508 bp, Cannabis indica
tgtcagcaaactttgccaaaaaagggttcgacccagcaacgtctttcaaccaacagtactgcaccaggcttgactggaaacccagtgggcactgatgagagtaatggtctcctcttagctgccgtctcgacgtgatcttttgacgtcggtcttcatcagcttcgtgacgcaaggaaaaggtaggggaagtagctgctggcgatggatttggtcttggcattagcaccgacaccggagttgtgagctggatagagtcattatatttgacgacccttcatgagtaagtcatcataaccgcatagggtcttagcaccctcgcctgccccaagacctcttgtaccctatcgtgtctacatagttatgctttagtcactactacaaaaatgaccttttgcttcagtttttaagtgacatatacagaatttgtgtcggtttgtgtaactgacgctataaccatagacacaaatagtctacttttttgcttcacttagcaacatacgctaaaaga

SEQ ID NO: 202114 - DNA, 1594 bp, Cannabis indica
gcaagtagttgtctgggaagtcaagtgcgacactagctttactgaggagcccgtaacactagaaccgtcgttaagagaccaacaacaggctgtagaagcaagttaatcgaagccccttaaacaatgtaaaggcatacattactttagtttccatgcataagatgagggagactactccaaaactagtcttgatgcggctaaggcagatgctagggtagagagcttggagatgccttatgtcatagtccttcacagattgtggtcagaggatccttccatactctaacatattgataagactgagatggaggaggttaccaggaaagtactttccatgactcgtggcaaatacctcgaggagttcccacttatggtcgacatccacaatgacaagggaattagtgttgtggccttgagctctcaagaatatgtagaaacggaggtatcttttgcccaggccgaggagggacctactcaagatgctgctgaggctgacctagagccggaggagcaatttgatgttccagccccaactgtgttaggagcgcctttaccctcccccagactattgaggacatttttttttattttttttttatcttttttcatctctctctttttttttcacagaattgtattttcctctgcctattccgcagggctattcgtgaagcttatctttagtgatatcttttgttttcttttttgacagagcactgtattaggctttgacatttttaaagtgtagttgttttttaagggctgtcttcttagaccgttctgaagtgtatgcctccaacgagcatcactcaaattgattgaaattctatccctatgctagcttatgggaactttaagaagtatctgcttcctctcgccaggagggatggtctcaaccctttgaaaatttcttgagccaattgatgctgaaaacatgggtggttttccaggttgttcccagggaaccttatgatcacaagactttgagatttttttgggcgcttaggcctctttatcttagaaggccgatttcacaaactatagacttcagatcgtatttttctgaccaggataacaccgaaatctatgggagttcaagcaaagccttaatagttttaatctttttataagattccttctttaaaaatttttgagaaggaatttaggtgagtatctcacatttcatggagttttgggtgcaaacgcttctcctttcatattgagtgtatttattgagctttaagaaggaattaaagcagtcattccttttctaaggaattcggttgaaaatgcatcttactttacgtaaagattcataaaaaacaaagcaaacaaaatgcgacacacaatacgttatttgggggctcaatcagctaggcatggtacccaaagtgagctgagtagtgtggacctctccaccttcctagtcacttgtttaaaacatagcttgtggcctaacaaacataaagtgtaaaatgtaaacataaaatacatttttctcattatatgatgctcgaaggccatttgtccaaaacttaattacatagattgttaacaaaacacttcaaactgtgtcactgcctggtgtccgact

SEQ ID NO: 202115 - DNA, 934 bp, Cannabis indica
catttgttcaagtttaagatcctcgattgctaccatttccaagatcattcttattgatgtcttcttaataattggtgaaaaaatctcatgaatatccaccctttctttctgtgtaaagcccttggaaacaaacctagctttgtatcttgctccctcaactcctaaaatctcctctttgtatttatagacccatttacagcccattatttttctgtcagagggccttatgatcattatacaggtcttattttttattaaggatgtgatctcatctttcattgcgccattcaatttgatcctttcctttgattccatttcctctttgttagtcctaggttattttcacataattcagacactataaaagaatagtgaatgatatctacaaatccaaacctcatgggagacttatgagttctttagtttgatcctgggtcaactgatattgtaggatgcttgtatcctcatcctcttccaattatagttcttcttgaccaatgttttcttcaccattttcttccacttcaaactctattttagtagctgttttgttgacatcctcaaactgtatactgtcatttttcttaggtccaatgtttgaactcaattctagtgtatctttgtacactttatcttcttcaaacatagcatccctactaatgaagaactttttatgattaccactttctatgctccacagtttgtagctttttacaccttctggatatccaagaaagacacaatttatgcctcttggttctagtttatcttgctcaatgtgagcataggcaattcatccaaaagttctgaaccttcaatagtcttcaaggtgacctgttcttgcctcaacaaatgtcttaaagccaatagcagatgagggatattttgttggttaaataaaaagttgttacagctgcttctgtccaaaaattcc

SEQ ID NO: 202116 - DNA, 1344 bp, Cannabis indica
taggtgatctcctatttatacacatacaagagtacaaatattaagaaactaagacaaatggaatattgattacattaatggtaataaataaaagatttggacatctacataattaataatatttataaaaatatttttattatgaattttaaatttattttatttatttcctatttctattcttattcctattcctttatttttaatcctcctaactaaacgccacttaagtggtttgctaagtagaaattgttcaactcatagcaattggcctatttgtgggtttgggaatgatacaaatgcacatgtagctttttgatgcaatttctcacaagacatggaaacaattagatcttctgtttctcataggacaaaatgatctatcttttaaaggaatgttactttatgcataaaaaataattgaaaaggaagcttttgagcaaatgatggacatgcaatatatccacagcaagtaaagatagatgtgactttcctcttattagtgtgaagtacgtatggagatgagtcaagctcgaataagtatttcagcagtgcagggacacaagtatcacagttaggaagaattgtggatccaattgatttctaactttatgtggatgcaacactatccacattttcaaattttggtggaagttggagcaactattttctctgcacataaaattataaaggcattcctatctaaacctttatagggtttattatatttgcttaattgagatttacttttacttatattgtagaaaagtaatgcttaaacaaagggatagttccctttagttagtgattcattgctaaaggttatgatacttagctaagaatgatgcctgctttttaatagatatgtttgtgatacaagtttactaatagtcttctaggcagaagctttagctctattggtaggattaaaatgggcttaagatgttggactacctattatagaggtcttctcagattcgttgtcactagttttagcactggagttattcttcgagtaccaaaatgagctaggggttatcttttttgatataatagttttactgtctagatttctaggactttctatctcctatgtcagtcgtaacgttaatgatatggctcatggactagctagacatgtccttgggatcgccaatgacctttcttggatggaagatagttctccatatgcccattgaaagtaacctttaaaggttttattttttgacataaaaagaattagatgtaatgtttacgctcttaaaagtagaaactcaacagagaagttataattatcacaacatattagatacttttatacttttattattcttcttgttttga

SEQ ID NO: 202117 - DNA, 1629 bp, Cannabis indica
tatttataaacagaaatgtcttaaagtcttttcaaggcataaactttcaagtacctgtacgatatcatatgagtagcattcggaacatgtcgtatgcccttctcggcagccagaaagatattacgcaaaagaatatccatgcgggaacaagcttccaagatggatcgtctagacggacgaaacaatacacattttagaagtaaagtttggacttggacaaagtatacccacttatagttctatcctgatgaagtcagagtagttaattgttaacctttagtatttaccatccacgaaggccccaagcctcgcattactccaggtggattaggcatgccggacaagtgtcactttttggataaagcatacaccgagtaaagatcttcagagatatttttctcaaatatctccacaattatagcttatttagaatccctattttcaagggacatgattaccaaactgagagattcgtgggactttatgtttaaattccctttcccacgattctcttcttttatttcaagaaaaaatatatttaatattctctaattaaatggaaaaaggctagagcttcttccttataaatagtgagccatattcactaaaagggggagggcttcttctcccttaggcactaagaacaaagagagaaatacttagaaatatttgaaaaattttgagagagatcaagaaactcacttgcttatttcctcataactaatacaactaaaaatggagtagactattactgttgaaaggagtaacctctataaatttaatgtgtcattttctttacaaacgatcattattataattatttctatcgctttaattgactcagtattgttgactaaaataaggtcaacattgtacatcaaagtctttagcaaaatttggggtgcattgagttaatttaagatgaaattatagctcgacaaaggtatgcagctgctcacagaaattacattcaatatcttagtaaaaaagctaagattgagtagataaaaagtgggaatgataacaccaaaatttttcctccgagcttgaatataagaagacaatagaattcaatccattccattagagatcaagatgacaattgaaaagatgatcaagaatgagttattgttgacggtgagaacttttcgaccaagttaagaacaaaaacccttgagttattttttaaataatgtgattaagtattataagtatgatggtaatggtagtaataatattaaatatgagatgagagaataagtgtaaaatattttatttgaataatccattcttacatcaaaggttttaaccccccacccccccttcctcaaatgaaatgaaggggtatttatagcaagctctaatggcccatggtcacaatttgaattaccctaagtggtcaaaactcaaagtagtgaaggccaggtggtgatggtcaggtgtcaagtcatactgacacttgggatcacgctcccactaccctgtcccctggtgaaatcctactttatcagcggttacaagtttcgtggttgtacctcttcgtatgtccttaaaatgcattgtccttgctttagagattccttctcggatgaggctcaaatattggttgagcctttaagttattgataa

SEQ ID NO: 202118 - DNA, 1499 bp, Cannabis indica
ctactaaaaaattgtcaaaatctgtgttgcaaaattaaggcttgtgaaatgttaggtttatgctaagctatatgtgggggttaggtttatcaggacaaaaatattgagttagaaaaccaaaattttttaattacatatacaaagcaaatatgttataggaattgattgaattgaactatggtatgatggcatagtagagtgggtatttaccattcaaattaatggggaattttcattttttatagttttttaaagtataaatttataaaaatataatattttttcaaaaaagttattttatgattttttttagagaaaagataaaaaaaatatagaaaaaaaaatagaatggtacctggttacctccttatgttaaatgattacctttttggttaccataaaagtacttggttacccttctttgactttcccatatttttcaatttttccataaaataatttttttgaaaaaaaaataatcaaatttgtaaatttttccaaattaattaggatcgattttggacagactgaccaatcttgtgcctaagaccgtatagaccccccaaaaaaaatcttttgcagaaatatgcatattttatggtatttttcaaaattggcctactttctttgaataaatcttttttttttcctttgagggtccaaacaatgtgaggccaaccttgaaaatacaatatagagatgataagtaagaataggaaacaactcattttaggtggtgtgtctgcaattgcattaattatagggaaatttaggatgaaaattaattaatgtgtggtctaaaaatatgcatttaaagttatttagggtgtaccccaaaacaaagggtgtaattggcgtattttggtgttggttgttatttttatataatttttataaaatatataataaataaaaatatttgaatgtgtgaaaattttactaaaaataataatttgtctaaattcactaaatttcattggggattgatttagattagatgtgcctcactttagaaagtaagtgtatttgtgaagttagtgtgggcttaagctcgtatcaaagtcagctcatgtaaatttgatgattacactatatatctcttttaatttaatgtttttaatttttaccattttttttaatatctattatatttaccttttttttataatcattctactaattttacctatattacttcatgataattttcatttttctctaattaaaattttaccaaaactttcccacaaacctacacatccatttacaaagaatacaaatatattatgtttgaaattatgtattagttatataaatgtgtaaggataatttggatacaatactcataaaaaaaactgaggaaattacatagtttttttgattaatgaatacaaaaaaatattatttttcaacttatacccatcttatgtatatttgaattcaattttatttaaaagtaaatttagttaatatgtataaaaagaggtattcttcaactt

SEQ ID NO: 202119 - DNA, 508 bp, Cannabis indica
gtcatagttaaattttgagaaaattactaaaagttatcttagagtatctaacattccacattttatcaagtgaatattagttttccatcttatttattaaattaaatatattaaatgaatattaaaatgtacaaataacaatatgttatttcttgtggtgactaatactattgttatttcttgtggtgactaatacgttaaggtgttttttaatatttttcataaatttaatttgaatcaggtagaattcgttatatgtaatttcacctgtaatatattacgtcactaaactattatattgagaatatctccaatgctctatatttagatgtacttttccaattaaaatttatgctaaaaacctcaaatataactaaggaaactaaatataattaatagctaaatgaaactgagcttttcctcattgctataataatttttgaccttttcttttatttcttgtaatcatacacattaacatataataaactaaattaaatatatattt

SEQ ID NO: 202120 - DNA, 1065 bp, Cannabis indica
gatagtgtatatttaattatttaagattatttataattttttaaaatttaattattttgttatatttttttagagaaagactcttattataaatgacacaaacttatttacaacaacaaaaaaaaatagtagaaggattatcttctaaccaattacaatcattatttaacgcttgtatatatagtgtaagagctcgtttgaaatgtcgtattaggttgtattgtattgtattgtattatattgaattggattatatatcatatttttatataatactatattaaactttaagttatactaaaatattatatatttaggtgtccataaaaataccacgtataattttatataaaatataatgcaatacaatacaacctaaaacggcatttcaaacaaaccctaagtctataatacactcgtgtaaatataagtttgggtatattcttttctgttttagtgtttaaatttttttttaaaaaaaaaaataaaaattacaattatataaatatttaaaaaaatttatagttggttgaaagtaattataatgtagactattattataaaaatatatatatatatatatgtgaattaattttttttctaaataaatagataacatgacacggtttataagtggtatgttgtactacatttttttttttttttgaaaaggttataataataataataaacaatgaagtagttgagaaatatatagggtgtggttggcctcatgggaagaacatggtgatctttcttctgagccgtccgattggaaatattcagtgggttttttgctttatggatatttgctacttggcactatgcactaactgaaacattgatcattgctataattaattgattatcattatcttaaacaaaagtttggtcagaaatgtaggctgttgtagattaatataatgatccaatcttaaacacaatcttacccaaaacaaagtatgtaacagcttcgctaatttatttatttatatataaaccaaagtttggtaagcttaattcatctttgtgtttgatgaaaaattgggaatttgggtaggtaag

SEQ ID NO: 202121 - DNA, 907 bp, Cannabis indica
taacggtcggtttcggttttttccgtttaatggtagttttatttgtttagcggtttttttagttttcggttttcatcggtttcgattctaacggtgttcggtaaggcggtttgaacgatttttttcaattttctagaattttatgctcacccctaattgaaatgaatcaaattatatgatgggattagggatgatggtaatggtgtacgatagaaacctatatcttttatgtgtgtactccagctggttatagactttttccaactctagagggcttttgtctccattatgccactcttttattctatttctcccattttattatccaattatccacccttaataataatatattgagaaaaattaacaatgaacacaccttcaacttatacacttaaattatttaatattaatgataatttttaagtaaaaattacatcatatttaattatatattatagattatagtgtataataatttgaatacagaaaaagtataatatctcataaaattaataaaatttccaaagctatgaacctgtttttattattgtattttattctccaacccaaccactactctatctagtgatagtgactatgtgagtatgtgacattgatttgtataaaatatgtataaatgtacgttataagtagctttgtccatgtgtttggacagcattaatttgtatatttaatataaaacaaaggtccatgactccctctttatttggaacatttatccaaatctcattcactctaattaaaaatatttagaatctacgtcaaatctagttgtataatccgccctaaattaaaaaacaacataagttatgatagaataatcttttttatttacaaaacataaaattattcccaacactcaaataaataataattgtaacac

SEQ ID NO: 202122 - DNA, 636 bp, Cannabis indica
accaattttcatagaaactaaaattataattagttgattttttagctaagaacttttgcaaagtaactttttttctttatattactttaaaagttgagagaacgtttggaacgcgtacatgatccttcttacacgtagaaagaccatactgctttaatgaacgtatatctaatttgattgtgaaatatgaatatgtcatagcatattatctctccggaccctcttggttgttagagtaattaattaattagatatacattgatcaaattatattattgcttgtcatgattgcttattgcattataatgtaacatcatatatatatttatatatagatgagtaatgagattttacaattttatggatctaaaaagagtacatatttaccaattaagggaagggaacgaagaataatctctgcctggctccctggatgccatctaagaaacttagtcaaaaaatatttgatctttcgtagttggcatcacgggagtcatgcaggtttaatttcattaagaattaatttataattcagctgtccaaaagtaaaagttcattaagaagtttgtttgctttttgttattttaaaatacatattaagattatgaaacacaatttaatatattgattgatgat

SEQ ID NO: 202123 - DNA, 517 bp, Cannabis indica
attagataaattcagttcaatttgattgaattagatattaccacctatattaacacacactttttttattaattatttttcaaatggaagagattgcttagcccctcttgtaatcaactagacttgtttagctgctctgttttgagcgatttttcaatatatttgcacttcatacaaaaattaaggaaaacgattagcatatgtaattgtaatataatgtactaatttttttttgctgaagaatataatgtactaatttaggccgcgcatcgtgcaagaaatgggccaatgatgcccgccccttgtttaaatttataattacctttggacccttttcacatgtatatattatgtataaatagaaaccccatcatatgtatatatgtataccttctctctctctttctctaattattacttgtattaaacttcgcgtgtatcctcatggcttctccctttctttatgtcccttctaaacacggcaatggattacaaagtttcacagttaagttttgca

SEQ ID NO: 202124 - DNA, 1022 bp, Cannabis indica
ttatttcttatttattatctatacatatgggttggaataccactggcataccaccatcataaccaatactaaaatcttctaattaattatgtcattcgatttattaaaaaatcattcatattggtatttatctttacaacgaaaaaataataaattcaatactcattaacctttagtacttatttatttcagtattttccaatagtagaataagaatatccccaattcactatcaaagtcaccacctcccattgattatgaactctccacatttataatttttacaccaaaataatattatgttatataaagtaaaactcatattaattggcaatataaattcccataaattgaattaaaatgaactaattaatttaatcacaatccaatttgagtattatgacttaatatttccttatttactgtttatatagatggattggaatacccacaccaaactaatattaaagcccttctaaatagtattgccactcaatttacttaattaatttataaatatatccttagaaattgataaatacaatttttgaaaacttccccctatttgcaaattggtagattccaatccatcctaaataatacataagtcaattacagttattaccatttaaacctttaatcatcttaaataatacaacaaatcattttaaatctttccttaaattacaacttagcccaaatcaaccctacataacaattagtaaaatcagaacaacgtataatttattaacattaaagttttattatatttttaaaattcatgatatcgtgatattttaactaaattaccctaaataattaggggccaaccatattataggtgcaaaagccttaaaaggtaccaaaactattaacaatggcgcaactcaaccatcaaattggtactaaattaagtaagaataatctgctaaatataaatatataaactattaatagggtagaaatacaatagtttaaatcaagaaaataaattaaaataaaatatttagttaattatttaa

SEQ ID NO: 202125 - DNA, 2067 bp, Cannabis indica
cgaattttttaaaatttgtaagatgtacttaaataaccataatagaaaaaaaatttgacttaaaaagttatttcggatactaaaacaatgtattgatatatctcttttaaggggtgctttatagaattttcctaaaatttttttaaatgccgaaacaagtgaaaggtatatcaataaatcaagagaatgtattgtagaattaccctaagacttatgtaccacaaactttctttataaataaaaaatttgggagaggctacatcaactcaaccgtccaattttccttccctgcttttcaaactattatatataattattaaaagattattcaaaattataattagtctactcagaatatattttaatttttttaatggtttgtataacaaaatcctgctcatatagtaacatacctacttttcttttttaaggatataaacagacctactttaattagtgacaaatgacaaaactttgattgatattgcattgggtaagggtttcaaacaataaagaataggttaaattagaaaacgcgtctacatcattgttccgatagaaacgatggcaccggatcatgaaatcacggaattacaagggcgacgtagggacaagggcgccgagcgaagcgagccaatgccgagttttgagaagacatatcggttggggtttgatgagtccaagcttgctagctcgaccccctaagctcttttgtctcgccgtctttaggagccatcagccccaaagagatcagaccatatcagcactacccaaacccaacactactacacatgcgctcaaattccacgcctcaaaactactattcaaaacccattttccacttactttgactttttattccttgggaaaagtttgcatttcgttatggtcttgtgttgttgccaaagttataacaatcaattaatgcttaattcacatttgaaatgtttttttttttaagaatagctaagctagctagcagtatactgttctttccaatatattataaaatgaaatattcaaatagtcgtaataagagtgtctctaagcaagtaagctctgactttaattgttcatattcttattttttattcactttattaaactattgcctcttctttaatttacaaacaaaatctttggtacgttggaataaaaaatcatatctttttagtcctcatagattttatatatatacatatatataattaaatatcacttgtagtcttgattaaaaaattgtaactatatgtcatatttagtcataaagttgtccaactttagtgaataaatttgttgtgatcatagaacatatatttaatcacaacacaacaaattgtaattaattttcgtgactaaaatttataggcttgtctgtttagtaattataattgatatgtattatctacagcttttgtgtacccgataaaaatatagagagcgagtttcaatattattagtttgcgtgcaattttttcagatcgatggtatatatgtactttggtcaaacatgtatacatatttatatattattaagatttgcatgtcattgcatttagttgaataaagtagaaggcgtttacaatagtttatatgtgtagagagttagttattgaatatatatataataataaattaacgaaaagaatttgggtagaatagatcgatcggaggagaattaggtggggaaaaagcttaaagctacaaacacggagccacaagaatttaaacaaacgacaattcttcaacatatgcaaacaaatatacaactgtctcattctagcagcttaaatctatagtaattaatcctatatttctatagttttcacttttaagagacatgtaattcctcttgttgaataactcttcttttatctcttatttttaaattagaactattatgtcttgtgtttacaaatgccccttaaagtttggtattctatgtacccaatcgagaaaaactatacattgttttgggtacttgcaagttgtgaaatgagacatataataaaataacccactataaatggaacttcgctataatatatatatatactaatagttaaa

SEQ ID NO: 202126 - DNA, 533 bp, Cannabis indica
aaaaaaaaatgagagaactttctttttacctgcaaccacagatatgtttttgcctttgtatctctcaacaaataaatcaattgtgtccttaaaggcttttgggtcaagtagtaaagttgttatgtcttgaaacataatacctgcacattccacagccgttaagacaaaaacaaaaaatgagaacttgattcgaaaaagaatataaccaagaaaaaatctttaaaagcaaacataccctttgtccagtaggaaatgaaaataaaggaaaaaaaaaagaaaaaggaatgatttttaaccatcaagctcactgctttttcttacgaaatgtaaaatccactttaatctaagtcaaatgctttggttttcaacaattgcaagtcccaactttttctctttcatttttttatgcagcgataaacaaaagaaaatcctcaaaaaaaaaaaaaagagagacagaaacaaaccaggtttagggaaatttgggacgacacgaatcttagttttgatgtcatggattcgaggatcttcatctt

SEQ ID NO: 202127 - DNA, 529 bp, Cannabis indica
acaatgatctctttgttactcgcttgcattgcctttctcgtttttacaagccagaattgctacctttatttgtgtcagcttttggtgttagagaatttccttctctggatgactatttccagttatggaatgattggacttcaagcaatgacggccgtgtttctaaagctaaatgccgatctttttgggaaggcatatcaaaacattggaagcccgaaaccatagaggctttcaagcaacacttcaccaaactttctgccaccacaggtttggatgatgagattcatttggtagacaaggaaaatgttttcatacccgatgatttgcgcttgaagagtatttttgaaagtgtttcactacctttgtttgtttggttcccgaatgttggtaccttatcgtcttcctcgtggttactcaagacgatctattgctctctaggagtaaaaaacttgactgattctgtcaaattggggagcatctttgcaggagatacaccaaagaaactcataccgaagaatggtttgatcga

SEQ ID NO: 202128 - DNA, 1486 bp, Cannabis indica
atggagaatcaagatgaaaactctatgttcatcaaggaattgcagcaaccattgatgaagagcttgtcaaagaattgaaagataaaaagataaagaaagacactaaatcaaaagctaacactgccatactgttgagccttggtgatgagattctcaggaaagtttcatacaaggaatcaactctaagcctatggaagaggctaacatcgatttactttaagaaatcattaactaacaaattatatctcaagaaaaaattgtatactttgagaatagatgacactaaagaactgagaaaatattttgatgactttaatagaataattttggatcttaacaatattggtgtcaaactggatgatgaggataaatcaattattctacctagttctttgcaggtatatgagcattttgtgaatatctttctatatggtaaggatactttgaccatggccgaggtcaaggctgctctcaactctaaagaaattcaaaaatatgaagagaatggagaagattccaatggtaaaggtctctttgtcaaaggcaagtcagacaaaagggatcacaagaatttcaaacataaagccaataatcataaacccaattcaaaatatacattcaaggtagggaagaattgctactacggcaagaaggagggacattatagagatgaatgcaagttattaaaggccaaactcaacatagacaaatccaaagaaagaggaaaggcaagctttgttacaaatagatatgactttgctgatgtacttgttgtttcaagtcaagaatctggccaataatgaattcttgactcagggtgttcatttcacatgacaccacacaaacacttgctcaatagctttaaagaaataacaagtgggaatgtactcttggaaaacaacaaatcctgcaagattaaaggcattggatctgtaatgttcattatgcatggtgaatgcaccaagattgtttaatatattagattttttcatgaattcaagagaagctagctagcaattagtgaacttgcaacaaaagggtgtgtcatcaagatagaagactccaagaaggcttcaaagggatcttaaattgttatgaaaggaaacatcaggaatgacatttatgttttagatggtaagtctgttactgggaagatagatgcagtagttaaagatagagttattgaactactcaggttgtggcatctaaggttgggccatgtgagtaaaagaggcttgcaagaacttgataaggaaggtttgtttggtgataaactaagaggtaaattagaattttgtgaagaacatgtctttggtaatagttgaagggcaaaactcccaactggcattcattgcacaaaagtcactagttccgctaattcctgaaccatcctgtctatcttgtttgtggacaacgagccctagtgagctctgactacaacaggagcctcatccttagacattgaggttgggatgaatctgtcgct

SEQ ID NO: 202129 - DNA, 1004 bp, Cannabis indica
atagcaacaaataactttagtttaaccatgcctatctttgaccgagtaaccataacatgattatttgtagtaggtggtgttagaattgggaggtcactgtgaagatctgctatgggaatagacggtcgggtgggttagaatttataataggaaggtcaatatgtggtggatcaattagttccatgggtgtagtgatacaaggttgtatgggagtgatttttgggtttattatttaaggtggtttaggtaatataaagtttgtatttagtgagagaacaagttgtatagtagcttcatttggaggatgtggcattgtgttttgagaattattgtaaatgcagtttggagaggggttatggggactgttgttgttgcttttatggaacaatttagaataagaaaaactcttcgcattgaagataacaatcgagctatgtaaagtcagccacttaggtggaggcacagatacccttttgtgatgagggttgataccaaggaattacacacattttaaggttctaaaggccattttgttagtgttgtatggtcttagaagtgggaagcatgaacaaccaaagactttgaagagtgtgtaatcaaatttttgcttaaataacatttcatagggacttttgttgtttaataatggggtgggaagtttgtttatggtaaggcaactgtaacataggcatcccaacagtatgttaagggtagctcatcttgtgctaataatgtggggcccatatccatgacatgtcgatgttttctttcaacacgtccttgttgttgatgagtgtgtgagcatgtgtgtctaaaatccatttcaatgtcttgtagcaggggtttaagaggcttgtactctccactccaatcggtttgtaacttttttatttgtttggcaaccataagataaattcatgtgtatttagtgtaatcatcaatgaagcttgcatagaatttgaatccatctatagatttatgaaaagaagggccctaaacatctg

SEQ ID NO: 202130 - DNA, 1723 bp, Cannabis indica
aacgggaagggtaaaattaagttttgtagaatgttagcctatcctactaatataagttaacttagatttagaaaaataattttaatctaataaataaatataaattcaaatttcccatataataatgttcatgaataataataacatgatcaaggaaaagtgtgtccctagacaaattttatacatgtcgtttaatattaatatatgaaaatgctttataaagtcaaacatataatataatatctatatatataatgcattccaaaaatatatttatatatataatgaaaaatgttcttttcttagagatcttgtgttattttttatgttgaagttaacgatcaaaattaataatattaaattaattaattaaatataatttttttgaataaatttataatgattttacttaaaatagttaaatttaaaatttaattttttatattattatgtattaaaaggtaactaaataaaatcaggtatagatatttagaaatttaaatttgaattaaaccaataaattattatcattaacaaatttattaataattttacttaaaatatttaaatttaattttcaattttattattattaaaatataattaaattatttacaaatatttataaaattatgtagatatatttgttttatgtatttagaaatatcatataactttgaattaaattaaatttttttatcattatttaaattaataattaagttataatagcaactattaaataagatatatcttggtataacttgattatattatatatatatataatttttatattttgaatctatacacctaggttatacacagtcattaagtaaagaatttaaaagtattattttaattaaattgtaaagcaatttaaaaaaaataaaaaaattaacggtataacatcacaaaataagggctccattgataggaaactttaataaaataaaaaaattaattaataagctgttaaaattaatattcctaataatacaatgcataactataactattttgattcttcaatagctagcaaattggaaaacaaaaaaaaaaccccaaaaaaaatctaaattatgaaataaaatccatattcctaaattaattattatacgactccaagtatttgtagtgatgtttacagtatgctccaatttcttcaaacgccttaattaagttgaagaatgttttgtaattctcctcatttggattagtaaatgtatttttataattaagaagaatatgatgcgctctcaaaagaaaataacccaacacaaaatcttcatatcctattaatggagaccgtagcatttgaaaaatatcttcactgcttctttccaattcaattgaatttgaaataaaatttttgatcgaaacaagaacattgagaattggggattcagtgtttgatttaatcatagaatcccagttcttgaaaatataattaccacaaaccactcctctaatttcatgaagtgatttttcataggaataataaacaatcttaggaggattagaagggtaatttttaggaaaaataagtcaaagaaaaacaaaccatggtgataagaattagtcgctgcttgctcgttaatcacaacaactctcataagatcacaccttgactcataaactctaatataaaagatcgaatttagaagttgagacgataaaatctcccactcttgtctcattattttctttagtgacttatttt

SEQ ID NO: 202131 - DNA, 713 bp, Cannabis indica
atagccgacttgaaaggctcaatgttctctcagcaagtagaaaattggctggaaatgcatctgctaattttgcccaaaaacctggatcaagtggttcatccaatacgggaggacagagaaggttcaacaccggtcagaatcatggccgaggacaacaacaacaaaacaatggttacacaagaggaggtagctatagaggaagaggacgaggggatagaagcactggtcccaagccaacttgccaggtgtgcggtaagtacgggcattcagcttctatctgttataacagatatgatgaaagctacatgggaaaccaaccaaatactgcaggaaaccaagacaagcagttttctgctcttgtagcaacacctgagatgctcaatgacgactcatggtacgctcacagtggtgcaagtaaccacctaacagctgatgctaacaagctacaaaccaagactgaatatgagggtaagaagttaatcacaattggtgatggcagccaactgcctatttcacacattggtacaggttctatttaaacaaacacttctaacaccctcctattaaataatatgttgcatgttcctagcatatctaaaaaccttatcagtgtttcaaaactgacagcaggcaataatgtctcaattgaattcttccctgatttgtgctgtgtgaaggatcaaagcatcaggaaagtggttctgcaagggact

SEQ ID NO: 202132 - DNA, 605 bp, Cannabis indica
accctttggatagcaacatgacatgcttctctaattggcatctgttaacaaaaatgaggcactgagcaatatagtgagagttgtacactaagcaatatagtgagagttgcagcacctgtaatacaaggcttcctgaataatcagcaatccctcccattacatctaatcgcccaggtgctctggtcacaaaaatttcttcctgtaatcaaagtattgaaacgacttgtgacaaacatgttcaagcactacttatcatagtaaagtgaagttttttatctgtttattttttgtggataagtagtgtgcctctgttgtaactaatccaaatatgtctgatagttgaaaataatatgaaaatcaatgttatccaaattgtaattcattgcaattataatttataagatgtgatgttatggaactattgtgcatactttcatgtgataaactagaaagaaataacttgtgaaatttgagttaaaatagttagtcgacctcccaattaaaaagtccagcggcagccttgcgctcccggatttggcgcttctcagcatttttccccacatcataaccagcatctaattctgtcaagctcttcaaaaaagtta

SEQ ID NO: 202133 - DNA, 811 bp, Cannabis indica
aaaaaaaaggtaacaaacctagaaaaatagatgtaggtatagataggtataatgatgtcttactagtgtatcatatttcacttcattccatccaatatctgatttaagggacaaaatattatggtgaacagtgaaaagtcatttctcagtacatttgatactatattataggtgacaactctcccattcactttgagttgtcttactcctttcacctataattatctttgacttgatcctcttaatgaacatgcctaagtttttgacgcttgtctcttaaattttcagtatccaaaggttaataaaaaaaatttgcactttgttttatgaatcattaatgcatgctagtgtctagtagtacttgaattgtatgaggatttattgtggttcaactcgagttctcaatgagttgtctactagttttttaatttgggcctggcttgttaatctttcggcccacacaagatctcaaaaaattgctagatagcaaatggttttttgaatcatttctcacaatatgggctttgtaatataggttcttcattaataaattttaggagactttacatgtctaccagtaaataattacaattttgttaatgagaaaataatacacccaatgtagaggttttttcatttatatatatatttcagagtatatttatatatatttacaaggaaaatgtgaatggtattaatttttacatatttgtttactatattttgaaataaaaaaaattaatgggcccatataaattaaggagaaatttaagagaaaagttctcattttatttccatattccataaggta

SEQ ID NO: 202134 - DNA, 759 bp, Cannabis indica
aacttgatgattcaggcaggttagtagaaactcaaggagcaccagtcttcgagaacaccagtagtgcggcctcttttcaggtatatccgaagctatctttatacaccataaaagataaatctcaaattttagtgttgcttattatgatttttctggtttgaatataggagagggatcaaaatgataatattggagccatttgtgaaatagacagaaatggagaacaccacgacggtgcagtaatttaaattatcattttctaaacttgaataattctattagaaattcttctgacatggggttgaattttttttggtttggacaggtaacaatgtacaacaaagctctcaaaatcttcctatggagaaaagatctgcaatctgggaatttgttgattcattagaagtgttcaaaaaattaccacagaatcctcaagttcagtttatggcagctgccaatgatgttgagcttcaagtcatagctttgactagtaaggtaaagtttgcatacgtaattgacatgatctcgaaattgaatgaagaaactactacaaccgaaactgttgattccttaataaagcaattgaacaaattgcaaaatatgggatttgatgttgagttgttaaagaattatctaagtgagtttaaaagactcaaacttgagttaaaagatgtcaaaacccaactcatggattatattgggtattaacactaccaaatgagaagtcattttgattttgatctgtattttgtttaagtg

SEQ ID NO: 202135 - DNA, 1179 bp, Cannabis indica
ctctctcatttctttcagtgaattttagcaatggaagggtttcaaggttacaagccagcaatggctatggttggattacaatgcatatacacaggacttgctcttttcactagggctgctttattacaaggaatgagtccaagggtttttgttgtctacagacaaggtgtagccactcttatcatggcccctattgcttgtttcacaagatggtatatttatttacttattttttttttaaaaaaaaaaaaaatctatttattattgtcaataatattttcttttttatatatatgtttgcaggagaaatccatacaataagacttcactgggattgaggagtttttgtttgatttttatcacctcccttattgggttagaaatttaattatctttccttttttttgtaaaaattaatttaattgactgagtttataaataattttcatatataaatggcagtgtgacaggaaatcagaatgcctattttgaagggttgtacttatcttcttcaacaataacaacagcaatgactaatttacttcctgtaatgacatttgtaatggcaaccatagtagggtaattaaataaattaaattaatttaatttacataaattaaattaaataaataaataaaaaatgatttctcttgttcttgttgtagaatggagaaagttaattttcaaagcttaagaagtgttgcaaagataatagggacaatattttcagttggtggagctatttgcatggcattggttaagggtccaaaattattaaacacaattcttgttttagcatcatcaatatcagatgatgagaatttggagttgggttgtgcatttctcttcataagctgtctttgttggtcattttggatcatcatgcaggttaattattattattataaaattctttctttaattaatttgttgtgacaatattctaattaattaattttccaatatatatataggtaccaatttcagccagttgtccagaccacttgtattcaactctttggatgtgtttattgacaaccattcaatcagcaatatatacatttatggttgagcctgatcttaaagtgtggagtcttcattcctatttagaacttggaagttgtttatatgcagtaagtgtcctcaaaaaccttatcatttatttatttttattgtttt

SEQ ID NO: 202136 - DNA, 1264 bp, Cannabis indica
ttcgtgacatgatttttgagtattttagtcttgtctgtatgacatggttttgttttgtttcgttattagtttattttgttcttcgatagctcgccatcaaattactattagtggttgggagtaacaagttctctgcgactgaaggagtagttagtagtgcaattacatatcttgcacaatagttaagtgctcaagctacgaggttgaatgaacatgctgcaacaatttttacaaatgtgtcttctaagcggtatatgaaactgaatataggtgttcttaagattaattgtgatgttgcaatcttttttatctgatttatttttagttattttgtcagacgatctgagaattaagcgactgattagttggcttatttttctaattctaatcttaatgtttctagcggggaagatgtctcgattggattacatgctattattttaattgattgctattaataaagtttcatgatttattcaaaaaaaaaaaaaagtaccaatatttaaatttaaacaaaatttagtataaacaagtattttcttattttatctctaaatgttacaaggttatatattctaaataaacttatttttataaaataactagaaaacaaaaattgcgcgttgcgcgatcttaagaaatcttaaactatatacattattaaaaaaaagtttatacttttaacaaatgttaaattaataaaacactaattaattattgaacaaataaaatctttatttacagtttataaataataaactataatattttctgaatgtgaaatttttacaaagttagatcattaaaaaaaaatgaaattttcaaaaaataataaaattttattgaaatatatgatccatcgatcttatcattcttaatcttaaatatatagattttttttagttattaatatataattaatttattaaaatatttttcttagaaattgataatcattatttttcaaaaaaaaaattaaataatcactaataatacacataattttttttcactatcaattaatataaaaatctatatatatcaaataaaacattatgtaaatttttaataataagttacaattatattaatatcaattattatttaattttttaataatggatatgtaactacttaattaattagtttttaaataaattaattaattaacattattcataatttataattaaaaattaaaattaccaaaaaataaagaaattagaggaaaaagaacataccgcactacaagaaatgtcacttt

SEQ ID NO: 202137 - DNA, 2698 bp, Cannabis indica
agaccacacctacttttattcttcatcaactaaccctccaccaaccaagaatatcatataaaagggatcattatgtgaaactcaatcagccataaaccttgcaaagcgattgagcaacagaaaaccctagaaattaaaagtaggaggagtctagagtaacacttactgtaatcaggaggtgcatcatccttgttccgccttcgaaatgccatttcatcccccttccaaccagctatcaagcttcgaccctcactcctccttcgagagtaacaattagtcttttagtgggccacttgtcgacaatgatacctcgtgcctagcatgacttgcttgaatatttaagtgtgtgacatattctgatatatcataggtagtgctttgagatgatttattggattgctttttgtacctaaagaaataaaataatttttttaaaaagaaaaaatcttacaaatatatcatttcaacatttgtatataaattgatatcttacaaattagttgttgttatcctttggttcaacaatcgatcttgtttaattttctttctcaaatattagaaagcgacattgaaatgctacataagaaaaaaaataaactaaaactcgttatttaatatcaaaatagagaataaaactggttttatatcagatttaaaataacaaaaacaaaacatattacatataaaacaacaattaaaaaaaatcttacaaaataaggagcttcccataagcatggagagtgtaaaaccacattttctcatcaatctggataaaattaaaatccattggggatcaatcttattatcgacaactgaatatttcttcttagtgctaaataaaagaaaacaaaaaaaaaaaaattaaaaagctaacaaaaatacatgtatacaaaacacataataaaaatctaaaacattaaaattacctcttcatattgatcttatgctctaaccattgtatgaatttcagacactgctctctagtgttataacatccaatctcatttttaaatggattaacaccatcaacaatcaatttgtctctaaccaacatattcttcaaaatatcctgaattagaagagccaaaatcagttacaaaatgagacaacacaatagcactctttctaattacgctttggcttttccggtgtttgataagatacatcaaacaaaatcagttccatattatcattgttttgacatgagggctgaccttttgaattcaaaacatccttgactgtattatcaacaactttcataacatcaggataaaaataaagttgatcataatcaacacttttctcctgaacctacataacaaaaagaaactagttatatataggaaaaaaaattcaaaatcactatagttattttaagtaacgaagaaattaattagaatcctatatatttacctcatatatagtgagatgatagatgcactaatttcttgaagatgtataaactgtgtaatatcatccctataaagataaatgggtgacagtaattttccaaagacatcctcaagcgctgtaattgtgcacgtcaaagaacctttttgcttcaaatatatttttgcacaagcaatcaaactttttggaaagtgacttgaaatgttgatatcattgggcctcagacttgatgttttgacactagatgatgatgatggtaatgtctctttaccttgcggttgggttataggtgctattggtgaactttggctcttctttcgtcttgttattttaatctttggttgtgatggggtctacaaatgatcaattatattagaaagtgatagaattgactaacatgtagtaaaattaagatataaattacctcaaatcctttcaagactaaatgttctaaccatgagagaaaagtgtcaatagcatctcccactttgacaatctcatctgacattgcatttggtaagtttgcatcggcatcaataacttcatatatgcaaactcgtagagatttgaaaactggtacacaatgaattttatctacagaatctatactaataatgtatccctttgcaactacttcgtatgatggttctatagttaatctgcaaggttgaccctgttcaataaagtaattatcatttgttagcttagtttgttttataatattatcaaacacatatatgtcaacgataattgatggtctaatagataacctgtgaatctagagtacgaatgtcgtcaatggagtgaatatgagcatcatcaactaaatcaagttgatgcttatctccatacccaagttggatgtcatctgcatactgaggctgagtgtcatctgtatactcagattgaggattaactgcattcttcgattgagcttgagacggttgagtgtcatctgcattcttagattgaggatcaactgcattcttcgattgagcttgagacggttgagattgaaagaattggcttgttatcatttttagttgggcctctaaagaactgaattttacctccatactcttcaatgcatgtttaatttcttgtttttcttgtttatcttgtaatcgttcctctagtagttgtgcgtaagtgctccttggaggctttttgaacacctctctttcacacacagacattcctttaccacgaatacgaccaaggtgcttgggtttacctaatgcttcagcaaaaacatcatttgagctaatcacaacaagttcaccacttg

SEQ ID NO: 202138 - DNA, 1082 bp, Cannabis indica
ataataatggactaaaaagtcaaagctgttgattagacaccacaaatcagaacaataagaactttgatttggtattgctaatatgtgtaatttctctaaaaatagaaggttaaaaaaaataaaaagataagaaagggtaacaggtcaatttaaacaggtgaaatatatataatgtattactcagtcagcaccaaacaacaaattaactttcatgcatatatattattcttctaatttgtaccttcaaagtcccaaactttgcttctagtctccctgcagctaatgtagctcccccagccaagaacctagaatgatgaaatacccctttctttttccaaaaaatatgaaaaagggatcagtgtttcaagaaagacaattgaagctctgaataatctttccctccacaataatgtattcgtaatgttctctctcttgctaaaatcagaagaagccaaaaaaataaaaggagtaagtatatctcaatatagcaggaactggggttataagcacataaactatgcattagatcaatctgatcctctttaacttttacaggtccaagatatttgatgcattgttgcctaagctttgatcttggacatttttcaaggtcaatctctttaccatctcctatgtctaacctgccagacaaaataacaatataatttccaagatgaattccaaataatccagtactcaagtataaggataatctatgaaatggtaaattttctcgccagtaaaagaatggctgaccaacatcagctttacaccactctttgcagtacagatgcaagctatgaccatacatatgtcttggatcaatctgcataaattattgacaagtataaatgcaaatccaaagtcataatagagtagtatagttgaaaattagaagcatttaagacattaacaatcttctttgtcttttgggtaactaaaacaatctatattcaaagagaaaaccagatcaatatataacattaagaatcaaccatatatataatatagggacatatatatatacacacatttatacatacctaataaagtataccaaatcttttgctaaaccttatgtt

SEQ ID NO: 202139 - DNA, 1330 bp, Cannabis indica
cgtctgaggttgattctcgtatgtttttttagtttgtttttttactttttgttaaattatcgtattttgtaatttgaattttaaatcatatttttaataaaatttaggttgaaaattataaataaacataaaaaaaaaattttgaaattttctttttttttatttgagaatatgaatgaatcactgttgacacatattaacttagtctgttttaatatgatttaacagaactggtagtaataagaacaggaaaaacgttaatgttagtatttataccgtcaaaaaagaagaataagtatatgtgtaaacccgaaagcattagatatttataccgtaaataccttttttagtatcggttaaaatttgatgaatggaaattgttgcatgggtgcaggctgatggatatgtatgccctcaatgtagagcacccaaaaagaggtttgcacgttatgatgtgaacacaggtaaggctattggtggtggattgcctcccattggtgtcattattggcttgcttgttggtgttggtggtgttgcagcattgcttttgtatggccttcaataagacaacaataatatgtatatattatgctaaagaaaaaaaatcatttcattaatctaagatgattaattgttgtattaaattaagaagaaaagtacaatacttttcatatcatttttctcaacaagaatgcttttacactttgatgattgagttgtcacatgtagaggtgataattcatgtttatggatcatgtttgtgtctgaaattcaaaaaaatgacaaattcgaaactaacacttgtttattaatcgtagtgaaaattaaaactcaaatctaaattattgataaatgaattcagttgatacatgattcgtttaacttgtttatataaaaaaaattattagcgatgaaacatttttatgttttgattttttatatttagcttctttaatttttttagcaaagttcctttatatttattttctttataaatttaaggtgtttttttttttgaaggattataaatttaaggtgttagttggatatcatcgttaaatattgactaaattattctattgatttcgaagttttactttcacatatacacagatgtacacaattgtcattcagttgctttttaacagtgatatttaaccatatctcaaattttaaaaaaaaaaacgtaaacttaaagaaattttgctctaaataaaaaagaaattaaagtgtataaaaatttaaacataaagtgtttttctatcactgtaaaaccagagttcttgagctgacaaagatgatccataaacatgaattatcacctctacat

SEQ ID NO: 202140 - DNA, 2060 bp, Cannabis indica
gtacttgggtatctatggtgattagcatagtcttatgtctagtaccaaaatacctagtaaataaaaggacatgttagtggctgtatggcaatggcaccaagatgcctaacatgtccttggtcccattgctatagagccactaacatatgtcctatctgttgttggtgactttacagctttgaaattctaaacttataattgtgaaacagtttcatgtgacatttacatactactaacttatttaaggtttgttttgtgaagttcttgttttgtttttaattaagtatgtataatatatgatttttttttagaataaaagtatcataaataacaatgtcaagatacaatagttaaataggggagagggagtatcctcccactaaatacaatttgtatccactgagagaacatgcttaactaatttatgagcattagtattcacagccttataaacatgagagatctacactcttgaaaaattggctgcaagattattaatatcagtaagaatacaataaaactttgagactaagtttaaagaagattataatctttttgttgcaataagagaatctgtttcgatataatgaatcggtagttgcaattcaattagtcatagaagactataaaagatagccatagccttgagaatttctagtttgaagcttcagtgaaaaggctttgataaggcagtcactatctcagtatttgagtgacaaaggatagggccaaaactagaattttttgtcatcgtattcactgcagcattattgttgagtttcaactttccagatggtgaattcaaccatttcggggatactgaaatagttgtggaagatgttggccaaatgtctccatcatcccgctcctttttagcattttcaaacttttgtaatataatttaaggcagagagcagtaaaacaccagctggtttgagactttgttcatggatctcattattccgttcattccaaatgctctaaatgatgcaatcaatctgttctaattcctattgagagaaaacatatgatatgtgaaacattgatgatttgtagaagtaaaaatgatcaagaaagacaataatgttgaagcttgataatcctcaaacttgctttgctcttttacattcaaagagcgtatggaaagctgtttcagaacgatgggaacaaagggagcaacaacttgaagggttgatgtaccaaccatggagaactgtagcaacagacagcaaatcatgaagaacaggccatataaagatcttgagttttgaatggagcttcaatgaccaaaatttattccaccaacgtgattctaaggtagaactagactcattacccatgtttgtgataattgttgcaagttgatagcccgatttaatattataaatcccatcagaagtgtgatgccaaatttacttatcttggtgaggtgtgaaacttaatgggatatccaagatacgactcacatcaaagggtagaaacaaacatggcaaaacagacatatcccaatgacgatcactagttataagactagaaactctcaatgaccgatcaacaccaaagaaggtcaaaggtttaatttttattataccaagaagtcagtcttcgtaaaatgttattgtttgttccaacaatccatctaatacctttcgtagacatatcacaattacgatcactagttataatgtatgatgatcaaaaaagttaacaaacaagtttgtagttgtagtttgaatctcttttcaaacaatgtcatacgatgataaatttgtatgtttcatcaactcaaatcgcataaagttacacataaaaaaaccgctcaatccatcaacttgttggacagttatgggttagagttttaaaaactacaaaaactatctaaaaattgcctaatctgcctgccttgcagtgtctcgcatggtgttgtatttggcccaaaaaaaacattaaaagtagaatcataaattacatcaatccatccctggtgttcttttgttgatgatggaatcaaaggggatttcattttttagcagctcttcctttttcttgtgctttctatt

SEQ ID NO: 202141 - DNA, 1779 bp, Cannabis indica
ttagataatatcctccggcaagatagtgactattttttctcactaatgttgaatcatcttatcacaagcaagtccgaccctaggtgggctaggcctgtgcctagggcccacctaggtttaagggcccaaattttttttttaaaaaaaattacatatttttttttactagttttgaaaaatatcacatgtagttctatgtaagggtccaaaaatatatttttttatagtcggccctgatcataaattgtgtcatttgctaacgcacataactaattcaatcacctcgtattttgttagtagttagaaatagtctctttaatccaaatttgatcaaaatgttttcaaatttaattttataataaatttatatattttcagatctttcctaattataaataatttcatgtttaggggcaaaattaaaacaaataaaataaaagagaaaatcagaaataattataaatagggttattaattgaaaagaaagaagaaaaaaaaagaacacatttaacaaatatggaattatgtcaatatatacaataaaaaagacctaaaaaagagttaacatgtatgtctccattggtgacaagagcaattaagattgttgctttcattaacacccaaaagaaaagaaaaatgaatatcatattataaatcaattaatgatgtgaaaactaccttttgttttgttcttggaaagctacacaaatacaacaaacaaataaaaccaatatagaaaataaaataaaaaccaacaaatttaattgtttgtgcattttgagaggatctatatgctcttatcggagagatttgatacttttttcttaggttattcttgagtgaatcgtattcagttgagaaattctaaataaatttggagattattattaaaaaaatatcaaaaaatatcagtggtgcctagtactcttctatatgttaatatcgttattggtctaactaaatatcaggtcccatatagtttaatgtagtgcttaattatcagacatttgtcatgaaaaatgaaaaaaaaaaaaaaagttattagtagtggtggtgaccatgaattttttttatatctttttaatatagctttaatcataaggaaaactcacctaatacaatccactagactaagtctacttatcttgcataaccataaaaatggaatcttcctcaatatataacattagatttttttataccatttctatatattgcataaacaataatttatataatcatatattattagaggtaatatcaatactaatcctcatcatgattaaaactaataccatctaactttcttttttctttttttttgaagagaattattgtgcccatcacttcaaattggacttattttaaacaataataataacaatctttagacataatgtctaatatgagagaaaacccattaccaaataatatcaaagtaacatacatagttgacatttgagaaaaagaaaagaaaaccaatttaggcaaaattaatttcccaactaaattaccaagacataatataattagcctaagatttaatcaattaagtccatgaaccattattctaattatatagataaataaataacttaacaacaacaacaaaagagaattgcaatattgtttttcatattcttacacgcaacaacaaacaaatttcttatactaaatattttctttatatcatattttacctcaaaagaaaaaggtaaacaacatgaattaaaaatttgcaaaattaaataaaaaagaaaaaaaagaaaaaataatgag

SEQ ID NO: 202142 - DNA, 1505 bp, Cannabis indica
atttaacattttaatgtgcaaccatactactgtatgcctctttctgtaataggattactgcacttggaattatattttttatttttaaagccatttattaatggcatggtaaaaaagcgcataaaattaagaacgctcagttgagttcgatttcttcatgcggcgaccacttcaccctctccgattctgcatcactgacttcccttcttccataacttccgtctccatgtcttctgtaatagtctacatgttcatgtataatttattatattatattatattgatttataaactcttgctgtgaaatcaattttatctttttttctcttatgtagttccgtggtggtcggaactacccgcggaggaatttttccgaccgtccgattgttgatggaagaagaggccattacatttctgatgactcccatttccggccaggccgagaggccaatctagggtcccaccacggtgagggcggaagcttcaggaatgactcggagtttccaatgccggatcgaccatctcatcccaatcaaaaccaccagtttcggccgcgcctctatcagaaccagcagcagtttcggccgcgtttctatcagaaccaccagcagtttcgacctccacccacgcattacaattatcaaaaccaagaatttcgtcggtctccggctccgccgtttcaacataatcaaccgcgcagggtagctaatcaataccagcctcggcctcggcctccagattttcgaaattgggagtttgcaaagacttcaccgccatcaactagtggtaactgagctctgttctgttattttgtgcttgttatggtagtggtgtttattttgtaatatatatttgatattatatgctaagcagagcggtttacaattctttcgtataatatactggctgactatctggctacggaccaccgaagcagactttactatcacattcctccatacatattggactggcaatggagaaagaaaaatatacttttcgagctgggtttgtggtctgctgatataatatgttttcaggttcccaaactgactacttctttacatattctcattcatcacttctttattatgctcttgcaccctcttttacgtttgtttcctttgacaaaatgaatcggtgtcttaaattcatgtaagtttgtggcttagtggctgataattctctcacattgccaaattttatcaagttgcacgttttttttttctttctatgtggttactgtcataacttctaagttccgacctgcaatggtttaattttgtttttaggaggtcgatagatttcaggaactagaagaggggttaaggcttcgaggatacactggcgtttggaaggtatgtcataaatatcattgctcttttgaagctatgtgataaggatcgagaacatctaaagtttcttcttcttcttgtaatgataataatgacaaagaaacaaaatttattttgttttctattctattttcaatggtgaagaacaat

SEQ ID NO: 202143 - DNA, 860 bp, Cannabis indica
attgtgaatccactatttgcatggatgcacttattttgtgtttttgacaattaaatagttttaatctttgattttctaatgttatgtaataaattttaaatagtttgttgtatgtgtatttcttttgttttatacgcatttagaatgaatattgttattaggtactaaagatgtttagtattttaaatatgctgtcttgttgtgattggttagctatactctttaaaagttattatattaaactatatgagatctaatactcagttggattaatagtaatattgacgcaaaagaaggtaaatggagaagttaaagaattacttttttttatatatacattaatcaaatttacttccaaataaaatttaatttaaatatactcatttttataagtattgtacccaaattatcctcacactcataattaagacataatttcaaatataataaatttatgttctttggagatggatgtgtatgtttgtgagaaagttggaacaaaattttgattagagaaaaatagagaattttgtgaagtgataaggataaaattggtggaatgattgaaaaaagtggtaaacataataactaatagattttaagaaaggaggtaaaaatcaaaaacatcaatttaaaaaaggtatgtagtgtaatttcttcaagatattaagcactattaatgacttttggcattactcatctaaaataaatagtttgaactttaattatgtattttaaattattttaaattttttaaaattttataaattgttttaaaataattatgatgtaaattatcatataaaataattaaatgggcaactatttgtatttggatgttaaaaacattaaaaaaaaaa

SEQ ID NO: 202144 - DNA, 1030 bp, Cannabis indica
agtagcaattgaactttaacaactgagtagtcatctttttgagtagatagagatgtaacaaaaatagagtactcacgtgtaaagccattgaaaatggcttcgatatgatcttgagttgaaagaacatggctaatggaagctagagaatcaacaatgtgtttgatcttgagcaagtagtcatttagatttctagtgagctttgtgcgacaaacttgagttctaaaatgactgaccttagctcgattttgagctgaatagtactcttcaagagtaaaccaaatctgagcagcactattccatccaattatgcgagtgaggatcttctctgtcatggacgagagaagccatgtgacaaggagactgtcttaaacgtcccattcaagaaactcttcagtgattcgattttctgctgcatcttttgttgtcgtatacttgggtggagcttccattgaatcaagaaacttgagtaaccgatggcctttgatagcagcataaacctagtctcaccatgggagaaatttattttcatcgagtttaatggagaaagtgtgattgaacgaaagaaatgaaggtcttggtaaatgattggatccattgggatgaagtgtggaatcggacgaagttgcacacgccattagaacgaaaaaagctctaatatcatgctggactgatgaaaacgaagaatattagaagaaataacagaatttgtgtttgttgattcaaggagaatgaattctgttcaactataaataagtcagtatatatacatatatatacagttgagcgacaattaggaattaattacaaagttagttacatgtgtagctaatcaaactaactgaaattaactaactaaacaacattgaactaatcctaatagagttaactaatcttattctcaacaagactcaatacttaagtgtaccaacaataatataatatattataagatgctatacactattaatacctttagtatttccaattcaataactactctactctacatatctaggagcaaatgagatct

SEQ ID NO: 202145 - DNA, 827 bp, Cannabis indica
attagaatttttagtttttatttatctatacatataatgaaatatagcactacataaaaattaacatttccatttttccaattttttttagaaatttaataagatgaatttagctagggcattaattgaacatgtcaattaagtttttcgtatggtaatagaagagagaaatgattctatatatcgtaattggaatatgttacaaagaaaaaaaagggaaaacacttacatacacactcatcctcacaagacagataagttagttgtaactaactaactaaccaagaagcttatgactagaattggtttataataatataccccctcgatgatatttaaatgttttttttacattaattttgggcaataattcattaaactaagaagggaaaagtagcttgattaaattaaaggtcaacaaggttgctgagctttgaggaaatgtaaagaagcttgaggagccaagcttgaattttctcccgaacgatgtgacactcgatctccacatgcttcgtgcattcgtcaattataggatattcgaagagatgaattgttgcaacattatcacagcataatgcaacaagtggttgatgagatataaggatgtcatttaagagggcaatgagcaatgtaatctcaagtggcattagcaataacacggtatcttgcctttacgaaggagctagacacagtgggtaattttttttttaatttttcagggtataagagaatcacctaaagatgcagtagccaatgaccgatctgcaagtgtctacgcaggtccccaaattagcatcagagaagactttgcgagagacattgatatc

SEQ ID NO: 202146 - DNA, 2111 bp, Cannabis indica
aatcatgatcatatgcttcaaatttttaggtccatgatttattagtgtactagatttacactaacgtaataatcagcaacgtacttggctaagtggtatatcttttccaaagcattagtaaaataaattaggatcagatgtattagctatatattagattggaccggtatttactgtgaaaaagattttataaatttactgtaatattttttctaagtaagcatcacttagttgattagcccatattgtattggctatcttaactatatttatattgcacatgttctttcgttactgcttacccatagggttagcccatagttatatattgggaacacagtagtgtaattgagcgggagcgttaatcatagaaatagaatatatagcttctataactatatagaagtgaaacgatgattttctcagagcttagctaaaagatataaatgaaagagctcttatttcgttaattatgttagtttacggaaatatgatttataaaaagctaagtgttttaaggataaaatacattgaagtgtggtaaaatagtaattttttccctactcgatgtaaaccgtctatagatgatcgttgattgttttgattaaaataatggataatttatagtgtatctattcttagtaaatagagcgttttatgtaatcaggagtgcaattctaaatctatagtagagtcaggaggaattaatgagttaggaaatttattttgtaaattttgaatctactaattatgagtttagttatataagttcatgatccccacattatctggaataatattattttgtagattatattaattaatttatttaatcaattacaattctaaataaagactacgtcttatttataaatttactaagtagagacttatttgaaaaaaaaagttatggtttgtttattaatacatccaccctcttaaagtcacctatgtggagaaagaattctaagaacaccaaacaaaatgtcaaaaattttataaataacagtacttaaattatttttgtaattgtttctttttcttttctaaaattagttgagctgttcttttttgcttctatttaattttaaaaacacatgcagttactatgttaattccatcttttctttatttgtaaaaaaataaccacatctttctatatattacaaaaatactaaaatttatttctaaattctattctcattataaaattttttacttttagtcacaacaaaacttgcgacaaacaataaaaaagtagtgagtaattataaattatcgtttctatgttattacttaaagacccgtggttaaatatattggtcacaaaaattatagtttgttgtgactatatttatttttagtcacaatagttgtcttaattaaaattaaattagtgacatctagtatttaaatactatattttagtcacaagtaattttttattgtgactaatttgttgtgactaaaaatcacatttagtcacaaaaaaattatgttgtgcactaaaaggagctttttttttttcctttttcttttataattcaaacatctcaatgttatattttatattataccactcaatcaatacaacatatatttatatatatatatacaaagataatatatgttagcataacacgatcacataaacatattttaatgctacactattagtcaacggtaaagaaagaatgaaacgatgcaagtttcactttacaatgttgtaatgttaatgtagtttttttttttttgaaaatgaaatatcaacttcattgaactttagcattcatcatacaaaagagcatgaagctcattaggaacaacattcccatgaatgctacaatcagagaaaaaccgagagcgcctggcaacaaagtgaacaactcggtttgctgatcgtctaataaaacgaacacttacattatttaaaactgataataaacttttacaatcattaataatcaaaccaaaaacaaaagtcatgtgttgattactaaagattgcttggaccgttaccatgctatcagtctctacttcaacttgattccattccttatcttttaaccagctaagtgcctccttaacaccaagagcttcaaccacctccg

SEQ ID NO: 202147 - DNA, 1013 bp, Cannabis indica
ataattatggtttgtgtgtgtgtatgtttatatattataaatcactgtgtgtatgtaattggggtatcgtaaaggtaatgctggctcttttttcataccctttaatcagacaaaatcaaatagccgactgcatgcatataaaaaaaattatattactaataatatataatatatatattcacctgcttcatataacaataaaaataataatgaattacatacacatatatataataatattatagttacataacatatcttataatatatagacatgtataatcggacgttgtggtccctaattgaagcacaacgttcaagattagcatcgtgataaggaagaataaagaggttataatcactattaatgcgaaccatggtgtatgtgtctccagagagagagagagagtctaataattaattaattaataaaaaatatgatgatgaaaagctcttatatatttaggattttcttaacaataatggttaattatatggatcatgagatcacatgctccatggcatgctgttattgattcctttaacaaaagttaaaataatacaccaaaaatagaagagaagagaaaaaagagagaaaaagaggagaaaatggtctctctaaaccacatgcttcctggggaccatcaaactctcccttaaaaatattagagctactctccaagaagagcatgagaagatccccaaaaaagtaaaactctatatcatattttaataagatgaagaactaaatgttacatatatttacatatgtatatgtgttgtttactctctctcatatatcttacttctcactataaactacaacactataaataaattgccctaaaccccagaaaggggaatgcataaaaaatgtggcatttgcatgctgtattacaaccacctttgctttaaaagaacatttcatgcattgggcactgcatgtttccttgctttttgatcttaaatctagtcaaaattaatatccaccaaatattactttaataaaatta

SEQ ID NO: 202148 - DNA, 1891 bp, Cannabis indica
aattgaaacatacctttttttatatgtactgtactcaaaataccctgacatatcctcctcctgcaatcagctctgtcgacgtcgttgactcaccaccatgggaggtcgtctttcccgaccatcgatctattagatctctgtgtcaacgttcacagtaggttgtgatttctttttaatgttatttgattatttaggggtttttttctccacagattctcagtttgagtttgtgtttaaatgaggatggttgtaattgtgtttgtagaatgttttgatttgttaggtttaattttaatttgttgcagatatatttgtgcattttttttctaatctgatatacgctatttaaaaaaaaaaaaatctcttttcaaaaaaacaaatctcatatatgcttcattaggtataggtacagtttctcagatttattttattttaatttaattttatatatttaaatgatttttttaattttaaaatgattttataatttttaaatatttatatataaaaaaaaaaaaacaaatgacttgaaccaattaaatgacgtcacgtgtgtatctagttggcatttaacataaaagttaacgttaggtaccctatttgtaacaaaatattaacagaaggtatttttaccgccaaaaaaataaattaagtatttatttgtaactcaaacttaaacttaagtatttacgccgcaaattactcaaaattatttatatttcttagagaatcattgttgtaacaccgttcttttcgcaatgactaaaaaaatattattctattatttattttttaaaaagttagaaacatgtatgatattccaaaaagtaaaaaatatttatatatataaaaatatcaagtttatactaaaattataattaacaataaattttaaatttttttatatattaatattacttaaattaaatatttttttaataaaaaataatattgtttattaaataatataaaaaaaattaattatacaattaaaaatttacataaccaaaataaaaattatacgtgcattgcacgtaatattaacctaatatattatagcgtctccaaatttatggctcttatacacaagtacgtcattctggctacttaaactgaactgactttacagaccaacacaagtatttttagcgtgctttgttctcactcgtacgcttcctgagaaaacttctccatcctgaaattacttatgtgggctaccagaaaacaattcaccttgttgatataatattataattattatcaattaattcatataagtcctctttaactgtgtaatcacatacctacacagtctcaaaatcatcacgtttgaccttccccaaataatgatagaattgcacaactaattcaatattttttcttgtagatcacgagactaaacatatcacatatatgtgtatatatatatatatatttatatatgaaagtggtggctaaaaaaggaagaagataacaaacttttagattatttttcttttgtttgtttgcttaaaaagaattgaagaacaaactaaattaatagcaaataaacaagataataaaagaacaaattaacttaatagcaaataaacaagataataaaagaacaaattaacttaatagcaaataaacaaataaaaaaacaaaagaaattaatagcaaataaacaaatatagaaataaacaaagtaaacagataaagaaaagtacaaactaaattaatagcaaatctataatttaaatatatatatataggtaataaatgatataataaggtaatattatatttattgcatatattgtgtaaattaaaattctataatagcatcgatcgatcaatgaacaactcaccttacgaaacaaactacaaatcattatacatttataagaat

SEQ ID NO: 202149 - DNA, 975 bp, Cannabis indica
cacgatacgagtctaaacatgatactaaaatgtaagtttataggtcgtgctggagtcattctttaaaatactgacacgatataatgtgacttgcatctctttattatgagtcgacacgatacgaactatataattacagattttttaaaaatatgagctgagatgacaattatttatttatagctaaaactttcaccaaataaaattcgttgaaatataaaactcttataactgacacgtggtcttaattatcaaaagtgaaatgttaaaaggtaccagtagtgtcaagcaccctcctacgtgtcaatatcacaattggtctaatttagtatcaggtcccatatagtttaatataataatttttaaggagtatcgctagtcaattgtaaaacacatcccttaaaagtgctagacaccaatgaaacttaataacaatactcatatcaaaaatactgaaaaagtgaggaaataatctacatctccacgtgatcccctttttcacataaaaaaaactttcaccaaatgaaagtgaaaaaccaattgtactaaaatacgccaaaagacggtgcgcaaaacgcacatgggtgcaggttctgtcatgggtctaggtcgggaaatttgattacttactatcattaaagttttaatcacaagattataattatgaactattataattatttcaacaaattatcaattttctctgctattctttattttccccttgccttctcttttcttcgtatctcactgctttcaaatttatcattcttacttttcacaggaatatctaagctttcctaagtccatccatggcgtcgccagtaattttatttatctaactgatttcattattttctgaatctccacgtttaatatatttatatattttctaaagtctctttttcataagttggaaccttctttaattttcctactttcaattctgacccaagttgatcttctttttgaaaa

SEQ ID NO: 202150 - DNA, 776 bp, Cannabis indica
tttttagttatgatgccaaacacacactaagttttcgagttttgttgatagtccaaggcaaataagggtctgctattacgcatgtaggtcgcggcataagatccgggatcataatctccataggcttttgtagcaaagaagttgaacaaaacattttttcacccaattcaggagaaggcaacatgtccaagctctcacacccttgaggcaattctgcttcaacatatggaaaattgaattgaactagattgattctgaggccggtttccttggcccggttgagcactccttcaaatcgagctgcattttgtgttgtggtgaatatggtgatgattacaccacgttcagccaacattcttgcaatgtcaaccattgggatcaaatgtccttgccccattaaaggaaacaagataaagtgatgaagctcttttgctcgaatacccatggtgtaattctagagaagaaatattgaaaagggtgagtaaagtttactctctcataaatatcaatcaggatatttttcatcaatgagacaataataagattacaagctgtggtaggttctgcacccctttatttactatgcaattattgttgtgattgatcttatatgatcagtttttcatataatttataagtaatgcaaatcttatctaaaaatcagtaggtgcgtaagatttgatcatggatcacttattaaagaaggagaaaatgtcttttcaagttaagcctaataactcccaacctaattggggccgaattaagttcaacccaat

SEQ ID NO: 202151 - DNA, 1656 bp, Cannabis indica
acttccactaaatttaccgattcactaaattgatgtttaaaaaaattcttaaaaatagaaagaagagacgaccctgtgtctccaacactgctaaaagagaaacaaactataattattattattattattattattattattattattattattaattatgaatgacacacaaccacatgatatgacataccacaaaagtcaatacatagctattttaacattacatacataaacaaacttaataacaatttaataagagtaattatgtacataaagacaagacattgaagttctattaaatattaattactaatttaaaacaccaattacttgatcataatcatgtgtcttgtggaaagagaggatcagaaccaggaatatcaatccactgaatctgaacaaagatttcaccacactcaacatttcttagccttaaacacatgtcttgtacaatttttccagcttcccaaacacaagggctctcatcagataaacagttttgttttgtgggttgaaccctcttcactacacacccttctggtaaatttttcaatcccattttcaaacattctatgtatggttttagatctatatctgcatctcccattctatcatctcctgtaaatgtgtccttatcatacactgtctgtacaaattattaacactcaaattcattaattactcactaatcacatattaatagtttgatgaattaattcattaaaattacttacaagtgttattggggtgtcaagacatgttactgagagagttaattcatcattccattctggattgcaattgttttttaccacacgtgtcttcaatttctgcataacaatttttcattgttaagatcaaaattttatcattttcacaaaataatttaatttaattatactctcttttttgtacctttcaaagttaaaattaaagcaaagtgaaaatcaagagaaaaccacaacccaatacccaccttttctggaaaattaaagctaataaacaaaattgtaattattgtaagaatcaaattaatcaaacccaaaatgagaaagtttaataagatgatgatgagaagtgaaattacctgattacccatggtaacaaccacataaggatcactacttagagtatcacgaacagcaagattaagcccttttttaactctaatcctcaaaagtcccaacatgttcttctccatctcaattctcaataaataaataataatacaaaatattttaaaaacaaaatttcctctctagatctctctctctatatatctcaataaacattaatttcttctattagctaccaaagataaggatatttatatactaaagataagttagaattcttcatgggaagaagcacatgtttttttttatttttttttcccacaactttatagctttgcttttttctttcatttaaaaatatgaaaaagaaaataaaagtgttagggtccctatcaagttagccatttggaattattattattatgtatatgtgtgtgtatgtgtttccaccgttgtactcggtttatccattgtttgtgaatggacaaggttgttctttgttttgttctcccaatacttacacttgtaatataaatcattacatttgtatcaatagaacaaaaaactaataaataataat

SEQ ID NO: 202152 - DNA, 824 bp, Cannabis indica
ttccatctcaaacaagcctaacacagtctgtaaatatgtgatgagtccattatttatataaattttagtttaagagtcaacgatcgatgcaacaaattatatgttaaagtacaccaaacacaatatagagaaatgcatgatgttaattactaattatttataaaatactactttatattagtaatatataaataccaataagactttttgagatggcacgaaattgacatgaccttaaaaggtacgagtatgacccgacatgaaaatatatggacttggtcgggtatgccgacatgctacacaaaaacatgtagatttatatatggacacataagcacgtaagcacgaataaactaacataaaaacacaatatattaaaaaaaaaacctaaaaataatttaataattataattatttcttatatgaattgtaattgagaaattatataaaagtaattaattgaaactatcacatttagcttaataagtagctcaatatttgtcataaaaatgtgaaaacgtgaaatatgatcaatttgagccactgagttggtctagagaaacagatctcccgagtataccatgacatgaaatgctgagtttaccctataaaattattgacatgtgaaacggcacaacatgacctatattttttcatgacataacacgagctctatatttttgtgggacgtttttaaaagaaaatttttgactaattatgtataatttatgtacttaaattaaaacgctaaatttaaatatatccaaattgttaaaaattggtacactttatttatcttaagctccaaaatactcttctcattt

SEQ ID NO: 202153 - DNA, 736 bp, Cannabis indica
gaaaatttttagagaattttcagattcaatgatttgaaaatgtagaaaacataaataactaatttcatttttattagcttaaaactcaaactcaaagtcatttaaagatttagtttttatgaaatcttaaccaattgagaattctcggatccccatattttaagtttttaaaaatataaaattattttgagttctaaaccaatgtaatttctcaaaattcatttcacttgtgttatggtattttttaaaataggttttgacaaaagtgttgattttcaaaacatagtaattaatttgaagaaattatattgtatacccactttagtttatatgttttaattttaccattatttccatattctttcatatatacctacttttataaataatgttcctattataccctttaagttaatgtaaattatgtgctagacttaaatgaaatgtgagagtatattaggcaactcacttacaaaaatgaatatatgttaatgaaatataatatgagagtattttttattaatggataaaaaaagtattcttcaatttattccaattaatttagtgcttgacattattttcagaaataattttaaaattaaagttacaaaaaacataaaatatttacaaacttttaaaatatttttctgtctataaaattatattttattaatttgtgttttggtttttattttttgaaactattcagtaaacaccttttatagttttttttttt

SEQ ID NO: 202154 - DNA, 986 bp, Cannabis indica
attagtcattgttaaaaaaaatgatgacttatttgtagctttcatttgataatgtggagaaaagaagcccagtggttgtacatggagggagaaaaacagtgcaaggaaaaatcatttctcatagttattgcttctgtggagatttgtattcagtttcatttagaatttttgggtctttttcctttttcttgctcatgatgattcatgaaaagctaagctacttcagtatatgatccatttggtccatttatagtatacaaagtaaggaaaataggttgataaacatttttcatgaatcattactattttttcctttatataaatgattaatttaggcagccaaattgagccatgcatgattggaaatttttttatttaattctttttttaaaatagtaatttatatttaaaatatattgtaaactctaactttatagggttgtttataacttcatatagtaatatgtggttccaaatctctaattaatctagaccaaaccatttaatactaaaccaaatgaatcaagggtcaatggttttggtgaatccgaaccgtttttaattatatagtttggttatagttttaaaattctcgtgcacggtgcaaatcaaactaaattaaatcgcttaattttacttgtacttattttttttattgaatattgatatttagaaacaatcataagcataatattgatagtaacttaatattgtcttaagaatatttatataactcccatcattttttttcaattggtaaagttttggtttttttgtttacaacatatataagatgctttaagtttgcaacaatagaaactttgcctcattttctatctacacaatgcttgtacgatttacattcttcaaactaatatataaaaacagattctttgttagcctaatagtggaatgattatcgatctcccatccttgtgattttctctttgtatcacaggaaagttttgactgctgccacttgttct

SEQ ID NO: 202155 - DNA, 808 bp, Cannabis indica
tcacataataatatgtttatcacattttaatctatacttattatattacaaaataatataacaaaaggtattagtgtaaataaaacaaaatgaaatgtaaaaatgtacattggagtagccttgtaagagtataagcgtaatatttttgggtttttgtatgttttatgtaaatttttgaaataattaattatatataattaaatggaagaaaaatacatttcttttttccttcaactattactattatttacgacgataatgagtgattttgttttcccgttagtcagacataaaaatgtaataactcagattacaaactgaaaaaagaacccttagtattaattttctttacaaccacatagttatatatatatatatctttatttttattataaaatgtggataactaatagtttttattagtttaatagaatattttaaaaatataagaatattttgttcaatttaacagtgttagttgggttagtttataaatatataaatatttatattatttattttagattaatttaaatatttataaatattaatatattatttgttatattattattttttattgttattgtaatattcatattttttaactttacatttattttccttaattttttaagtgaaaattacatgaaagatgagatttgataagaaaatttcaaaaatattgcacttataagttagccactctcttatgatattttttcacattaaagttttttatagtatttgatatgtcacatttttgtaactctaatatacaaacatatattttatatttttgtttcta

SEQ ID NO: 202156 - DNA, 1450 bp, Cannabis indica
tctcatcgtcaagtgatcgagtgactggtttcctttcaacttttttcttcctcgccatggagggagaaagcagagagaacgaaacttttaacaatttcgtttttagctttaaaagaaaaaattattattttaataattattattttatataaaatttatatatttaattgtactaagtttttaaattatttttttcaatctatattcttaaaaatatacacgtcacattaaaataaattatgtttttaaaatattatgacaaaaaaaaacttaaataaaaaattaatctcaaatttgtttaacaaaataaaaatatatttaactttatatgtaagtactgtttgattacgtatacttgcgtaattttataattctcataatatagttaatacaacatctcatattcttaaaaaaaaaatgtttaagatagattcatatatacattacaagtaaaagttaaacctaataatgatatattttatagtgtaataaaaataactcaaataagacaaatagtatgagttgcggacccagaatttaaagtaaagaggacattaatttttttttgtaaaaagagggaggacataaataaatttaaaaagaaaaatttgaacctttaccctctgacctatttgccatttaccttaacctttacaccaagtttactattatgtttataaatattatcttttaatacaatatatgttgtaaactaattaaaatacatatacatttttttttccgattttttttaagaaggtaatggctcctcgctacaatgtgagtctgcccctaggtatgacccatgtttttttaaaaaaaatatataaaatttgtgggcaacttataaggcaaggactataaggtgtcggcaacgtgtttaattgtcaagcttataggcctttgttagaatgtgagaattaatgtggttctgaaattagggtttgatgatcatgtccactaaaatatatattatagaatattttatctcaaaataatcaattagcaaattcaaatatttatattaaatattaaactttttcacatattattaatgtgatgacgagactacctaacaacccctaacccttaagtgagattaaaaaaaattcactctaaaactgtttcttcttccatttttttttttttaaaaataaagctaattggttgaaaaataaaagtgagagtcaagcaaataactttggtttatatttcttttgtgttgtagtgagattttgagtcattatatggtatatgatctatttcacccatggtatattatataattatatttattataatatcaaattctaaaaattaacaacactcttttaaaactcatttttcaatttctataactacaaaaaaatcaatgtatttaacagaaacttatatcagcacatatacagtaaaatattacatccaattaatgacgtggtttttttaacag

SEQ ID NO: 202157 - DNA, 3338 bp, Cannabis indica
tgtgagtttaaaactacaaaagattacgtatacttccgaaactgctcataattttcttaacaagtttttagcgtcgttgctggaaaatcgattaaatattgatattgaaaaaattagattaaattctacttttgttaattcttttggttgttgctaatttatttcttttgaattgtcttattctattttaggaattgggggtgtatgcgacgttaaggacaaagtgtaatactgccgaatgatcctaaaatcaaaaagacctatagaagaaacagaagaaacaaaatgcaagaaagaagtgcagaaagagctgaaacaaaagaagtcatgggtgataacgctaatagggataataatggcggaaacaacggtaataacgaatgtgtcgtagaagaccaggaaaacggtcgtaatcttcccaaccgtagtctgagggactatggtcttccaacattgaagggggttcagtcttgtataagaccacctgctgtggaggccaataactttgagataaagccagccatactccaaataatacaatctttagtccagtttggtggactgccctgtgaagacccaaatttgcatttgtctaattttatggagttatgccaaattttcaaagtaaacggagttagctatgatgccatccgtctgagactgttcccattctcgctgagggagtgagccaaaagttggttgatttccttgccacccaactccattgctccatggactgatttggcgacaaagttcttgtccaaaattttccctccagctaaagctgccaagctgcaaggagaaattaataatttttgtcaactagacagtgaatctctctatgaggcttgggagaggttcaaggatgatctcatcagaaaatgtccacatcatgggatcaaaaagtagatgttggttcacaatttctacaatggattgattggtaacactagaacgattatagatgtcgcggctggtggggcatttatgagaaaaagtgcaaacgaggcatatgatatactcgaagaaatggttatgaataactagcaatgaccaactgaaagaagccaagcaaagaaggttgctggtatgctcgaggtagacgccatcactaagttgacagctttagtcgaggcactgacgaagctgatggttgttcaagcaaaataggctaaagttatgcctgttataaaatactctaataaatgattataaatctcgtttatcaaccagcctaaagaagactttgaggtccccaaatactcctctatatgaagtaaggatttttccataattcagttgacaagacattacccttgggataatatctatctttatagacataggtaacaagagaatcaacatgtgtaatcaacctccacctttgtttatcaagaaaaactaaattatagctcctaaagtccctgaaatccaaatccccaacaagtttgtgacgacataatctcttccatcctatttaactcccacctcttcgctgatttgacttcgtttgctaccaatattttgccatagccaacttaagactcatagaaacttccttaagaaaaagaaatacgctcatagcattgctgggtaatgcttgtacaaatcactaaccattatcactacaaagtgattagatgatacaaacacataatttgtcatacgaaaaaaattattgttataatctatcccttagaaaattatgatcatgaataaaccatagtgcatgaaaaagaacaaaaagctcaaccaaaaaaacaacatatactctcagtatgaaaatataagcaaccaacgacacactaaacaagaaacaaaaatataacattagcaataaatttctttacttattcaaaaatgaaatggccgacaaatttttcggtccaacttcaactatcttccactttcttctctatggaatatggggctatggaagaattataagtaataatgcaggcgttggacaattatacatatatagtgtcacaactcaagttctaagagccttaggtgtggcagttatgtaatatctataacttgtgtggttaaaggtcacattttgacccttgcgaaaaaatgagacttacaaatgatcccttaatatgtattacaaaattacataagacctataattaaaataatagagtaactcctatagtaaatagaaaataattgtaataaaattggatcactcgtcagtatatatatacaacaatatattctcaaagttatgtagtcaccgaattgttaacatttataatccgagaaataccaagataatacttatagcatccatcatattcctcctccctaactggtcatgtctatataaatgatacaggtcattcgttaatataattagatacacattcaatctttaaagaagagttaattaataattatggtaagactaagctaatctcatcattctccatcaacgaatttcccacaactacaagtatccaactaagttcctggaagaaaaatatagggggtgagcttataaagcctagtaagaaaataactaatatcaaagaaataaaaattcctacatgattagcttttaaaataaaatacctcaacatcattatatcaaaatgtataaacaaagtatagagaccataaataatcacaaaatcaagcgtcaaatgcatatcaaaccgtccattagacccctagctctcaataccaattatagaaaacaacattcaaaaactaggtagtcacacctgataagtaccataatattggggcttagattcaattcactcattgtatggattctatgtctttcacctataggtgagtgctcacctaatctacctatgatgacacagagactaggtcgtgaaataacaatatgcataaatcataatcaacatggctctaatcagtataaccaaaagtaggcaaataataagaataacaaaaaaatatattttttttctaaaaaatctggcagcataacggctgtattttgtctaaattcaaaaatcataacttgataaatatttgcacaaaactatatttgacactcaataccccagaacagtccagaaaaatatgcagattaagcttttaatttttcaaacaatttgcaaattataaaaattagaatatgtgtaatagtatccaacacatataaaatcaagtccaataatcaagttgagtctctacctctcccaagtcgttaaactttatccaaaagatgatcctaagctctcaagtcccgaactccaattgtttagtccaatcttagatacactcttacttataccatcaagcgactaaataattatcatcactgtattttacattcaaaaccgaatccaacg

SEQ ID NO: 202158 - DNA, 1146 bp, Cannabis indica
tatcttacaaaaggaaaaaaaaatggtaggtgtaagttactatggttaattatttatttaataaataagaatattttggttggaaactaagatatactcatagagacataaatatatatgtatgtggtccagtatgtatatgggttgaaaggttaacattataatttagagtactagtactactactggctctgaatttaaaatagctagactactgaaaatgaatgattccaagcactgtcaacaagtttcatctgccttcagtttcaatttattttttatttaatttcctaattaattattatatatatataatgataccctagtccctaactagctacctacttctctcatagcaaatattttttgataggtcaatatataaacccattatggtaaacatataatatgaacaaaaactgcatgtgtaattaagacaatattattataatagcatcattattattattaaaaaattaattaagaattgagtacgttggtcattgtcttgtccatgcacaaaatcatatctcttccaaaaacctatccattgggattcggggattttccaccctaacacttccaaagcatataatatataaatgattgagaaatgggggagatatggtggggaggaggtagattcggcgagggtgttgctgcgtttttttgctctctggtttgctgggtttgttgagtgaagtgggaagaaagaagacgaagctgagaaagatatatactctggatcgacgaccctatggcatcggttcctttataggaaccgacggcatagggtacacgtgtcagaaaaccgtgtactctatgtcgtcggttcctataaaggaaccgacgccatagggtctagcagaaaaaaaattatatttaattttcaaccgcctctaaatggtataatgtaattttatacctgtggtttttatcaaaaaaactgcctctaaatgtcaatttcaaacaaagcgggtattttcagaccctttgcttccctttttataaatgggagcgaaaaaacagcctctaaatgctaacattgtagtagtgcactatggatttaaagggggtttttagagataattctagggttagtttttaactattagtttctgttacactacaaaaagtttaactttt

SEQ ID NO: 202159 - DNA, 1946 bp, Cannabis indica
aacactcaaccaatagggtagaacaggccaaatctgaccaacccattaggcggctagctagccaaccacctgccaatgatcgaccaggctggccgggcaaggtttcgcaggataaaacctggccggacaaaggaaatatgatgttgatcctctagtgcaggcacaacttgatcaacttaagagcatgatacaaggcatgtctggcccaaagctgtccgacttagagttagacaagacccgagggttaccttcctctacacgcatcaatgcgctgcccttgccagccaaatttaagattcccacatggagaatgtacgtcgggaaagaagatcccttgacgcacatcaaatagtttgagacccagatggatctacagaatgttgaggttgatacccattgtaggatcttcccgacaactttgtctaaaactgcacaacagtggtttttcaaactagttgctaggaggtttgatttgtgaaactcctttacaagagagttctacacacaattctcatcttccgggaaaacaccttataggttggaagagttagttgaggtcaaatagaggctaggggaacctctcaaagactacctctagagattcatgactgaggccaccaaagtaaagaatctaacaaaagaaagaaggtacatagccatcatgagtggcatagtagctttgagtgagttgtggaaggatattcgttgacactcaactcaaaacatggttgatttccttgatcgcacagaaggctttgttaagcttgaagaagctatccgacaagcataaagtgggagacaggcagttgctagacaggccctaggtggaagacagccttcagttctgcccagcacacctgccagcatatgtagccagcgctctaaaggccaaacacaatggaggcaaacataacaacaacaactttggccaagaaaaaggaaaaaatgggaaatttaataagtctcccatgccacaagactcaaaggaaaggaggagaggtttacatgcttcactctcataacaacaactccaaaaatagaataggcgggtacagattcaatagtattgtacaagaagcctcatcccatgaggaaagacatgagcaaaagggacacctctgaatcctaccgattttataatgattttggccatgataccaattagcgcaagcacttatagtcgaaagatgagattcttgatcagaaagaacatctccatctgcgtcgtattttagatagccagatagaggcacaaggtgcccaaaagagagacccaatgccacctcagtggctagtcacctaggggtaatcattgggagaccccatattgtaggcgagataagcaaagctatgaaatgctatgctcggaccctccattaggagtaaaaaagcaacatcctggctgtagagaaaagagatcccaattagcttaagcttgaagagtctgccatctccttcacagagaaagatgctacccaagtcaggttccctcataatgaccccttggtcataatgttggaatatattttaccaggatctagatttactaccatgtatgttatttaacatcctaaatatgaatatataaaacaatgtaaataaatacatataaagtttcaaaaaaccttacggtgggtgcagcggaatattaatggctccatccactcagatctctaacccttgtatcctgtctgtagcagagtatcaccaagatttgtgcccgaatgtccttctcttgattttggattcttcacagccttacacactatgattaagataccacttgatgtgtgtgggcactcactctatcactcaaggtatgaaaatatgaagaaggaaagagaggggctggttcgaaatcgatagaagaagaaggctcaggaaaattttactggaggttaaattttcatcatctttaagcgtgagccatcgctatctatttatag

SEQ ID NO: 202160 - DNA, 1152 bp, Cannabis indica
gtccaactactctttaattaacattcagaaatatgcaaacctttataattctttttccaacaatcctcattccctatagcaacatatcttaagtcaaagggttctgggtgtcccatggcgaaacgaacagcaccccatgtagaattggcctcacctctagcaaactcaataccatcaagggcttcctgtaaactcaataaattgattagattgatttaacataattagagcatgtattaattactatagtaggaataaaaacacatgcctgcacaaatggtaagacactagatgtgtcaacttcatcctggtgactgattcctatgatcatgaaacgggaaaatgaattatttattgttttcgaaagtaagaaagctaagcttgagttttgaatcgaatgaaaagtaccgttgttgaaaacccatattggcaatgtgccaaggtcttcagctagctgcagaaacaaattatgttatgttagaatgcaatggaggaacataaaacatcgaaataaatatagttttttttaaaaattccatacttgaagaaactcaaaataacccattccgtcatcagtccagtacatccaaacatcaccaaaatggccaggtctctcctcccatggtccaatggtttctttccatcgaaatgcattccttaaccattcaccttcaacaaaacagccacctaatccaacataaaattcagtgtgttaagttagaaattttcatggttccaacaaaacatcaccacaagtaggtttaggacaacttgaaccaaaacttattttaaatctgcaagcgttgacagtgacaatattttaattttacctggaaatctgaagaaacgaggtttcaaatccgccatcatttcaataaggtcagttcggaaaccatgtccctgtgccagaatgatggtgttagaacacattcatcagaaatcacactaggtttgatcaactataaggtttttatatgtctttccagtatggggtcaagaaatcacattcaaatgctcatattcagatcagaattaggattctatcacaatgcaagtgtatattttcccattcaagaagcctaagtgagaactcataaggaaacaatgtaccttataagtgtccaagggcatgactgatacttgatcaaacca

SEQ ID NO: 202161 - DNA, 839 bp, Cannabis indica
ttggtgcttacataatgttagtagctgccagcttttgcaaccaatttgaagcttttaactctatggatacattgattgatcctgatgaacgaacataaagagcaaccttgtactgcttcccttgttcaatattctaaatgaaaagtaaaaattttgtaatgcaagaaaagtatcgaaaagatgcattgttccaaattagtacatggggtgttggtagtaaaagcttctcaccatgccccagaagccagggttatatataccaacaccttctgatggacaggaatttgcacctttgctgtcacaaagtacttccatttttagtgcaatcttgttacgttcaaagcatgaagagcgatcggtcgatacaatcacagatgactcttttccaattataccccagggagcaatgtttgatggtatattagggcccccagcctcaaaacctgaaatcagttttcagtatgttaatactaacagtaacatgagaaacttgaacattcctttcacctttaaccagcaaagcaaaggccaatgttagagaaattcctcaattctaaaagaagtaattaagtaatattattaatttcagtccaatattaacatacaagatacaacaacatgctgaggcagttcatctatgatccacccaacagacatgagaagttttgaaagcgttgtttttaaataagagtttttagcggctacactctcctaattatcgttcctccaagctcaaattttggagataaaaccttccaaactactaaactgttagcaaatttaaggtgtcattcggttcatttatagtggttttaaaactgacctctgttgcttacaag

SEQ ID NO: 202162 - DNA, 1483 bp, Cannabis indica
gactcttcaattacatattgcctctagctttttggaaaacaaaaaggtatatagattatttaattataagtagttgtattatattctgtttggattccatctatataaattaaataacattttacaactaaaaaaaaaaaagtctcatatatacgtcttcatgttcacaagtgtttgtcctcctaacttacgtacatagaattattctaactattgttttgttttaattaaagttagcttaattattaaaatagtggcaacttgctattggaagcatgtttacaataaaaacaaaacagaaagatcaaatagtcgaataaaattcataacggtcaggataatagaatatatatgagtactgctatattgggcagagttctgccggcttcaacttcatatatatatggtatcaataataatgaaacatatgtcaattggcatctatttatttgtcttagcataataacgcgtctaaatttttcatgaccaataaagttaaattcacttgttttctattttgtaaaatcaagttcatgatagttttaaaaacaagaggcggcaaaacaacatgttagatttaaaattcctcatatgtattagggtattgataattaaaatttgacttaaataaagtcatccttttagtaattgtgagtcattgcatatttaagtgtcatgtgttaatgtgtagatactgtaagtgatatttttaattcattgagggactaatttaaaaatacataaaattaataaaataactattaggttatatattagtagtgattctaaagaaataagagccactctattctcatcatccccatcagagaaaaaaactagagaaaaccctaaaccttgtattcttgaaagatgattacccaaagatctaatcttatctatctatagaaatcattaaattaattgtctctatcaagaaattaaggtacacttccatattattcctgttttttctccactttaaatcatcaagggccttagagcatcttcaagaaggacattaaattttgtgtcacactatcaccaaatttagtatcaaaaattattttcactccaaccacgttaccaaaaattacactaaaaaaatattctttaatatttatattaatatactaataaaatcaccacaattgttatatctaaataataagaatgtgattactagtgtaaataattttcatttaaatgtgtgtttaaatttgtaatatttttattgtgaatatattttttttaaaaaaaatataaaaatgtaataaatttttacataaatcataattgaaaataaaaataatttacggtattcacatttaaatttacacacaataaattaaaaggtgtttctacaatgcactcctctaaataaaagcgacatgtgcaatagatagtttgaaccttgttttctgtgtgttaaatttttctgaattttcaaaattttatgtaatatcttaaataactatattgtaca

SEQ ID NO: 202163 - DNA, 1103 bp, Cannabis indica
aaagcatcttattgtaaaatcttggttgacagcaattcaatgaagcttctataaaaaaaattgacaacaaataaaaaaaccttattttatatatattttttttaaaaaaagttcggttttaggcggtttgaaccgaccaaaccgcagtttacatcggtcggttctaaggaagttttggattggtcggttggttttcggattgcaccaatccggaccgaaaactgaaatttggatttttatatggaaaaaaaccgactaaaccgaccgatgctcagccctaacttgccctcgagtaaaggccaagttaaactgacaaaaacaaacacaataacgaacaagttaagccaccattaccatttacacttgctttgccattactcgtgaaattccaattgtaatattaaccaaatttcagcctaaccacttcaaaatttaaccttattgctcaattaagaaaattaacaatataattcacaaatgaccacaataattagactccactgcatatgctcaactcaaactaaacagatccacagaccaatttttaatatacttgcatcactgaacttcttcactaatgtcaataacgcaagatttgaaatcgaaaggactttcacgggttataacactaggcttatgtaagggtagataaaaatatcatttaggctcagccataccataagatttacattccaatcaagccacctcacaaagcactcaaataccaccccaatcctctttctttgcaacaaagagagattcatttactaaattttgcaacaacacgatttctatttttttttatattgaagaaaaattaaatccttttctatatattttttcgtgaagttgcaactcataaacttttttatattctctcattttttttatttcccacatatcacatctaaattaccccattacaatttttctccacacttattctaagcttatggtatagttagggataagtaaaaataataactgagttatttctagctcaacaaatacatgtacaaataaaaataacagtttatagctcaaaaagggcatataaggaataaacatacaaaggtgggcttgaaaggcacaaacgttctaaa

SEQ ID NO: 202164 - DNA, 1207 bp, Cannabis indica
cgttctataatctcgccttctgcaatatgttgatcaagcaattcaggcacatccgcaggagtgacatagccatacctaaacaaaaactgttttcaatcacacagcaaaaacaacaatcatcaaagtagttctacttctgaaaaattggaacttaccaatgaccagtaatctttgcatcaacacctggactgtagatgatcaagttcccagcatatttatgacctccaatgtgagaacatgcattaacaatgacctgatcggtaagccccctcgactcaatctcctccttgaacttttcaataagaacaggtccacatacaccacatcttttatctcgattcccatgagcgcaaacaaacacatatgatccatttaagacttcctgcactcctgttgtccacgtctgaccattaacaaggacatcttccacaaagctatccacatctgaatccttcaaagaccttttaaatgaaggaacagaaacaacttcagattcaacaatgaattttcttatttagcccaaatgttaaataccagtacataaacatcttccaaatacaaatgattattcttgaaagaaaagaaaaaaattggcaaaattgttataatataagaaaatcgaatactatactaactgcaactacagaaatctataaaagacaatttcagaaatttcagtcgtatcctatcatttaatgaaaatcaacagagtcatgataaacagtgtaaattaaaagtacataattacttcatacctaattctagtcatttcaacgaaaatcagtccatagtcaacatgaaatcttttgataaaggtaaacctcagctctaactaataagctcaactagaaaaatctgatactactgtagttacatacactaaaccctaacaataatattctaaaacttaacatacaagcatgtacaatcagagcaaagatgctattagattcaaagaaagaaccggagcatttccatactctgcaacaaaattagctgagatacacagtaatcaaaaaacaccaccaatccataactatacctgtatttgaccatttcaggaaagatcagcacatctccatctgaaaactcggtcccatcgcgtccctcacagatcgtcaacttcgtctataaattaaaagaacaaacagtccaaacgtaagatttcaacgcataccaaacccaatcctatccaaaaaaaaaaaaa

SEQ ID NO: 202165 - DNA, 654 bp, Cannabis indica
agttactcgatacttaattagaccaatagcaatattaacacgtagaaagctgcttgatactactttatttttttagcatttctctaatattatatgtagttcaaagaataaatttatacatataaattaaatccttctatgatatcatataattattagctatactcccatcatgaatctgagcttaaatttttgagctataatttctagctagcaacaccatttgtatactattattaatttctctacaaaagcacgatttgcgcgcagagatgatgataataatgtcttaatttatcattataattattttgattttggtggcaggcatatatatgataaacattgatatgcgtgtatttttaaaaatatagcttactaatgaaacttaatctggatacttaacgtaagcaatttttcaatttgtaaagaagaaaaaacacgcatatatttatattttgcaatggaaaagtgctttttttctttttgttaatagtgtctatatggaaaagttaactacttattcgactagtactattctttcccatacatatgttgtgaaccttttttctttattaacaattattacttcctggcatgtatactgcataggagatgcgtggtggttatgtatatataccacgtatatatatt

SEQ ID NO: 202166 - DNA, 766 bp, Cannabis indica
tcaatacacttgaccccaacacctacgggtctaggtcctaggtgtgggtccaagtcctgagtctaggtctgggtatggatctaggtctgggtctgagtctgtgttcgggtccgggtctgcatcctgggtttgggtccaagttcgggtccgcgtcccgggtctgcatcctaggtctgggttcgggttcgagtctgggtcccatgtcccgggtcaggtcagggtcccaggtctcgggtttaggttcaagttcgggttcgggtccgggtctgagattggtgttaactccgaatcttttgtaaatattataatagaaggtaatacggatcatttgttatgtattaaataatacaacatacattgtattaaaatttttggccgtaataattaatacaatacattgctttatctaaacatagtgttatttattatttaatgcaatatgattcttatacgacataccaatggagctctaagaaaattgagtattccaccatgtgatcctctccaagagagtgtagcatttatccatgtgagtttctctaagggggtttgtgtgtttctctatgtgggttttgggtttcctccaaggaagttgacggattttgatgtattattatgagctgagtttttttttttttctagctagttccattgtagaatttgtaatttcatctggcggtaaagttgcttttgttcatttgagcattaagtttatattttgaatcttaatttggttcactcttttgattctgtaacaccctaacta

SEQ ID NO: 202167 - DNA, 550 bp, Cannabis indica
agcagaaatatttacgagaaattatcttatatactgtttttttaatatttttttaaaatttacagtttgagtgtttaaagtaattgcaataggagattatataccattttttgttaccatttaagttacaaggctagtttcaataagaatttctatataaaaatattctctaataatatttctaagtacttttaaagtagaaaaaatctcttctataaaaaaagtgcataaagaatacgttcatggcggggtatagttcaagtgaggtaataattataatatttgcttttctaaatattacaatcgggtttgattgtgtattagttttatgatttggattaatttaccgttgaatgaattgcatattgacaaaaaaaaaaaaaaaagaaaataataattgcataagaatacgtgtatttgaaaacaattgcataaatacactctagtaaattaatacagaatttttttcattaaatacatgcacccatttgttttgtttgaagaggcagattctccttttaaataagaataactttttttccttacttaa

SEQ ID NO: 202168 - DNA, 678 bp, Cannabis indica
aatttcttcaattgatattgtggaagatcttgggaaggataggttggtgtggaaaagaactccttcgggttgcttttcagccaaagaagcatactgggtgaacttgaagtataggttgggtgttgatcataaagtgtggaaacggatttgggcaagtaagattcatccgagagcaagcctattcttgtggagaatctgtagtggagtgttgccaactcgggataagctgggaaacgttgatgacaatagctgcctgctgtgtaatggtgaagttgagagctccaaacatttattctttgagtgtagcctcacgcggtccatctagtttggagcccctatccctctcagaattgaaagattgcagggagagaatgttctgtccttagttcatgatctgtgtggtgatttggaggaggaagaagcttcaaaactgctattgtgtggatatgtcatatgggataccatttggaattacaggaattctactcagcttggtgggagaaaccgggattgcttcagtttgttgttagaagtgaggaaaagatttgaggaattcgggggcatcaacgatctgccagggcttgatgttccccaaaaaactgtccaattggtgcagagggcccccttcaattcaaacattcttgtttcggatggatccttcaaagatgggagatgcgg

SEQ ID NO: 202169 - DNA, 1744 bp, Cannabis indica
tatatatatatataaaaaaatagtttattactttttcaaaaaagatatttgcataaataaaaaattcaaagcgttaatttttttttccatgttaatgtatttttgaaatttttttccaaatatttagtttattatgtaatttttttttccttcaaattcttttattttcatttcaaaaattgaaaaagtaaaaataattttgtagaatacatttcttgaaaatattcacattttataaaaagaaaacaattgattaaaaaagttgttataaaatgcactataatatagtaaatttttttcctttcctaaataccaaataataaagaaagcatcatattttcatctacttctttctaatttttctttctacccccattttctctcttcaattttccacccattgtaccaaacataggataaagagaaaatgtccaaattattagtatttatctaaaaataattcaactatcaaaatatgagtccaatacataccaattccaaacaagaaataataataagaattgctaatagcaccaacaatacaactatactagccctatataaattaaaaataaaatttgtgaaacccactatccaacattttataagttagcttttgtctcgagataacagcatttttggtggtgtactataaggtaaagtaaacaaaaaattagaactgataaattgaatttaaaattaaatagtaaagtctactacaaaaagacccaacaacaacaacgccttaggcaatagatgctaagaaaattactagttcttctctgcaatcatggtgttccttgtggtttatatataatcaagtatacaaaacaacgcaaaattaaggacagaacaacacaaagaaacacttaatgtgttttataggtcttttcttgtgtctattcagtttttgtattgctcacataaggaaattcagatggagcagaccatagaccaaacaatattacaaaatggagacataacaagagtgctgatgaaaaagcatttgaaggataaacattccagcagaactctattccgataaacaaaagtacactgcagggcaaacaaaatcatcatacaacttcataagtgggataaagtaaggccggaaatggaaacaaacataccgtaacaaagtaggataacgagtcttccaaagcagatacggtatgctatagaaatacctgcaattaaacgacaatggataagctagatttaagtcaagaggacaactttggtgaatcccaatttaattttaaacggctaaaagcttctggatctacaaacatgagcgtggcagcaaggagcaattttaaagttactaaaatcatggcatacaggcaataattttggtccaccagaacttaccacgagtagaactgataatgcaatgatcgggcacatataatgccaatgaagtttccgacaaacattgttgtgacaatatctgaaaacatcagagaagatggcatgtaaataaataaagaggaagcagaagatggatattgaactaaagtttatgagaatgccaaagcttacgttctgctttgagcaccttcaatgatctatgaccatcattagaattcttcgaggtggaaggtgataatcttaactttatagagaccagtatagaatgcaaaaaatttagaaggcctccttcatgcctgcaaatgacaatcacataaacatattgagtgaaaattcgggtttaagaggcttataccaattataatgtcaagat

SEQ ID NO: 202170 - DNA, 1863 bp, Cannabis indica
gtgattctgaccaagggtctcttaaatatttggctcattaatgttgactgatttacacctcaaattactccaaaaacttagcacgcttagacggtttctcttcaggtacttgaatgcctaacatttactttttgtgggggaaggggaaccgaagcatattaattttgaaacgattgcccttcttcactaatcaacttataaatagggcataaattcctaataaactacttttagcatttttcatttttgaagatttaagagcaagaaagcttttcctgttgaattcttcgaagaatccccaggaagtcccgatcagtgtcatccgaacaactctaacgcttcaaacaatgagtaagttcctcatctctttatttttttatgcttgaatatttgattttttggatttccattgtagaaaatttgatagttcttgaacttgttctacgaaaatctaggtataggaatatgacattttgattatgttcaaccatgtggcttgacagtgattccattttgattttgattccacgatgtttggtttcagttgcctattcagggattagtgaagattaacccttaattcaaagtcttgaaattctaagttataaacctaatatcatgcaaaatcccttttttaatccttcaatcggacctggtcggcatattcaatttgtttttattcgatatcccagccaaatactcatcttgtgtcctagcttttatagatgaaccttggtgagttttggagaggcgaacatcatatcgaccaagaccttcttcaacttttgcacgaggatcatcctcgtctttgtgccagtctctcctcatcaagtgacgatctttccaattcgagctttgaagactgggagataagtagcgaacatgcaccttctctagaacccaaggtgcaacaccatttttatcccgccagatcgcaggtgaaggctacgaacattttatctgagagctcaggaaggggtggaggtgatatttttcgtccaattggacatacattgtctgacaaaacatagttgacactattcctgtacgtcgcccaatttgtgctgttgtaggtacacgtataaccactttcactgtgatagttacaaagcacactaatcaagctccattcggggatagaatgatggcgcgcacaaaacaaacagttagaagatctactttgattgatcctcatgtgtctcggcttgccacaatgctgagtgctgagtaggcccgacctgttgctgaggaagaagacaatgagggagacgtcgaagtcgaagaggtggaggatcaaggcgaggtccgtcctgatactccatctaaagccgaggaggatggagtcgcttcaggatcgccctttggaggtttcagtgaggaaggggaacccgtgtctgaggctggtgaagtcttgctagagggtgaagattacgttacagaggaatacaccgaggctgttcctcagtgaacacaaggtgccataggagctcagtgggtttctcctccatgtatagtaacccaagccaagatgaagaatttggagaagcacgactacctggggatgtcgactgcttcttcccctctccaatcatcgggcaactagtctaaggtaggtgttttgtgcctggttgggcacttataccaagcagggtgcaatgctgcctttccctctatacttcaagaagattacggactactaccacctttgtctgacacaatttactcctaagggtatcaaatactgatccgccctgtatatcctttacgcctcccaaggatggagcgagccatccccgcacgacacgattggcttttcgacctgaagttaactcctatgcaaagcaagttgaggtatttctactt

SEQ ID NO: 202171 - DNA, 595 bp, Cannabis indica
gcacgtggtatactcacctagtacatataaaaacattaattacaaaaatatcatcccaatttaattttattttatttattcatattccaaaataaaccttgtggttactagcaatttatgttagaattactattgtagactaaaataatcataactttaatactataaacataattattaattatgtgtctaatatatgtcaacaactataatggaatggttaataattatttattatgttagaggcacataagagtacatttaagactataattgacccattaaattataatataccattataaaatcacttaagtacaattagtgtataaccctttagggttataagggtatgacatatatgttatgtatataaatatatatgtcttaagtggaaaattttatggttaatggtaataaaaagaaaagagatgatagctcaacattgttctcctctctaatatcactctaatcttgattttgtgttgattcttgttggagattcttcgaatcaaaatggctcacatggatggatcatcaataggaggtatttgtgtgtttcttatattggatgctctaaataaatgttgggttt

SEQ ID NO: 202172 - DNA, 1454 bp, Cannabis indica
ttcctttctccgcatatactaatcattaatcagtacaaaagtaaaaaatcactacatttatttatttcacaaattctagccattgttgaggttgaatctcttggaaaacaaagtcgtaattgtcgtatctttaatcgaatattcttctttaactatagaaagaattttggattttaagcattttctaataaaaatgaataaataaaagacaggaaaaaaaaaatccgacctaccggattcgaaccagtgacctaaggatatctatttgggattaccaactacagtcctccgctctgccaactgagctaaggtcggtttgtgctaatttctctcataacaaataaatataatatatcaaaaatacaggtctaaaggtacatgttaatacctctcattttacaaattttcttatagtttttccactgatacggggggaggcagcatacgtatataaagagggatggactcgtctcttcttaaaatcaaggcttattaatattagcagttctgcacttctttgacactaaggtccccaatctctatatttttgcatttaaacccctaacttaataagttattagcatcagtgagatcatctagttaacatttcaattgcaaacacaaattacatggtcctctaaaagatatatattcctttcattttttggagataatcaaaagagagtgaaccatatatacttgaaaaatgggtgagtccttgttttcaagagtgataatggaaacaccaccttctatttacatcaagggcttatcattggtgaccttaatggcaatggccctgttggggttgcttgaaatggccggaaatcatttggggtattctaaattttccgacttcagctcacaaaatcgacccaagatgtcgagcagagccggcatgttgttgctctacacgcctgcctttctcgccggccttgcttccttgattctccttgtgccccattctaacgatctaaggttccttttcctcaccttagctctcaccattcatttcttcaagagggtttacgaggtaattaatcatattattattattattattatacaaaatttaccttttttttcttttctatcgttattacaattttttgttcctaaattaattttttgtttgagttgaggttctaaaggctaacatttgaaataattgtgtttctttttagaaggaaaaaatggaaaagaataagaaaatacatatttaatataggttggtgacattaattaatacgttgcacatgcatatatggattcgagtaaggatacgtgtagataggaacgttactagttattatgttatgtacgttggatacttcacatttctttagggcaacttcataaaactttaaataactaacactaaaataacaaaatagcattaaatatttttttttaattctaattataacattaaaaattattttctttattcttat

SEQ ID NO: 202173 - DNA, 1490 bp, Cannabis indica
actggttatgggatttcaatccttacttgagtcttcttgatttatccaataacaaaatcaatggaagttttcatgattttgagcaaggaatcaatatctcctgggacgacagatcacattttcctgatatagatttgagttcaaatcagtttgaaggctcaataccaagatttttactccaaatagctacttcactaaatcttttcaacaacaacttttcacaactgaattctctttgtaatatcacagactcaaatcatttaatctttcttgatgtttcatataacaaattgtctggtgagttacctgattgttggtcacaagcacactctttgagaattctagttttggcaaataatgagctatctggaaagattcccaactccattggtttcataaacaccatcaacatattgcatttgggaaagaacaatttgaactcagagttgccttcatcaatgaaaaattgcacagagttggtgatatttgatgttggagagaacaaattgatggggccaataccagcatggataggtacaagcctaacaaagcttcgtattcttagtgcaaggtccaacaacttcaatgggagcatacctttacaactatgtcatttagaggatcttcagttgttggacttgtcctcaaatgatctctctaaccaagttccaaattgtcttggtaatattacagcaatgaaagaaactggggaccaaaatgtagcaataaaatatccttattcagctactcgtggccgagccggtgttcctttcgatttcaaccgtgaaaatttggtgttggtatggaaaggagcaatctctgagttcaaaaatgttggacttttgaagagcattgacttgtctagcaataaacttattggggagattcctaaagacatcactaaacttggtggactgatttccttaaacttgtcgagaaacaatctaagtggacatattcctcaagaaattggtgacttgaagtctttagatgttcttgatctatcaaagaactatttttctggacagattcctttgagtctctctcaagtggataggcttagcacattggatttttcgagcaataatttgtctggcgaaattcctaaaagtactcaacttcaatcccgtgatgcagttgcgtacatgggaaatcctcaactttgtggaattccacttctgaccaagtgtccaaatgaagaagagacaacaacttatgatgaagcaatggaaaatcatgatggagatgaatttattagcaaaggattttacataagcttagcacttggaattgtagttggattttggggattttgtgggactttaatcttcaacaagacttggagatatgcatatttcaagcagttgaacaacgttggagagtacttggctcacatatctgcagtagctctaaagaaaaagctattcgagacttttaaaagctagttggtaaaaacttttccctctaaagcttttggtgtatactcatat

SEQ ID NO: 202174 - DNA, 556 bp, Cannabis indica
atgatatgatcctttctgtgttccattttgggggttgccaaatgccaatggcttcatctgattattgattaacaaacaagagcgtgatttgtagaacaaaataggtcaaatcagatcgtttaacaaacttaccatacaatattattgagcgtagctttgtgagaagtgaaagatctgtgtcaggcggcgtttgatggaaaatctgtgccacttctagttctacctctaaaaatgtcaaggagaaaacaataataaaataagaataattagtatttttgtgaattttcgggactactgggagtttgcctcctaatagttggttaaaaattctctaaaatataacagttattagttctgtttcttttacagtaaaaaaaaaatagtatttctattgcttaactttcaccaatacaaaattttatctttttttattaaaaaaattaattttaaaaattataatattatattaattttgaaaaaatattaaaaagcttcataaaaatattaaattaattacaatatattaattttgtttaaaaaaaacttaaattattcc

SEQ ID NO: 202175 - DNA, 602 bp, Cannabis indica
ataagtaaattaggtatgttcttgcaaataatcgtacctgcattggtttgcgcttgcttctagtagtgctgctggtgacaatgcaaaagtttgagaggtaatccagagctcccattgatcttctttgttatagctacgatatatatatatatatatatatttatatatatatagagagagagagaaagagagagaaacattacctatataatgggaaatgggagagcaggtatttatattaatgagaaaaggtgtcttctttgtttaaatgaatttagaaagagggtatgcttgcaaaaaaaagtattattgagactaaaagttagtctataattaccaaaaggaatatcaagttgggcaagaaaggcctgtgacttgaaaattaaaatcatataatactttttggggtataaataatattattctttcatattttttagacaatctagtgaggaagacaaatattgtattaaagtttgtgatatatgttcgatctcatttatttttgttcaacgagagtgtggttttgctttttcttttgtaagctagccaagggagacctatgtaatggcctctaattaattagctgattctattataat

SEQ ID NO: 202176 - DNA, 1053 bp, Cannabis indica
gtttctaaaactgctttaatttgatgtgagataaaagagctcgagctcgagctcggtggggatgggcaatactctttgttcgatggtgacaacattaattagtgatcttattgatttgatattcacaatctctggctgttgctttggtctccaccgtccacgaaagtctttctcttacaaattcaacgacgtcgttcgacttgcaaacaactttctctgttcgtccattttcttttatttaaattcccctgtttataaatccttgttgttgatttcaataaatagatgtactttaaattttggattatgtagttagtgttaacgaaattgaggccttgcgtgaactgttcaacaaattaagtaactcgatcattaacgatggcctaattcataaggtaaactttgattcttatgtaaaagtaatttgattttatatttgtacttatacttacttttttgtttctgggttttaataatgtgaaggaagagcttagattagcaatattcaaaactgctgctggtgaaaacctttttgtggatagagtgagtaaactagatcagctagctagctaccactttttttctttcttaaattctttgtggaatgatatctgagttatataatatgaaataggtatttgatgtttttgatgagaagaaaaatggtgtcattgaatttgaggaatttgtacatgcacttagtatatttcatcctagtgcccctctcgtggacaagattgattgtaagtacactacttattatagtcatgtgtagtctctcataaagttttctcaattttgtagaatattatgttaatatggtttactattttctcttataattgtaatgagttgcagtcgcatttaggttgtatgatttgaggcaaactggatttatcgaacgggaagaagtaagtgtctaatactatatttatgtaaaaatgtatgtgatgatcatactcataaccaaggtgaatgaaatatatatctagtttcaaaggtaaccatattgtttcaggtgaggcaaatggtagtggcaacattgttcgaatc

SEQ ID NO: 202177 - DNA, 1191 bp, Cannabis indica
cgtgttgctgtggtcttccaccctagccacactgtattacatagaagacactgcatatctgctacaatattgaatcgagatagcctatcctttgtcttcaaccttttctgaattgcaagccaaattacgaagctatgtttgggagtattaagtctgccccaaacttccttgctccacttaacccagttctcattggggcataacaacttgtacccttcaactattgtatatcagctttgtgtaaaagatgagggagtagttaaagttaggatggtacctttcaatgcaactatcttcctccaataccagctaccttgttgtggagcagagtaactccaccattcaatttctttgatatacacactatggatccattttacccatagattgtcttccttggttgcaattgcccacacatatttgaacatcgccgccttgttccaatcagctactcttttaaagccaattcctcctactccctttgattgacaaatgttttccaaagcaatttgacccggtccttccatcaattattcccctttccataagaaagctctgcaaatggcttctatgtctttgataatcttctttggaagaagcataatctgactccagtatgtgtgtatggtgagaagaactgagttgattaaaactgctcgaccgacaaaggaaatgtgcctggtgctccaagttctaattctgtgagtcatcttgtcaactaggataccacactctctttaagagagtcttttagggctgatagggatacccaggtaggtgaaagggactacacctctctggaaacccgatgcatcaattatacgttgtacttcagattctgacattccattacaatagatagctaacttgtttggattaggttgcaatcccgatgtttgggaaaacagtttgagccagtgtaggagataatagtatacttttatagtctccattgcaagaaaagaagaacatcatctgcaaaaataaggtgattcagcttcatatccttgcatctatcatgaaagaggaaatttgataagatattccatgtcgagtacaaagattaatggagacatggggtcaccttgtctcagtcctctccttgcattaaagtagccatgaagagaaccattaagcataagtgaaaaaatctgggcgatcaaatgcataccatgattagctgaatgaatg

SEQ ID NO: 202178 - DNA, 2171 bp, Cannabis indica
agtttcaaagtaaactaaagtatcaactgacctcaaggtatccgaaaaatccagaggttaaactaccagctgggaaacccatggcgattatgttctcggttatatatgtcatatccaaatcaaaaccaccttcctgaacattacaaaatgatgccaattatgaaaatgcagtcattgacactccaaattgaatgctcataatgaattcacaactcccacattgtcaataccgaaagacaattgaaaacagcttattaagatagtaataacctggtatcttcgtttgttttgagaaactatatggcgtgctttaacctgcacagccttaacagcactccgcgatgaatccacaaacccttttgtgagtgattcaaaaacaccactctccgagctagctttaacatcattattattattatcagttgtagtatccactgatgaaggcatctgtgaaccgaaccctctagctaaacgggcaaatgcagacattccaggaattccacctggactctcttgcactgcccctaatgattgttgtagtttcaatgcccaagatgatgttgaagatgaaacagatgctaattcaggcggattagtttcttgtccagagacaattggaacagaatgttcaacatcagaagcttcagcagaaggctgggctaatgaattagtagattctgagttcattctgccaatccaacatcaatagtaaaattaccaacatagctagtagatcatcaatgtataattaccattaaatagaaaatcaattaacttaaaataaagattcttgaaagtaagaacaagtaaaaaataaaaaaaactccatgcttttccccattgaagctcacatcttaaccatgtaatactaccaacataaagaaaccccaattacttgaaataaggaatcttgaaaataaaaagaaaattacagatcattaaaatcaccattaacccattttaggacaagattaattaatttagcaaaacaaagaaagcccaaaacttgatttcctaaacatgttcatattcacaaattaaaattccccaattacaaagatctgggaagaacgcattccaaatgggcaaaccaaaattcaaacataaatgcactcaaaactacattttgaatctactcaaacctgaatcaaacatatgaggttttctgggataatgtataagatgcaaatctacattttagaattgagattggaatatacttacagaaactggattggatctctttcaaacaaattggactaagaagaacaagaacaagaacaagaacaagagtgcagagagtgaccttaagacactgattttttttttggtgttttttttttttttcagaaatggaaatttgatccaccaaatatgaataaataaattaatggttttgcattagatgcgctaaaaaataattatcaataatatgtttttaattttttaccattaaaaaaaataaataagtaattattaatttaaatattggtattgtgtatgtgaagatgtacggacgtgtatgataacgattaacgacctattcatagaatcatacctaaataaatatatgcttgcaaaatacgtaaaaataaaaatacctttttaatttatacatatagaaaaaaatgtaaagttattcatccaaaaattatgtaaaataaaatatattttagtattaaaataacaaatttatacacgttttaaagttttaaaaaaatattattgaaattagcaaaatatatatataaaataaaaggtaaatttcaaaaagctattttaaattgagtgtatttagtggaactatttgtattaactgtgtttctaatttattttttgtgatgtaattaataagattactcataaactagcagtgaaattttaataatccttttatatctatattttattttaattgtttttagtttattcacaagaaagatatttagtaggataaaagttatgattttttttcttaagtttgatttggtgaggacaaaagaggtaaagaaaatgtagaaaaaaaaggaataattatataaaacacaaatttttataaattttttgtatttttatgtttaattttattttatatttttacgatattttgtaaaaattaaaaaaaaaaaaaatcatacgaaaataatacaaaaaataacaataaaataata

SEQ ID NO: 202179 - DNA, 499 bp, Cannabis indica
catcttctacagtggcggagccagccacaaaatggagagggggcaagaaaaaaatacattatcataaataaagtcaattacaattgtccttcatacttttaaagcgtagcataatagtttcattatccattgtatcacatattttctttctcaatgtactcaattaagctatcattcatccattgatctcccattaggttgcgcaggctattcttgataatattcatagcagaaaatgatctctcaactatagctgtagcaaccgacaatacaaacgataagccaattgatatatcttattctttttggtctcaaccatttgttttgcaagatcactaatgcttttcaaagctccaaactctttacttctacgcatatcaagaatgtaagtatcaagctgatcatcaagtgccaagagctcaaaagcagaaaaatcatcttgataaaactcaacaaattggatcaattttttcttgccaaaagcataaaataaatcagc

SEQ ID NO: 202180 - DNA, 637 bp, Cannabis indica
tatctatttttccttcttttggaagcatacaatatctattctctatttttaacctttctaccagtacatccaactaatatttaccaaaagtaaaaactaaatagtttctacccaaaaagaaaaaaacaactaaaaaaaaatgaaaaccatagaaactatatagagagcatacctttgatggatggtctaagtgtagtggttaactttgtgaacaagaaactacagacatgcaaccttttgtaaaggggggaaagtctcggtttaaataatcagttctatatgttttcactaaaatgaatactaaaaagttgaaacggtgttatttgtgtctattgagataaactaatacgactcttggatccaattgtcgtttatatttttctatattagtttatcaaagcacacactcctataaattttatttacacctcagaaataataataaattcatcttaatatttaaagaattatgtttaaaataattttaaaacttacacttaattttttttttcacattattttatattaattttaatatttactttaactttatttttattatgtatttttaaatcatatataatttaatttttatctttttctgataaaatttcttaaaatattttattttattttt

SEQ ID NO: 202181 - DNA, 349 bp, Cannabis indica
ttttgattgtggtttcaaaatgaaaactgaaactagaaaaaaagaaaaaaaaaaagaagaaaggaaaccagagaaaaaggtttgggtgtgatgattacatagtgacatcatcatgtatgtatgaagtatgaacaagaaataatttagtaattatttttttaaaaataaaaatgtttaaaataccatgtaaaggtatgtttaaaataaatattattttccaaggccattttcttcctgtaacagccgaagcaatgggaattcgtgaggctctaagttgggtcaaggcgagacaatggatgaatgtaatacttgaaaccaattgcctcacagtaattcaagccttacgaag

SEQ ID NO: 202182 - DNA, 519 bp, Cannabis indica
gggagcatgaagatgcatcaaaccgtgggggattttactggggtagatcataactcataaggcatatttttgagttgtgaagacatgtgatcacgaataagaataggtgaaaatatagaggcacgcatgcatgagtctctcaatgcaaagccaacttttcaccattgttcttaaacactcatcacatcacaatcaatatttttgttttggtgatgattaatttgttcaatcataacggacactatttaactcaaatgtatatgttagtaaattaataaataatctcttcgcctataatattattcatattttcttttgaaaataaatattttttgtaattaatgggcatgttttaaatatatattaaaaaaattgttaaaaatgtttcattaacacataatgtttttctacatatataaataaattaaactcaataattaatattaaatatacgtaattgacatcatcaatttggtttgattaattaagtaggctttaaggtatatatatatatatata

SEQ ID NO: 202183 - DNA, 710 bp, Cannabis indica
gtaatataaataatttatttagttaacttttatttattattttaaaattttaaacaactaattaataaaaatattataaaatatatttgtttatggcaaaaatgtataagtgccttaatttaaagaatattttggacaaaataattccaatggcaaaagacaaagtctccaagtgcgataattctagagtaagcgaacactttatataaatggcacctcacgattggttaacaatattacttaaaaactatttttctaagttataccagacccgatacttaattacactaatagcaatatgacatcgagaaagatgctaaacaccaataatactttttagcaattcttaaaaactttttatctaggactaatacataatatatatttgattgtttcaattcaatactatttggacttttaatgtatacataaatataaataaccccaaaattaatacatgaacaatccatttattaaatcaaaacctgaaattaaagcatacatttatagcttaaaataatggtccaaacaaaaagaacagaaagaaaacttatggccatcaaaaaaagacacctcaatttccaaccatctaatttaagaaacacaattttctttcttttgttgtaattgatgaaagttggaaagtagcatttcataattaaaggaatgtttttttccagttaaagaaccccaaagaaggggtttttaat

SEQ ID NO: 202184 - DNA, 1714 bp, Cannabis indica
gtatttttttagaatatgaagaaggaaaaaatagtaacaaactaaaatatatttataataaaataaaatatttaagtggggtgtctttgtaattatctttttttttttgatgaacatctgttttataatttttagtgtaaataaattcttttttaaggactaaattgttacaataaaaaagttaaagggtatttttactaaagtcccaataataattgaaaaataatttggcataacgtaaaactgtatcattctcgttcctcctgaataaatagtcatggaaaactatatcttaattccaattaattgggatttgtgagaatttagcgtaacgaactataaatgggatttgagattaattaaagagagtgaaatgaggacgttgcttaacgcatttgacatctgtttttctttctgttttttttttaattgtaattatatttataatttaatttaatttgatatttttgttttattttctagtctcgtgtgttgtgcaaaatctcagtaagcatgcacacgtggtgacccaatatttgagtcatttttaaggaatctaaacattctctgttcatcttctttttatttctttctatttttaagaaccaaattcttccttgaaaattaattaatttaacactcaaaaagagtactcaattaaattacttacaatggagaaaagaaaaaggttctcaattgcattacagtttacagcccacaaagcaatgttacctttggacataaagacttcttcattattggatatttgaaattggtcaacaacaaatcttgttaattttgtagggtcttccttttgctaattgtaattaattgtgtctaatttttgtttttgtctttcttttagttagaaatttgtttgacttaattacccatatactctttaaaaatggcatataaatgtattcatagaaatattttatagtagtccaccaatttttttatatcaccttgttgttatagcagaatatttcacttgtttctaaaaaatttagagcaatttgttgtagctattaaaaataaaattcaaacattacattgtaggtgcaattaattattttttaattttgttttcaatattataaattaattagaatttttcaaaaatagacaacatatcattgtgtaaaacatcatatattatatctccaaatatcgaaaatataaattaataaatgtttttttcggataggaataaaagtgagacgcatactatagttgttatatatttatattcatatcgtacttaatagagtaatttgatattaattgttttttaactgcctaatttttataattaactgcttctctctctctttataaaaaatgtaggtgtttgatcttgatcaatttcaacctatcatctaataaaatcttcataatgattttttgttttatttttccgtaaatttttatttatataaaaatgaaatggaatataagctcataaacaattagcgattaaatacatttattaatttacatgtatttaccattccaaaaaaaaaaaaattagcatctatttatagctatgaatagactttcaatataaagaaaaaagaaaaaacattcatagatttgactaattatataattattaaatactgatgtgtggctgtaagcaatttgttaaagttattgggttgtaatatcttcaaatactttctagccaaaaagtgaaaaaaattaaaaaaaa

SEQ ID NO: 202185 - DNA, 2049 bp, Cannabis indica
agtacacaggaaagccttgctcaaggctctcgcggatgaacttccaattgattctattcgtttctcaagcaagatcactgccatagaaacccaagaacatgagggctcatctcttgctgttgttcacatggaagatgaaattatcatcaaagcaaaggtattgtgatcaaactcacctttgaccttcattcttttccatattatctcaaaacagctttcaaatttgtgagctgcttcaaatttgcaggttttgattggctgtgatggggtgcactcaatagtgggaagttggttgggactagctgaaccggttcattctgggcggtcagcggttcgaggaatggctgtgattcctcaaggccatggactgaaggaagaagtccagcagtttgtggtgcaggcaaaggattggttttgttcccctgactaaaacagatgttattggttcctaacttgtgcctctgctgataaaggttccacttttcaaccttacttttatcttcatctcttcgtgataaggggaaaatgtaatgtctaaatatataaagattgattatctaaactgcaaaaattaatgtaagtgaagcaatgcctttctgaatttcatattgggcatgtgtcatatcagatgcctacttgggaggaaaccctgaagcaattaagagtgaagtgcttagaaaaatatgccaatgacttgcccgaactatatcaagacattatcaatcactctgatctttcaacattgacatgggcaccgttaatgttcaggaaaccatggaaggtagcatttggaaacttgtgcaagcaaaacatcacagtggccggcgatgccatgcatcctatgacaccggacttgggacaaggcggttgttcagcacttgaagatgctgtggtgttgggtaggcacattggggcctgcatcgcacaaaaaggaggacttgtccctagagagatgattaaagcagtatctaattatgcagaggaaagaaggtggcgagtcacttggttggtcactggctccttcttgtcagggtgggttcagcatggtggccctatgtgggggctgaagttcttcagagacgccatcttttacaaatttgttttcccaaggattgctagagttatgcattacaattgtgggaaacttgcgtagagtctccattcctatgaagcacaagttttctaaatgaagatagaaattcacatctttaacatcatttgtctcactagaggattttagtctttgtcccgggtttgtttccagcttttttatatattaatttatttttgttatagtaataatgatgataataataataagggatatgattattacttcccaaagagaatgttactttgatgcacaagcaagttgatggcataacaagtgatgacccagttggagtttggattgttgttatcgaggttctttgtgtacagtttcatttctcttaattgtaatatttcaatccagatatatctatatcatttcatgatatgaggagaaaattgaatcttaatggctggaaaaaatgttagcatatgagcattaaattcctcataatccaataataatcacaacaatgctcatacatatcatccaagaccaaatattttatttagggcatcaaattaacaataagaatctccaatgtgatcaatacaaaacacaaggtaagtgagaaatcttagagagaaacaaataaggagcaatcctcttttactatccacattaccattaattaaaccctcttacactttatatctatcatactcttctaaccttaaccttaaggttatgggttaattgggccaattggtttaattaaggaaaatttacactcgatactattatttttttttacaatttaactgttgcacattgtttcttatttttttactactccagtttatactcgatatattgtgttttgtggaaaaaaaaaattgttccactttaatcacacgtggcgtccataatttaatctaatcttttaattatattttaagttttaaaaagtcttgatttgattgatgttgttacttttg

SEQ ID NO: 202186 - DNA, 722 bp, Cannabis indica
agtaatagccttcaatatattactataatataattgatattgaatatcaatgagaatgatgacatatatcatcatttcattaggttcaacttgatatatataatgacatgaatattcatgaatgtgcatatatatatgggtgaaagggcattggactcttttcaatgtaataaagtttgattcactatatgaggttgatgtgaacttctttatcctaataataattatatacatctttcttcgtataatcagtcaattagttttttatttttaaaatttaatttactgtataaatacttaaatttaaattttatttataaataaatatttaagtttaatttttaatagttaatattactaaagttataattctgtggaacgtacctgacctgacctacaagtgtcaagtaaattattacgttgtagtttttagttggttcaaattattaaatttttatttttatttaaaaattaatttaaatataaaataaaaaataacacataaataataacttaacacttaacggttaaatacctacaaaaattctacaaatataactttaattttattaacattaataattaaatttaatttcttacgtgtaaattattatttttttaaataatattttggtacacttcaagtggactttataagagatattagctccacgtgtagttgcaaaagaatattatttggtaggttattttatatttataga

SEQ ID NO: 202187 - DNA, 465 bp, Cannabis indica
ggaaaattatcacagctactttgtaatactaaggtataaatattttttgcaagtagcatacatcaaaatgttttctgtttctaatgttaattactgcaaaacaagaagaaattcaaaatggccaacatgtgaacagatggatttaagtgtcagtttaatggacataagtcttaatataacttttccttttttttcctttggtcttctaaaggctgcttttatattagctattaagataggcactaagaaatatgtatttttcatattcttaaattttgttcggttgtgaaattggaaaaaaacataggcctctcatctgacaccgaagcaaaataaccatcctattaagtaatgcagccactggagtcaataccagagtaaagttaactacacgtactaaaagttgagagagctgtgaaggttatgcagatctataaatatatatatatatatatatatatatat

SEQ ID NO: 202188 - DNA, 760 bp, Cannabis indica
ttacagttgcgttaactgaagagttagttatattgggttaaataacaatttttgtgaggctagatggcagagcttattcaaaccacacatacctcgggtaggattcttgtctttgggaaggatctcaatgtagcaagtgtctcgaaatgaggtgattaaacatatttttgtttcaaactgcagaaaatgatatagaagcttagaaagaaattaatttcctaagtagtgaaaaaacaataaagcaaacaaacaagaaaatacatagaataacatttagaagttacttaaataataacaagatatgagcacatatcaaattatagaaacagaccacaggtaaaagaatacaacatattagaattgttgatttcctcgacaaatatctagttgctaggattcttcgtcagagttcaaaagaaccaaagaagtaaactaactttccttttgttttttaaactatacaatacgaaactaaacattttcccgagtgatgttagagagaagataggtgtgggtgtgaacttactcggtcagctgcggcctgtaatgtaaggtgatctccccactcgccagctctagtagtgaaccataattaggactatcgaatttagaaacatgaagaaaattttcttgaattacttgaaaataaataaatcaacagaacaagacagatgttttactttttcattttcctcaggtagcttctgtacttcattggaacataaccttcatataattttcgatggtgcttaagctgaaa

SEQ ID NO: 202189 - DNA, 543 bp, Cannabis indica
ctacacttttgcagattaaattagattgaatttaaactattgtacgaattgaattggatccaaaatataaactccgcacttagtacggatcagatacactatgatcaaaatagtacggatgaaataagataaacacccctaataatttgtcacaaaatcgtcatatttctctgtactttaaaaaaaaaattacatttttaattttaatactattactttatttataatatacacatcaaaatattatattttaaattatatcactcaataaatatcaaacatatatacatataagcacaacttaattccttaatttgtgggcataaaaacatatattggaggagattagtgctacatcaacaaattgttttgatacaaatgagataatttaacacatgcaagcatgcatgcatatttacaccgattaacaacagaggtgttgccgccacaatctcaagcatgggtgaagaatttcccaggtcaatcattttgcaattgcaactgcataatttgagatgtgttagagcaagtccaaggagacac

SEQ ID NO: 202190 - DNA, 1340 bp, Cannabis indica
caaaaatgagtgggggtataatgggaagaaaatgtcagcattgcggggctgaaaaaaccccgcaatggcgcgcaggtccttgtggacctaaaacgctttgtaatgcttgtggtgttaggtacaaatcggggagattggtaccggagtataggccggcgagtagccctagtttttcgagcgatttgcattcgaattcgcaccggaaaattattgagatgagaaaagggaaaaatgtggtgggaatgatggtagagaatcataacccaattgagtcttgatgatttgtattagtgtgtaatattagttagtaattagtacttttaagggttttttttaatttgttttactattaatatatataagtttctagttaggttagattgtatttttttttgtattggattagattatttttagttaagttatttgtttgtttgttttttattagtatgattatttagcttgtagattagcttccacaaggtttgaagtttgagattttggtacttgcatataattactatagttgaaaacaatagaggttaaaaatgaaattatattgtggtgagtgagtttgatgattttgctagatttttttttttttttttagggtattttaattaactgaatttttagattatattgggttttgggaagaatgtcgtttttgtttggtttgatattttggtatttatatcaagtttgaattttgaatgatataacacattattatttttgtattttaaatgaattgtaatgttttgttttttatatagttattttttctgtggtgaaactgaatacaatgttagtcatttgattagtttttttttttttttttttaataatggaatttgatggttgatttacttgttatataaagaagatttttctgaaagattttatgatgaatttggatgttttttggtattttaagaaacatttgtaactttttttttggcaaacatttgtaactctgagtaagaaattttggtaactaaacttggataaaaagctgaaacccttttaactaattctttggaagtgaacattcacatcatgagtttattttttaaaatacattattaaaattttacttaatttattttacataaatttttgcattacattattcaataatttctctatttttttttaaattctatcttttaatatattttattcattttagcatacgatacacacatactcatacataaaaaaaaaattaaaattataaaaactaataaaataagtttagaacatctattataggagcgtatttaattaaaagaatattgctattaaagcactttctctattttattctttaaaataca

SEQ ID NO: 202191 - DNA, 1178 bp, Cannabis indica
tcaattttttttttttttgatgattgctttatttgtttttattgtagagaaacaacttacctgcagttcgccagtacttggagacatttgccattaacatatatttgaagttcccattgttggtaaacctttttctctagtccatggtgcagatagagcccattcttattgttgctgtagaagatggatcaatctgaattcatttttaaatgttctgatattttcttaatcaggttgaagagcaaatagtccctgtattacggaattacgacatgagaccacaggtaaactagtttgcttatttatttgttttttcaaatatttttccccttatgttgtagttagctcttggagaaagcaaaagagaatgctaattgctgtattcagcagttggactgtgataacaaccttctctttaatctgcctagaggcaagatcagataatctgatattcatatacaacgggtaggggccaatctaagacaatggcctgtctctttttcaaaaagatattcatatacaataaaaggggggttttattctgtaaatgatacgatcggttaatggaaattcagtaagggttcatctttgtgagggctctcaataaattcgagtgggggccagtctaagacaagtggtcccttcctctttttcgaaaaaaaaaaacgttgtagagtcattccttgtttaatttgttaaaagaaaattgtgttaatgttccccattcatatgtattctattaatattttgacatcaaatgcaggcactgtcttcttatatatttatagcagcaaatgtcatcatccacgcatctgaagctgttcagtccaagcatttggacatattacttcctcccatagttccattgttaacctcacatcaccatagcttacgtggtttcacccaggtgcttacttttactactttatactctattttctttacaaattaaactataagaggttgcatttgctttatatttatttgtatttagaattttgttgactgatggttttgcagttactagtataccaagttcttttcaaattctttcccccagctgatttaaaagctactgtaaccatgcctctagaaaagaggtgctttgaggatttgaaaacttaccttgcaaaaaactctgactgtacacggtaagaaatgtttttttttaaaaaaaa

SEQ ID NO: 202192 - DNA, 617 bp, Cannabis indica
aataggttcatgggcaacataaaatcccgatctaatgaggttcggaaactctcctaaggtgacgatgataaaagaaataagaaccaggcttccaggaacagatcttagtagccagcacctccggctttaaattcggaggttgcttctaaggctctgggcatggaagctacatccacttccatcatcaacctaactaagcctatctaggtcataaaacctctgaggcatgttcctatggagaactccaaaggagatagctcagattatgatgcgccagtcccgattaacaagaagcgggctagttcattcgatggtggtgccagcaagaaggcggtgaggatggatgccaaggagaaggtcttgttgttggcagcctcgaagattcagtcctagaaggggtctgacgcatctgatggtgaaaggccgcctaggcaaggcacgagaacgataaaaggcaattaggatcctctcccaccacccccgctgcctaagattatccttgccacttccacttagttgtctagagaaaggactgaactacctccattacctttggcatctttcacatttcttgctaagcctttatcatggatagaaggagataatgcacgcctaga

SEQ ID NO: 202193 - DNA, 621 bp, Cannabis indica
taactaaataataaatttcgaacttatttatttttataaataaaatttccacctaaaaacctttatatgtgcatgtagtttcaggtataaagagaatgttttatatcacaaaaatgggcatgtgaaataatgtccaagtctaataaaagacctttggggaaagccttggctttatgttttgcaatattgtttgtatttgatggggcatatcttgttaatttgacatcttactaaatcttgatccctaataatcaacacctaaaatttgatgttccaacttattaattacgatccttatatattgcatcatcttacacttccaacagtatggaccttgccctttcacccacttataattaaacttattccctatattttatgacttattatgagagacctagtcttctagaatataatatttctaatagtgacagttagatatgctacaaattaattattaaattatatcttaaagggtttgccgactcttaatttcaattttgctcatgaaaccaataataattgaaaaataaaataaaagatttgtcaacatacaatgtcttggttataattgattataatatattcttagttatataaccaaattggtgtgttcttgtc

SEQ ID NO: 202194 - DNA, 2130 bp, Cannabis indica
tgctcgagttgtttgacaattatcaatatgatataaataaatatataataaaaatttaagattaaaaatagactattatactataggtgacggtttaaaactgtgccctatattgcacactatacacgatgattttacactgtcaggaatgctttttgggcgacggtttccaacagtcgcctattctacccattttgcgacggtcgaataggcgacagttatagaaattgacgggagtattttactcgactatttataattgttgagaaaacccagtatgagcaaggcgtatgatagggtgcagtggggttttcgtcatgcaatgttaaagaattttagtgaacaccgaattcagctggttatgtgttgtgttaggtcagtctcttacaatattcttttgggtgggaaggaaatgggccttattatgccaaggcggggtttacggcaaggtgatcctttatcaccatatctttttctcttgtgtgcggagggcctgtcagcattaatttcagattatgagagacgtggaaaaattaagggctgcaaggtggctcgtggggctcttgttatctcccacatattttttgtcgatgatagttacttgtattgcagagctacagaggaggaaggccaaaatgtgatggagcttctccaatgttttcaaatagcttcagggcaacaggtaaacttgaataagtcatctgttttctttagtgcaaatactggtgttgatgttcgtaccaggatttggtctattttgagggtgcaagaggcaggtgagtccaatacttatttgggtcttcccaacattttgggaagaaagtactgttgggttttttaaaagaaaaaatgaggaagaaaattcaaagttgagaggggaaattcttgtctaaggtagggaaagagttgcttttgaaaactgtggctccatcgttgtctagctatgctatgaatgttttcctgttacctttaaaaacttgtaatgaaatggaatagttgatgtgtaaattttggtggaagtcctcttttaagaataataaggggattcattggaagagttggtataagttaaatgttcataaatctaaaagagggatcgggtttagaaatcttcataattttaatctctctttactgtgtaagcaaggctggaggttggtttgttagccacacacgctagttggtcgattgtttaaagctagatttttgtgggtggagatttcttgaatgcagaattgggtagtaactccagttttgtttggcaaagcatatttgaaactaggaagcttgtgcaggtgggggcacataggcgtgttggtaatggttctcaaattagtatttcgttgaatccttggttaccatgtgatgagaatcctcgaattagtactaatcaccctgcttttttacgtcaaaatgttgctgctcttatggttactgataatttggcctgggatgtggacttggtgcgtgatttgtttaatgacagggatgctcaactcattttgagtattcccttaagttcaagtcgtacaaaaaacgtatggttttggtcttttgggagctccaggaattttttagttaagagtatatatagacatctgcaacaggggaaggaaggtgatttgagctgttggggtctgatttttggagtactttgtggcgtctaaaagtgcctccgaaggtaaaggatttgttgtggagaactgcctcgaattgtctccccactaaggttcagcttcggttcaaacatgtcaatattgattctaattatcctttgtgcacttcgaattgtgagacaatcttgcatcgattggtggagtgtccttttgctcgatcatgttgggaaaggactgggatcggtgtcagtatggatgttgcagggacttttaagggttggttggagtcttgttttagattatttgatggggaacaaaggaaaatcatagccatgacttgttgcgctacacgaaaagtgagaaatgactatgtttggaaggagagaaatgttaatgtggcctctgtgactctcttggctaaaggcatgttagagcaatggagtaaggctcaagataaatttcatgtgtcgactgctacatttttgatagcagaaatgtggaggaaaccaggagc

SEQ ID NO: 202195 - DNA, 1127 bp, Cannabis indica
aaagaaaaagcaaattaagactgaataaacgactgacctctccagcaccaaggaacaaatatctgtggtcagataaagctcccttaactactttctgagatgcaattagccctgcaagaaccactgatgctgttccctggaatatagtaattaatataatatatcagagattcttaaaacaaatccaaatacatcagcataaaaattatttcagcacatacctgaatatcatcattaaacacaaggtgagttgttccatattttgagagaagatcaaaagcattgtgattcgcaaaatcttcaaactacaaaaagcaaaatcttcaaactacaaaaaaaaaaaggcaaactatttgaaagagaacagaaaaaacaagagaatcatatagttatattattatatacacctgtaatccaggtaactatttggtttatgtgtgtatgattatacctggatgagaattttctccccatagagctgcttgacagcagtcatgaactcatgcataagctcagcatattcctacaagttgaacaagagaaagcaaaataaactcagtaagaccagaaaaggaagagtctcaaaagcataattaaacacccgttgagccgagcatcaaagttaacctgtccagttgctctcttttgcctgaggcctatgtagaactcatcattcaacagctcctcattgtttgtaccaacatcaatggttatcggcaagcactgaaacagagaatatatatcaacttttcaacaggtagtgctatgtcaaaaaagtaatccagggcaatgtcaaatattgttacaaacaaaacatcattttgttctaggggtgcaagaagtgtttgataataagctttgagaagtgcataatgactcgttgaaactcacagctgaaggtcgtactcctccaagtgctgtatacaaggcgagtttcccaacaggtatccccattccctgtgtacacattacacattgtcatacattaatacagctatgcaggagagaaagagaaaataatgtaaagaagcgcaaaggagaggataattaatccaaagggtaaggatatttaagaagaattggaaacaaagcattgcagttaatttttcatagaatctacctgacag

SEQ ID NO: 202196 - DNA, 1206 bp, Cannabis indica
agatactaaaatattatagcttagtaagctcattcgataaaacagtaaaatctatctaaagagagttaagaaagcttggaagctcgatttcccattccgaagctatcactgaaattgaaactcaaagatcaaagactaaaaatctaacatattgtttatataagcttcatattttatatctaacatacataactttgtaatgatctcattaaatataaaaataaaatatagaaatttggagaatgaatttgaatcctacaagaaaaacatgccgactcaagtaaaacacgacatgacacaacttgtttgttttatagtacggcacgacatgatttatattttttatggcacggcgcggcacaatatttgtattttatcattaggacacaacactgccccatgtttatggcattacatatttttacagctatactctgctaattccacgtgtgaagcatgagatgtttttaccgtttatcttgacacttgtcagcatcaaagcgaacgagggaaagaacgagcgaataatatgtagtaaatgagattgggctagacttaaaagcccatttcgaatataatgttcgtgggccaagctgggccagccccatttgaaacccaatatactattttaaataatttattttttcagcactttcatatatacattcgttttttacgatcgtaatcataatatattcgtataaatatgtttctggataataacataccattaaatatataacatgtgatacaaatcagtaatctatcatttaatgtgacaattgatctaattaataatgtagaatttacactagggatagttgcaaaaaaatacgaaaaacaacaacaaaaaaaaattataaaaatacggtatgtatagaattttaacatttttacaattttttaagattttatttacataaaatattgtcttttggtgtatttttatgttgtattattgttattttgttatttgattttttatcatttgtatattattttttatgttgtttttatatattttttttgttgtgttttataaataccgtaaaatatgtaaaaaaaacattaacataaaatgtaaaatcttttacaagttgtatgtaattattcctttatactatatatagctatagctttttttcttttgtcacttttttttacttttattatatatactacataaaattacaatttttcttattg

SEQ ID NO: 202197 - DNA, 831 bp, Cannabis indica
tgtgtattataacctcacaaaaataattcaaatacaaaaaaagaaaaacaaaataaaataaaaataaaacaaaactataaagtaaatatgtaaaggattgaactaatatcacttaacaagaattgggagaatttaccaaatgtgctaaatgtgactatataacagaattcttagtttatgagaaatcattgggtgactttttcttaaagttttttattctaaaataatatatatgatgttatatatccacattcaaaaatcgactatggaagcttaaaatcccaaaaatacaattgactcttctccctctttcaaatcagacgacatcaaatctggcgcattcgaattcaagaggtatttgcctttggttttatcaaaatgtggtgtatacaaatgtactgttatgtattttttaaccgatttgaagttacattcgattgggtttattgtgatttcaagcttcccattctgatctgtgaaatgctcctttgatctctgctacttcgttgcgtcactcttattcgccaataatggtgatctatggcgcagtaactcctgcccaggtttcttcttcttttttcattaagaggtcattcgatcatcttatacatataattttgtgaatttacgatgcttgtctaaattctttctctctcaattttgtttgagaaatttggtttattcttgattttatttgaagacggatttgattaagtggctctctcggccatcatcgatatcgaaaaagctcttattctactcttatgtcattgtctattgcagcgagggttttgtgaatgaaaaatattaatgcggaaatgaaatggaagt

SEQ ID NO: 202198 - DNA, 1186 bp, Cannabis indica
ctaaaaatgtaaaaaatagattaaagtgcaatattaaaatatttgaaaatttgaatcctcaaaaacccaatttaaataataataaaaaaaaattaaacatacataaacaaaatataataaatttcattacatctattcttaatatataaaataagtggtggacctttttaagggagttaggttccttataagcctactttttttagcttgattggagaatgtcctcctagtactactcttcaagaatgcataattaaaaagcttatgattaatcatatatatatattatataggcatattctctctttactctaatggagcattttaatggtctttaactagataatgaagcatctccattgcattccagctagtgggaagttaaagaccttttgaattggaagagaatcatcatctttttcttaagcacacctattagctagggattaattctacttaataaaggttcattaattaatcaatacacatataatataagaataatattaaagattgttacaatgaatatattgtaattatatccctaatctcttctttaataattaataaagatttacaaaagaaagtcttcatagtgaagatctatacatgtgcacttttttatcatcatgcatggctaagaatatgattacttatatgctaatttgaaaactttctaacatcataatggggtcaatatagttttatcagctcgagaaatattcaaaaatatacatgtttgcaaatttaatgcccttctaatgattatgatctaatggattaaaaaataattaaatttaaagtattgttatattaaacattatttgtacttagtactttttataggtggtgcattataattagttaataaaaattattaccttaaattatatgagatttgatacttattatactatgataccgaaaaaatactaagtgtgcaccaataatactttttaatatttctcttaaatttatattaaaacaaatcaactatagagtagagatgattgctagctaagcaaaataaataaataactttattctttgctgtactaaacctttctgtaattaagagaccagatttgattttgggcaaaagtcacaaaagtataaacaaaattcaccaaatgtaatccactttgttttatggtccaacaatattagaacctcttaattcaagaac

SEQ ID NO: 202199 - DNA, 889 bp, Cannabis indica
atcatcaatccaataagtgatcagaaattatttttaaaattaataataataataaaaagagaatgagagaaaaagattggagagagaaatacatgaatataatatattaaaacatactcgataaaggaaaaaaatttcttcatatttactttatataattatataaaccataaagtatgaaatgaaaaattcctagtcaaatattaactagagtatgaatcaccactgtgaagaaaaagacttagaggatagcttttaaactgagaagaagtcctttcttttttcttttcttttaaatgtaaatggtataataagtaaaacctttcaaaaaaaacaaaatatatacagtaaaatccatcaaaatgaaactatgctgatagattttataataattgcttctcgtaaaatttttttgaatgtatattttttttattaacctggaaatttcattaaaaggagaaaataaagagcacaaaccagctcataatatcaagttggatggaaacaaaaaggtcccacaaaaaaagcgtggacggcagggttaatcttaaatttccgtccaaataaaaacaaaaatcaaaatcaaattaaaagcgtgatggcctaaactaaatagccattagccacaacttacacaatctaacaatctaaatatatgtatgaagataagataagaacgagtgtaagctatcgatcgacaagacagggcgttaatatgtggaggtatattataaatgatctttcctcacataattgcattacaattgaaaaacaccaattctattaacttgcattataacattttttacacgtggcccacacacattatttttcattcttttttcgtttcctgcttaaataaatatgacaactaccattaaagtttttt

SEQ ID NO: 202200 - DNA, 1283 bp, Cannabis indica
ttgttgccatctccaaacaaaagaacagagtcggtagagggaagatagcgaccgggttgccccaaaccgccaaggaagtaaccagcacaacaattagctgaaatatatgtaaaaggaatgtttgcttcttcaatggcttttctcacttccattttgtcatcatacactactctttctgcacccattgtaatattcttcattcttgctacatcaaatccaaactcggatggcaaaaatctctgcacttaattatatttttatttattattattacatcattgatttatcattatttaatggaaaaaaaaataataaatttgataaatatttcaaagaggaaaaattatgaatgaattattaataaatatatagtttaaaaaaagttcaattgaaaaaaaaaattggtgtttgataagaaagcaaaaaaacaattttattaatgctcaaactaaaataaatattataaatatgtttacatttataattataatttaagataaataaatattatggtaaaaagcggcataagtatctaaagttttaagcttgtaagtgacataaacctaatgtttatttttagcggtataagtacgcaatgtttattataaaactgtaatttttgtctaatttttttagtatagactatgttattgttttaaacaggggacatatatacaaggcctaatttctaggtcatttgatctgagaaatcctcacaacactgctggaattgttttctcccacaacacaagtacaactgtttttttttttttttcacagtacaactgtatatatgaccactcttggcgggatagtatgaagtcactagctatacctacgtaccttaacatttccagcttgtttgatagcatctacaagcttgagttgaagaagaatatggtggcttcgaacatgaacacctgaaatggcacagatgacaacatcaacaagtttaacagcgttaacaaggctttgatggtcattgaaagaagcggagactagcattgctcctttctccttgaacgacaaaagcatttgaactctctcgatatcaacattcgtctccggcctatgaaccacatacgtctcatgaccctcttctaaacttgccttcactagccttttccccaagtaaccagttccccctactatcaacactttgcttttccccatctctttctctacaattttatatgttggttttcatgatgaaatgttataatatattgaattgcttttataatgtcttaaaataatgagatgtctttctctctctctctctc

SEQ ID NO: 202201 - DNA, 956 bp, Cannabis indica
acataaagtccattgaggacattcttgccactaaatgtgattcaagatatggatctgctacaagtgccaattgatctgaccaatatcttttctatctaaggtatttaaccattaagattgatcctttccgtgtggtttgtagcatagtccctaggtcatacatcttagcactaaaagtgagctccatacaaattttttaatgaaatatccacaaggatctagttgaagtacaccccattactttagtagctatggcttttgtcatcaatttatatagtcaatctgtgtgcaattcgtcacaatctatccattgctcaaatttagaattcactcgaatcccaaatgctactagcaaacccctaatctgtagttacacatgtaggaacaaactctataggagcttgtctcaatccattgataaaaccatttacacgtggcctcttttaatcgtggaaattattattttttacaaattataattgttacgatctagttttaaagtgaaaggttgaaagagtgtgttaccaaatggtgggcttttgaaaccaccagatccactctgaaatcctagctgtggtactccattaattaaagcctggtggggagatggtttatatgtggtcttattttttgtgtgccctgatctttgatagttgcagggatttattggtccctttatacctttttaggcaagtagtattttcgagtaatagttggtctcaatagatacattgttgcataaaaaacatgtagctctgatagtgaaaaaaaaaagacattttacaataatagaaaaactgagctcaaacgagactaagatggctaattgtattatctatattgaaagtgtgatcactctagctttagctaggaccacaaaagacagaaaggaaaaaagcatataataaaattgtaaggaaacctatctattattttacgatctaaatctatttata

SEQ ID NO: 202202 - DNA, 1194 bp, Cannabis indica
tctttgatttttggaatttcaattgcaaagttcttctttgcccaaaatttctcatcaaacaataagtgacactcttttctgcttatttttcctccatactttcaattttaattttttggtaagttgtttttttttgtttgcattgttttgctatttgggtattttggttttgagtgtttgaacaactctagggctagaaaatttaaggttgtaggattcctaggttcttcgattttatttgtgttatatttttctaagaattgggacattataagttataatcatatcctaatttattatggaattcacattccgagaacccttagaatccgtctgtcctcaaatttctgccatagaatttaaacctaaaacttgtagaccccaaaccattcttgacataaattatgagaaaattagggatcatcttgttaaatctagtcaagatgaaacctctggacgttataggcgattcttacaagaggttattgaaggtaaacaccattatctatgagaagcagcttggcctgaaccctccaacttagttgatatttccttagcgaggcccatatttttacctccggtcactgttgctttttcaccaggtgacttaaatttggaaattatggctcaaaaagcacacaaatcaaagacccctcaagatcctatagtcactttcgaggctgaactaattgaatccaaaatcaagtccaatagaccttatgttggggatgtcttaaggtcatgcattatcaggaatgaatagggatgtcgcattaggtctgttgttggtggggagttcagctgttaaccccttgaacatctagctctagattaaggttgtagcaccagcgagccttctaggataggcgcttggagcctagagcatatataagctggggcaattctccctcttaggaaatattttaaagacttctacaattacctcagctttgccccatttaaattggcaccaaactcatacaggatattcgcctatttaaagtcttcatatcatattttgaattggaagtgtccgacccactagaaattctttatttctactctgttctagcctgcctagcgaggaagcatagtgtagaaggtttttactatctcgggccccacaccaatgatcatagaatcgtcatgaggctacccaacaaaaaagagtttaaggatgacttcttttcgacc

SEQ ID NO: 202203 - DNA, 1388 bp, Cannabis indica
aggtcttggctttactctatgcatgcgcatgcgccacccacgtgttattatttattttttcttaaatatattacataataaaaaataaatattctttttttttttttataaaaaaaaataaaaacattcattaaacaattaaacagttagactttgcggtcgttacaaaataaattttccggtaaaaaggagatcaaaatagagtcatacagttggttggtgggaaaaaactcacttagttacattatggctaacataattacaagtcctactaacattagaaaagttataacaaataaaagcgttaaataacttaatacaaaaaaaaaacatagtttttaagaggccaataaaacatctttccattaagcacattgagtatttagagtctttggtataataatttcacaaagcactaaattttagcacatttcatatctataattggttaagaagtgatatatatataggtgcatatttaagtagtgttatgatagtaaattttttatttaatttttttatttttatattatatgaattgaaattatttattggttgaaaaaataaaaatataagtttttaaggaaaaaaaaattgaagttgatttaaatattttatatataaacatatttttatatagtataaaaaaatattttttaattaaatataaaaaaaaaattttttttaatattaattattaaattaaaatctaataatttaatatttttaaaattaatatctctagttaaaaatttgagaaaccactaatttttagcacatttgatatttttaattggttaagaagtgtatttttttttttttttttttttaaaaatagatctatgaatatgaaaatgaaatgtttagttatataaaataaaaagtttttttatggaaaggaggaaaatttagctgatactctgtaccaaaacagacattaaaatatattaaattccttgtagcatttagtacattcacgtggaatattatatgggtttcaaaatatattcaattgtataaaataaaaatagaataagttgatttatttgtactttacttaataagattttgtgaaattatactttcttttttaatcgggacctcatttaattggagacaccattagagtattagaatttaaaaaagagccaaataattagatgtataatttttagattatttaataaaaaattaaaataaaatcagatgaaaaagattgaagtatcacaattaattttaaaaatacttatatttaagttcataaaacttattatttttatctactaacaagaatacgatggaagaataaaaaaaaatacaaacaacaaaacaaaacaaaaataaaaatcatggcataaaaataaagactaattgcagtattaaagatt

SEQ ID NO: 202204 - DNA, 1573 bp, Cannabis indica
aaatttaaaaatagttaaaaaataaaatacaaaaataattaattaactccacccatattataaaaaaatatgcatatatatatattgaattcatttcaatcaaatttttagcgttgtaattgtaaataaattaaaaaataaataaataaaaagaatgtctaatataatataatataatatactgaaaataataataaaaaaatattcctataaataagaacaaatttaatatctctacaaattttcctaaaattttcatatgcatattataagagaaatattaatattttttagtatcgtaccgctactagtgtaattaagtattgagtctcatataagttaagaaaataatttttaaaaaatattgctaaacaatcataaaacatcacttataaaaggtgattagcacgatcgagtgatacctaataataacaatgttctatttataaatataaaagtatgaaagtagaatatataatttgttacatggtacctgcatttgatcaccaatgtcaacaataatggaatagggcatggctttccaattgacccattttccattatgtaagatttgaagtccaccgacgtcgttttggataagaatattcataagagctggatcagtgtgaggtgggagtccaatcacttggtcaggatttggacaacttggataatcattcattagcaagtattgtaaccccatatccaaatttgtagccttctctatacaattctcttccaaccctaatgtctctgatattcctctcattaacacaccacatatttctcttgttcttttcccatactcttctgcagcctctctttaaaatattatcaaaatatatagatacatttcaattaattagttttgagatatatatatgatcatatagattattcaattaataaaaatatataattagtactaaacaaattatcaaaaatttaagaatattaatgttatcggatatcatattgccatgatgaacattatgcgacagtaatacaaactcgataccatatgtttgattttactaatgctagaaatgatcaaattaatttgataaaatttgtttgcgaaattcgaaagtacccaagtaaatacagtttcaaatcacatacttaccaactatagtctgtatttcgataaaacataagatattaaaacgaaaaggattaaatatttcaaaaatactcaaaaaaaacaaaaggtttgcgtttttagagaattctatttctttttatttatatttttacagattttctttcttacaacatgttgtttttagattgtttgattagtttttatacgttattttcacgttgcatctatatagtataacattacaacaatataaaaataaaattatttttctccaataatacaaatccgtaaaaaaaaatgaaaaataaaattataaaaaaatgtaaaaaaaaaaaaaactaacgattttagatactttatgtaaattttttaatattaaactacactaatcaccaaatatacgttgcgttattaattatataacattttagtagcactcaatatttaataaattatatataaataaat

SEQ ID NO: 202205 - DNA, 697 bp, Cannabis indica
cattgttctgttcatactagtaaatcaacttatctgacctcaaaccaaaatcgtgaatatgccaattagttttttgtcggctaagagtgacaggaaacagaagaataattaaggatattgttctaaaattagtgggatggttttttttttaatatgtgctactgaaatatgataaaataaaaattatattttaaaatttgtatttttataatagcacagtaaaccgcactgcaccaggatatttagaaaaattacaaactgcattgtactgcatcacaaatagtttaaaattatatataaatatatatatttttgtatgagcagtttgatgtaaatcattgactctagatattgaattgtataatagatatatgtgccttaaaaaaaataagatatgttattttattggagctagtgacatttatagcaattatgcaaagtacacatgcatataacatggtagaaagaagatactaattagatcatgatattccacttctagttttttcttttgtttttttagctggatgatcaagataatccactaacttgctttaagggtgtccaattatttgaccaataatacttatgatttgaaattcttaatcgaggattggagtatatatacatgtttgggttttatttttttttttgaatgaatattcataagctttattaaactttaatctctgctacc

SEQ ID NO: 202206 - DNA, 863 bp, Cannabis indica
ttatatcgctattgatgcaattagattaaatttatttctttatttagtattttcacttaggctatgggatcaattagcttggttaaattatagtctgattgctctgcttttaaggaagttcttcctttttctcggtttaagctaattagaaacgactccctatacacccatatttattaatatgagtatcttcctttaattatccaaatttccaaatagtgttttgcgttagagcatcctaatgaagtgaaaaaaaaaaaattagagtattgttctattttagtacattaaaaaaaaaaaactacttaaatggtgttttaaaaagtattctaaatttgacacatgctaaaaattgtatcaaatttagtacaaaatataatattgtgttaaatttagcctacaataaatgttactttatttaatatagttttagtaattattacaattcattaaattttactaagttttatatttttattttttatattactattatttaaataataaaaaaataaaaaataattttttttatatatttttaataaccatcaatatgattaattatttttttcttatttcacatattgtgcattgaatcacaattataaatagtgagtcatatataatataatttttttttgtgctaaatttaacaaattttaaatcttctattgaggatggttgcccagaaaatttattctaaggttattttattagagagctatgtaagttggttttaagctaacccaaaaaaataaaatgatctcaaatggctgtgaatagtcaatcatttaggaccaatcaaccaaatccttcacaaaaggattacatataactaatcaaatccttattgggttcttgtg

SEQ ID NO: 202207 - DNA, 693 bp, Cannabis indica
ttaggtattagtaatgtcaagtattttttatagatggtgttttatgattgattaacaatattttttaaaagttattttcttaagttatatgggactcaatacttaattacaccaataataatataacatcatcaattaattacatattatcatcaaagtattgttgtatatatattaaaactgaatatattgtatttcaacttaaaacataagttttcatgttataataaatataattttaaattttaacacttgctcaaaagatacaaatgtataataaattaaatagaaagggcaaaaagaattaaatatcttttcaagtagatgaaagggcaaaaagttacaagaattcataaaatattatgaatgatatttttctaacggaaaaattatctttattgatcgataaattttgttactaaactaagtaataaattagttagaatagacttcaaactaaaacgacaaccagagtaaataatagaggttttagcaaaattatgaatcactctattagttgattgtttgataaaataaattaaaacattactcaactctcaaagtataaggcttgataatcttgaattaaacaaccaaataaaaaaaaaaaatcataacaaaggagctccataaagcttgtacaaccataagccaatttatctctacactcactgtaatgaccgcatagtttaa

SEQ ID NO: 202208 - DNA, 920 bp, Cannabis indica
ataaaataatttcaaaataaaataaatgtatttcttttttgaaatcaaaataaatgtgtttaataagcagtatattgtatacttcatcataatttgataatgttatatcatatttaatttcctatatgtaatttgtataattaaaattatattttttttcataagcaatatagtgttagaatttattttattagggttttaatttactaacatatatgttggattatcacataataatctaatattctataaaatatgaaattcataaaacgatcaaataacatataagagaatagaaatctgtatattggtaatgagcaagtttaaaaacccgtatagtacaattaggctaaaatttaaccatatcaaaattgaaattaattgacctaagatcaactaagtgacattgacttagaaaaaatataaatttatgatatatttttcactgtcaatatcgattcaatccaatatatagttgatatccgatacaagtttactttactaatgcctaagaaaaacattccacttacccaagtgtaagcaaaccacgtcgataattatcacgtcagtaatctagtgcactaataaatcatgataccaaatagtttaaaacatataattatgattgtttttcattgtgtaaataacactaaaatcatgaataattacatattcagaatttaataaattttatatattaaatatataatcataaaagtaataatgtgaaacaagcaacataaaataatttttaaatttgtaagtaatattaattgaaataaattttatttaaaagtaaataaatttgtatacaattataaaattttgtaatatatattgttataaatttctcattaaaaaatcccctaaatcttaagaggcttatgaactaaaagataagagtcatttagaaagaaaat

SEQ ID NO: 202209 - DNA, 2170 bp, Cannabis indica
tttctcttacaaagccacgagatgcgtattgagcaactcaactctattgctgcaccagatcgctccttcggctaattttgctgctcgaggcaaaaaaattccttctaactctggcaggtcctctggttgtcgtgtccatggtcatggcagaggtcgaggaaattaaggacgaattgtttgtcagctttgcaacaaacttggtcatcccgctctggcaagtgctactttcgttttgacaccaacttcataccttccaataattagaatcctcctcaaaacaacactgctcagcaatatggtaacaaccagcaggcttttgtagctgcctcaggctagcaccctcgacctgatgataccaattggtatgtggacagtggagcaacaattcatatcacagacaatgccaatataacattcaagctcctgttgaatacaagggtaagacttgacttatgtagttggtaatggacaatctcttgctatttctcatgttggtaactacatcattaaatcctttggtggatcaaaacatgtcaagttaaacaaaatattatgtgtacccaaaatagcaaaaaacctcgtaagtgtttcccaactaactagagataataatgcctatgccaaattttatgctaattcttgtgttttgaaggacatggattttaagagggtttttcttcaagggacacttaacaatggtctctatcaactcaaaacactagtagcaagctctacaagtcacaatttcacttctgcttcaaaatcctttaccaatagccctagttttaagtctattaagtcttgctttttaatttctctcaatgaattaagtttgtggcatcataggttaggccatccttcctctaatgtactcaagcagttcttttcaagttgtcctcttggaaaagctcatcataaggcttatcctgttgctataaaagaatcaaaacaacctcttgagctgatccactcagacgtatggggtctgacaccaactatgtctaggtatagctatcgctactacatcaacttttagatgatttcagtcactacacctggaattttcctctcaaaacaaaagatgaggccttaccggtcttcacaaccttccaaatccaagtagaaaaacaattgaataccaccataaaaactatccaaacagattcggggaggtgagtaccacaagtttgagccatatctcaaatcaataggtgaaaagtttaggcatccttgtcctcacactcaccaacaaaatggcaaagtcaagcgaaaacataggcacatagtcgaaactggccttactcttcttgctcactctagcatgcctcaaaggttttggtgggaagcctttcaaatcgcaacatttcttattaattatcttgccacacatgtgctaaactataaatgtcctattcaaaagctctttggtctttctcccaactataagttcttgaaggtttttggttgtgcttgctatccatatcttaggccatataataccaataagctacaatttcgttctgccaagtgtgttttcatagggcatagcccaagtcacaaggattatttatgccttcatacctctggtcatgtttatgttgctagtagtgtgtcttttgatgaaactgatttcctttttgctagtggctttacttatcctactgctcatacagatccaccattgctacccagccattaccctcaatggctgccttatttgtctactgtgacttcagatcatgccagtgatgttatgattgatgatggagaattctcctatcactcaacaacacaactcaccaggtctagcaaatcaagccactcgtgcctctgtcaactcctactccactataccgttacatgtagattttccactttcacctttatctttgtccaaacagccacaccaaacctcaccctcccagctgcaacataatgcagcgcctaacactccacccaacccaaacacaccttctcatcccatgataactagagccaaagctggtatacataaaccttaggtctttcatgccttctctccctcaccattggccttaataactgagttagaaccagacagtgcaagtgcagccttgaaaattcctcgttggaagtcagcaatgggcactgagttttatgctttgcttaaaaacaaaacatggatccttgt

SEQ ID NO: 202210 - DNA, 1482 bp, Cannabis indica
taaaataatttccaacaataaaaacaacagaaaaataattaaactgcaatataaaaacaactataaaataacaaaaagacaattgtataaatctatagaaaaataacaagacatcaaccttgttaaaatatgtaaatcattcataaatttattttgaataaactacaaaaaataataaaaaaaaagattacctttattaatcatatttctttattaaagaaataaagatataggagtgttcatagtaaaaaaaaaaaatttagtaacacaactataatattatacatcaaataagccgaagttttttttttctaaaatacttttatatagtgtttgtttgcagttaaagtcttctagtttatatattataattatttttaatgtaaacagtgttggttgttggtgtatggtgtatggtgtacgggcaaattctatattgaataattatgtttaggtaaaacagagtacttctgttatctactaccaatgatgctatcatgctactataaaataatgccctactttacgtaaagctgaaaatttgtgcaaatattttatcatgttaaatgtttttattagttatgaatttgaatgtcaacaaaatacacgcgtatattaggtgaaatcaacttttaatttctggttttaaatcgataatcattcagcagtggctatataaaccacccaaaattcattgaaagaggtcacaaacaacgttactctaaatttccaaaccttaatttacttttcttccaaatacaacaaaattgtgatgggttctgaattggaaggcaccacagaagtagtagttgatcttaaaagaaaacaagaagaagaaagcttctgttatgctgctcagttgttgaacacaaatgtgttaaccaagtccttgcaaaccacaattgagctaggaattttcgatatcatagcgaaagccggggaaggagctaagctctctgcgcgggagatagtggcgcagttgccaaccaacaaccccgatgcgcccatgatggtggaccgcatccttaggatgctggccagctactctgtgctcgtatgctctgtagtggccgatgatcaaagggcttacagtcttaataatgtctccaaatgctttgtcactaatgaagatggtgtttctttaggccctttgatgttgttgttagaagataaggtcttctcggatagttggtatagtatagtttgcaatttttttttaatatgactaatttttcttatgttattttagttccataaactattctaaccctgaaacaataatttcaggtcacaacttaaaggtgcaatacttgaaggagggataccatttaacagattccatggaatgaatgcctttgagtatccagctttggactcaagatttaataaggtttttaataaagcaatgcaaaaccaaaccactatgattatgaagcagattcttgagttttacaaaggatttgaaaaccttaaacaactggt

SEQ ID NO: 202211 - DNA, 992 bp, Cannabis indica
tattaaattaaaatataaaatttcaaaatgcaccaattacaataagccatttcttgtagtggttgacacctaaatataccctatattatttctataaaattagtaaaagaagaaaaaaattaaccactactattgtaaaattcaacaatacatgatgtatctttatctattttggtatttagaaaaaaaaaaatagtctgaattttttgtatagtcgtatacattgtagttatttaagatatcttgtaaaattttgaaaaattcaaaaaaatttaacatgacaaaaaatatggttcaaaaagtgtcgcacgcgtgaattttttatttcatacgcatgtaaaatagacggttttaacattaaattctatatatttttaattattctaaattttttaaaattttacaaagtgtcttaaataattataacgtacacgattatgtaaaaaaattagactaaaaatttcttttagatgccgaaacagtttgcattaatacacttattagtatggtgtattctaaaagcattcagtactgttaattgattactttaaagcattaacagtgaaaaatgacccaagccctgcactacgtattcatgaagaataatatatcataaattgttatgtataatatacctaacctaagtactattaattgtatatgatacacatagtcaatatgcaacaaacacaaactcaacataaaaattctttgtatatctatatgataaattaaataaacctcatcaattgattcactcatttatgtatttgaattataaccacaaaaaggatacaaatatatagtagtgatgtgtctgcatcaagtactaccaatatatatttagtagcatgcatgaatattggtgatgatgatatataattgcaagctgttatcaactatgtataaaaatacacaaaacaaacaatttttgtatacatatgcttatacaaactgtatttgtgcatgtatatctatatatacatatatat

SEQ ID NO: 202212 - DNA, 1363 bp, Cannabis indica
gaagatggcaagactgatgccatactacccggccacgttggtaaactttagccaactattgggcaagggtggtggatagtctctacgtgagatcggcaagataatggcttgatttaggaacattgacactacttttttcctcttaagaaattaatgctttcatactaccttgtgtttctttttttttttccttataatcttattttatggttttgagttctagaatgccatgattattcgtacccttattcttgtaccttttaattatggcaagtacaaacctctttgtcgcatggagagatgaaactgaaaaaaggggtgtcacttttcacgattgattagtgatattttttaaaatttatttttttaagttagggactcgatacttaattacaccaatagtgatggtgctttttagtagttctctatctaaaatacaaaaattctgatagagaaaactaattttgcattttctgtaaaagtaaatagtgacataagtactttaaagttttaaatttgttaagtgtacataaatttaatatttatttttatcagcatagtataagcccaataataatattgtaaattgtatgatatctttaagtatagtgtctctacattgataaatttattatatgtaaaattaagattttttagttattattaattgcttaatctcaactttaatgatcttcttcctttacattaacttatcttattgtcactgctataaaatatgagtcttccatatctacttttaatatactttttaataataatgttaaaattaataatatatatttatattttttcaaaaaaagaaataatatatatttatatattataggtgagcaatagttatatgtttttttacgtgttatataggttaaaatttattttttaaaattaattaattataattaaatatataattagcaaaaattaattttactagcaaggtcacttatgtagctgccatggtaatacagtaggaactcacccctttaatgtttgaattgttggctatcaaagagggtcttatgggtggtctcaataggggtgttcacaactttgcagtagaatcatattgtttacgagcatgccgagtaacccatgtgcggtatttttttttttacattttcttggtaatttttaagttttaatttctcaaaatttgtccaataggataagctgcatttagtgcattttagatatgagtccatcccattcttggtgtaccaggaaggaagaatataaagaataatacacatgagaagacaaatatattgtgattgtggttgaacttttcttgttttccaagtaatcttagattattgatattatacaggtggaggaggcaagt

SEQ ID NO: 202213 - DNA, 818 bp, Cannabis indica
ggttttgtcatttaattattgttaattatctaaccattagtctgatctgagtttgtgttgtatgattacaacaataaccctaaatctaattataatcatataaagcaaaacaatatataaaacatgatcatgacaggaattaaataaggtagaatcacataaaatatattagatgcaactaaattttgcatcaaattataaaatcaaattaatcgtaattagagatccatctaaactccaacaactataagaaaactagccacacatatatgctttatcatctcaaaatattgtttacaatctaaataataaaaggagaaattaagaagaaagaagaagatattgcttctttgatctctcctttaaagttgtgtttttatgtctctgtagttctccaagagccgaagctctaatgttctttttatagactgaaaatgatgaaagaaatgacttttaaaaattaagttaaatttgaatttcgtatggatgaagtcatgacacctaagacatggcgcaaggacgccacacgagatttcccaaggtttcgacttcgcgcaaattaaaatatgatgtttccatatttggtgctctaacgcctcaatcacaacgctatagtgccaaaagtactttttcagcgttttgcgtgattctcgactcgtttgctccttgattttggcactttgctcaagtatgtacaatttacactaaatttactataattttatcactttaagttcaatactactcactacagaaaatacattaaatctacacaaaacttaaaaaatagacaataattcatctaattaattaaaaaa

SEQ ID NO: 202214 - DNA, 1587 bp, Cannabis indica
gtaaaaaaaaaaaaaagagtagttggttatattagttgggaaggaaatagtccatgttgaaggatggagactatttcacaatgttacctttcaaatttgatttgagtcgtaaccaagcctgcttgcaaatcaaagatttatttgttagaggaaggcgtgtttggaatgaacatttgatcagagagtgctttaatcctagaagtgctgatgagattcttcggattaagcctcttcctgaaggggctgatgttttgttttggaaagcctcgaagtcgggcattttctcggtgaaaatcgcctattggataagtcagagtcataggttcaatgaaacaagtgatttgtggggaaaattctggaaatcaaaaatacatcctcggctccagcttttatgctgaaagattttctcggattgtattcctacgaagggcagaatcggtctatgtaatggagatcatttgaagtgtaggttttgtttgtcctatgatgagacttccctgcatctttttttcaagtgtcatgtggttcgcggcatctggtttagaagcttctggggtttgaggagtgatggtctgaagtgggattctctcaaggactgtggtgagtggtggtgtggccttaaagatgataatttggctttattcgctgcttgcgtttgggatacgatctggagatggcgcaatgaaatggtgcacaatgacagaagtggcagtttagaggatatatatgcggattgtatgcgtagatatagtgagttccaatcgactcactattcaagtttaactgatattaatcctgggttgggcggggaaaaacctcaccaacacctgcttcttgatgtctgttgtattcgtgaggatgcttcagttttccaggagcaagcgggctttgctgtagtgattttttcggggagtaacttggagaatcaagtcgtcgcagctcctatggagaatatgctcactgctgtgaactttggaaaagtttatagtgtgttggaaggagagttgcagggtattctgttggccttacacatggctttggaggctggaattcagaaagtgcgtatagagtcggactccatggctgctgtcaatgctttccgggcgggttatttgcctttttgttgggacacttatcctctgttttgtgactgtcaacgtttgtgcaagaagtttgtcatggttaatgtgtcttatattcttagggagttgaatgttgttgctgataaattggccaagtgggctagaattaactctgtgaatcgttcgggtagtattaaggatgtggccccttttgtaatctgttgtttgttgtagttttgttttttatgtttcaataaaaatcctttacttatcaaaaaaaaagattgattgtgttccaaccaatcaaagcgcgccactataagtttataaccaaactgacgcaaacgcaaaggcgaaactacccctcattctttccaaatttgataacccctcaaactaattgacgaaaatacccttattaattaccggaaaataacaaccatatctatggatgttgacccgtgatccgatttgtgttgtcataatcaataaatatatctagttt

SEQ ID NO: 202215 - DNA, 801 bp, Cannabis indica
agaataggtcaaaatcacatagaagttcacaaaagaactcaaccggagatctgaacacttaagtcgtcattagtgtgtgaaagtatcctcatgtgagccaccaagaggtgaatcaaggcaactcactcttctcaaagcaatatttttatttttcacaattttgaaaatacatgatctattttgcaacaacactcaatgaattttcccaaccagttgtggcttttacacccccatagagatgtagccgtcgccttatttatttttcaaaataaataacatgagaaggagaaaactcctcgagccatacattggtccaaaagaagctcttcccattacttctatgggaggtagtcttttcaactgggatgactaaatgttcaaaccacaactaggaaaaccatgtgaagctcatatgtgattagacttgaaacaaaagccaacaacaaatgaaacactagctaaaagaaatcataaaaacaaaactgtgttgaataccagatgcaactgtgaacaggatagatggtgcacacaccagtacaatttttgagatgagaaaaagtgtgggcatctaatgtctttataaacaagttaacaagttgagcacctgtagacacatgagaattagtcaaatgatatcgtatatcaatgtgtttagtgcaagagtgttgtactagatttttgaaatcttgatggcactagagctatatgaaaaatgacacttggaaagaaacacaatttgttgaaatttcattaaactaaatcagctgagtacaatagttattaaaaactaagaaataagac

SEQ ID NO: 202216 - DNA, 883 bp, Cannabis indica
gtaggaaggaagaagaagaagaggtaaagatgatatatgaagaaaaaagaggaaaggtaaatttattaattaatttgggatgagtgagaaagagagagaagaataattaagattgaaaatgggaggtgtgaagaggaaggagaaatggaatcaaaaccccttttaaataattattaatgttttataataaacaaatgttaaaagcaaattttgaggtgtacaataatactatattataatatgagtaatgatatgttgattcaaattatactaaaattttccttttaaaaaaaatatactaaaaatttacacacagtaagtggtataatttatttaaccaatcaaatttatttaaattaaaataaatattaagttttatattattattggtataaaatactctttttaacataattaatgataggtaacttataatttaaagagattttttcatttttcaactgtaaaatatatatatttttgcatttttatgaaatttcacatataaattcgtactaacggaataatttaaattgcaatcaaaattcacatagcaatttatatggaaattacgaaaaaaacaactagagcaatttaaaccgtaaatttgaaaaataaaaataaaaaataacatataaaataattttcttaatttaaattatgtaccaaaaatttacaaatagtaaaaacattttcattatgggcaattaaaataattattcacttacatattcttagagaaattatcttatatatttatttttttaaatttttttttaaaatttacggtttgaatttctaaaatggttgcagtgctagttgtaatatggtttttatatattattctacaaatatacaacaaaaaaaatgtttaaaagtgtaa

SEQ ID NO: 202217 - DNA, 1029 bp, Cannabis indica
ggcattgatttgaggctgtaatttagtaatcattctgcatgtttaaatattttgtaaaatgctataaggtatcagtatttcgaacatcagacatcattatagagccaaccatgagtattaatgggcctaaaaaaaattttgtgtgtattatatctaaagtagagtgtaaatattattgagcctatttcataaaatttacaaaaaatactattttttttaaaacacgaaatatattatataaaaaatttaggtcttgggtttgggtgtgccctaggcacaactgccttgccagagccaagcctacatcattacgagatatgtataattaaatattgaatctcacatattttaagttaataactattataaaatattattaacacgggtagaataaataatcaaatttagaataaattattaatgattatatgtaattattcttttatacataaaattttgggagggttaccgtcagagattgggataaaataggttaagtttgtacttaggatctactcaactgaagagcctcccaaatttttttatttaaaatatacatatattttgttaataatttcatcgttaagagtttctagagttatttacaaattaaaagaaggaaaaagtgaaaatcttaacttatgaatgattttccaatatatatatatatatatttatgcatatataaaaaaaaatggaaacatcaaaaatttcaaattttgtaaaaaaagttgctgaaaaagatttaattggttttaattttttaaaccaaaaagaaaacgattaaatggaactcttaatataataatgctgatattattgttattgttgttattatgtcactgtcaaattcaatgttttctattaaaatcttgtgttcgtgtgtgtactaggatatctagtaagttctgacaattctgttaaatattcataaatataatgtcacactattatttaaggtaagtttatgttacatttttaaaaaatatattttggactagttttggcaattaaaagagtattttagtc

SEQ ID NO: 202218 - DNA, 716 bp, Cannabis indica
caataagcaaattcggtttcaaaactgaacagctttctcaagatatatagatgacaacgagtgaataaatacatgttaatgagaaaaatagtacaaacctctgcagcctttccttgaagaagttcactagggagaatgccaaaacgagcatgtaagctaaggtactgactaatctgcaaaaagttgcacggtagaaaaaatcaaacacagttgtattaaatatcagtaaagcatacaagtttatctctaataatagctgcatctttctaggagatcagcgattagcatatcatgtatcaaaatagtaagactgcagaaatattcaactccagtaagcaatgaatctacattatggcatatcatggaatttcaatcattgtaatccaagtatgttcaaggtaacaaaacacaaacattcaaaacttctaacaataatagcgaacacttacatcattgtaattttatataggtgtgtaaattttaccctgcttgataagtttgactgcatacaaataatataaacaataacacctaaatcaaaatggagatagtaacagtaactactttttttctatcacagatgagaatgaaatgactaaaacagaattcaatcaaacattcatctacaaccagaatacactaaattattcacttcctgtacttatatgaaatttttatcatatattattcacttcccagtttcgatatcatgatat

SEQ ID NO: 202219 - DNA, 998 bp, Cannabis indica
aaataccctctaatgttgctaatggtcgaagttatccataagacttgattcacattcacaacttgtacacatcaatctttttatacaacatcgaatagttcaaaatcgttctttgtgctcccctttcttcttcttgatagttacttcttaataattattcactaattcaaccttacgacatgtagaaatgtcaattggagcaaatacataaaattcatttcttcatcttgagctcgcaatgttaattccccattttgttacaatactcaatagaataatcattatattgtaatggataacaaaaactaaaagggaaacataatggacatattcactaccattatttattaccattactattacaattacgttgaaccaaatatcatgacctagggtgggtttggaaagtcactgtgtacttgaaggtaattaataatttggcatatttgtcagaccatcaaattacactgtaacggtataatttgaggtaatatgagggattctaatttcactctttaattttcatggcccacatgagaattgagtgtaattactaaactaataattacatatttatatttagtaattacacatttttatttttttgatataatcagatcaaacataacatttatcttattactaaaactctattacggggttatagcttaatatctactaataagtgtaatatatattaattatttttaccttctcaacaaacacacctagaatttgtgttggcgggttagaaaagccaagctaaacatactcaaatctcaaatccatttaaattttaaagcaaatccaaacatgttaactcgtgccaattttgagtcgtcttgtctaatcctaacacacccctaatatattgtaatttcctttaatttaccattttcttaaaataaaaactattaataataaattaatattccaattgagtccaataactcctcctttcacactcaaataatcaataaatagcaaaaaaaaaaaaa

SEQ ID NO: 202220 - DNA, 1781 bp, Cannabis indica
gattcaaatcttaacaagttatttagagggttggtaattacattggtacgtttgtcgagtctgatcctaagaatttttgaggtatttggcgtgaatacgtgcgagtacgggtagctttggatataacagttccattgaagcgcaaaatgagactaagacgcaccacatgggaagaagcattgggccatattcaaatatgagtttcttcctacattttgttttatatgcgggattctcagtcgcactaagaaattctatttaagaaacttcgatataccctcggatcaaatcgtctagccttatgggacatggatgagagcccaaccacaccataaaaataatctcatcgaagccccgtggttgagaaatggtgatgcatatgaatcgttgccatctggtcagctaaccggtagtgtgaacagaccaattgttatcgatcagggcactgtgattgaggagttaagtggaggaaatgtggtgcatcaaatttatagctggctaataatagtaagtcaaaaggagttatggggctgaggaaattatgggaaatataggtggcaagtattttaactcagaggaaaacatccacgtggacgctttggaggaagaattagaagagaatttgattgttaattctaaacggcgtcgtaatgattctggggcggctattgtgcctcctgttgcggctcagtctgatttaagcccatctatttctcatgggcttagttttgaaattatggaagaagatggtagtatttttgttgtgcatgaaaataactatgtggtgggctcaaaaaatgagtctttggtgggtgctggtatcgaggcccaccatttaccatgagtatactaagctggaattgccgtgggcttgggaacccatgggttttttaattccttgtggatcttgtgatccaaaagaaacccaattttttatttctttgtgaaactttaagtcatggtgatgtgttggaaaggttacgtgtgaagttgagatttaaaggcctctactctgtggatgtaaggggtcatagtaagggtatttccatgctttggaagagtagtgttgaaacccacttgctgaacttttcatttaatttcattgacattcaaattactaaacctagttcaatcccatggaactaacagacctttatgatgagcccaacaaaggtttacgccaccaaacatggaaccttattcgaactctaaaataaacatcaacactcccttggtgtatcataagagatttgaataacattactagttaggcgaataagcgaggtggcaacaactatcctcaagcattagtcgatggctttaaccaaacactcatcgactgtaatcttgttgatcttgaccttattggctatccgtttacatgggagaggccagggtacatcaaattggattgaagttcgtcttgaccgtgccttggtaagccattgttggtctaattatttcacatctgctcagttaactaatctcaaaatctttgcctcggaccactgcccgttattgcttcaacctacctgtcccgaatttctttgttatagttcgtcaattcaggttcgaaaatgcctggttgtgtgagcctttatgctttctttgttccgccccatagtaaaaaagtaaaaaagttgaaaattttagtataaaaaaccccttgtttattattataacaacaccataagtgggcaaatcttgtttaaataagtttcttaatagaatgggccttgctaatcaagactaaatgatatttaattagatttatttaaaaa

SEQ ID NO: 202221 - DNA, 623 bp, Cannabis indica
aaaattaaacttaaatattaattcgtaattgaaagctaaatttaaaaattactctttattattttataagaagaaataatgaaaaattaaccaattagagcttggcttctttcaaatataacaaatttacaaataaagctctttactttgtgaaaaagtgaagaattttaccattgcccaatataacaaattaacaattaaagtgataatgtttaatgttccaccacaatgaatcatgattcatgaacatgaacacataatgatcaatgatgatgatgatggtgatgatacaccaaaacaaacatgaaacttttttatataagaaaaaagatatatttctatataacaaagtttcaaactttactatttcctttccaatattatattattgaaatatttaatttgtcgttgaaataaatattaaaataagctatcaattgattaaataatttcacttcaatttttaacatttatatatcaaacatattaaagtataaaacaaatattaaagagtgtgtttaaaaagttacagtgtaattagatttatgtataaatagaagtaattatataatttagtatgtttgttgactatgtaattacactaaaactgtataattagagat

SEQ ID NO: 202222 - DNA, 2283 bp, Cannabis indica
gataaccatacatgcaagtaattaacttctaaaatttacccaaatattactttaatttcaaagtaattttcaggctgtaaaaagttaccttttttaagcatacaaaattatgaatcaatattattttaaagttattataatttaatttccatgccaaagtgatgcattatttttttttcccatttatcattattattttatataaaagttaaaacaagtagggacctcaaagctcaaaaagggtatttataagtgaagacttacttttgatgttgaattaatttgttgaatatgttttatctttattaagctaagtgtgtgtgtgtatatatataaattattttatttaatttatttgtgttattaattaattaattagttatagtctcaagggttaggtccaccactctttgaaattatatatcaaagccaaatgtgacacattctgatgaggtgtgttgtaatgtacacccaaccaatgcattttttatcctttgttgcaccgacacatacattttatatataaataatatatattaattatattttcatatataaatatatatatatatatattttaattatatatatagtgtagtggcaagcaaattgcataaccaaacaaaacaaaaagcttaggccgaacaatattttggcctaaggtatattatatatatatgcacatatatatattaatgtatttatatatttatatagatatctttattggatgctgtaaaatcgatcaatatctaatcagttagaattaattattgttataataaaaatgatatctctcgaaagaaaatgagacatataattacgtgatatatataacacacagttgtgaattgtgatgagtctattattaaatttggatttatttatgtattaattcagaaaagtgtactacgtacgtatttttcaaaatattatcacgtgcccattttattttgttttaccatgcagtaaatttcatgaaaagtactacgtaactttgattttttgtattattttgttggctgaagattaattatttatttctatatttttgtcctatcactattaattacaaattacaatattattcttaatttgaaaattaaacaatagttaaatatattataatatttagtataataaattgtgcttcaacattgaagtaaaatttaatttacaaaagccaatactatattttaataaatgacatgatattgtttttaaaaaaataatactacaaaattttacttttagtcacaacaaaatttttaacaaaaagtaaaaaaattgtaactaattataaataaaaaatttgtggctaaaggtattagttacaaatatcacaatttgttgtgactaaatgtgcttttagtcacaatactggttgtgactaaattaaataaattagtaacagcttatatctaaatactttagtcacaagtaattttttgttatgactaattaaagttattagaggtgctcataaaatagccgatcaatccaatctaattcgtaaagtgcagatatctacacttgtgcataatccaatccaatattaaaaagtaaccaatctaaaataatcaatccaatctgcacttttgcgactcggtttgaattggatttgagtcattgtacggattggattagatctaaaaaataaaatccgcacttagtgtagatctgatacactatgagcaaaatagtgcgaattagattggatgaacactcctactaaaaattttatatttaatcacaaaaaacttatgttgtaattaaaaaattgtcactaaaaataactatatttatagtgtaataataataaaaattaatggcatactacttttttgttttgaaatatttaatgttaaataaattaataatatataagaggatgagaaagaaaattctcatatcctcaccaatttggttagttagcaataaacatccaaagaaaaatgagaaaactcaatctgtaaacaaagttttttcaatgaatgagtcaccttattcccttcacagggaacaaattaaacaacaacataaactaatttggcaaagagacataaaaagtttgcatctacaaaattatctcacacaccaacgattaataacattaacaatactaagacaatagccacttctccctgtagcaccaatattattgaagagcaaccaaaatagctgtgagctccgcccgttagtggttactaacggaaagagatttgctgcgtgaagcagtaatcgtcttgttttgaacaatagccccaaaacctttaaccccga

SEQ ID NO: 202223 - DNA, 1184 bp, Cannabis indica
gcaccagcatatttgttgtcccaactaaagatatcaggtgaatcactagctcccagagacttgatgaagttaaagtaagtcacatcatttgttgctgtcaatagccacgtagctccccacagcagctcatcctataagtacataccctaaattaaaaaaaaaaaaaacccctcttatatttatataaaactaagtaattaaattaccttgtaaccggaatacgagcaataaaaaggacaaacagcagaaccaagagagtcactatacgagcctctgtattgaattgcaaattgcataactttcttggctgtgctaagtaaaagctttgagtaatgagggtcaactttgcgaaaaaccatggaagccgcggctaacgcggcggcagtctctccagccacgtcggagccaggattagagggagagactgaataaacggatcggacggtgtccatgtcttcgggcctctcccagcacttgtggtccgcatttgggtctccaaccccaacgtacaaccgaccgggcgtcgcacgtgcacactttaaaaggtagtccgtcgcccaacggattgcggcacgtgcatttggtaattgtgggcccattcgtttcccgtattccagtgtgttccatgacagcattgttgtcgtgaacgccatcgggaaattaaattttacgttgtctccggcgtcatagtatcctccagttaaatccacctattcttgaaaatattaactacgtcaataattttacagaaaaaaagaaagaaggaaattctttgtttatgttgagatacaatgcatatacatgatataatgactttgtcggatggtaaagaaaaaataatatatatattttttttaatttacggaccccttcttttgtacaagttttgaatttgactcatttaataatcttatataatgaaaaccgtttgtttgttaaaaactatttaatcgaacattaaaaacgagaataaataattgacagaatgattaaaagtacaatggttgctttaaaaaaatggtttaaaatagtattttttttttatttttttatttttacggaattttacttaaaattcttattacaattatcaaaacaatttaaattgcaactaaaaattatagcaactcgcataaaaacttaccggagaatttaccttaaaaaacgttaaattttaaaaaaaa

SEQ ID NO: 202224 - DNA, 1740 bp, Cannabis indica
atatttttttatagtgtgtgttaaatttatgtattgtaagtgcacgtattgtcactttctacaaattaaaaattctatcgacaattaattttagtttgtctctgaatatgattttttttataaaaaaattggggtcattaaaacttcttgagtaaattctgtagaaaaaacctcaaaagaaaataaaataaatgtaatggtaaaaaatataatgtattttttttaattgagtacatttgttgttactaatgacacattcattgctattgataatacataataatatttggtgtggagagaatatttaatattttcaataaatagctttatcttttcaaaaaaaaaaatagctttattcttttaaaaatatatataaataaataaatagccttatttattcataacaggtttctttttttttttttcataatatcgatttatataattattgtctgtttagagaaaaagttgacatttttcaaaattggtttttttgtgctcaatatactttgagaggctatcttaatatcttttagtttgaaaatagtaacatcattctgttatttcgcatttattgggtaaaactcttaatttctcgccccagagcagttggaaatgtaccaaatcatcattgattgattatgttgtcactctcaaaattgtcattttttgtcttcttttgatatttagaatcactagtgattatgataacacactaaattatacacatgtttatataattgaattgtttattaaataattgaatcttgtaatatattcaatgtcatctgttcaaacaattagacactcacgaattgattaaaaaaaattgatagatgaactttattcaattttttaaagtttaaaatgtaattaataatagaaaaatgttaaagggtatacatagggcttaacacttttatgaaatatgatatgatatataatttaatattaaatttaacttactttactttaatattaattataaaaattagtataacttgcctatacaaccctcttaataaaaatataacaacaaattccctgaaaaagaggtaaaatagctctttactattttagttaaaattttaaataattaggtaaaactgtacttccattatgtgaaatggtgagctaaaacaatttatagatattcttttagttacaggtaactcgatggatagtagtaaggtaaaaaaatactataaattattttatttttttttaatttttttaattattatttttttattttaattaataaaatatataaaagatatataatatttaaatgataaagaaaaaaaatttaaaaaaaattagatgtatgatgtaaaattttagtaataggagtagagaaactaataaagagtggtctcatgaattggaaaaacgggaaagaaaagaaaattatgaaaactaattaaaaatagaaaaaggaaaaaacaatagtattaattacatctagaagtacagcacttattatattttacctagggagaacgttaagccacttggtactatttggccactcgttgagggtcgatcataacgtgccttgttcatatgtacaaattttattttgaattaatttattgaaatatatatataaacgtaaaaatggaaattaacgtattaatgagctataacatagtcggccgacaaacttgttagacgagcattactattaggaaccagtagtgcttagcatcttctcgacatatcgctttgcgattggcg

SEQ ID NO: 202225 - DNA, 647 bp, Cannabis indica
tctcttagagcgtcaagacccatgcttaggcaccaggacttaacacccatggaaagaaaaaacgtggcagtgcctccatgaaccaaggagacaatattgtggatctggatcctgaagatgtttactccttagctgacctcaaggacagcttgagcgcacgaagagaaaaggcgcgaggagaaaggatcaggcctcgcagaggtgatttgagaaacaaaatcaatgatcgaatgcaaggatgagatctccctagggatcacactaagaaactggaagacaaaattgtggccctaagactgaaaagctgctcaagaaacaaagtggattcggatctgactcagaagatttggagctttgtgttcagaggattttagacgatgtgtttccaaaaaggttttggatgcctcatatggatttgtatgagggcaggacgtaccccatggttcacttatcctactacgaccgacttatgaaagtagcacatgtcagtgatgacagaaaatacctatgtttccctctcactctagcaaaatccgcaaaagaataatagaagaggcttctagtaggatccgtccaaaaatggcatggcttgcagtccatgttcaaaaagcagtttgtggctgcgagagattttgatatggaggtca

SEQ ID NO: 202226 - DNA, 526 bp, Cannabis indica
acttttcttttcttttctttattgtatatattttgcttttcccatgttattagataaagaagaattacaaggtcatgactctatttttgactgttatgattgaacaaaaagctttaaattagaccaaagaaataatttaagaaaaaaaaacttataattattattagtcatgttcagatgtgtaccactgccgattcaccccattgacaaatattatatatataatcatttaatatgtaaaagaataatgtatatggctataattaaatatgcaaaagtaagtcttcattacatataataataataaaagcattaataccagccaaatatagtggatatacatacactaccacacaataccaattacctatacataacaaaaaagaccatattcatataactttgatcatatataatactaaaaaaaaaagtaaaaggaaaatgtattgattagctagtcttgtatgaaaaaaaagaacaaagcaagctaagcctaagggaaaaagatatcatcatcatcatcatc

SEQ ID NO: 202227 - DNA, 2093 bp, Cannabis indica
aaataccaaaattatatagtggttttacactcaattgtatatacgtgcattattgatatgcatgaagaaaatagacattatagaatctgtgatttaatttgtgtttgtgtgcatagaggaattatactaatataatagaatagaagatagaataggagttggagttgcacatgatgtgttggcgtagccataaacatcaaaatttgacatcttaactacaaataattttaacttattaaaaaaaaactacaaatatttctatgaacatatattagtctctcttcttcttcttctttttttattattattattattattattattattattattgaggaaaccttcatatttaattaataaaaccacattaacaaaaaacataataataataataacaataataataataataaatatttattatatttatatttcgagcaacaatatgatgctaacacgtgtaacatagctagaatatgaaccagctcaaattatgcatcaataaatacattcagatgacttgtatcagaaaatacaactaatagaaatactcgaactcactattatttaggcaatggcgagacacgaataataattactgactgatgagactaccgagatgaacaaatccatctcaagaaaaacaaaatacattataaaattatttcgaatgggtagataatgagttttgtagctcattgacccacatactcctaagtatgttaaaagaataaagacaaacaacttcaacatgattcatctcgcctttgtcacactaagcgtcttgcatatacctccctcaacatttatagaagagtgtgagatgtactacaacaatacacttagacgttgttccacggagatgtttaagaaaagtattggttgaattgtgagaactatgaagcacagtcagcataatcgtctatggataaagataaaaagcggttatgcaattatttataattatctcatttacataaatatggaatgtgggaaatgtttactttttatgaacaattacaaataattagatcccaagagaataactatcatcctagactcctataaatatggacagaacttagggaacaaaggacgaccattctttattggaaaatagagaattctattattcatttttgaaaaataattaattgtattttgtatacaatttatcaacccataataagatggactcgtgggctatgaagatttaaatttaaaactacgttaaaaccttcttgtcattgtcattattactattagtattgttatacccaaaatttggctattcaccagaaactgacacatgtactacaaaaagaatatgaatcagctcaaagaatataataattaaattgcattattaaatgcagtttaaataactcgtttcaattaattaaagttgatagaaatattcaaactcgctgactacataagcatatgcgagataagaataataactaataacagatgtaattgacaagacaatacttccatctcaagataaatagagtatataataagagcgcacaagggagcttgcatcttattgacccacatatttgggataaaagcttgcaactcattgacccacatattggtgcatggaggaattaactacattcctccatctcgccgtttacgtgatagggtaaccacctcgcaaatatctttacgatatgaagaacacagtgaggggaagcatattcttagcattttttccataaagacagataagaaggacaactcacatttagcgagaaataaccttcttagtcagcataatcgtttaaggataaagacaaatattagttagatagttattagatattatcccatgtgcataaaaatgaaacgtgaaatatgtccacattttatgagcgattgtaaataaatagatcctaataaaaataattgtcattctgtacacctataaataggggcagaatccagggagaaagggacagaaaaattgagagaaaaaactgttatttacatttattgagaattttactctgtatccaaataaatatctcaaataagtaggactcgtggagtgtagatttcaactacaaaactacataaaatat

SEQ ID NO: 202228 - DNA, 1063 bp, Cannabis indica
aacccgacctgattatctcgagccgagcctgacccactaggccaaaagaaagagtcgggcggatcgggtcgggccaaagtggtgtcaggctgggccgagtttgtggcgggtcggacccggcccggcccgattgacattcctagttttacaccatctaaatgtagcttagtgagcatgccagcaatatattttaatttagaaatatagatactagacgatgttctctttatttcaacccctgaaaaataatgaagaggtcctatgtaacaccctaacctgtagggatgctacgtgtgtgtttttataaaataatttataataataaattaatggtttaacgaaaattgtgatttaattaaaactttataattatttaaaatataaaatgaacgttgacaatacaaatatctagggttagtgatcccctttctatgttttttttttttctacaaaagatacattacgatttcacaacatagaacttatacttattaaagtggtcataaatcaaaaccctaactactcagcattgctcgtcggataagatgatatgtacatttttcaaggaagacctctaactcttggctgacttagttcagtccttttcttatttgcaccacaaagtacacgcgagtcataaatactcaacaaaaaaagcaaaagcttaaacagtaaatatcaacacacaaacatcttcaaatatgctcatatacttaaaaccaaattatcatacattaatccataatcaagaaatcatactcatttaataaaaacaatcatcaataataaatatatgtctaataagacaaattagggtttttacttaatacaaaataataatttatataaaattattatttttccctcaaaaattatttctcttagaaattaattctttctcaattcatcttacaaattatatcttcatttgtatagtgttgtatagaggtaatctggggaccataaacttatattttaaagttccaataaatacttgattgatattgagtctcatcaataaaataattaggtttattaaattcattattactccactataaat

SEQ ID NO: 202229 - DNA, 975 bp, Cannabis indica
acagacgaatcttctacgggttagagcctagagcatgcagaacatctgagtgaatacacttcttccaagcttacactgattatgtgggaatagatcctttccaactgatccaaaataggtatagggttctggcattcctttaaattcttgtatcatatgttaggatgggggactcatgaaccttatgaaatttcttatatatacactctaaaagctactttgcgtgagaaaaatttgttttggcgacttttattacctatccacttgctccaacaagaacaagatcattgttaaacttttgagccagtcacaaagcttcaaataccaattttttggacggatggtcttcatccatctacatactttgttggtttttgtggtactaaataaggtgtgcaatggaagcataatgatggttatcatcgtaccacattcaatatcttcatatgtatatacattaattttgaaaattacctcttgaagcctatcaaggtatccttatttcttttctcaaattgtattcaaaacgatgatgaaaaactcacgccttgatcttccaaatcttccaccacactcaaggatcattgtgggttgattatgatacattaaataatatgctcttagattttttcaacacatgagcaataactattctctctggagtaaaaatggagtaaaaatgatgttatggtcaactttttttttaagtttcctaaatcacacatatataatgatttagaatatatcggtattataattataactaataaaataataataaagttttaattaaataacatatttatttatttaaacataaaataataatattttaatatttcaatatttgtcatagatatttattttgaaattcaaatttttagtttaaactatattttataatcgattgaggaaatatcttaaccacttgacaatatctccaataggctgaagagaatatctcaacaatattaa

SEQ ID NO: 202230 - DNA, 1311 bp, Cannabis indica
aatatgccatctccaaagggtttaacgcactaataggaggacacacatacaaaatcaagacaaggaaactttacaatcaaaagcactaatattaagtgctacaagtattttataaacttcaagtcaatgattattttactcattcaaaaacagagaagaagttgtcacaaaattaaacacttaaatcaaaacatagaataattcacgctccctacatcatcatcaaacacaatccagatttctcttctccatcaaatgcatttggaatgatcatggtgtttagtggttcttccttaaagattaggctgaacaatagtacgtaagcagaagcaacatctaacacagctggaagcatttctctatttgaaacttacctagctacacttttgtagacgcaacaacagccccttctcttctcacttcatttctacaacaacaacatcaaacaaatgacattttaaatataaactggctctcagttataggcacatagatgaaagttccatttgatagtctttatgtaattgatcagcttatagccattagtcccttctttcattgaaagcaaaggaaaatataatataagaatttgctttatgttatttatagtttaagagctaaacattatttggccaaggaaggtgtttttagaccactaactgtttgctaatttctacatctagcgtggttacaaagtttgggcagattggaaaaaagattgtcttaaaattgcaggacgaattatgaaagattttaagacaaattacatccgacgtcataatgcctttggccaaagagaatatggtgaaggagctcgctattccccaaaaaaccatcttgaaattgatcaacaagattgggtaaaatttgttgcgagtcgtctaacacttgagcgtctggtacgtacatgtatattcaatacatttatataaaggcacaatctgaaggagctcgccagaatacattaaggcaccacgcaactcgtagaggcatggtgactctccgaaaggatgtggtaatgaattacatacttgtttctatttagtttaattgtttacaatgacttcatcaataatatctttaattgtgttcttttataaatagagcctttgatttcaatcatgtaaaagtaagtagcaatatgattttgttgttgactaaggaatcctaacccttttttctaaagggtgtctttgacaagtttgttttatatgccatattcattttcagagagcaccatctgaagcaaaaaacacttctgcaacaataagaaaatatttgtatatactatattcatgtgaagaatgtgag

SEQ ID NO: 202231 - DNA, 1956 bp, Cannabis indica
tattttattttgggattacgtgttattttctgtattctttacctgtcattagctttagcatagtttcaatatggatgaaacttaggttttaactctcttcaacccacaggttctaacttctgatgaaatatggtctacactctgatgacataccaactgaaactcctaatgatattactctacttcttaagatttgtactttcaaacactttagccgtctctctttaatcaaaactctttctcaaatctagtcttctcagtgtagatttcctattattgtgtctgaacattcagatggtctttttctggtcacatttggctgtgaggggaatataagcgtagaatcttagatggctagctttggtattttgcccaaagtctcacaatctttgctgctcttgatagctcctttcccataaccccagagtagttgcactatgttccttttgggtccaaatttatggtattccatttaggtgtaagtcttatgatttggctaagctcattgtcaccatatcttaattcctttttttttggtaaaaaaataggggaattatttcatatactattttttaactttttttttaatttacggtttgggtttctaaaatggttgcagcgctagttgcaataagagtttctatacgattttttgttgcaatttaggttgcagcgttagttgaaataaggatttctatgtagaattctgtaaaaatacaaaaaaaaattattttaaagtgtaaaaataaaaaatccctaaaaaaatattatagctacaatgatctcctcttattattagttaaagtgactttactatcattgtttaaattcatgattaatttaataattatggtacaacttaaattattataaaaataaatttatatttttttttgaattattatcgaaaaactgtcaccaacactaaatattctcttaaactatttcaattacagtaagaccttttcttattttgatagactaatttggcacataaggccttggcatgctaatggcacaggtcattgtaacatcaatgcaataatataaaataaataaatatttcaccccctaactactatccaaaaaattatgctctttcaatttattaaaaataataaactaattttaaaacttaaaaatattatgaaaaaaattgaagtgacgaaaaatcatttatatttttatgtgtaaaagtatatttaaaattaagtatggttatgcagaatgcataataaattaattctaacttttattttctttgagcttttatacagtacttaagctaattagaaattatgggtttaatatgaattagatccagaaattatggatttagagcactcccaatagctgttataaaatacaacaaactataaatttttaaagaactaaaccaaaagaagctccaacaaatgctctataatacattagtataagtctagtctgaagaaataaagggtgtaatgaaattaaaagttacattccattatttactttgtctttgaatctattgtaatagtttttttattgtaatcattaatagaatagtcattacattactatagccatgtaatagtaataacgtacctttgctttttaaaattaaattggttattaattcataaatgtaaggatatttttgtcaatataatatttattatatgttccattctcattttcatgttcattatataaataaaccaaatatcttaatattattctcattaatattcttattactttccattattattctcattaccatttctattacatgtaaaccaaacacaaccttaattcttacatatgctagagtacttagatttagaacatgttgtttattctttaattcattttttattagtttctctcttctatatctttcacttcagcctttttcttttcttcttatttctttgttattgtttttatcttttcttaagataattattt

SEQ ID NO: 202232 - DNA, 552 bp, Cannabis indica
tgacatttcttgtagtgaattatgtattggagtacaatagtatacttaatgtaaaaaatattacaaaactattttttgtactaaatatagctcaacttttatatcgttcattaaaatagtctaaggtgtaatttaatattaagtcttatttattttactttaacaaatattataaataactgctatctaattataggacacgattttatattggtgtcttagtgcttcttagcaatactctataaaaaattaaaaaataaataaataaaataaaaaaattaattatatcctttttggttttgtttttaataaactaacatagtatcaaaaaattagagaagaaacctctttttttttactttttttttattttatttatttaagcgtttatatattacaaccacatgttttacctgggattcgaacccagaacctccaagacacacccacccacctatggccacttgaactaccctcaagtggttaattagagaagaaacctcaagctacgtacgtactactattcaaaagttttccctacatatcaatact

SEQ ID NO: 202233 - DNA, 563 bp, Cannabis indica
tgtttttattgatgatcgtgtaccagttaaatctacagctgatgttggtttttcatcaggggagaacgtttctcgtgatataaagtttttgacagacaaagtcaatgcaattatttgttctctgaataggttgactgataattaatttgctcttttgagagattttgttaagcttaatttcaagggtgcatgtgttggatgtaattggtgaattgaaaacaaaggtcactaatttttgtgacatgtctcatgttttagtatgtttaatatgtcattttaagttggtattattttaattattttaaatcatattttgtttatgttattagttgttaatggggtattttatgatttctacaagttaatttagctaaaaatagcgaagagtcaaaatctgatgatgatgaagaagaaaatataggtccagattcggagaagaatgatgacgattttgataatgttgttgattctgacggtgatggttctcgtgaacatcatagtagtgttgatggtgaagataataacaataatgatgtggtcggcgataaggaggggtgttgatg

SEQ ID NO: 202234 - DNA, 1309 bp, Cannabis indica
ccaaaagtgactatcagactaaagaggcctgttcgaccaaggaggcctgaactttgcagggaaagctgtacaaagaagctagaaaggctaacgggcacatactaaggttggcaagcacatactacagagaaaggctggcagacacagagaaaggttggccgacacatagaaaggctagcagacacatataaaggctggtaggcacataccgaggctagcaggaacatacctgcttggccaggccctacccgagcaacttatccaaacaactctaaacagttgagcaaaattacaggacaagtctaataacccacaaaaataggaattttccctcgagatattagtcttaatttctaggattttagttatctttttttgtagcttaaataatggataaaaagatgttaatatccctattttaaggggatatctttacctatttgaattaggatcttttgtaagccctacactacataaagagcattagatactctttcaaggctaagtcattccacaggcactaaagggtctctacaaggtcttctctcatgctcccttaagcctcatacacgtgtgaagcatttctctctcaatcctcacattctatgaatgcctcctagacactaagtcaagtatcttcttatgtccttcacaagatcttatcagtctttatctgtaacacattgttctctcaattttaatactaaagaaagccatagctagaaatcataagattttcacctatgatatgcatggtattaactcaagagtgaatacaactaacgagtaagtaattacctgctaagcaagggggtcgaacctctataaatctttgtgttacctttactatttattgttcttatttacacatggtgataatcaataattaataaggctccattgttagttgaccaaattccgaggtaataggtacatttagttggtttcacatttttccaatatgtattgtttggagaaccaaaataagtagccgacttattgttaagatattgatcccatttttctatgtttttattgagtttccaagggaatgctagttagtttttgttagacccattttgtccattgctactttatcacacaaacgacaagatatattaacattagtattttcaaatattttagttatgttttcttccacttccattcatttagtataacattcaaatattagtgaaaatgggctcaaaattatcccatcaatagagctaatagaataattttaatgacaattacaatttttttttccaaataatgaatagagtgagtgaaagagttaacaacaaca

SEQ ID NO: 202235 - DNA, 734 bp, Cannabis indica
ttcgggtccgggttcgggtccgagtccaaggtctcgggtccaggtccgggtccaggttcgagtccaggtccgggtctgggtccgagtctgggttcgagtctgggtccgagtccgagtccgagtccaggtcccaaggaatctgagtcttgaattaagttttttttaaaaaataaattgaaatcgggtcagatcagatccgatctagaaaaaaattaggcagggcggagcagatatgatccaagatctaataagtatccgaatgtttcggatcaaaggtgatccgccgggtcaaagctccaacccgctccaactaaatggatctttttgacatgcctaactcttatgcagattacaatgcttctattttccctactctttcgtgtctggtagttggatggcttcctcctcgtcttgagtgggttaagcttacctgtgatgttaaagtggggatagaatgtatgtgcattgcagttgtgactagaaatcaccttggagtagtgtgtggggtgcatacaactagattagaattctctgatgctctatgtggagaagcgacaacttgttgcttggctctggaagttgctaaagatggaagctggaattttattataatagagggtgattttagggtggttatcaatttgctcaacgatctagaattctgttgggagattgagaactatactaatttttgtaatagactctcgtttttttgcttgttataattttttttt

SEQ ID NO: 202236 - DNA, 553 bp, Cannabis indica
taagtaatacccattaaaaatgtctagatagatatataaatttgattgcatattatccacctaatatttagttaattgattattaagggacacatatgatggatcaatttttttttttttaagatatgatggtcttcaaaaatttcctttagtttccgtcgggcctaaataccaattttgtattgtacatgactaaccgtacgtggtacaagtcaattaagtatggaaaatgacagttgcatgcacctaatcaaatcgaatagtaattaatcagtacacaagttttggccctacgacagtgctgagcaaaaggataggaaaatagggcatgagtttcaactcaagcctcctaattaaacaggtcgacccaaccggtttggagactttggataaaaaattaaaattggatatattattaaaaggaactgtctcaatcaatactttttaaatttaatttttttagaaaaaaaaaaagcaaatactttataaattttaaaatagtgtgtattcggatcacaaaatttatcaatttttttaaagacatttttaattg

SEQ ID NO: 202237 - DNA, 827 bp, Cannabis indica
ctctcatttttatattagatgggctgttattattcaatccgctgaaaaaatttaagaaaaaagttgatgttgatgctggctataattgattcttgttgtttgtgttgtattacaggctataatttacggtcctagactgagcttttggtattcaggaaataaaattccctactggtgtagttatcgaattcagggatctaaaattaatgaagattattataagcttcaagatctatcgacgaggattcatcatttgagcttctatggcatcgttatatgcatcgttgttgattttggcccctacttttcagataacaatgataataagtcaaacaccaaatgcaaactccatttttgttcgaagcactctgatgatcatcaaccacgctcttttgattcatcgatgcagtttgacatcaatattcattctaaacactcaaactctgatcatgctcatcatcatgtgttcatattttatcttaccaaaactgatattatttttaacgagttacatcttgtaaagagtgcttcatttgagttttacatcaaagacaagccatatgaaatcaaagaatgtggaatctcactgacgaatgacgattgatcgtctttatatgaactagagaatcgtattaagagagctaaaatatcaaactcgtagcatttctttccttttgcaggtaattaactaaacttctctaattattattaattgttcttgtatgcacatacacacactcacatctgtacacaacatatatataaataattaaatattatatataaatattttcactttcattatatatatatatggggtaaacgga

SEQ ID NO: 202238 - DNA, 819 bp, Cannabis indica
aattatcaaatcctaacatcatgtgataaactaagaaattcaaatgaaagcaaggagggatttttatatttttattttgtgtacaagtttggatgcattataataataaaacttgatgatatggaaatgcaggttactaagactgagaccagttcatcgttctctttatatcagcaaggagaataatgatgatggaagagtcatttttgctctgaaagttggcaaaacagtgatatttgctcactttttttactaaaggttttacagtttatgcatcactatgcaaacaaacaggacagcgaccgaatcgggtatagaacgaggctttgcaggttcgtgtttttacttggatatatagtgttcaagttcatgatagaaggagaggaaggaaatagttttgtatgtgtttatgttcaaattataatgtacaagttttttacttgattgtatttagatcattttgttttgttttgtatatcaagtttgtgaacgtataagttttctttttctgttaaatattttacacaatcaagagaatggagcatgtgcatgtacagagattatgtctcttgttgattagtatgcctttacttatatgtcatagttacttctttctcttttcttttgttcttctttttatgttgagaaatattacaatcagcatttcctttgtctgaataatgaaaatatacaacggtaataaagataaaataagaatgaatatatttttcctttgtcaattaatcaatagggtagtctacagtgcacctcttcaaggggtgtttcgttaaattttttatctgtttcggtatacaagag

SEQ ID NO: 202239 - DNA, 681 bp, Cannabis indica
gatctggatagcattaaccctcactataaatacaactaagatgggagtaggtcattacccgctatctaaggggggcaaacctgtataacaattctgtgtgtgctttacttttcattctaattgtgtaacacgtgtcaaacatcagatctataagaccctgccatcatttgattaatttttatggtcaacagtttggtgatttcattgagagtagtggatgtcgtatttgatcaaacgccatggttaacacaagaaaacccgggtcgcactatctccatctttcagtctccctcaagacccgcaaactgcaaatctggatgctcaatttccagcaacaaccggaattcctatgaacactacagatgtggtcaatcctatcaccacaacaagcaccacaagtctagccactatagctggcaaaatcgatacaagcatcctggtggatttgaatagcatgcccttatctccgagggaagacccaccattggcgtaatgccctatcctatagggaggccgtgtgtgtgattttataagctagtttagtactaataaagtaatcaattattaaaaatctgtgataatataaaaaacttcactaaaataatatactaaaaacaaacatcataatgacactaaaattgtgtttcggggatccctattgtaaaaagtttacaaaaaggc

SEQ ID NO: 202240 - DNA, 1189 bp, Cannabis indica
tacttttaataaatccttattatctaaaatgaaaatcatcaagaccaaaatgtagatataaaaagaaaacaatctaaagcatatttaaatagcagtgtaacatgtatgtaaatttatttattggtatggaggaaaatttataagttataatttgggtagaattgggcaacttttctttcaccaaaaatattctattatttgttatatatgaattttattaagtacagacacttagcttcaatcaaacaagagaggaccggagttgataaccaataagtgaagtaatgatggtgaacatgttcactatccaacttaaagagaaaatgatgttagacaggtttgttgtttaggtgacatacaaacgtgcacagagattataatgataacttctctttaaagcctatatatatacacaaatatatataactgtttatctaattaataagtgattacaaaaagtttggaaatgactttctctttctttggtgaataataagggaggaccggattgattagctaggggggaagaactttattattgtttttgcttgaacaatagttctttactaaaaaaaaaaaaaaaaaaaaaaaaaaaaaaaagaacaacttttctaaagatagatataattagaatgcatgttaacttaaaagagccaaaattagttttgggttttacatatatacagcatatatgttttttatactaaaataatgatacatagccaaaagtgtttaaatttcaaaggcttccacatgctggcatgcatatactactttttcatgaggaaaatctttggattaattaggtaatatcatgtacaatttatatttatgtaaaaaaaaaatatttttttaacaataaaatatttaattattgtaatattaaaattgatatttactcactaaaacttctatattgtgtctaaaaaagttatatatcatcaaaggagatgactaataattaactaagtgcttgtttgatatgtatggtataatatttggttggattatattgtattaatattatttaatataatattatttggtattgatatgtattaataggttgtgtaaaattatactattattattccaaactcgatctcagtcgtagactggaacctcatactcagactcactaggacccgaagtccacaggtccaaggtttgggtctagggcacgtggtcg

SEQ ID NO: 202241 - DNA, 906 bp, Cannabis indica
gaatatttaattaaattatattatttgattgaccataaaaatgtcatgaattgttgtaaaaaatttgtttttaatttaagtattatttttgcgttatttttgtgctggctttttatttttataatagtctagtcctgtttgatctaatatcattatgttttatggttcattaatatctaatatcggaaatttttaatatagtttgtcatattattctcttttcttctagtttgaataattgaggtatctctacccaatttttatgagaaaatatttggctaattgtcattgataggtgcgatctgtcacatgttcatttatggtgaaaattttatactctttacatcattttgaatctccacagctagtgacttttggataatttagttggagatgatgtaaggtttattgtcctagttattgcaaatgtcacgcgtgcaataaattttttaaaccttattttctacttattaatttttttaaatttctcaaaattttaccaaatattttaaataattacaacatatacgactataaaaacaatatagactaatttttttttaaataccaaaataaataaaagtgtatcgatacatcaatttgtatattgtagaattttcttactatcatatcaaaccaataattctattaaggataaatccaatatgctttcttatcatgataattgtgccacacaacagttatacctttgtcatctttctaaattaaggaaaatttggaggaaaattttttaaaaagttcactttgatacagattagtcctcaatctcaaaaaatagcaataatagtccctaatgtcacattttttaaaagtctattagtccttttcttaacgggttcataaatcaaaactgcatgatatgttattggttcaaatcataatttt

SEQ ID NO: 202242 - DNA, 589 bp, Cannabis indica
ccctatttgttgaaggccatcgaaccaactgccaaaagtagaagcagtacttgtgttgatggaaaggccgaatgagttccagcaggaatttgcaaaagaacaatgcaagagagcatgtgttacagtctcgggagaggctttacagaccgggcattgtgtagaaattggaacatgctttgttacaagatttacacaagttggaagagaatcggttatagcacgccataggaagtttaacactttaggtgggatttttagatgccagaattttcgccaaaaaccggagttgttgcttgttggggctgctggtttttcagattgcagcagactataggcactacggacggtaaaaattcctctatggtcagctgtccaagaccagaaatctgatcgtggagtgctggttagtggtataccgagaatagcttctgcctcatgaggtggaaacaagtccaaaacaacctcgggatcccactcacggtggtcaatctgcatgagtgtactgactgtattattttgcaaaccagggtgagttgaagttgtgtatctgttatggggaatcggcagccaaggggaacccactatacta

SEQ ID NO: 202243 - DNA, 691 bp, Cannabis indica
taatagaaattgatgtttatttgtgtcaaacactacaattttatacttatgcacacattgacaaatttattgaaaaattgttagctcacatatttttcagttttaaataacacaactttttttaaaggaaaaattataggcccatttctctgtttctaaagaaggaaaaagaatctttcgtatcgaaaaaaatgaggataatataaaaaatctttttcttaaacaatatatggaacatgttataggaatagacggttcattgaccaccgtcttataatttggtcaacgaccaactaactagtttgcctttttttctcccaacttttaaggtcaaaactcaaatccatattgttctagtttataaataaatccataatgttctatgttttttttttgagaaaatattgttctatgtttatcatcactatttctaaaaataatagtttatttaacaagaaattaccatcaatactcttttggagcactcctaatatatgctctaacttagtttttctctaaaatagataataaaatatataaatttatcaaaaatataaaaatataacattctgatctacatgtggagcaactttctaaacttactttattagttttaaattatttattgtgtaagtatgtttgtatatattaataggggaattgccttatattactttttttttaacttttt

SEQ ID NO: 202244 - DNA, 1953 bp, Cannabis indica
tatccttccaacgatgcttcactttcctcacaagaagttggctatcagtttcaattcgatccaaaggaaattcaacagccatacaccagcgaagcgcccaaaggagtgcctttgctttagctaataagggggaaagaactccatcacaaggtgaagacatagcagctacaatatcaccgttatggtcagaaattgaagctccaattccaattttgtggacctgattactgattgcagcatcaacatttaatttaaaataacctgccttgggagctactggaatgaaactggactgaggacaagccgaagattctgcagaggagttgtgagcatgaaaattctgagcctcatcataatcttggagaatacatgcaacctgaaattcaacagaggaaaaagaaagtcctctcttgttaaacatgttaatatatcagcggttccaaatttcccaaataattccaaggaatactctcaaatcagttttagacaaatcttgaaaatctcttaaaatatactccctaatatcacaattcctagccactcgatacaaatctttaaaccttgaatctttccactctctcaaagctctggaacactctaatagagcatgggtaacagattcatgacacttagagcaaatggaacaaagaggggttgacaagatttttttatggaaaaattgagagctgtaggaagactgtgatgaaaggccctccaaataaaatgctttatcttaggaggcatttttaagttccaaagggtcttccaccagctgacaagagaagtactgtttgaagaagagggtaatgaattaacagacttggccaaatggtaagctgaattaacagtgaacaaacccgaagaatgatgctcccaaacaagagtatcatccagagaaatatcagcaagaggaacagtcaaaataacctggattacttcctcatcaaaaaacattgccaatttctctctatcccaacacccatcaacattaataaaataagaaacagtagactcagggggggagggggggcgatagcatctttgaaagatacaaacctccaaccaggaatccaataagagtcaatagaagagatagatctgccattcccaaccttccaaataaggcctcttttgagaagatccccaccccaaagcaaactacgccaggtaaaggaagcacaatgacccttagaagcttcaaggaatgaattatgactaaaatatttggcctttagaagcttagcaagaagcgaattaggcatagaaaaaaccctccaagcttgtttagcaagaaaggcctgattatgacacacaaaagacctaaaacccattccccccaaaaattttgattgacagagtttatcccaagagttccaatgaactttcccttgatttccagaagaaccccaccaaaattgggccataagacgttcaattcttttacagacagaaacagggaccctgaaacaagacattgcatatgagggaataggttggataacaactttaagaagaacttccttaccagctcttgaaaacagtctgttagtccaattactcaatttagagctagctttctgcaaaaagaaattaaaatgttcttttttggaacgaccaaaaaactgaggaatgcctaaatatttactgataaaaggcttattatcaagacctaaagtacgacgagaaaactcagcctccgaattacaagtgttaggggaaaagagaacagaggacttagaaaaattgacaagttgacccgtagcttgatggtacaaatcaagagcagccttgatagcaagacaagatcgagcagtggtagtagaaaacagaagactattgtctgcgaaaagaagatgagaaatagggggagcagaacgacatatagaaattccttggaaataattatcatgctcctgcagtctaataacaacagataaagcttccgagacaaga

SEQ ID NO: 202245 - DNA, 508 bp, Cannabis indica
gtatttatataacttgtaataaaatacaaagagaatttgagaaaagagaaatacaataaaaattacggtaaacatgtgacaataaaaaccacggaaaatctttcacaccaaaaaatgatcatgtgaaaaataaaaactaccctaaattttccactatgataataataataggcacataatattatattctcaaattttgtcaaatatttgaggaatgcacttaaaaccctcacttactagtgtggtagtttcactatttttacaaaatatttctcacaattttgtaagaactctctttttctctctgtctaacagatattctctctatttttccatctggagtttcactcttcacttttggaatattttgtgatagtaattagttataatggaatgaacaaataaacaagacacaaaaatatcaaccttgtattaaatgtataattgaatacatacatatgcctcaagtcaaaaactatctttggaatttttcacatggttaaaaacc

SEQ ID NO: 202246 - DNA, 3564 bp, Cannabis indica
agacccttcttgcccttaaaactgccttggagtcttccattgagcactaagttataagaagtacctttgatgcaagtcatgatctagttcacaaatctagcagggaagcatagcaagttttgccacttctccaaaaacaactaatccaccgtgtcatacatcttactaagaccaatcttaatagcacaatgacgagaaacattcttcctgctataattttagataagatccttgaaaatcaaaatattatgagctattgttctttgttgaacaaaaactccttgcatgtgattaactaagaaatgaagaatctcagctagtcttaaacaaatcagttttgagatgcatttataaattttatgtagcaagcaatcagtctgtgttgaatagcactagacggggactcagtcttgggaattaaagatatggtcatttcattaaactcctttggaatgctacttgttgagaagaagctttgaataccatacaaaactctttccccagatcaggccacatatgtttgcaaaactccaagccaaaaccatcaagccctgagcttttggtgctagggatgctgaacagaacctttttaatctccttcatggtaaaaagtctaacaagttggagttgatgatccaacatcaaagtgttaccaaacttcaaacactgaatattaaaataggcagcaagattagaactccccatgaagcttttaaaatggttaacaaactgattcaccacttcagcatataatcatcaataatttccccttgattgttcatgaagctagcttattttattttcttctcttagtttttttaatatatgcatagaagaaggttgtattatcgtcagtttttttttcagtcgattagcttttctcctttgaagtaaaataacatgaagcattttatcttgatcacataagtgaataacaactattttcttttcctccaagatagttggcttgagcagctaacttagcattaaggaagtgatctttggccttttgaaaattaacctccacatctccaatagtctgcttgtataacttcttaagttgacattttagcctcaagcatttaaagtgaagagtcttgagacatgtctccttaactggtttataccaattctccaacaatatgtttttaaaatctttgtgatcagtccagaaattgaagaatttgaacggtttgacacaaatatcctgaataactgaagaatagaccacacaagggcaatggtcagacacagtttcccaagtcatgatagcagaagattttaaacgagcatgatcaacaatatattttggcagttccattgagtctgaatgtagctagggattattttccaggtctaaggagcatcatggtttctactcggtgcgtagtgcatacaagttaatacaagctcaaaaaagaaattggattgcagctgattcttttgggttatggcgcaagctctagaatttgaaggtaccaccaaaagctctcaattcggtacggcagactgcttcaaattatttgcccaccttgactcaattaagtggtaagagggtcctagttcaaatcatgtgtctagtttatcaaagaggtgaggaaactatttttcatgcacttatatcctgttcattcgctgctcaatgctggcagaggcttttgactggggtttaggccgattggttctactaacttttgcagctggtttgatcaaattttgcaaaagtacagtaagtacaagtatggggaggcagttatgttgtgctagaggctcgaaatgatttggtttggaaccaaaaatatgttgcggtggatggggttcttatctcatctatgaattgtcttgtgcaatggaagtcggcccaaaatagaggttcacatgcttctttttcaatttttaaagctgatgatggagctggattttaggttaagtcgtacgagaatacaattagggtaactgttgatgttgccattattcgtgattgatgtgcgtttagttatagcatagtcgctcgagactctcaaggggaattagtgatggctaagtcaggtagttttgttggtataggtgctcaagatttggctaaagcgattggtataaagaaagcgctaagctggattaaaactcaactatagtagaaagtggagctggagtcagattgtttggtagtagtacaagctatatattcaaaatcgattacctatactttcttctttttggggttattatagaaatttatcataaacttcttgcatctctaaacaatattttcttatttttttactaaacgaattgctaacatgcatggttgttcatagtcttgatggagcatcttgtttttttctagatcgagtagttgaggtgcaatcttgtttttttgactgatttgacaaattaataaaaacttctatatttactttcaaaaaaaataataataaccatgtgaaaaaattctattatttgatccagtaagaagttaaatatttgttataaataaaaaaaaaaatcagtaaatttgtctcctttaattaaaattaatatagaatgttaatctataatacaccagtaattaaaatgattattctggtacatgcactttatgggtttgatatttaggagtttttaaatttaatttttttttttttataatagtgtgtgttatacttttttaagataacttataatttttttaaaaaaaaagtaaataattcacttactgtgtcgaaaataaaatttaaatacttaattactatgcgtataagaaaaaaaaaataactcgtgtaataaaatatttgaacaatattttcaatactgtaaactattcaaaatttttaaaaaatattatatatctaaagggcgtgtttggaagtcattatgtaattaccatgtactatatttaaaatatgaggtgtatttaaatataaaatggtaattatatgaattcttaatgttttgttcagccaaatagttagtaatacatacttaggaaaataatattttttagtagctaatatttaaattgaaattttttgaaaattatacttaattctcatgggactataaaaattgaagagtgtgattggaataagtgacagagccacttggggagtatgcggggctacagccctccttaaatgttttgtttttatgaattttatatatattaattatgtaaaaaaaaaatatacaagtttatcaatttacctctccaaaaaaaatgaattgttctatattttgctccccaatttacatttctctctccgccagtaattagaatccatcaattaatccaattacatagttacattttatttaaattattagataaaagtgtcaataaattgtgtaattattacaagggaaattactctgtttttttaacttttttttaaattttacggtttgagtttttaaagtggttgcagcgctaattgcaataggaatttctatacgattttttgttacaatttaagttacagcgctagttgcaacaaaaatttttatgtaaaattttataaaaataaaaaatatatatattgaagggtaaaattaaaaaaaaaaaaa

SEQ ID NO: 202247 - DNA, 2665 bp, Cannabis indica
aaataattaatagtgacatccctagaaaaattcaatatgaaaaaagaagatagatttggttcttaagtatttcttactttagagagaaacatgtctataagaaagaaaaaaacacaagtaaattataattgtctttaagaatacgacaacattaatctatagaatattcattgtaggtagataaatgtaatgaacaaaagtaggaattttgtccaaaataaacaaatcatgcacgtgaagaggttacttgctattgattagtactactattactagatatatcatatatagaaaaaaaagaaacaaaacaaaagtcaaagatcccatttacaaatttctgttcacactgaattacttaataacctatacttaattattgtctgacactaacctgaaagctcataaatctggattaatatttatttaatgaaaagaatgacgttaacaattttcattttgggtttgaccttcttattcgtagaacatggccctgggcccaggcccacccatatgagccgaagtgatcagctcccacgaaccacttcaccgactcagcaacaccgcgcaccaaagcaaagctggcttaaaagcttcaatggtgggtcccacacggaacggtgtgctgtccttatctccaatatccacgtgtcaatacgtgtttggctaacccaaatctgccctctgtagactctttcctggaaactaatctcaattttctttctctctcctattatatttatataaataccctgctcttatgggtttaaagcttcttcaccttttctctctgtttttaattttataattaaagaaattaaataataatgggaaactgtttgagaagtgaatcgacgatggtttgggccggcgaagattggggctcgttggagaaagagagcagccatgacgatctcgaaagcagtaattacatggagaggtttaagcttttgggtgatcatgatcaaacaggaccatcatcatcatcaggtaataatattcataatcatcatgaagtgaagatcaagatttcgaagaaggagctaggaaaaactggtgagtagattgcgtggtggcgaggatggtatgtcggtggagcaagtgctgttgtcggagttgatgaagggtaagggtgttggtttaagtgttcaacatcgttattataaggagtataatgttgatcatgatcatcagagccactgggaaaatcaacggtcatggagacccgttcttcagagtattccggaggtcaataaacttagcttacccatttgaaataatcttgggttaaaaaaaaaaaaaaaaaaatgatgcacatattttgtatttctcttgtaatacgataattaggtacatatataaaaattacctcactttttcatgttaaatttaattttttggtactaaattatgaatttctatcacaattttttttcttaatttttttaatgtcggttggttatagttacaatagtcatgataaactaccatttcagaaactctgatgttaaaaatgttttgaaaatttatagagagaatattatatacctataaaaataggaagttaggatatcataactcacattttttttaaagctatccttcttgtttttttttttttttttttagttaaagggtagttatcctctatttattaaactaatatatacagaataatctaatattaaatgacaccgatagctcgatgtgatgtctcgaaacatatccaaaccaataattaagtcattattagcgacataattaataatttaattaatattgtgtaacattttagaaagaaaaaaaaattgtagtaatagagaagagcagttacagacttacagttactagggagttgggttgtttcatatcattattgtgtcttcactcatcagtccctgcattttttttgttagattttttgaggtgggaaatcatcgaaaataaatggcggaattattttatatactatattttttatttttatttttaaatttacagtttgagatgtttcgttattgttatataaattgcttaatatatccaaaaaaaaaattctcaatgtgttaactttaatatatattttattttatttttttaatttttgaaatcatgtataattgtattttataaaattttctcaaaaaaaattgtattttatatttttttaataaaattttacataattttttacttaaatttatttgttttaatatttaaaaataatttatttttatttgataagtataattttgaagaatataaattgaaagaaaaatatataaaaattagtataattaaagaaatatcttatgtaaaataaaaaattaaaatatagtgtatttatatatttttaaaatacaaataaattcttttttttcaaaactacaaagtacaaacaaaacaaaattgctaatatatcctttaataatttaattttataataataataatagaagtatagaatttaaaaacaacatcataacaacatcaaaaaataatatacaaataataaaagtacaatataaaaataatatatataaaactgtaattttatgtaaataaaatacttaaaaactaataaaaatatttaaaatttacgttacaattgtatttttataatttttgttaattattttttgttatttttcttttttttgtgaaataa

SEQ ID NO: 202248 - DNA, 2391 bp, Cannabis indica
tcattgtatctggtatggctagtaatacaagattagttccaaaacccaagactcatggaggttttgcatagactttatagacatgaacaaggcatacctaaaagattataacccgctcccgcgaatcaatcaaacggtagatgctaggtctgggtgcaaagtgctcaccttcatggatgcctattttgggtgcaaccaaatcaagatgcacatgcagatgaggaacatactagcttcaagatcgataagggtgtttagtactataaagtgataccattcgagcttaagaacacaggggctacataccagcaaatggtaaattggatgttcaaaaacaaactagggaggaacatggagatgcatgttgacgatatgctagtaaaatctaagacctctaaagagcatgatgaagaccttgaagaagcttttttgataataagaaagtatgggatgaagctgaatcccaaaaaatgtacctttggggtctcctttggaaagtttctggggtatattgtcaccacccgaggaattgaagctaacccaaaaaaaattaaggcctttattgacatgccttctcccaaaaagcataaagacgtccaaagtgtcactaggtggatagccacacttagttggttcatctcgaaatccacaaacaagtgtattccatttctcaatgtgttgcaaggcaacaagaagtttgtatggaccgaggagtgtgaggtcgctttccaaaagttgaagaagcatttgactcaagctcttattttgtcaaagctcgtggaaggggaggatttgtttttgtacttggcagttttgagtcatgccattagtgtcacacttgtgtgggaggaagacaaggtccagtacctagttaatcacttgagcaaaagattgttgggtgcaaaatccaagcatccgatgatctataaattgaccttttgcttgctgaccgcgtcacgaaagctgagaccattcttccaagcctacgccctaagagtacttacaaatcatcccctatgccaggttcttcaaaagttagagtcctctggcaaattattaaaatgggccatgaaacttagccaatttgatatccagtactagccgtgggcatctataaaaggaaaggcccttgctgactttgtagtggagtgttcaaacttaaatgccctccagaagatccagtccctgaaatacctacttggaaggtctacatagacagagcaaccaacgagaagggagccagagtcagaaggatcctaatctctccataggggcaccgctccaaagtggtttacgctttgggttttgcaccttaaaaaattgaagctgaggacgaagctatgtcagtagatatgaaattggctaaggaggtaagagcccaataggttgatgtttgtagtgattccctcctagttgtgaatcaaatctctagttaatactagacaaagggaaaatggatggatacatacgtcctgttgtcttggaactgttgcaaggttttaaaagttacaatgtttaccaaattccaagagaacaaaattcatttacagacatgttagccaagctggcaatcagtatgtactttttgcttggtgacgttacggcgggtattatattctggaaggcagtcaaggatccccattgctagtgagtacaaatggggccccaatactttaaccgtttctctgccactagggaggatcatagtcactttaagatacgagtaatccaggaaggtagcaggttagtgtgactgggaaagacttggctcaatgatcttggagcctatttgacaatatcctatccagagctcaaagccactattacctatcttttgacaccaaatcagatcttgtcccttgtataagaccatggtagtacgcatacatgcctctaaaaccttctttttaccaacagcttctctagacaacaacttttcaagataaaacttttgaataacacgtgtcctagttcacatgaaatcctccactacagctgtacaccacacgatggagaaggttcctaccaactaacgatcagatggtcatgttgtagtatcagcccttgcagcgtgttgagtacgaaaccctaggggacaaaagggtaggctcttacccacatgtaagcctataaataccctcattttatatgtactaagggtgaacaaattgatacttaccgaacctttgctaaaatttctactagctttcttcttcatcaagagaaaaaaaaaaggagggcagagctaggatttatattgtaaacacttttattacttaaacactcacctgtaaggccaacacaacggactcctggactagagattattaaccctcgaatcacgtaaaaaatacctatcttctatttgttattttattcctttcttaagct

SEQ ID NO: 202249 - DNA, 1863 bp, Cannabis indica
aactaacaaaaaataaaataaaagcaaacacacaaagaaagtcatcatttttatctacattacatattacacattctctaaaatcttaattgtaatttttaacttgattttcaattcaagtgcctcaaagtttaactttaaagtccaatagaaaataaataataggattcacaaatgaccacaataatttatactccaccatatatgctcaactcatacaaaaaaaatcacaatctaaatttttaatattcttgcattatttaaccttctcaactaatgtcaacaataaatattttgaaatcaaaatgactttaagggttataacattggcttaggtaagggtagatgaaaaagtcatttagactcaattataccataaattttttacattccaagaacctcaagttcatcttaaaactatcttgataccctcttgatgcaatacacacaaggaatttatactattgcaactcaaaccaataactctttattattcattttttttgtgaaactacttttcttcttcgttttttttttcatttttgaagaaaatgattgcgacatactaaaaacattctctctcaatcttcttaagcttttaactcttcaagacataatacccaatttcaatttttccccaaacttatgtgaagctcatggtatagttaggacaaaaaaataataataaatgagtcatttatttttggaaaatttgcagcataaatactccttttgttgctaataagtaccaaattttaaacaattacgacataaatactcaaaactcaattttaattatttgttattggtacccattaacagaagttagtgtagtagacacgtgtcatgctctcattattttcaattttttacctaatatattataaaacaatacaaacataaaatcaaaaactttctattgacacaaaccctcaattaatggtaccaccaccatgatcaaccagagttcatatgttctctcttcctaaacccatatatattgagtccaaaaatttttaggaatattaaatctcacagctcacaaccataaaaaagtttcttttttcacaaaataaaaagattcatggtcgcaccagacccttaaaaaaattaaaaacttcacagtcgcactgacagtaaccttgaattagaaatcgcaccaccatgatcaagaaatcgcacctgccctcttcctaaacccatattttgaccaaatttttcagcaatcttccatttttaatcgcttgattaatgatgatgatttagcgcaacttgtcgttgtcagaggggggaatagaggtgcttctactcgacaactgatagtctatggtggttgctgatgatatccacatcgatgcgggtttgttgtgagctagctgaaaaatccatggtgatgttcgataacatcagtttcttatagttattattacttttggtactgaggctaggggagagctgttattcagctatatacatttgattacaataataataatgataataaatttgtatttgtaattataatatgcaagacttacatatacgaaaaaaattgagctcaaattatgtaaacatatattttattttgtgaaaaaagaatttttttttatggttgtgaactgtgagatttaatattctcgaaaatttttggtcccaatatgagtttaggaagagaacagatatgaattctggttgatcatggtggtggtaccattaatttagggtctgcgccattgtgaatgttttttttttgggtctactgcaattgggaataggagtttttttttagtttatgattttatgtttgtgttgttttaataaattaggtaaaaaatttggaaataatcagaacatgacacgtgt

SEQ ID NO: 202250 - DNA, 968 bp, Cannabis indica
taaggggtgcattataaaatcacccgttagtaattattaaattaaaatatttagaattcaataaataattatacaaataccgaacaatttgttttggaaattgaactggagaacaagaagattaattctcaacttattttatatattatatatgtagaatcatgagttgaagattttcaatactttaacataatatataataaattaattaataacatactacatgtgcacataaattatacaatatgcactaaaatattagatgacactattttttaactagttatatatatatatatattaatttgaatataatatgacttatactgtttaataattaaacattgttataattaagtatataatattttgcaaatatatatattgagaatgttaaagaatattattggtgtctaataatatatacccctcttccttgttaatattattgtagtgtaagtaagtatcggattccatatagtttaatgtatataataattttaaggaatatcgctaactaatcgcaaaacaatacatctaaaaagtactaaacaccgctagtactcaataacaatactcgtatatatataatagaaatgtatagtattaattggagaagatccaacaccatgcacgtggtgtgtggtgtgtgccatgcccatgaacactactattctattccatgacataattagcataaagacattagtataggctgggtcgatcgacatgactttgctaccaaaattaataattaacttcagtagtaacggtagctagctaggattaattcaaattaaagtcaattaaaactgctatgggaagtttttttacttttagcacatataagataaaagttaattataaccctactatatctttatgtcacatattgtatttttacataactaccatgaaagatttaaaatttgtgttaagtgttatatttagcccaatatttatatact

SEQ ID NO: 202251 - DNA, 531 bp, Cannabis indica
cgtaccaaacgggcccttaggatacttaatagcgccaacagagataattaaacattttatttatacacatgttcaattcttcaaagaattggcattatcttcattaaatattaaaaaataattaaagatttataaaggggttttttatttttacactttaaacataattttttgtatttttacaaaaatttacatagaaaccaacatagcaactaataaagcaacttaaatcacaactaaaatttacatatagcaacccacatagaaagtaaaaactactggagcaaccaattaacgaaacaattcaaaccataaatccaaaaaaaaaaaaacgttaaaaataagtgtataaattaattctcatgtataatattattaactaatttatgaactttaagaataattaagacaaattaaaattgattttaaaaataaagtttttttaaaaaaataaattttaaaataaagttaaaaatgatatttttttatgtctttaaaaattaataaagataaatagttataaccactatc

SEQ ID NO: 202252 - DNA, 1468 bp, Cannabis indica
aattctgggtccgccactgatccatagtgaagtatgctctaaaagtacatataccgcagtgggatgggtagaaatattttgtattgctaaatgttgttgtcattgttttatattgtaatagattgtgttttgttgttattaatagctttaattttttgagaatgttcaattataattgttatggtggtagaattttagtaaaattaggactatttactagttaataaattagtatactataattagttactagtgagtgatttagagtaatattagttactaattataaatagtaactagttgtaagaaactagttagttacaaattatattagtaactagttataatttgttactagttagtaatatgaaagaaacttttgtcttaattgctaagattttttaaaatcatagcgttaggcatctcaatcaataaaaacataaaaaaaaaaaaaattagagttcgagattagttgttatcttttcaaaaattgtatcttgcttgaaatttaagacacattgagattgagtcacttgttagtaatttagtactaaccatttactagttagttacaaattatataactagcaactagtttttaaattaatttttaattttgtagtattttttttttattttataagattttgtattgccaagtattgttgtgattgggttatcttattttaaattgtttttagtttttattagtagctttaaaatttttcgaaacctttcaattatagtcgttatgccactgaaattttagtagaattaggataaattattcgatttaagtttctcttaaacattcttgttatgatttttatgtaattgttatggataaattatggatgcgtgaggatagagagacactataattttaggcaagattcgatgtatatatagaatttaccctaaagaattcactactacataataaaatttttgtgtcggtttgagggacggttgttttgaaaaatcgatactaaagacaacccaaactctaaggtgtctgttcacaacttacacctataacgactttaagtgtcagtttgtgaccgacactaaaataataatcgagaccaaaaacgtgaaaaataatatacatacagattaagtataagtgttagttaataaccgaccataaaagaacattttgtcttggttataaattgacacttaaggcactttcttttaaagaaaataaaaaaaaggtataaatagaaaccctaattttaaaaccctaaaacactatcatttcctctgtccctgtctatcccaatatctctctttctctctatctttctctctctcgttgcattggtacagtgccatagtagcagcaggtgcaagaattttaaaagccatggtcctagaggatcatcttgctctctccctatcttgatttcttggccaatatgtatatcctgataaccctaagctctctctctctttctctctctct

SEQ ID NO: 202253 - DNA, 1069 bp, Cannabis indica
agttaaggtggctaactacttggattcgtttcttttgtatagaaattatgcttaggaaggtctgtcaagatgaagttgacttggaagaggaaatcctagagcaagaaaacgctccaaagcttgttctgaatgatagtccatgggagatggaccaacacgttaataagtttaggatttacaataatttaaggaaatatgggacccaaaggggcctccaaagtgttcagggacagttctggaacatgctctctcttcaaggggagattcctagcaagtgcacgaaaggaggcttcgacatttggagctggtctcacgtagaaatgagtgtacacatctgcccttgaggtgttattttgccaccttctgtgccatggttggagtagtgcccttcctacttatacctcaggcgtatagcctaatgtcaggatgatatattttttgtgctcagcacaagaaacctacaccgacaccaaaagaaatcttgtatttctacaagattaagtctcaacttatgagaggtcataaggagaagataggtttccataggttggagcgacactcaaagagtattgcctgcccaacaagtttcacaaagtatacatatgactttcgagattactacttctacacctctggcttcacactgaagagagtttccacactcaatttggacttcaatatagcaagtgagtgttatttccttctttgaacttcacattttgttttcctcctagttgttgtagtctgacatgtcttttacctctactaggttgtcttcctcaatccccacttaacaccctactagtttaggtgtgttatcgtgattttatattaactgtgtagttcgttgctaatcaacgagtttattaaaaatcgtgaataattaaaactttattaattactaacaatattaaaataaactaactttatatatctaggatgccgagttttaaatatttacaactgattcaaaacatttaatacaaaagttgtcgcctagcgactaaataaaatacaaccagctatcctaaagatcgtacactccacttcattcgctcgctctcacgac

SEQ ID NO: 202254 - DNA, 1052 bp, Cannabis indica
ataagtttagagtggttaacccaatatggcgataatattgattgcaaggaagtaatggtagcataggaaccatggagtaaaacattagtggtaatgataggaaaataatacgagagtcttagatattggtgaaccagcaccatcaacgggagactcactataaggttgtatggtagttcataccaaggggttgtcagtaaaacagaatatatacttgaggaatgtatatttctagatgtgttttaaaagattatcaaaatttctaccaaatacaaacaagaaacttcaggatcaaggaatgatctttgattaattgttatcagttgagaatttgagaaatgggtacttccagtttagatatgggtggccggatgagtaatattgcctctaccatatacgttgaatcaatttactttacaacagtggttaactataaataattgagaaatttaaaagttgtgtcagtttgagcgaaattaatatagatttaaataagtggagatgaagaagattcaaattgacaataaaatggaattactcaaggttaagtgaacaatgccgatgaggaactgtaagaggccaatgaaggaagtgatgtaaattagatttaattgacaaagaaataaaagtaagaacgacaaaagatgcattttctttccgataacccatcatgagcttactttagagttaagcatacttaactgaaaataattacaagatgggaagtattctggaaagttatctcgaaaagcgtatcaataaagaaaaagtatgctatgaagattcatattagaatataggatcagtagtcgttccaaaaattatcaagagaaaggaatgtgttaataagtaaggaatgttataacttaatatccatcagagaaaacattcaacttattaataagttcaataagtacattaacagctagtaaggttacatcagcttggaaaatcccataagaaaaataggaaccaagtttttagcaacaaaattttaactaccaaatatagttggtagtagttaattaatattagttactaaattttggtag

SEQ ID NO: 202255 - DNA, 1093 bp, Cannabis indica
tatatatatattatatatatatcgtactatataaatatttaaaaagaataatttgcttttataaatttcataactgccttcgaagcgattaaaaaaagatttgattcattttgagttgtagatatgataagaaaaaagatttgagtatgaagaaatttatcgagtttcatgaactatagatccccaatctcgatcttcctagctatatggtattatttttttttctttggaaaataaacatgtgatattattgcttcaacaaactgaagtagattatagcgttattaacaaggcaatatcaatatgggattgataacaaaagcccctagatggctcacatgtgcatatgattaaattatatcaataaaagattagcaaagatattcaaaacatatatatttaagagaattatcccatatatataattattttttaactttttatttattaaatttacggtttgggttgttacagtagttaatttattcggtgctttctatgtgggttgttatacgaatttcggttgcgatttatgttactttgttagtcagtactataaaagtatttctgtgtgtggaattccgtaaaaatgttaaaaaaaataaaaattcttttgaactataaaaataaaaaacccttatatttatatatattatatagatattccaaatgaaaatgggttgaacttgacgatgaaaaattaataattttgaggacttcatctaattttatcaaagttacttagatagctagcaaactgtaattttgttaagtgattaattagtaattagagactgttattaattagttagtgacaaattgtttgttatttactgtgttatcaaagttggtcaataaatacaaactccaccggaagctgactggtaggtagtaaagtggattatctttttgtgatttctcttgcactttatcaaatagtttgcatttacatttgtcttctactctctccatacgtgtttctgtgatgttgactaggttggtgaccccaccgatgattctcattaccttgggctattgtgttttcttgactactgcatcttaatttcccaaagttctaacaataccatgtgtc

SEQ ID NO: 202256 - DNA, 850 bp, Cannabis indica
tatatttaagttttctcatttttaataatttatataaataaataaaccaagaaaaaaatctgtactataaccgtgccatgcacataccaatgtcaaagctaagattgcttatgatttctcatatggctaaagtgtaaagaactatttgtagcttctacataggttacattgaaacatgtatgtaattgtaaagctcttatactctatttgtaatgttctcttctttcccttcttcatgcattaactttttagtcttttttttcaaaatttaattccaataatttggtatatatttctacataagacaactacaagtaatatacttacaagtaatatgatgaatttttcataaatttatcaatagtctttgttatagatttttattttgtagcaagaatttttttatttataatattttcttcctttaattaaatacatttatatttattttttcattattaattattaaatttcatttaaatataagtaagatacggtcatgaaaataaatttttaactcaaatgatgatgagtaatatcttgatttatcaattattagaaatatgtattttaaatttatatttatttattcaaatgatatattcataataacttaattaattaattaaaaattattatttttaaagttcaaaataattagaaaaattaaaactaatttttttaaaaaaaaaatatcacaacaaaatataatcgtacatgaaacgcattttgttttttaattttatataaaacatgtcattgtgtcaaatttagcacacatgaaattaatatattttttttatcttataatattgctattaacattactaattaactttaacatattttt

SEQ ID NO: 202257 - DNA, 926 bp, Cannabis indica
tggatagaaatggttcaaccaatttaatacatctaacatttgttagattgatcggaattaattgaatgggatcgaattgtaaaatttaatatctaatatatatatatcttaaatttggtctaataaataattctaacgattaacaaataaatataatatattaaattaattaaaattaaaaattaattaattgtaattggtttgattaaaaatatttaacatttaatttgatgatgatgatgattccactggaaggagtcatattttgcatgaccttgtctctcttgaattaaacccactcttactaatactatgataagtgatgatgtgcataaaacaacaacaagtgaagttagtaactactaatttatatataatatatgtgatagtttattagaaaagtgtttgattgaaataaatgtgaggtaacggccaagggagtgcacgtgtgcaactgaacaattcacctgacacacacgtgcacaaggttggaactgaaatagatgatgcttctgttctgtctatgtatttccaatccattttccaatagagtttggccacgttgttgatcatgatcgttgaatactgttaccgtgtgctacaagggtttcagttcccctacaccacatgtggatggaatgatgtgatcaactcttactacttcaaatcaaagatgcgccctacgttttcttttttactttttagaatctaacacttggaagttggaaccataaaacaacttcatttattgatttatatcttttatctcatatatcaaaatgctaaatattatatagtaattgctaaacaccattgttataaagcacccacctatgacatgacatatctttgttggtgtgaatttgagagagagagagagagagagagagagagagagagagagagagagagagagagagagagag

SEQ ID NO: 202258 - DNA, 1675 bp, Cannabis indica
acaatttggttttgtccatagaatctttctagttggcattgcccgcccctcggaattgatcatttttgttactaataggagggggacgttgacatcgcgaaatgttttcttgccctacctcggccttgccttgtttatgtagttatcggtgtatagttgattaatggaccaatttcttttttccctggctcagatttttggaatgcccccaccttatgatttaaaatcaatgaattgggagagaaatgggagtgaatcgatgctttaaaggcttactcgacaaagcaatataggattctaagataccatattaggttttaccaggagatcagtaacaaatcaggtgtaacttgtaagagcttttccataaccatattgtgagaactgaggaagttgatcaatttaagtttactcaagaaaggccaaagaaaaggattggtggtggctgataataaaatatgattctaagatttattctaaggggtaattgaattacattgaaatctgtcaatgccagtattcaatagatttattatatcatcatggcttttcctgtactccaaataactttattacatgaactactcaattttttgttacactatccagtccattataaaaaagaacagaataagaaactacttgagaaattgtgataacatctaccatcttattaaataacccctcaaaacagcatagaaggacttattatggggaatgatgtagcatttttttttattaacctcacgtgagtaaggtcaatctcacaaaaattgtagctaaatagcaaataattaaatttttacttttatttggcaaacttataatttgaatgacgattgtaattggttaataaaaagaaagtaataaacaaagaggcaattaacaatgattagaaatataggacatttaatttcaattgcatcaacttcttatggcctaatacaaactagttacttcttcaattcaatgtaataacatattaacaattcaatttatatgttgtggtttcctaattctcatttgtcctcagtcacacttgagattgaaaagttcttatatggtgtgggaacttatgtatctattgatctggcaaccctcatctttgaaaggattctcgaagcctcaaaaacaactggcactcgtaacaaactcccctttctaagtctcattcaactagtgctcatggctgctcaccctcctcttacaactcatgattatcaagttccaaatcctgtactcagtaagagttttttatcagttgttaacaggcagccctcttcgaccactccttctgctccaaagatgagcaaaggcaagtctcctctgttcaaaggattatcggattccaactggcaggtgcaaatattttttgattttaaatccttcatcaaaagatataagaaggatcaaaagcgccagcttgcctttgaggcctccatgtacaaaatggtttgcatcatcaagtctactgtgttgcaaaatcattatgcagatcctttaactccttcaattgatatatctctccctccgtttcatagggatccgtttggtgcatcctcagatgggtctggtagtaacgcacaagtgcagggagagccgtttgttctgccccagtctcaagtccagtgccacaggatctgcctcctacagctgacccgtctccagtaccact

SEQ ID NO: 202259 - DNA, 641 bp, Cannabis indica
ttttttactttttttttttcataaacaataacttgaaccttttctccattttattattccactcccaattcattccaacctcacccagtttatcgggtaccagattataattataatcctgtcttgtatccatatgaatatggtacttctcctacctcatattttccatgtcaatacgaaaatggtatttctcctaccccatattcataccaacatggtacttttcctaccccatactatgatcattctcctaccccatatccataccaatatggtacttctccatattcgtatagttcttctccatacccatatacttataaataagagttaattttcacctagtcttatgtgttctgtcttttttattttataattattagtaaattctttttcgtaatattaaacttgaccaattgatactattgtttagagtgtaaatgctatttagtctttatttagtcttgtttctttttgaagatcattaatgtacacaattgataattatgttaagatcgattgcctatatatatatatatgagtatatcaatgtttaaaattttttttgatgtgtttctgaaattttgattcctgataaattatattatatagaaaagggaaataatagtgaatttatatat

SEQ ID NO: 202260 - DNA, 1232 bp, Cannabis indica
gcacataggttgttatgcttcattatgcattttcatgatcagatgagatcatcatcttgtaaagtgatgaggagtcaaactaaagcatccacccagggataaacccgttgacttgttgaccatgagtattgttgctcatctgctctgttactcctgcgttatacctataaacggtttttttttagtaaatattaatatgtatatatatatatgtgtagaaagagagagagagggaggaatcgtaagttacccaatctgcaaagtgggattgcaatctaagggttgaaagatcaagccttgagattgaccatgctgatgaccgtacgatatagcttgctgctgatgatgatgatgatcatgttcactaatatcccatgattgacgaaagttattccttgagctaatctcatccagctgccaaaattagtcaaaatataacatgattatttgaatatcaaacggtcatgcatgaagagaacaatgcaaagctatcccattatatattacacatttttttagtgggaaaaactgtgatgtatattaataccttaactgtcaaagctctgttagcttctattaagttgtgttcctgaaatgttaataccaatcagataaaataatatacaatagtaaaaacagctagctatcggtatatatataagtgttcttagtgctaaccctgctttgtagatcagaaagctggtcaagcatatattgagtctgcaaatatttcaagaaccaaaagaaatgtatgaattacacatatagttaaaatatgtatatgcaagaattattaatataaacaaaagttagattagatcattagaggtaataataaaggcaaataaggtaccttagtggacctaacttgcttgagtgaagactcaagttggcgctcaatctgctcaagctctttcgtatttagcgggcccaagtcttccccaagcaggtttctaaatgaaaaaagactcattataattaactaaagtagactcatgactacctagcttaagaagattttttatataatatgtatatgcaatgtaagtacctttgagttcgttgtaggtactcaaatctagatttaagtttcaggtactccctatagctgctctgtaacagaaaaataaaattgaagtcattaccgagaaaataagctgacataaagcaagtactaattcttgacatttgacattgattgaaatatatatgtatgaactgtagataacatc

SEQ ID NO: 202261 - DNA, 1004 bp, Cannabis indica
aaaaaaaaaaaattaagtataatttcctcaatattatatttatatttattatctttaattacataaccaactaaaatatatatataaatatatatatttgcattatatttaacccaatgtcctaatcttaaatgttcaacacacagatacaaaccaatatataaacatgatttcagacatatgctttgaccaaactaagaaaacaacataacaataataatttattactaaatcaaaaacacgataagataataggtatctagtacctagtcaataaatcagtaacatcttagtcaacaattacttgtgctttggaaataattacagtaactaaccgaatttcaacaagtaacatgataccattttattaggaacttaaacattagtgactagatactacacaagaaaaattaataagaatactaaaataaaaaataaataaataaaaaattactactaaattaaagtaacgataacaacttattagttttccacgtagtgattgattgttactaaaacatctcttattgcactaaaaaaaccaatatattaagtcacttaaatattgtatttgcctattcatttcagggttaatatcattttgaatcctttacaaaaattcttcgtatgcaggtttggcgttgatggttggcgtcggggatttggtggtttctcctctatagaatggtattactgcagtagcacacgttttgtagctgccactcttaacaatttggatctcaccttactgtcatcgtggtaagcgatatgaaatttctttctcaagctggtggtggtcgattcctttctccgggttagtggtggttgatcgggggtgagatatctattgtccgcaaggtaagttattttttattcttctttcaattggtggaagaagtattgagctatgttgattatgttctcattatttttggttttggcttgtgttatttccttgctctaaatttagttttcaacaaggtaaacttggatagttttataga

SEQ ID NO: 202262 - DNA, 1316 bp, Cannabis indica
aaatcttatgaaagtggcccgaattagatttagacatctgaagactataatatttttttatatataaattttaattatttttttgctcaagtgaagattataataatatttatatgtttggtttggatgtagaataatattgctgtatctgtatcatttcatatggtctacatatatttatatatacaaaatattaataggtacttacgtaggtgtatatatatatacatatatatatatagaagctagagtactagatatatagttaagtatatatatagattaattaataaagcaagtggttcacaagtgtccaaatttcacaattgcacttacaaatattttagacaaaggtcattagtcattgtattgaataagacacaaaagtgcttctctaaaggaaagattttgataatcttttcttcctcatcaattacttattattaattatattaataatcaattaatactaaaatgtatacttgcttattgaaactatagaaatttaggtattaattaaaccccatatatatatatatatggttatacagtaaacacaaaaaataatgccaaaaattaataacatataaatcatggcatacatgcaaatatatggaaaacataatatattcaatatattattgggttacagcatataatatatattgtacgtacataatgttcctcatgagtttctttcaatcaaaatgctctttctctctcatcacatatcttattcataaaaagtcttagtctctaagtcttgttatttatatattaagactttgtaactgttataaacagtggaatatatatattaatatcttttctatacatagttagaaacaaaacattgatcatcattcattatagtactactactactaaccatcatttcattttttttcttcctttattttcccttttcattatattatttttaaaccaaaaaaaaaccatatctcaaattaatgccaattccatcaacatgtccatcatctaaaacaacatcttcttcttcttcttcttcttctttttcttcttcaacactaaaaatctcaatggagacacttgtactaaaaaccaagaacaagaacaagatcttgtattggatcttagtcttaataagtccgaacacaatttcatcgacggcttcgaaagttcaaattatactcatccggaatcatcactagtagtgatcttgatcataatcatcaagatcaagatcaagaagaagagaataaacaacaacaacaacaactgaaaagtgatgatcaagatcaagatcaccgtgatgatcatgatgatcatgagcc

SEQ ID NO: 202263 - DNA, 765 bp, Cannabis indica
tggatcattataagttaatgatgatatggacaaatggaatatatataaatatatatatatatatatataaaatacatgtatcccactgagaatacatatatgatcagaacgtggggcttgttcttttgagttcctcagtttgcctataatataatatttttttaatacaattattaatgagtctattctttttttgagccttaaataaatattatattatttttgttcaatgaaagaaggtattaatttgaccttaggtcctgtaccggattcagttgacaaatactaattatttctctaatatatattggattatacatcattgttaaaactactgttaaatattaagtacaatacatatatagtagaattaataagtaaatacattcctttgaaaactataaagctgtagatgctggttattaattattggctttgccatgtacagttttttttgttgtgctttccctaagttttgtattgtttgttctttggtattaatgagattacttacttaattacttactactactactaataatatatgtttttttaaccacatataccgatcaacatgagatttttttttttttttatttcttatattttttttttctcgccaaaatcaaacttatgtcaatagaaatgaattgttgttaatcgaacaaaacataagattaaaattaacattatgaaatccctccacttatattggtaaatatagggattattttagaaactaatattgagttaattgggatgtca

SEQ ID NO: 202264 - DNA, 854 bp, Cannabis indica
ggatgcctgggaagagcttgtgagtgcacaaacaaaaatgaactttttattccttcttgcatatttacataatgattggctaattaagtgtaatcttgactcttgatggctgttggataagaaactctaatttgccctgtcagtgtctatcttgcttcccttagtacaccatgaaggcatctgaaaagcttgattttattgtatttacttatcaagtcttagagtggactgcttgttttgttcaaaatttaccaatggctttcatttattagtgaatctaaaatatctaagatatgctagttgacgtcgcatcttttgttattttgaatttgtaggtgaaggagtatgtttccacaagagttggtttgagaagggtatgtctccttattgatacaaaatggggaatgaagccaagggatcatgaactcattgacttaatggaaaggtacatagactgacttgtaaatcattctcatggctaccattattattaataattatttcacttattgaattttcaactgagttaatggaatatgcacgtatgcctggtagaatattactttgctggaaacattatacatttaaaaacatattttctggaccttcgaattctgcatgtgaactttgcaaattccaaaaaatagtgcaagcatttgagtttgatgatgtaaaatacttgttcaacagatctcaaaccaaataccagattgttttgaccaagacagacacagtcttccctatcgatgttgcacggcgtgcaatgcaagttgaagaggtgaacatagaacaagtcaagtgacactaaattgaaatgggcgcgatcttacttgcactaatgcaccggatcccat

SEQ ID NO: 202265 - DNA, 1573 bp, Cannabis indica
acttcccgacaattaattattcggatgtgagaataattattggtattaatgagactgatgaaacgcataattgtggggtgtgtatgagtagattactagaccatgaaaaaatgcgtatctttattcccaagtgtgatcacgtattccatgcagattgcattgataattggctcaagaaccacagaacttgccccttatgccgtgtcgattttttagacggacctgacaacgctcaacaccgacgacgaccgccagacgagatagaaatgcaatcccaatctcacgtcatcgttgatattgttgatgaattacaagtaagaacaattagttacgcctgtgatgactagtactggaggcggctttctatcaagaattacaagcccatttctacggtctcgctcgactacccacagggatccggagattaacgctcagcgctcaattttgaatctgaccgaccaggccagggaggacttacagcgccgccgccgccgtcaattggaacgtccggcgaactaataagatagaccgaccggtatatgagtttttctgttaatattggaacaatttttcttttcttttcttttctttttacatattaatgtctatataggccaatgttagggcttcaaaggttattaattcagatacgtaatttgaatcttgatgggcatgcttattaatctttgtagctaatattgatttcatataataatatgaagatttttagtatcaattacttcattaatatatatgaatataatacaacagcttcgatcttgaataattaaagtacatgatttatttattgcgtaaactttttttaaaaaatgtctttgaataagttacattagaagaaaaataaactttttattagtttgtttaatattcctaatcaatattacactcatttaattaaaaattattgtattaattaataaacacgttcttgtgtatgaccatataaacgattggtttttttttttttttttactttttattcaaatggaggtataattagtaaaattgttcagtattcgaataattaatttatcatttgtcatagattgcttttaaaattttctgataatgtgtgacattttgaaccggtaaaatgtacggaagtggcaattttaataatttgttaagggtaaattcaaccaaatgaattattgtgaattttatttgaaggtgagaaaagatcgaccttaggtgtaatttttgaatctgttaacaacttataattgatgctttcatctcctaaattttttaatcgatggcgcaacctttgtttctaaatataataaaatttggaaaagtttttaaaaatactattttttatattttatttacaattttacgacctacaatttttatttataaaaatatacttttaaagttttaaaattacaaaaaataatttactataaaaaaaagtaagaaaacaaataaaaatcaaaccagaaaagcaaatctcacgatacctataaatcaactataaataaactagaaaataactaaaaaaaataactttaataacaattataatataactataaataaataaaaaaat

SEQ ID NO: 202266 - DNA, 873 bp, Cannabis indica
tgaactttgggaggaactgaaatctgccacaattttttccagccactatcatcttgtgtaaaaagccaatttccacttgaagattgaaagaacttgtacgcactcttgactgaataaaatcccgaggtttccatattccaacaccaattatccataaagctggagctacttaactgtatatttttgatcaagctattatccctctcatcaaacatgtcatttaaaatttccatatcccaagacctctccccaacattcagcaggttagacacttgcttatcaacaagcccaggatgtgttgtaacaacatatgggttggtatcatggggcaaccaaggatctttgagaatactaattgaggaaccatcagcaactgaccttcttgcaccctttcgaactaaatcttgagcagcccatatacttcgccaaataaaactaggattctttcctaactcagcatcaagaaaggaaccatgaggaaaatacctagccttatagatttgaccaacaagagtgtctcccatcgtgagcaaacgccatccttgttttcctaaaaaagacaagttgtagtccctaaggtctcgaaacccaaggccaccaaaattcttatgttgacaaaggcgtttctaactcacccaactcactcccttacttgagtttgaatgggatttccaccaaaaccgcgccatcatactctcaagacttgaacaaatctcttgagtcaaaagaaaaacactcatagcatagcttggcaatgcttgagctactgactttatcaatacttctttaaccaaaatgagaaagttttaataggacactctctctttaacctataatattaagagcaaatcagattaagatcaaattaattat

SEQ ID NO: 202267 - DNA, 2266 bp, Cannabis indica
atttaggatgttaattcaacatacttgttagtgaatctagatcctagtaaaatattcccaacagtgcactggtcggttgtatagaataatattgtgctaacaatcttacatgtttgtttgtcaagaattctgtttcactggatgcttgtacttgttcaacctgttatgcatacagtcgcctacttggatttcaaaaaagaaaaaaaatacttgcatgtccgcaagacatcattactacatcacaatatataagtttgtttgatatttaatattctaattttacgttttgtgtagctcagtggaaagttacagccccagtaaaaattggcacaatatcagtcccatcaaatggatgactctgagatatcgcagtaactagatagtgtacaatgtagattctatgttatgaagtttattgaaggttacatgaacgaagcagatccaatatgcgccaataagaagagataaatcatatcataagtaaatttatgttttttaagtactttatttcttttaatttaataatttcaatgttactttaataatttctttcttttgttttacaggcagtaagttcaacacctcatacacaaatgatcatattaatgttttacgtgatcagtgggtagattatgtgagagtagagatagagcgacaaggaaaattatgagtatatatctcaattcatgtttatattttttattaagtaattagtttcattaaacttacgagtcgtgtactttttaatttagttaaataaatttatatgatacaaatatttttattatattacaaatattgttggattaattattgttgctattgtataaaattattaaaaatttgaaatgtataagcaatacacaataaaaatggtagaaaatttgtagtttttctctattctacaacataacgaaaaaaagcagttaaacgtaaatttttattgatttgctcagccgactatagtataatcgaatgtgcaaaaccatcgacaatttttcttagtatatattgccgatggttttttagtgtgagcaaaattttttaccgttgcctatttttagtatatgtaactatgaaaaactcttccaaaattaataatattaaatagtatgatgataagttggttcaagaacaaataataagagagtagtataattcgaatctttagaatgtaatttgttttaaaagacacgtgcttgtcttgagcattattatattttaattaaactaaataaaaatatgtcaataaattaattaaatccaacgttttaaaaaatcccaactattgctactatgatagtgtgtgaatattaaaatatgtatgaatagaaaagaagagaagaagttggtgcttctatttggatttcagagtcagaaaaccaatttctttccctttgttgatataatgtagatccatatacatacgtacatgcattataactaacaggtttagcacattttatttttccaaatgtgatttcatttaattcaatttaattaagataatggattttttgtggtctgctcgtgtgccactggttattatattactctacatctctattaatatatatgttgtgtggtgttaattagtctaagagcatgaaaccttgcccatatataataaaataaattttgtcaatttagtgtgtagatgacattactttcaccatgttgccttttcctaactttctcttaacattttttttagggaaattactcaatatattgtttttttaatttttttcaaatttatggtttgggttttaaagtggttgcaacgctagttgtaatagaggttttatgtgatttttgattgtaatttaggttgcagcgctagttgcaataggagtttctatgtaaaattctagtaaaataacaaaaaaaaaaataaatatttttaagtgtaaaaataaaaaaaaccatttttttaactagataaataaagattaaaataataaaaataataaaagttaatataatataagtggaaggtttcttccatttaaaaaagtttattatctcttaatatttttcttaagtcaactaatacactaatagatttctaaaaataaataaataatgtaggagaattatcttatatataattttttatttttttttaaatttatagtttgagttgttctgaaagtttttatgtgagttgctatatagattttggttgcaatttaggttgttctgttggttattatataggtttctatgtagatttctgtaaaaatacaaaaaaattactttgaag

SEQ ID NO: 202268 - DNA, 1150 bp, Cannabis indica
atgatgatgatgatgatgaacaggttcaaggaatcgataatggtgatttgggtattgaagaagcttcatttggagaaaatgtgttggaatttgagggtagagaaaggtgggtttttctttgtttctctcattttaattttatttatttatttttttctaaaaatctcaatgaaattttgaaaattattttaatttaatcaattcaaaattcatgttactaattgattaagttacaattcaaaataatttttgtaccgttttaactgttgttttagccgttgaagctcttccccttttttttcttttctagggttttgttttctttgtcaaaccatgaatataggaaaaattcaaactttaatctttggggtttctcctttttgtgtggactaattgattcaatattggctagcttagcaatatagacgaacaattttaaatcttttttttttcttttttctttttgtaagtattcagtttcccccttttcctcattgttaacttcttttcaaagttcatgtctttttttaagaaaatatattataaaacttgggttaataattatataaactaaaattatagaattggggtttagaaattttgggtctctgcaaaatcattatattttggcttaaccaaactcaaactgaaatttctcttattattttaaaatggtttttctctgcaattgttatcagagtcaactgatactttcatttcatttatacgtaatgtctcagctcagactaactttcacaccttgaagtgaagctaaagcatttatttttatttttttggtcaactgatttagactttaatgttttatcagattttcattgttatctgctacaaccaaaccctgttctctctcgaggacatttatgttatttagattattagtgagtttagtattccataaatcttaaaaagattgtcattttgagattttggcttgaaatattgaccaaataggtttcttcctcaactgttttttaggacattttagtgaaaaattaaaccataatgtttgttgttaaggaattgtgctaagttattttgtgatttaactttctcttattacattttctggaaattttctgtcagagagagagagagagagtgctgcttgtttttctagtgtgatttcaga

SEQ ID NO: 202269 - DNA, 1663 bp, Cannabis indica
aaaaaaaaaaaaaaaaattctggttttaggtatattgtataaatttctcttctataaacatgttttggatgggttttgtttcattcattcattatgaatgttttagaattatttacaccatataatgaaatttttaatctcttttaatttttttattttatgagaatttgagagagagagagaaacagaggaaccactgtcaactacccaagtaaaagatcgagtattgcctgcaagatttgatgcagcaggggtcatgacagcaggttcgggattggtgttgtggctgagttgttggcttaacaatgaaatcagctgttgacatcttgtggaaagatcattgttgagtgaggaattgtctgcatcagatttgtcactggggcaggaagcgaggttggctttgcctttggacttttcttgcttctttttgtcaccataacctgggggaaatccatgcaaaaaatagcatttttctaccaaatggccaggtttgccacaatttgaacaaaaagggcgtggtttcttggttcttggtggattgttggagctggaagcagcagcaagagggatttccacagaaccaagagtcctttggcgttcttcttggattatcatggcaaaaacccgagataaattgggaataggttcattgagcaaaatctgagctcggactaaggcaaaagactcatttaaaccagttaaaaactgaagaacttagttttggttatagtagtctaaaaaaattttcatggctccacaagtacaagatgtgatgggttgaaactctttcaactcatcccaaatagacttgagttttgtgaagtaggaagaaacagaaagatcaccctgttgtaaacgtgttagttgggtttggagttgaaaaatacgaggaccatttccctcattgaaacgatcggcaagatcatgccacatatcagtggccaaatcaaaatacatgatagattgagcgatttcaggggaaacagaattgattaaccatgacattaccatgttgttacaacgaagccaagagttaagggagaaattaccattctcaggccgaggaatagtgccgtcgatgaatgcgatcttgttcttggcggtcaaggccatagtaatccctcttttccaagcttggtaattaggtccagtaagaactgttgaaacgagtaccaatccaggatgatctcccgtgctgaggaagaacggacttgagtgatcttctgtgaggtttcgaacagcaggagctgctgtgttgttgtctgcaacagtggcggagttttcttgggtgtgaaccagatcaggttcttgattctggtttggaccatgttgatttctccgaggaactgttgaggagttgtgattgcaagttggaggatgatcggaattgatcgcagctgctgtgtgatcagccattgatggaggagcaccatcttgtgaccgagttgtgggtcttgccatggaagctgtgggcaaggtttcttctgataccatatgagaatttgagagagagagagaaacagaggaagagtgaaattgtattactctgattaatctgttgaatacattggagtactgagtttatatattactcagtagcaaaggaaaaaattagttacagatgtaactaacatataacagacaaagacttataactaatcct

SEQ ID NO: 202270 - DNA, 1071 bp, Cannabis indica
tttagactaattaaaatttttaacttttgaaatttattagatcttgatcccgaatatttaaaattgttaaaatttttatctaaattattaacattcatatatttaaggaatttcgtttaattttactaatggacgtgtgatgtggataaaagtttaggagcacaatttagtatgtgccaaagtttagaatacgatttggtagatgttaaaatttaggtgacacgatcaatttaatacatatcaaagttcgaaggtacaagttagtatatagacaatttagtaaattgaatgaaattaaacagaaatcattaaatctaacaattacaataacaatagttcgaaaaaaaaattaatagcctaaaaagtttaaacgcggtacatgtcaaagttttgtgatcgaaatttaattattattttttttttcaaccatcttaatgtaatactgaatggaaaccaataaaatttacaaacttttttctttctttcttgaccatttatatagttatagtttttataatcaatgctatatatcacgattttatataataagtaatatatttgacacaaaaatttactttatattatatttgcattaattttagtacaatgctctaatatgcaattgtcaaagatgttgggcattacaaatggaagaatgcaaagccagcatgtatagtgaaaatggccttgacgaaagcttatgagacaggaatttcattgatcaagtgatgttcttaaagtacctcaaaaggtttattcatctagtcatgacttgtatcaaaactctcagacttcttttaatggtcaaaatgagtccttgcatggaatttttcctttcataggtaaggtgattcaaaataacacctcttatgcttttctaattttaacgtcatgttgttttgtaacggggattacaaatcagtatgcttaatgctgcttggtgggttcacaaggttcttgggccttcaagccaatgtgggatgccagaggaagaaatgcatcaagatttgtaaaaagtgatgaacttccttttctttatatatcttggtgttattagaatattttatttat

SEQ ID NO: 202271 - DNA, 546 bp, Cannabis indica
catcatgatttcaagaatgttgtgcttaatgactggacgaaaccagttagagcaaaggggatgagagctttatatttgaagttaatgaaattaaagtgcaaattaaagaaaatcaacaaagagtcaataggagacattgggaaaggctaccaggcggctaaaactcaatacttggaagcaagaatggaagctcaaatgcataggcacgatctcaatctttaattaagggagaaagaagcagcagcttattttcatgatcaagaacacatgtatcatagcttcttgaaacaacgaagcaagtgaactggctttgtaaaggagatcataataaagcctttttaccatgcctttttgaaaaaaagaaggatgcagaagagtatagtttcttataccaatgatcatggagatatcattgagaagtttcctgaagtggtgcattttatgaaccactttcagggattcatggggactagcatcctaacttctcagaggctaagaaaagattgtattgagcaaggaaatcgggtgaatgtcaaagaaccgctg

SEQ ID NO: 202272 - DNA, 1124 bp, Cannabis indica
ggtgtttaataggtgacatggatcatttggggggtcgagatgaaaagagtggtgggcaaagctaccccaatcggttggtggaggggtttcgggcagtactaaaacaatgtggcttgcacgatttaaggttggaaggttacccgttcacttaggagaaaggcaaaggatctagtaatagggtggaggaaaggttagataaagctctagtttcgcaatcttggcttcatttgtttcctttagcttaactttataatgttgagatttctacttctgaccattactcgttcaatcagacccctacccctctcttctcccccttgaaacctccatagttgccagtgcccttctcaccagaactctcttcctcttcttcctttctcatctgaactcgaaaacaaacccacctgaactcgttgttacccaccatcacttatgtcgtctctctttttccagctcgcctaagtccgatttatcccatcaccacaaccagttcatctccacgacccaacgaaatattttcatttttatacttcaaagcggtttttttttttttaatttttatagaaattcacatagcaatcaacggaacaatctaaatcgcaataaaaacttacatagcaatctacatagaaactactagagcaacctctgaagcaatttaaaccgtaaatttgacaaaaaaaaagttcaaatataatatatagggtaattccctaccatcttctttcctcatctatgttcactttccccgtctaatacttagaccaccaccctagatggaggtcaagaccaccggtcctcctctcaagctccacctttcctcactccttagtcctcccaaactccacctcactcctctattgaaactccacctcgaatcgaatagcgtaggagagcccacttaaaagtaagatctgaaaatttgaacaaaagaaaaaatgaaaaataagaagatgagatctcttttacgtggtgaccttgcacgagttcatgggttcgagcgatggtggtggattgcagtggcaatggtggtgggtagtggtctgtaaatgaagaagaaagaaagcgagagggaatagggagcaataaaaaaaaaatccgaaaaagataaagaaaaaaaaaaa

SEQ ID NO: 202273 - DNA, 986 bp, Cannabis indica
ttttcttccttttatttttattccacaactagtttagaactctttttctaatttgaattcttattttaataaatattatcattaagtaaagtgtaacatattaactgagtttcataagtttttttattacaaattatttttaaaattaacatctaatttttaacttatatatatgtcataatttctaaattacatattttaacatcttttcaaaaaaaaaaaattactaattttatttatctatggtggttttgcaaaaactcttattttattggtagcattaagatggactcaaggtgccttgttttcagatattaaaattttattatctaatttttaggacttctctttgttatgtttgtcgtaactttatgatttataaattagttaagcatgtcatagataataaattttcttagatgaatcagacccctcatgtttgatcaattgaagtgaacatgtaaaaaaaaactattaagtagcattagaatttgaaccactcacactacaacaatattgcatataggtgacatttgattttgtaacatttgctaaaaaaatgtaacaaaaataatgatttaatgacatttagcaaaaaaaaagtataactaaataatgtattataatttctaaacttattttttttaataatgctttttaaaaaatgtcatcagaaataaattttagtaacattttaaataaatatgagtataactaaattttaatgatatttagtaacattttaattagtaacattcgtaatagatgtttcaataatagttatttaatgacatttagtcaaaaatatcactttagtatgaataaataacattttaagaaaaaaatgtgattataagtgcatttagtggcatttgacaaaaaatatcactattttgtagatatttatctttagtatcattttaaaaaatgtcactagattatttcaatagtgagatttgtaaaaaatgacacaaaataataaattt

SEQ ID NO: 202274 - DNA, 919 bp, Cannabis indica
caacttgtgtataaggaggggtagtactaatgtagccaaatggtgcattttaacctaaataagaagtaatattagtgagaattttcaaaaaagctaacacgctccaactcgaaattatgttctaagtatctttcattacttgaagtaggcagcagaagagttcaaatcattaaaatgagagagttaaaacatcaaagaagcacatactaacaaatttgtctgtacgttctaagaacttttcaactcaaacagtatgaataactgaggcatctagaaaccctgtccattccaagttcggacgcaagacattcgtaacaacccatcggtccatctcaacaaaatgcacctggaagttaagcaatagaaagaagtaagattttaagggcagtgtagataaatcatagagcataaagagaacaatggtaaatatttaactcgtgaacttcaataggtgtacctcagaacatccacagctaatagcttcaatcccaacaatggtaaaaatcatgagtattattaaaattgaagaaattagaaacctaaatgcaacaaatctaatatatatttttaaaaaataaaatgaatttgaacaacatatcatatacagtttaccaaagaacatgatatataaatttgtttaataaaccccaaaaattatatctcaagctacacaaggaaaatatatctgaaccctaaagaaagaagaaatataaggacatgaaacttaccttcatctccccttctccattcatgctcatctctgagcccgttcaaccttcgtttcttaagccaaagccacgttgccatagctgaagcctctttttttgatagaccataagccaaagcctcgctctgtcattgttgttacttatgaaggttcgtcaacagaggactgaagagagcgagcgagcgagagaga

SEQ ID NO: 202275 - DNA, 1477 bp, Cannabis indica
aataccgaaccaatatttcctctatctcgttgtcttggttacaccacctcaattgttcatcgaaaagactgctgatcgtatttttcttcttcctttgagaggccttgtgatggaagtatttcgtattgcgatctccgtgtgtaagccaaagagcccaacttctttgtttccataaaagctcctctttggcctctgctgcattaaggtctctctctatctatctccgtttctgccaatctatctctccaagtgaagaagagatatgtttcaattcttccatgagagcctttgtcttagccttaagctctattttttttttcctttattccaatctttaaggacctctctccacacacattaatgcaccccctaattccttgagtcgatccccattttactctatccatccagacattttcaacaattttaccgcattcctctttgctggcccaagcatgttcatagtgaaatcgtgatttccacttagaactcgatttagagagatttttactattgttgaaagtaaggattaaaggtcggtggtccgagttccaccaagggaggagggtgactttgatacacaaaatctcttataccattccggattagccaaaactctatccaacttttcaaaaactaagttgttgtggcgcctattacaccaagtaaaatctccccttccatcttaatttccttaaagttgcaatacgaaatggcctttcggaattcacgcatctgagagtcaagtttcatacatccccctttcttttccttttccgtcatgatctcattgaagtctcctccacaaagccaagttccttgcagcatgtttctaagtctctccataagcagccatgaatgtttccttccacctggatccgggctcccatagaatctagtgaatctccaaataaaacccagccctttctccacagccgcatctatgtgacaccgtaaatgacttgatgttcacctcctaaggatctttccacaagagagccaaaccaccacttttccctttcgccgccacaacaaagcaactgtcaaaacccagaacaattttaattatttccatcgcagcttcatttagtctagttttggacaagaaaatcatcccgggatgatgatctttaacatgggagcaaagagtttttaatgtttaagggttcccaagcccctggacattccgaaacatgatattcatggctttcggtgaccgagctccactgggttcgccgcttccaaaagtactccagagaccaaatccgtcaagttagaaatgttccctggttgcatcacctctgtagccttttcagtgttctcatccgacactttttctgtgttcaaaggtgggggtttgagtttatcatcgaccttcttgtttctcttggccactaccttcttcttccttcctcctttcagaccgggattggcaccttcaatttctgtttcaaaagtgatttgaactgttgggttt

SEQ ID NO: 202276 - DNA, 557 bp, Cannabis indica
atatttgataaatttaaattataaatattatttaaataatcacatactaactatagtagagagtatgttggagcatcaacaataaaaatagctctctattttaatttttagctattttaactaaaaaatgtaaagaatagaaagaatagggatccatctataataattcactgtctaccatgagtgcatgcgctactaattcatgactatgaacgtaaattatggatgccttagaaaaattgaaaagtaaactaccacaatcctctaaaaatgatcctaatccagtacaaataaaaaatcacatataaaatgcataaaaaatttattggtctcgaaaaataaaaatgaaagtcaaaagctaagcataagaaactaatccaacaccatcaataactatcttgagtatatgtgatcttccatacatattaacatactaggtgaggctagcacgtgcaatgcccgtgcctagctctcattgttttattttatttatatatttgtttgtttaattttcatttcataaataattgtaagaaaaattatataatttaattttt

SEQ ID NO: 202277 - DNA, 1109 bp, Cannabis indica
tatacaaatataaaaacaaacaaaaacactttgtcctactttgatattttcttatcaaattttcaactttcaactccatacatgaaacaataatttgacccaaaaaaaaaacactacctttttaggaacccaattacataaaagctacagtgacaggctgtcacagaatgaggaatgacaaactaatcaccaaaaaaattaaataaactccatttattcacaatgcccaaggataaaaattccaagctctagtagatcaaagctgtcactcgaataatcttactgactaatatacatatatatatatatatatatttttgtcttttattttatttttatgggatctcctcccctaaagcggtgtctcacgtgaaacgacgacgctgggacccttaaaaaactaaggtgtgttctttttttcactgttgcgtccgcagaatacgtaacgctgtgtcgaccacaccgaatcatttcccacttccagcaacataaagtgcacaaccactacccacactacaccaaaccacacgcagacctattttgccacgaaaacacgccaccgataaagcaggtgaccaattttcccaatgaccaaaatacccctcttgtaaaaaaaaacgacttacacgacgtttgactttcttgttttttttttaaatatatgaattatcgttacgaactaactcactccgtcgatatgtatatgtatatgtatctccgctttctccgccaccggagctagtggtggccccgacgtgagagagcggttgtattaattattaaagaaagggtattaaagtctttttatgagaaaaacgtgataaaagaagaatcattctaaacttctgactcttttcgttgaatagaagtcatcaattttcttaagatttttctttttttttttcaaaagtacacggataaacgaaaagtcatttagttcaaaaagaaaagggtattttagtaatttaaagaataagaatgaagcgccaccgattatcctcgagatgacgataatcggcgaaaacgcgatctggggtcgaatcagctacgggagatccccatgcaacggaggtcaaaatggtcatttaggttaagatactgaatgttgg

SEQ ID NO: 202278 - DNA, 1025 bp, Cannabis indica
gtatggcttttgatttattctaaactcttgagaatcatataaatagtttgtcgggtgtgcattgttaagaagataacagaggaagggtgcaatacctgtccagtatgcaaagtcgaattgggtgctgtcccacttgacaaactcaggtatatcactcttatatactattcagagattttcacattgtaactaattatttatatatgcaatctcaaatcaatgaatgttacagctctattaccttttgttgtacatgtcaaaaacactgaagaacccccacacattagtcccatgttaaaaaaaaacacatcacaaaaaataaagagacagagagagagagtttaaggaaaagctaagaagattcacttactagaaaagaaaaaaaaggaagtcttttgttttggttttgacacttaagattcctagtgctctggctgttgtgaattgaattttaactgcttgatcagttctagtaagatatcttggtttgtttaagagtttctgttatatatttttatcatgcattgtatatttggttgaaatgttgtatatcctgttattccaaacttcattctttgtttacacaggtcagattacaatttgaaacaactaagagaaaaactcttccctcccaaacttataccgaaacccaatcccgaaaccaaaaccaaaaaggctaacaacaaagaggcagaggcacatgatgaaagccatagtatgtactcatcagttccagtgacagctaaagagaaggagcgatctctttcgtcattggcagacactgaatgtaaagtatcagcactcaagcccccccctttctggattaagaaggaatcctcctagaaacagttacatcctcagagaatcagctattcctattagagaagactatttcagagctaaaatttatgtgaatagaaagcatggacaggttgttagactatgcttattatgtattttcaaaactaacaagatactataacaaagcattgattagtatagtcaaaattgagcaaatagtgtgt

SEQ ID NO: 202279 - DNA, 785 bp, Cannabis indica
caaagttaaatagtgtttttgtatagtaatattcggaaaatatatttaaattaaactacacaaatgttagtaaaacatattcaaagcaataataataatgtttaccgagtttttcggcaaccgaataattattgagcttaaaaaaataataaaaacacaaatggtaagaatatagacaacagattttttacgtggttgaagcgttaattattcttagttcacgagtctattttattaggctctttggtcggtgaatgttgatataaatacaaaaagaattaatggactttactccgatctaccgtgttcctcttgaagaagagaaagcttagtaggaatattttgaagttgatagtacggttacagtataatgtgtttacaaaagatttgccttcgatcttaaggtggagagttgaaaggtgagttaaaggaggaagtcgaggttcggattggattccctgccttgtgtgtcttcaagggattttataggccgattccctcgcaaagatcgtcgttgctggaacttcataaggacgaagccccaccgttggattggtaggtggcatattttccatgtggcctttatcaatattagatcgtactggttgtactgacgatgctttggacgtgtgtcagtactcaatggttgttcttatttgaattatacttattcttagccgttggatcatatacagtacacaaggacacccatgctttgccaggtagtgtggcatgggagagatttgacatcgtacatcaaaaagctccaccattggcttcgtagc

SEQ ID NO: 202280 - DNA, 1036 bp, Cannabis indica
aaggcaaaagcttgcctattcaaacacaggtgatttttctttatattttttcttttcatttcttctagatgaaaggcctcttcgaataacccacctcaagtactcacccgtctcccaaaacccaaaaactatttaattactcctatatctaagataatagaatatataagatgaatgcgatacccttcccattgccaattaattttaaaataaaaccttattcatcttatcttaaattctaagattcatcaatcaaacaagctaattttgttttcaaaccttggatctcatcagatggtacaaaatcgtaaattttgtgccatttcgagcccaatcatgttaagaaaagtacaagttaaatgcattggttgttaattctcaaatgagtcaattataagaagctctcaggtaagagaaaaaagcaaggttccccagcatgttatatagacaatactgaaaatttcttacccttttcaagtagacaccatgtgcatccctgatcaatgattcaattttgtagtagtcatcaaggatagaaaaaagactggctgaacagaaatgaactatgaaaagaagctcagctaactcagctatacattaaaattaaactaaacaaccagatagattacaagaagggtaagggtaaggatagaaaaatgcattttgacagaaaacaaaacacagcacccagaagccaagtgaatatctcataacctggttaacatttcggtcacctatacctccttttggcagcccaggtgagaacattgcagccagatttctaaaaccttttcctgtaatagacaaggattttctcaagttaaatgtgataatgcacagaatagtaaaaagtatatgagaaaatcaagttggagaaaatcatggcaagagcataggcaatctatattcctctatatctaccaataactctttatcaacattaccacacatgccaacattttattagcaattcaacagtctttatcctttttctatttacaataatcccaactctcacagatgtgttgtgtgtgtg

SEQ ID NO: 202281 - DNA, 1217 bp, Cannabis indica
caatcacctagtatatctatatatatttatcttttacattgattaataaaaatagtatatttttttgaatgttttgtagtttatatagagttttttatgaataatttcaatattttaacaagattgatgtcttgttgtttttctagttgatttatagttgtcattttattattttatagtcgttttttatgttgttgttaatgtattttatagttgttttatagttatttttatctatttttttttgtacagatattgtttaatttatatgtatttttttatctgtaattttaatttatttcagacaatatttttgctatatatatgtgcatttattttgtcatttttatgttgttttttagtttttcagattaaagttgtttttcaactatcattaacccaaaaaagaaaagagaaaaaaacagttgaaagaataaagttgtaacaataaattttatgaaaaaaaaggtaaataccattttggaccttgcgttctgcaaaagttaccaattagaccctctgttttgttaaatgacaaaatggatcctgtatttttcaaaatattacaaatagcaccttgaactgattttttgtcaaaataaaatttaataaaatccaatcaagttggttatattaaaaaaaaagttagtacaaaaattaagctcaaggtcctaattttactattttggaaaaacaagatctattttgtcatttaacaaaacagagggtccaattgtaacttttgcagaacacaaggtctaaaatggtatttaccaaaaaaaaaataatataatagtacaaaaagaaaaatcaagttgtcaaaattaagtaaaaaaaaattgtaagacaaaaatacattgatgagttaatattattttacttattgtaattaggttaatgttttgttatatttatgttgttttgtacatagttgtatttttgttattttagagttgtttgttaaattgttttagggttgtttttttagttatttattttattttactgtaaatatagtatttttgtaattttgaaaatttaaacacaatatttatataaggttaaaatataaaatacttcgtgtcttaatatttttatgtattttttttttattttactagtatttttttaagtttctctagtaaaatattcactaaatgtaaaataaattaattttaatatgaaactgaatataaaaataaaagaaaagtaaaaaa

SEQ ID NO: 202282 - DNA, 1133 bp, Cannabis indica
tttttttttgatatatataattagggtatgggttgtaagaagtactgcaaatacgtgtgtatttttttttatttcttttgtaacaaatttagacacctactaaaattgattatcatcaaattaaaatttgtgcatgtgtgacgttatttccgctaggatttgtactcacaagtctgataagaatttgtgtatggcaacaaatcattgatcggtcaagtggtgctctaattatttttttttctttaaactttaataaaagaaatttaaaagttgaaatataattttttattgaaaaaaaaaagttttggtattattaaaacactttagtacttaatcaaagtagtaatttaatatacactatattacactttttcttataaatcatgatagacaaaaataaaaaaataataatatacttataatatattatttatcaataaagtattttctttataaatatataaagatatctcattttttttaaaaaaattatatatattaaattaatttctttttctacattattaatttatattttttattttctttatataattttaaaaaaataataataaataattttgattaatgttacttatcatacaaattttttacctcttttgttttactttttttttttgtcaaatattaaaattatattcatgtatgtatttgtcaaatatatatcttttcatttgtaacttaaagaaaaaaaataagaaagaaacaaaagagagtcaaattatcttttaaattttgtaataatatagcaaaaatgatataaattgatagccatacactaaagataaatagagagaggcaattcttaccaggataatagctttaatattgacttcactaactgcaaacccagccattttagtgttttcttgaatctcgagcaaaatgtccacaaagttttgtctatcttcaccttcactaatattataattaaaaccctccatgtgttcctccactacactatcaagaaaactatcaaaccctttagcaactttctccactgccttatccgtaccattcacgaaattcacccaagaaagccacgtaatatagtctccaacacaaaaactacccaacaacctcatcagctctcctagtaattccttaaaccg

SEQ ID NO: 202283 - DNA, 2053 bp, Cannabis indica
ttttttaatatatataaaaaagttaatatggttttagtaaaaaaatttattataatcttttaattaaaacagttttttctaaaaattaggttggagcaactttagcttttagttgtagcttctccaaaaattctttaaagaattattttttgattgcttaccaaacatatttttatcacagctttttttaaaaaaaattgtgccaaacgagcccttaaacatactttatcaaaatttccaaatgtatttattttcaaaatgaaatttatatgtgtataattatttgttatttgctcctcaaaattaatttattcacattttgcctcccgattttcattcctatcgattgcacatacatacaatgagttttattggaatgaaaaaactcttctactcatatgaaattttgtcgcttttatgtattaacttttgttggttgtcccttaaagaaaaaaagttaataagtggtttataagtttgctgaaaatctcccatgtttgaaagcgtttttcatattttattattgtgtgccaaactattaaaaaaaatggataggaaaaattaatgttgaacgcttcaactgaatttcttggaagatattctaataaattactgaattaataatgccattactattgcctttattgattggaaagtactcattctgacctaatttagcttcaaagctcatcaatagaaattaacttccgcttctagttatttattactctacataaagttaattaattgattaaatatattttttaaaagaaaaaaaccatggcctcataactcagtctacctaatttaatttcaaaaaaaaaatatatatattgcaaatataaatatatttacttacttatctagttatatttattaaattaattgagttttttttaaaaaaaaataagaagatagagagagtattatcaattctaataaacaagtaaaaaataaataaaactaatatgcaaccccatatctaattttttttttaaaaaaaaatgtagctatttatttatattaagtgctcattagaatggtaaaatctacatgaattataatttaaattccttttaatatataatttttatgtagacagagacatactaaaaatgataaaacaatataataaattaaacacacaataaattgtttttaaaatatgattaatttcgaagcatatttataatggaaagagaaattgcagtaagctgaaacgcattgtcgtttctcttagtcaaaggcgaaacgacgtggtttttgcttttgttctttgaattatcattttccttaaacccatcttcacacgtcgtcgaagcatcgatcactgaactcaacccaatattggcgtcgtcgtatctcttcgccttgtaatctttcacagccaatttgatcgtcgacaccgcatcactgtaaagctccatacaatcgttcaaacaagccttcacataaggatccaatttagtagtagtgttggtgatagtattattattattattattcatcttcttgtttttatcatcgcggagaaggtgtttgatgaaatgccgagtagaagtaacgttgttttttgtcaatcttatcgagaccagacccagttgccggagatcggtggtttggttgctgtcgggggaggaattgaaggagcttgtacagaagttgtacctgatatttgggtcggtgtcggaacactttttgcaggtgtctttgatgagatttgaggaggaggaggaagaagatgaaagggagagaaggaatattgtgaggagagggaaaatatgagttctcatgatgaaatattcaacaagaaaacaaaaattggtttgcactttggattagtactagcttataattcatgatatatgaggggcttttatatatacaagatttagatggtattttggggtattatttattcttttataatgtaattatgtaagtttccttattttattctttaaaaaaaagtaattagaattttttttttcgaatttagtatgtactaaattatgtttcttgaaatttttaagaccgttaaaaaaatttcctg

SEQ ID NO: 202284 - DNA, 560 bp, Cannabis indica
gacaaagaggatatactccctttagtggtgcgcaccatatcatgttctgagaggacatgatctgatttggtgggaccaggctttagaaggcagccatgtcaacctacaagaggctttcaaaggcgcctcttggacttcctctctggatgtgtctcatcgattatctgaaaggcttcgtttgtttcgtctcttgaaatgtcggacggtcttttgaaagtggaggggcctcgtcctcgttgacgaggcttttggagtttagatgggctcgggcccatcttcgatttagactaggctttttaatgtgggaaggcttgggcctaaacttatggagactaattatactttgaaaatgacacgtgtcgtccatccaaaaatatagataacagttatggtgatgtaaattctacattatgaccaatattatgccaaatttagctacagaactttataaaataaaacaaaagagttttaaaaaataaatgttcaacaaaatgataattttccccaaattaagacaagaaacctaaaacggataacacaatacttagcttttgtagtgc

SEQ ID NO: 202285 - DNA, 1232 bp, Cannabis indica
aattagtattgttttttttctatattttcagcaacaactctaaaatacatgtcttatatatgtaaattatttgattgaattgcaggtgtgtataatggaggaaatctatttttcaattctcatcaaatattaacttaattaagcatggtgagtacttttactaatttttttatacataatttatatatcttgccagattgtgcaatttgagtgatattatagcaaaataataatgaattttattcttttttaattgattataatgatcttaattctatagtagtttagttgtacgtgtatgattcatgaattatttattttatttattatttattaattttttctttggttttattttgtaattaatctcgttcaataattttatttattttattgtgtatcatgcatttgtcttattatattttccaatttgatataaatattttcatctcctacttattaattttcttaaaaaaaattatgaagctaacgagtaagtctagaatctctatttatttcttttctaactattattacaaaaaactaaaatataaaatacctttataaattattatttcaaaaaacatataagcaaaaaatctaaaaaaaaactctcccaaaaatttacatacaaaaaaaaaactatttttagtgacaactttttagtcataataaatttattttatgactttatttgacttttagtcaaaataaaaaagttatttgtgactaaacatagtatttaaatacaaattgtcactaatttagttttagtcacacaagtattgtgactaaaatataatttgtcacaataaattatgatttttgtgactaatacttttattcacagattttttagtcataatgtaagaatgataatttataattagtcacaaattttattgtgactaatattttttgtagtgatattattgacaaatatgcttagccaaactattacttttttaaaaaaaataaataaataaatcacatatatttcaaagaaaaaatatatatttttcaagcaatattttagttgtgtaatactgtgaacagtaactgtaaacgtttaagttcatctcttttatcacaacaagagcatgagcacatagtagttcgtcttgttggaatctattgcaattgtatattttatcttttaaattcatcatccataaccttatttaatgtaccacttcaaacatattgtcctttataagtttcacctgcacatt

SEQ ID NO: 202286 - DNA, 1939 bp, Cannabis indica
taaaaatttacaaagaataatattgtaactataacggatattactattaagaaaaaaatattttaatattttaattttggggtttagaaaattgaacaaaaaaaaattataaataataagaagatataattagcactactttataaaaaatatatataagaaatcccaatcacacatggcgacgagaacgcaggtgcatgtgcctcttatcttataactaagtacattacatccatttaaattgtactcttcatttttttttttgttaaactttacaccatatatatttcattaattttaattgtgcaacactccacaaacattaatattgttactacatttcttcaaatggtttaaatattatatataataattatttattaatattcatgctctttgatctttccatgagtaaaatgtaattatttgacattcaaataacttgtatatattcaatcacaataaattataattttttgactaatattaaaagaatagtattttcgatttaagttgtttttaatttatggagttttaatcacataagtgttgtattatatattaacatatattcaatcacaataaattataattttttgactaatattttgtcacacaaatttttaagtgaacagaagtgtaatagaattttttcagtcatatttttacttttaatcacaaattttattgtaactacagtacttcagtcaaacaaattctttattaacaaattctttgttaattgctagtgctcaaattaccattggtaatttatgataatgtttatatatataatgcttaaaaaaagctaagaaaaatacatgtgatgctaattaattagaaacattagtataatgtctcatgcaacattaatatattaatatttcaaaggctccctatatatttcagcagcattattaatttacttttgctatcaattagttaattgatgaataatgacaattaaaggcccaccaaattagttgcttcacaccttttttcttcatattccttttctcaagtgaagataaggtctatccattaatcaatattacttattacactttacaatattgaaatcatacttgagctttaattaccaagcttttaatttggtgacatataaccatctatatttatatatttgaaacaatattaaggcacaaacttgtgcaccaaaaacactaatttcaactttgatagtttattggccatttatatattattaattatacatgtactatttgggcaattgtaattttgtttagttattatggctaatttaatatttttggtatatggattaattataaattcatacttttgcggtatggtatataatgtagttacatgagatttcacagattttaaccttccaataatttaggaaagatgatgaaatccgaatttaaataatttattgggcacacatataaatatcaaaacaagtatatgtgcaatgcattatttaaatgattttgattttagcatcctaaagtatttgaagttttcaaaaatttgtaaaaggttcttcagctacattattcataatagtaattatcatgcgtataaaaaaaaaataaccacaggtgtaataaaatatgtaaattttatttttgacgctgtaaattattcaaaaatttacagattttgttgctaagaaattcaaaaatatttcattcatttaaagataagatcttagtgagcacataagaactcaccaaccaaaaattaagaaaacccttacaactgtgatgtagactccatttagcaagcatatgagtcgcctgattagacgatctaggcaaccaaaaatagctaacaaaaattgaagacaaaacaactaaaacttagaaacaaaaaggtcaatgttccagtgtggagcaataaatgcagactcaatagcaaccaccaaacgatctggcagttcgagagaaag

SEQ ID NO: 202287 - DNA, 621 bp, Cannabis indica
aaaaaaataatttaattttttaaagttaaatataaaaaaaatttgaatgtatttaataataattatttttattattatacttacaaatttaccatatattattttcttatatttacaaatatagttaatataaaatggtttaaaataaaatacaataattttagtacatcttttttttaaaagaaaaaaaaattttagtatacttaaaaagatactatatagttgtacgttgaactattgagtcttaattaattaaaaaaaaaggttttataattataatcgtatataaaacatgaaataatatgatcatatattaaatatgaaataataatacttgcaaataaagtataaaacgataattttatttataaataaaaagataataaataaaataattaataaattaatcaataattttatttataaataaaattttcataaaatagcataaaactttaattattttattgccatagctaaaactcataaaattttgaaacacttttagatgacgatcgataagttttggactgcttacagaaaacgtgataaagaatattggaagtgtttacaagcttttttggcgatggctttagcctataaaaattctgatggaaaaat

SEQ ID NO: 202288 - DNA, 792 bp, Cannabis indica
tttttcaacttaccccgtttttggatcctaacccgatccaaataattgtcattcgaatttaacctaattctaactcattgtctatgttgttgcaagaaatcatcttggtagagtgattagagttcagacggctcgggaggatttttcgaatgctctttgtagagaagccgcagcttgctgcttggctgtgtcagttgccttggatttcgcctactagtatgttattgtggagaatgactcgagagtggttatcgacgctatcaatgggaagcgatctcgttgggcattagagaactatatctcattttgtactaaatcttctccctcatttagtagttgttgtttttcttatgttagtagaacttgtaactttaccgctcataatgtgactagatgagcctttacccatcagatttatgggtctctcccgatctcttctataccgaaaactattttatgacaacccacaataattcgtatagagtgtcgtgttgttgtgtgaattgccacccttacttaaaacacataatcttattattactaattaatatgctgcttgtgcaaaaacatgaggatgacatcttgaaatatttgggcaataaatccctagcgaaatccaaacgacaaaagcggtgccgttttcattccacgagatcacgtcgtccgtgatcggatcatccaccaactgatacatcttcgtcaaaaacggcgccatttttcttccaataataacagtgagtattcgatttgtgatctcctattcgatgatgatggatgttcagatggaacaac

SEQ ID NO: 202289 - DNA, 736 bp, Cannabis indica
tgttattattatttatagataatatactttgataatgctatttttgtgttgttatttttatgaattttttcatatgcttttatgatgttatgatagtggtttaattagtttaacttagtgagttgttaatataatttttacaagggtgttatgatgataaaatgcattatttaattgtaattgtaatttatgaattttaggttaaatactcatggagatggtttggcagattaacatagaagcttttaatttacatatatatttatgattaaactagataacatatcaaaggtgtgaaaggtcttaaaatgtgccgctgcatatattttgactatacattaaccaattgatcatgaaacctaaattatacaatggttttctaatcaaattcttcatttctacgagccaatgatatatgctgcaaattgcaacgacgaaagtagattaaatatatagtgcaatgttatttggtgttgtgatatttttgctatatctataaatatataacgaaaagtccaatcaaaataatgaacatatatatacatcgacttatgtgtatatatataaaataattatatatatatgtgatcatcctcgtagtggacaaattgtgaccacaactctgctattatcctcttatattccccacaacctcacatgcattgctcaatatatgtaaatctactacactgctcccaatgtcactataaactatataagaaaaaataaacaaaac

SEQ ID NO: 202290 - DNA, 1040 bp, Cannabis indica
caataccaaacatatatagtattatattaaatattattaatataatacaatacaatataatacgacgtaccaaataatcgccttaaattttattttggtacagttaaaaatatacttttgagagaatttagatagaaaaatatatatattttaatttagaagaccttaatttacaaagtacttctaaaattacttttaagaaactatttttaaaattagaataatttacatactttctaatttatttaatttttttcttataatatctaaacaccattagaagaatttttaattaaaaaaacttttatataattatcaaaatagttaaaatataagtcaaatcttttattaaacttatatttttagactataaacaaaactaaaaatttaatcaaaaataaactaataattagtgatgttctataataatataattatgataccttggaataatcttaaacacaacttgccctttaacatttctcattattcattatttttaacatgcatatatatagccagctatataaacacatagtacatatgtataatgtatataatatatattcatcaatttaaagccctaccttattaaagtaattaagttatgataagattagacttaattttataatatgaatattttttatttgtcttttatgaaaggatttatcataaatatatataagtcctccaagtctccaacatactcaaccgcacgcgttgctgagtttctgagtcagcctgcacgtgtggccttaattatatataagaaaaattaatgctaaaaaacactaactagccctctctttattattaatgtaattaataggttatatataaataaagaaaatagttctaagagcatctctagagacctataactatagtatattgttattttttagaatattttgttgaaaattaactccaattgtgatataaaatgtgtgctaaatttagcataagctaaaaattatgccaaatttatcacaaaagatagcgggatgaggtgatgaatactttttttttgtattcat

SEQ ID NO: 202291 - DNA, 1267 bp, Cannabis indica
gagtcaaatctctcttattattacttggtttgttgtgtttagaggtgaatgagtttcattgtatgccaaagccaaaaaagagaaacttcctgagatgtcattgtttgtttagcttcctgagttttgagactagctttttgtaaatataaattttccttgttatttttattgagaatatatttctgaaaaattctacaatacaccattaaaagaggtgtagtgtcccttatatattttggtatatgggagaattttttagtttaattttttttttagtcttctatattattattattatttacgatattttataaaattttgataaaattaaaaaaaaaaaaattaacatgttgaaaataagatttaaacagtttatttaacatgcgtataaaataaaagcgtctcgtgtacaatagactgtttgaatcttatttttgaatctctcaaaattttacatgatgtcttaaataattacaatgtacacgatcatgaaaaaaaatagactaaaaaattctctcacatactaaaacaaaaatttgttgtcccaaaaatgtgttttggtgggacaaagaaagtatattaatttggagatagtagattttcttttgtttattgacaaattccttttagaggtgcattagaaaaagcattgtatttttttgtggtttaatgtagcaccaaaactagaagaacaattttattaatacaaaaaaaattggggatagattttgagatatttgtaaagtattgctaacttagtaattaaaagttagtccaaaagtaggtattatataatacctaatatgtatgtatatagaatagatatatatattgtttttttcttttccttctttacaaccctcgaacctttggcctcaaggcaaagtgtcaaagactctaccgtcaaggagggttgagggttgtgtcaaatgagaagctaaaatattatattaaccttatcattgaatcacctcccaaaaattgataaaaatccaaatgcaacattggttaatactaaaaggaatggtattaagcatgcccacgaagtatttttggagtttgtccttaaagtttcaacattttaataaaagggtggtcctaagctagggaccttggtattggtaggaagattattatggaggaatgatatggagaaaaatggtggttttcaacccaatttgattacttattcttgtttcatcagattttactatgagggcaatgattttcaaaaagtcttgatgaaatgaaggtcaaaggttgtact

SEQ ID NO: 202292 - DNA, 1195 bp, Cannabis indica
agcaacgttatatgtgtaatttaattgtaaagtaagtgtatacatgtaaattatccaaataaatatgtatatttattttatttttaattattttttaaatgtaatttttttaaaggcatgatggttctcaaattttttatgtttagttgagggcctgataagtttaatataggacccaatagtcttgttgaattttatgtttttgttagggccggatagtcttgtagaaaaacattattcaaaatgtaaaattttaaactattttaactcacttgatggagtcttattttataacatattctttaaattttactttttgagctggtttgaagatattattacgagtgctcttatagctgaaattagcttatttgatttttttttcttccacaaagtagaattcattaaagagaaagtaggatacacaaagggagtagctccccaacatcaatcaccggaggtcttagaccaacgccaccacttggtgattgaatacgctaaaccgttacataatctttcaacaaaaacaaaattatacacaaacaatttcttagaaattttagaaatctgaagaaggatagagaccaagaagaaactcaaccaccattttactatttgacaaaatcagcaccttatgtgttgaaattacacaaaaaaatcagctcatggaaggctatttttactctttttttttatatattttaaaaaataagttataatagctcaaatttaaccgagtactttggtatatgtcgccatatttggatgatgttgtcatttttactgttagtgttctatactacgaatatttggatctatatgctgtgtaatgggcgtctttagttttctttttgtaaaggtaaaagaaccattttatgtggcccaaaaccacaaccccaaacccaatacgactaaaactggcctgaacatcactctcaaacttggtaatcaaacctgcaataggtctgaacagctttgaacgagtttcaatacccatttccacaactcaatcaccaaaatatacaatctaaaaattcaaaattctcaaatcaaacatgtgtgcaccactagttttagtcatgcatttaaaccattattgtgatgcaagagtgagtctccatataaacctcattttttttttttttttttcgttttttttttttttttttgttttgtcaatgaccatataaacctc

SEQ ID NO: 202293 - DNA, 902 bp, Cannabis indica
attattatttatttttatttctaaacaatctctatcggagctttctgtctttttagggttccgaaattagattcgatcgtatcgcaactcctctcggttttctcacccaccatttaatctcatttcattctgtttttgtccccttaaattacttatattcgattttggcttccttagggtttcgaattcgattacagttctacttgcatttgcagtattttttattttttctttcccaaattcgaatttttgtctttttagagttagggttttgaccgatgattctcattaacttgtaagttgtgacctcagtttctgttttattttatgatttttttagttgaattgtgtttttcttattttgctttctttgggttaattacagagtaattttagttatttaggtttgttgaaatttatattcttttttagggcaaggacaagaatttaactcaatttggttcaatttgattttacaggcaataagtaaagctttgatgttgaagaattctttttttcttggtgggtggtgagtttttggtaaattattgacgcaaatatttgctgcaaacatggatgcttcacgagaggttggtggcgttccaggtccagtgcttattccaatgcggttcgtgtggccttatgggggtagaagtgtttttctcagtggctctttcacacggtaatagaaatggattgaacttgatttcaacgaattaactaactcattctggtttaatgatcatgcgaattgagaatgaaccaaataataataataattctgattggcttttaattttgtaaaggtggtctgagcttgttcctatgacaccagtggagggttgccccaccgttttccaggctatatacagcctattgcctggataccaccaggttagttg

SEQ ID NO: 202294 - DNA, 723 bp, Cannabis indica
aaaagagaatcgttaaaccaagagagaggaataaagagaggaagagattttacttgttgaataactgaagccatggaatagtttgagcttttgaagaggaaacgagcaagaaagaaagaagcaaaagagaaaatatgtttttaaaatcaacataaatctgttttcaaaatttattcttttttattaaaaaaataaaaaacaaaatattgttaccgaacgtagggctttttattcatatattcccccctacgcttacccaatattagtttaaattaaacatttacgggaagtcattccaaaaaaaaaaaaatacatttgtgaatttttctaatttttttaatggtaagatcattgttccttaagttaaatggaagaaaaattatcgtctgcgctgggtgtcacacgttgttgcctaaaaaccacttgaggtagcctcaagtggccataggtgggtgtatgtcttggaagttctaagttcgagtcccaagtaaaacatgattgtaatatataaacgcttaaataaaaaaaaataaaaaaaattattcaccactcctaaattaaaaataaataaaacacatactaaaaaaattgatactgatcaataactattttctgtttttgtttaattattaacaattgtaaaattttatttttttctcaacaaaatattcaattattttttattagatgatcaacaataaatattttctgtttttgtttaat

SEQ ID NO: 202295 - DNA, 1210 bp, Cannabis indica
taatatataaggtaattcccctataacttatgtattattttcgttaaaaattaaacttaattatttatttacaatcgaaaattatatttataccgcaaatcactctaaataataattgtataatatttcgtgttaagtgttggatttagatatcaattcaattcaaccataattaattaattttgttaacctatttttcaagaaaaaagaaaaaggaacagaatatgaatagcgtagatgtataattagagctgcaagaagaagaagaagcttagaatcgaccaatattagcggttcctcctcttcggtatttctctctccgcaaaggggactctccacctatttggtatactctcctcattcctgaatgtggatgtattgatattataattacttctgtttttggactgtgtttattggtattgctcaattttacgaattcatttggctttgtatagattggttatcgagaatctgttgtttattgtagttgaggtgtttgattaaatggctcaaagacaaaactctgacaatgtggaattgtggatgattgttttactgttaataatgtataatgtagtagaagtgtttgattaaattactcaaagaaaaaacttgaatgtaattgaagtgtttgattaaataatttaaagggaaaaaggaaatgaaaaaatgaatgagtttttcatgatcctgtatttgtttttttcgactataactcactttgtagttaaatattttgtgttttagactatgagcacccttttatcctctatttttgcttataattttaaaacccaacacttaaaaaacaataaaagttatatggatacctttctggatactcattcatatcatggacacagtaattcaaaatcaaaactgatgataacagtgatacacagatggcgttgaggagattattggggttttcggatggcgagctgatgaggtcagatgcaaaaccttgttctaggttgatgagacacactgctggacttttcagcgttggtggaggattggcattctggattctttgtcgattgcattacggtctgttcttctcctgctacttctacttctgtttatgttatgtttgattatcttaagaaatgagcaggactacttaagctataatcaccgtagttttgtttttccctagtaattttatttgctgtgctagtttgaagaacttttcagtctagcaaag

SEQ ID NO: 202296 - DNA, 610 bp, Cannabis indica
gaacatatatatatatatatatagctgaagatgaaagagaacaaactatggttggtttcagtgttggttaatcatcattatcacctcaaaactccatagctcaaaacgccactactgatccttctgaaggtgcggttcattcatctttacttaaaatcaacatattttaaatttgggtttgtatttaattctcttaatttctggtgcaagttataaacccattaccaagttttttttttttaagaaaggtaattgagagagtttatcttcaagtgtatgatcaccataatcactactcttcattgtgatcaccataatcactatttaatatttatacatatattatcctaaacaataggaatagaaaatgtacggatattatcaacccatcctttgtagaaaaaacggcatttgcatacaattttttcttcatatttagtgtttaattattaattctctattttatcatatatatatatataaagagtgagctattttagtttgacttgacttgactttctttcaccacaatctaactataataggttgaggaccactcacttatgagttataactattactactcgagaattatatctttatatattaa

SEQ ID NO: 202297 - DNA, 1715 bp, Cannabis indica
ttttttttttttttacagagagaaaaacctatgtatccatttatgatgagttaaatgttcaggatacaagctttcttatctaagcctaaagtgtacttagctagttgatgagtggcaatatttatctgttgagcgacatagctaacagtagcttgagaaagtgaagataacaagctattgatgttataaacaaaatcttgtaaatggagattggtagaggatgattgtttgacactatccactaggactttataattcgattccatgttacaaattgcaagggaattttcaagacaccctttaagagattgttgaagagaaagagcttccatcaatggtggtgagaagactccaattcatggaatgaaagcaacagctgttatgtcaccattgcaatctcttactataaaaccaagtccaattttacaattattttgaatcttgagttgcatcaatatttaatttcaaataacctacatgtggcagtacccattgggaggtggatgatctagctatatgtaccaaggaggatggagaggccacattatgcaaactgataaaaatgtaggtggttcgttgtccattgtagtactatgctatatggaaggaagtgtcgatcacctactcattgggatgaagccggtgagtggagatatcttggacccgatgcagtccaaagaactagtgaggctattgagaagatttgaacttgtatgcttgcctcacaaagtagacaaaaaagctacgctaatccaaatcatggagatattgagtttcaggttggcgactttgtcttcctttgagtgtcaccaatgaaggggattttgagatttagatagaaaggaaaagtaagtcccaaatttattggtctattcgagatattggaaagtgtaggtgaagtagcctatcagctagctttattccctactttatctggagttcacaacgtattccatattttaatgcttaggaaatatgtgtctgatatgacccaaattcttagttatgagaacattgagcttcaaacggacttattttacgaggaacaacatgttcagatcttggataaaaataaaaaagtattgcaaaacaagaccattcgactagttaaagtgttgtggagaaataacaaggttgaagaagcgacttgggaattatagtcgcagaagcgggagctgtatcttgagttgtttaggtaaattttgaggataaaatttctgtaaggaggggatagttgtgatatcccgaaaattataactatgttaattttggcatattttattaaatatgtaattatatgaatattacagtaagatcataatcttacttaagtcaattatgagataatcagtgatttttgagtaaataaaaaattgagtgtaatttatcagttatggagattttgttggaacatgtgggctaatatatatactatttttaaaataaaatatttttgggttcagcaaccgtggaaactcaatggattggccaaagatgtcacaacgacaatagaatagttttattagaattgtaccagactggtttagtatgttgagtttcgatttagttgagatagctagcaatgaccaaagtacccctaggttataaaatagcttaagtgttaaattgagggtacaatagtcattttactaagatatatcctttttgtcctatttgatttctagtaactttaggctgaattaaggttattttat

SEQ ID NO: 202298 - DNA, 1026 bp, Cannabis indica
agagaatagatagaagtatttgagatgattttagaacgtcacatcacccttttatacttctcctttatattatagaagggaaaaaaattcccaattttatatcttaatttattaattttttaacaaaaatttatctggaaaaaataattacactcctcacaacttaaatcctggactctgtgtatcgatcactagttacaagaaaaatattaaaaaatgggaattaaattaaaatgataagaatgaaaattttgttgttatcataagaaccaaataaataaaatgtgtagtttccaaaatttatgatggacttgcaaaacttaatagaatttcgaaattaccaaacaacagaagaccggcccaattaaaaactatttcctaactaaatgaaatcaatggactatttcgatagagttagggaaacctatttttgtcacttacagaaattaattaagaattaaatagtagggagaaaaagagatgtgggattggtctaaaagcgtggcaatatggtcaaatcggtaagaagaaaacaaaatatcaagttccatacagaacatggcagcgcgtaggattccttagagtcattgatgacgtggtaaactctgagtagtatgggcatcatgtgatcatcacgtgacttttaatctcaactcatcagatatcatgttgcatacagtttggggcctttgggcgttgtacgcatcgtcatgcccaaaaaaaaaaaataaaaataaatggactcccaacaccatatcattaggtggaagagggagtctttacaatactgtctaactaaccttgttgacactgtacgagtttggaagagatgactaagtacgaaaaataggatccaataccgaaaaatatatacttaaatacgacataatatgataaatctgaatagcactatacgtacatgaatatactagctcaaaaaacacgatacaacaagcacaaaaaaacaccaccagatacattagaaaatcctatgataaaaataatatatttaaattataaataaat

SEQ ID NO: 202299 - DNA, 1133 bp, Cannabis indica
gtttgcgtctagatccgcattcaggttcgcgtctaggtccgcatttaggttcacgtccgggtctaggtccgcattcgtgtttgggtcccgagtctcgattagggtccgggttctaggtctgcgttcggatctcgggttcgttcccatgtccaggcccgagtcttggtctgagtcccggcgctgagtccaggttcagggttcggatctgggtcatggatttagagtcttaggcctgggttcgagatttgggtctagatcagggtctgggtccagctccaggtctaggtttggatctcgagtgtaggtctgtgtcctgccctcgggtttaggtcttgaattaagttttttttatataattatatattgaaaccggatcggatcgatccagaaaaagttaggcagggctgagcaaatatgatccgagattcaataagtattcaaatatttcagatctgtcggatcgaaactccgacccgatctaattgaatggatcattttgacatacctaacggataacttgtcactgctacctcacgtcattcttagtataaatctaaaataaaccactacgtatagcaaaccactaaatatggtaccaaacaaggtaattaaactggacacataaacatactactacacaagatataaaacaaatcacaattgacacaaacaaactatgaaattcttggtacaaaataatcttcagtatacattataaaatagaaattaaataatcaataaaattctttaaggaaaaagaaaagatgtattagagcgaaaataaaaagccatctcatcggtattagtttctgttctatagagccttttataaggttctttggtggtgtatcctatctaatgcgctccctgttagagtcgagattggtagacgttttcagatcgaggattctagctgtcctttgtgtggtttgagagaagaatctattgaacacttattcctctcgtgtgaggtggcgttacatttgtggcgatcttcaccttgaggaatctaccttgtttgtgatgctggtattcgtgtctgggactgggtgaaatttatttgggatcttagaaatagggggatccgggttgaagaagtctttctttatccttcaattgttgtcgacactata

SEQ ID NO: 202300 - DNA, 635 bp, Cannabis indica
aaaaaaaactcttacatcgtactctttgtttgtaatttgtagtaggtatatttaatttgggaaactttctataacttccaagagttccaaagtgagcaatctttattacagattcccgagcatgcatttttggtaggtttggatgtaaatgtaaatagttaaagaagtgaaaaaataatgtctataataacagcacatttaccaacccgagactgagtagtgcaaccttggttggggtcatttctgttaatgcctatttttcttttcttttttaatattcatttttatcgatgagttggtcaaattggaagctcttaaatcgctatactaagccaactgtcaattagatggaatagtaccaatcacctacttccataatccaaattataattctccctttccttttttcccatatattattaagaacaagtctttaagggaaggtagaaatatattattgtgtatttgattatacatatttgggacactatatgtggctaaagctttaccaagtgtaaattaatgggtttggctagagtaaagtactgtaaatggtttttatttatttagttattaatatataatatattatattcatattcttattccttctacgctatcttagagctagtttg

SEQ ID NO: 202301 - DNA, 1382 bp, Cannabis indica
aattggtcttgaaaattggaccatattatatatgtggcaagagcacttcaatgagcaacccccattggatcatgctctaatagccatactggcactgcaagagatggcatattactattgatgtaatttaatatcaggtcctgtatatttttatttaataaagggaacattgaactaaaagtccctaaaaagttcattttgatgcagataagactccaacctcaaaaaatagcggcaatagtctctaagctcgagattcttgtaactctattggtcttctttttaatagatccgttaattcttctctaaaatgacacgtgttgacattaaattatagcataagtccctaaaagtttattttcatgcaaataagtcctcaatttcaaaaaattgtgacaacatccccaagctagagattctcattagtccataggtacctaattcgatgatgcatttgttgttccaaaaaaatacgtgttgatttttcattgatccaaattataattttaattaaaaattaatttaaaaataaataaataagtttaaaaactaattaattaactttttttttattatttttctattttttttatctttcttcttcatctagttcactcccagcccaacatcccaagttctggtttgctttactaaaactcttcaatttttattagcaagagggttactctaaaaaaaatctaagtaaagtttgaacgagaacctaagataaaaaaaatggtcaccaaaatccaccacgcaccagagatggggactggaggaatagattcaaggagaaagtcagagcaaggtgcaactatttaggcttttttggtttttttttctatttttctttccttttttttttgcttaattgcttttttgggttttctacatgggatcgtgggatgggacgaggaaaaaagtagagatgaagggatgacacttgtcgacgacaagcctccaccactgagaagggcgggtagcaatttgtagaagtttttttttttaaaaaaatatatatataatgatttttaatctttagtaaaagaaaatgaatagaaaatattaaagtttttgataaattttttttttaatttaaattatttttatgttgtaaactaataaatttttcacatgtgaaaattttaagaactacaaatagagctgtaaaattgggcaccttcgaactaacgagaatgtcgagcttaaggactataaccacaattttttgagattaggacttctctgcatcaaagtaaattttttggaaacttatttacttcaaagtaacgttccccttgatcgatacctgtagagaaagcccagtctcttacatcatgactacaccctctgatattgttgagtcttccagccaactctcc

SEQ ID NO: 202302 - DNA, 543 bp, Cannabis indica
aaggaaataggactgagtggatgataaagccgaagcttgcgatttcgatcgaattaaggggaaagagggaccaagtggaagagacgatttggctaggccagaagaaattgtgcactccattgacaatttgcggagtatctataactatatagataacgatatctgtaaaattatatatatctatatacaaatggtaagaaaataagaataagaatattgaatagttctgattctgaaatagggagaaaatctgggaagaatcaagaatgtgtttgaattgagtttgtgcccatttcggggaaggaggatggaggcgtattccagtacggtcgaacctactgtacacaaaccaataagatgatcaataaacggtttgacatgttttggataaaatcgtatccattgaatggaatttcataagttgcctattattcgttgactttgagtctatgaccgtttaacacgttgttggtacaaaagcaaagcttataaaaatatccttctttttcaggcttttcaggtattttttgttaaagaaaaaaa

SEQ ID NO: 202303 - DNA, 704 bp, Cannabis indica
atatagctataaacttatgaaaacaactaaaggactctaatgccttttgacattatatcattttaaacaagatcatgtaggagcttgtaatgcgaacctattcaattgcttctctcaatttttcaaattttattagcttctcattttatttgtctcatttaattagttttaattttactaagaaaaattataagtaactgaccaataaatatgctaataattaatttattaactaatgactctctattggtctttaaaattctaattttattaagttacttttgtcataatattcttttatattcattttttgttgctttaatttttagtgacgaagttacaaactatcaatatacggttcaatgagttaaacttgaaagtgctattcaagtgatgtataataaatatatagtcttttaagtttatacaatataatattttaagttgaatttcaaaatgtataatttatgtgtttaatagtgattaatacactattttaatgtgtataaagtatattaaaatgattgagtttacaaatgtaatgtttaaaatatggtggagagaaatatttataataaaagaagttttttgacatttttttattgattatgtgatcatgatattcatctttaatattaaaaaattaactaaacaataataattcatctctaaaaagattgataaaaaaaatactctcaaaagtg

SEQ ID NO: 202304 - DNA, 2624 bp, Cannabis indica
ctggtaaaataagttccaacactgtggagtagtcatcactatcctacgcgattgcaatagagtctttcctggggtgatgatgtcggatgtccctcctatctccattgtgagatttgttgaagcctttctgctccttgtacttcttgcaaaatcttttgcaagtgtctggaccttccatagaagtaacatttacgagtttccttctctgtggacttcaatcttgattgagagtgatggtgtttactcttcaaacctactttcttgggtgatctccctcatgccaaatacacatcctctttgttggattccttctccaattgtaattcaaaatcttttgacttaagtgcggtaagaacatcctctaatgtatcacgtctctgccatacttgatggcaaccttgactttgtgatatgcgattgggagcaatctcaatagaatgatggcctggctttcttcatcaaccttgtgatttaataagccaatcctactaatctcattaaatatgtcaatattatcatctaaagaaagagaataaatcattctaaaaccgcataacctttctagcaaattaatcttgctagcagttgatgactttaagtataattcttttcacttatcccaaaatcctttttctgtcttctctgggatgagttttcttcgaacactgtttgacagaaacatgatgattgtgtaatacaccatctcctccattttgctagttcgtctggtttctttttagctagtgactttgcatctccaagaaccttgaagaccttttgatgcactagaatccctttcaaactttctttccatagcgcgaagtctcatgttccatcaaatttctctaattcgaatcttgtcattgatgacataaaccctttcttcaagaattatagcgaaaagaatcttgattgtgcattcttaatcgattaccaagctctgatttgagagaaaatttagactaaagagtagagccaaaacaactaaaatttaaataatcaaacagttagcaatgaaaagattaattaaacgcaaacagtaattggagaaaacagggatgactgaatattaagaatcaaaaacgattttagcaataaaatgattaaattaacaccaagatatatactggttcaagtttgatagatcgttgtgatatatggctctactccaattctagaacaccaccaaattctctctttattgattgagcaagaacaaggtacattacagtcgagatcgattctttcatgagttctctcaaagtgttttaattctcacattcttacccaagaatcttcttcattttacaaaagattcttcatataaaacccaaactcaatatctcactttactctttacctttctctctctacctctcaatcttttctctctccatctcgaaactcaatttgattgttgttgtatctaaaatagtaagtattggtggtatttataggcttaggatcaatatcttaaagtcggtggctgcaagaagcgagattattaagttagttaggaattaaacaaattaaccaactctcctagcgagaactccacgtcagcacaagtaaggtgcttccgggaacatgcatgagagcttccaaaaatacagactaaagttactcgctgaaggagcttttgaataggatggagccaacttgagtcgactattcgaaactcttttctaagagaaacaactagccatctagaacttcttccggaaaaaggctaactttcttgaagaccttttatagaaggacaagaaagtcttttaggacctacttctacaagttaacaacttaccataaataataatattttttagagatatttttatttggaagtactatttaaacattaatgctcatttaatgcaatctttttaattaattaaattataataatatgaagaagttccaaaatgaaagggagagagtacgtgaataaaaatggtgactggtgagtgaaaaagaaaaagtaagcaattccttgtatgaaaataaagaaaattaccacaatagactggacagctgtgggaatgaaaggaataaagttagtggtaatgattaaggccattgggcacgcaagtgtgaacctgggcacatgccttggcagttggctggtcagttactttttccttcttcttcttcttattcttattttaaaaaataaaaaataaaaacgaaagaaaaattataacattgattgccttttggtctcatctcagtatccatccacaatttggaagatcacatttttaattcagggatcagttgtagtagaggaccaaacagtgacaccctcttaatctgggaaccttttaacgttagtgcactgcttgctaattaattataagtagaaattacaccagcaaaattataaaagtttattttttatggtataaataaataagggcacttctatagtggagacccttaaaagagacacaccaatgaacactctttttgttctcattttattggcggttaaatagatcccatattattatgttgttgctgcacacactaaattggtaagaagaaatatttgttcttgttctggactcttcgactgtcttctaatcgatgctggtcttcagcgcaatgaaaggctaaatgtttga

SEQ ID NO: 202305 - DNA, 654 bp, Cannabis indica
ttattatttgtgaatttaatcttgatatccttcatatcttagtgtttatgtatatgtcaatgtattttatattcaaggcttcttcagttttttttggttttattattattattattattttctatctttgtttgatgtatgattgtgacaattgataaaaataataataagaaaatataatgacaactcaattgtattgaactaccttgaaacaatggactgaaaagaaagtcttattactacatgcttaataataatatatatatatttatgatattataatatatatttttttaatagggtgacaatgttgatcatgacttgattaaaaactaatagggttgtccctaataatatttttagccgtaaactattagggactactttttaagagctacttgtcacctttaaaaccatatttacagttgattagaatttttgcttcctgaattttgacaagtactaaatcatgcctttgaattttgaaggtcgttaaaaatgtcccttaactattgaaattgttgaatttaaagacttttatttaatttcattcaattttattatttcagtgattgtttatttactgcaccatgctctccaaactttgatatctatcaaatcatgtaactcaaattatgacatgtactaaattat

SEQ ID NO: 202306 - DNA, 577 bp, Cannabis indica
taagtggattttaaccaacaatagcacctaccaatttgagtggccttaaatttgcatcctgtttcaatttggccctcatacattattgcatgcaaaggcaaactatgctttcttaagttattatgtcacttttactgaatagacacaatataagcatgtgtgttgttcctcgtataacaagtaacaaaaaattagtgtcgtggcaccataaagaatcaaattcgtgctttctaaggaaaaaaacaaagagagagaaagagatgtaaaaggaatttaaaataaatgatatatataaagttgttttatacaaaatattcattcctcatttatacgtacttttttttaatgataattgttgattgagatttttagtaactactaattaaatataagtaatagtaatttgagaaaaataaaaaatattttgtatgtgataccaatattaataagttgtagtctacgagttattaaaatatttttatttgaggaataaaataaaaaaattgattttgagataaattaatttttcatattcattaaatctaaacaaaattaattatgtgatattttatatatg

SEQ ID NO: 202307 - DNA, 1250 bp, Cannabis indica
tctatttttaataggtaaacaaaaaagacaaaaacactaatatacatacacacacaaaaagactaaattttgaataagtgaagagaataaaaaaagactgacctgtgtatagcttaaatgcagttgggagagctctctgtttgatagcccaccagatctctgatttattaaggctgtaaagccccggatcaattacaattggtttacctctcttgttcctaccaaccaaaacaaagttcagtaatcaaattacaacataattaacatacatacaaaaatcaaaactaagacaggaaaaaggcttacagtttccaacccaatctgctggagtgctgtatgaagttgagatctttactgggcaactcagaaaacgcatgaatcagatctgaaaccaaataccaaaaaccaaccacatttcccttattagttggattgaaagaaaagacagtaaagtaaagaaagatgaagactttttttttgaatgggacaaatgatcgaacacaaaaaaggcacccagcactcaccataccatcttgagagaccaaagggtaatcagaagcactgagattgatgaaccaatcccacttagaaaccctcaaaaggactgacattgcatgaagcgtggtggaaagcatagtgggtcctctgtaagtcaccaagtttgattttttaacaatccaaacattacccatttggctgaaaacagggtgttcccttatgaactcagccaaatctctgtgctcgctccttggagctccatagtccatatgaatcaaataacagttgcccggatggtaaagagcgtgcaacaatcgcttgagtctgcccaaatctcctttggtggcagagatcaagtaggcaaaggtcactggatatggggtggtcgtattattcgcatagtgattcaaaataagattaggcctgaaagtggtgatgggtattgttaaagtagtgggaatatagagaagagagaagataatggaggttgcaactagagatatcatgaacactttgatactcatttttgcagaaaaacaaggatgagtttcagtttgagtttgagtttgagtttgagtttgagagaggattagttgttgttgattgctttaaagagagggaagaagaagttattagtgttgattgagttgtggcctttgcctttggctttggcttttggggggttagagtgttgccttcactcactttagattccaactgaaactgaaatgggctctctctctctctctctc

SEQ ID NO: 202308 - DNA, 1530 bp, Cannabis indica
atgtgctggtaaaagttaaattttagccactgcaaatgtacgctggtaaaactttgatctctttgccagcgaactgtgctggtaaaagtgacatttcttgtagtgtggctaattataaattatcattattgtgttgtgactaaaatgtccgtggctaaaagtattagtcacaaaaattacaatttgttgtgactaaatgtatttttagtcacaatatttgttgtgactaaaactaaattcgtgacaacttgtaactaaatattatattttagtcacaagtaactttttgctgtgactaaaagttacatttagtcacaaaaaatttatgctgtgactaaaaagttgtcactaaaaatatcaattttttgtagtacatggggacaaggaatgactcgatatggcttcaaatgactgacataagagatttctccaaactgcaaattataggagcccaaccaataacaatttggtgcaggtttaatactcaactcttaattaattggataattttttaggggagtttgttattaattgtctatttttatcatatacatgcaggttcggctgcttaacactaatagattgaatgcaaaatatgtatttttaaatcttggttccattgacattcaggcagggcctctcgtcctatttcagcgcattgttcgatcgtttgatcgccatgaattcggataatgtcgttattgctcctatcataataagtaagtaaatttaaaattaattttataatttataactctacatataaaataataatatattaacaatcttatatgtttgtttgataaagtctgaatatccacacagccactcttagtattgttttgtagattcaaaatttatgggatttaaactcaaagaatctataggttaaggcattttcgattttttcatggtatctatatgattcgatatatttatagtttaattacgtatttcatatggtttgtatttactcataatttccttacagttactacttatatcaatggatctctcgatgaataaaaacactgaaaactgttaggaaagtaatgagaaaaagtattgggagaatattttttatggtataagtattctatatacattattactatctatataatcataatacactacattaattaataaactctctaataataagtaaaggtcaaagatcacaaattatctattgtgtttaatccaaaaatatatacaattttttttttattatatatatattacaggtgaagagtttaattaagaaatttgaaaagagagacaaaagcgcaaccgaccaaagacgttataaggaacaaagcttataatgtatggtggtggagaaacgtgtttccgccgtaaaatgaaataacatatatataatatatacatatttatatatgtcgatacatgacagccagattatatcatgtatatataagcaacgtagcttcacattatatatatatactaactcactactctacatgtatgtacagagaagagagtgtgatcgatacatacatacat

SEQ ID NO: 202309 - DNA, 638 bp, Cannabis indica
gacccgccgggaaaggttgatgatccactgttattcttctatcatttagtttcatcaactgcacacaataaaaaaaaatcaaccagtaaatgtgtactatgtactactagccatacaagtgaagaaaattcaatagttgaaaaaataaatggaagagaaaaaggaaggaattaccctttgtaagcaatggaaacgtttttgtttattgggatgattctatggatgggacaactccaccatctgtgagttgttcattgagtgaagcattttctgaagtgtccatgtgagaaatgtctttgcgtgattgtggctccaccagactcgaacaaactttagtttcttgctgaccaaaacactgtatgttacttttcaaattctcagccacatttgcagcacttgcttctcttcgagtttcacatggtagcttagctgaaaatgttgattcggactgctcgggttgttttcctgacagctccaaaggggtatgaaagagcaaatgagcaatggttctatccatggaattcgtctctgtctcggtagcacccagcctgtatataagcatatatgccattagattttgtttattatttacttatttaggaaaagtacttccttattattaggagaaatgtccttct

SEQ ID NO: 202310 - DNA, 1066 bp, Cannabis indica
ggttggggtgttaatgagccttagtacccacgagtcagattattttgagataggctgatgaatatgattactctgttcttttctcaagcttgtgttttaagaaattccatccctttggcataaaagattcaatgcatatttatagagtaatagaggtcatacttagttactctttgcctctaacagggtatttacatataatacattattttgggcttatcaagcgaagcccaatccatgagccaaataactgtatgttggcatgttgatcacggtcacagctgtaaagtcccaaaattatactcaaacatttctagatagtgaagaatcaatgtcccacacctcagcactcgtcatcaatctgacctgcctagttgatagcgaagattctggttggaatatatttattgtcttcatttggttcttttttattctcagtttgtctccataatggacagctgcatttaatatgacattctttttcgcatttataacacgcattttccccacattcacctagatgacgctttgtacatttggggcattttggaatatttcacccactgtttccattagatcggtggtcgttaccagtttttgtcctcttgtcttcacctaactgctgagttgtaatatttttcattaaagaccttttttgaactcatccggccaattaatagtattcacatcctttgtctgttttatgcaccaccgtccaccaaatgtgggtaccttttcttagaatgtacgatgcacacttcactcaatcatttccctcgacccttagcatcttcaaaatactttctatgcgactcatccactcttcagctacaactcgatctatgcctccctcgaactcaggtggatgttattttcgaaatctctctgctaataccttaagtctagcatctgcaccaggatataccaccacatgcagttggtgggtccctattttctggctctggtggctttatttgaacttgcggtgccaattgacgtctcagctaaagaagttcttcgttctgcttactaatggtttttttcattttagcaaaacactccttcc

SEQ ID NO: 202311 - DNA, 1689 bp, Cannabis indica
tcatttcttgcttcctctttacacacaaggacttgtgctctttcattgaattcattaatgttcctcacaaggcgaccctagagatcatcccataattcacctccagtcgtggataactcagttgtgattcctgcctgaagtgtcattagttgaatactatcattcaggtttttgacttttgtagcggctatgctgaagtgactttaacatgccttaagagactcaccaggttgttattttatgttggttaaagatgaagctttaggttggtgatctcttgcagcttgaaactactttttgaaatccctggacaattgttcccaggttgttatggaattatgggtaaatttattgaactagctgctcgtagctcttgttaaggatgctgggaataaaatgcaacgcaaattattcgagacattgctggctcacatgataatgttaaagttgtttaaatgagagacatggtttgtggtcccattgtactgcgagacatgtgggctcttaaatccctgaggaaactctaaatttaagatatctagatggaatggctcggcttcttcatctgagtcgtagcctggcaatttaccatgttctccatcttgatattttctaaaattatcctctagtttaattattcgtagttggatggggtccacttgttgctgatttgtattttgattaagttgatggggcaaatcatgtgcattttggtttaaatgctcgcaaaggtcaggatgtcttcgatttaggtgctcgcaaaggtcaagttgccttcgctcatagtcactcacagatcttttctctgaataactctcggattgataacttcatgaattgctcatgctttcttggtctgcataataacgtcgagatctacttccttcatgtttgcctactcgaccgactatgccctcaagagcttgaatgtccctagcttaaacttgcttcatctcataccagcgttcttctctggaatagattagatacacgtcctctacttaagtatgtgtatacatcttctctatctactcaagaaggacgttgaggatgtctcggaggaagcccacttgttcttggttaatttccagggtttctctcattagtgtgtgggattcccttgttccctagtcgaggctacctcatctcttcattcttgtgagatgcttctagcacatcagtttaatgattcccttggttagcaaatccatgggaagtttgtggaaaatctcgtcgatgttcttgattccttgtgttattaggatgggtttgattgtccattgggacatcccttgtatctctaaattattcaacctgggtgttttggagatttccctagatagtctcttgcctcctggtgtttctacgattccggtgttgatttgtccgtccccaaccaggaaggatacgccattttgtgccttgttactattcacagtatgaaagtaaacatattgggcctagaacagcatgaaagaaaaaaaacaggcttggacattaaaaaagaaagtattgtcgtgtcccaatattattgtaaagattggggaaaaaagcagtatttttgtaagttttcctaataaattaagctttgcattggatttggagcccatgtctcttttctattagaataattaataatttcaggaaaattatagtacatagtcccaaattatagaattatgttagtaa

SEQ ID NO: 202312 - DNA, 795 bp, Cannabis indica
tctttccacaattctccaagtacttcaatgtcccccagtatggcggccaatctcccttatttagttaactgtgctacttccgtagcttctgtcatgaatctacttatgtaggctcgaagaggctctcctggtctttgctttacttcgaccaggtattctaaatgtaacgtgagttggcgagaagaagaactgtgcatggagctccgaggagaatgctttctaggaattaaacctccctagtggtactttgaaataccactgatgtgcgccctctgatagtgtagcagggaatactctacaccgcacatctcctcgtaccccttgcaaatccatttgtatttcaaaatacttaagatgtgacaagggatcctccttccctatgtacatcttttaggtcagcatcttaaacttgaggggtagctccaaacgttgatctctggagtgaagggtgatccgcgtgctcggtccaactcgagatctgtgagtttttagctggccagaccttgaaacatattttttaattcatccaaccgtgcttgcatagatgggtgaactagttcagcctcgtggccgacctttgtcacatcaggatctcttagagttaggtcttggatgcggataccgggctgagtgaccggttgaacatattgttcgtccatacccctccttctattcaaatcatccctgagatcatgagccttacccagtctgttgaatactgaaacactaggttgtcttagtgattggttggtttggccggtctgttggccaaaaccgtcagtttggatggagtta

SEQ ID NO: 202313 - DNA, 883 bp, Cannabis indica
agatatgattctactcaccttatcaaaccaaacatttaaataaaagaatacaaaaacatataaaccaataaaatggtgccttcagatgatataatattaatgatgatatgaatcaaataaatggatccataaagatatcataattaaaaaaatcaattgtagaaaaaaaaaaactataaacatcaacgaatctgaaaaggaaaaaaattctcaatttagctatctacatgaaacttaggccatatgacaacggccatagatctaacgacaatgaatgaagctgaaatgacgccgttttgagttaaggaaggagcatcagtagcctacaggatcaagagcatttagtttggagtcatagtcaacagttcggagacatctaaagagtttggcacctggttggcgatgaagctccgcgaagtcgagagaaaaataaaaatagagatatcgagaaggacaaagagagataaattgtcaaggaagatgattcacgagcctatgacctcagatttaggtatgaagaagaccactcagatagaaaaaaaaaataggtggggcaaattgaatttgagaattttggatcagaaatgatccgttgaattggagcttcgaccctatctgaataaatagatctttttgtcatgcctatcattactcccttagtttagatgattttatagattaagtgatagttataggaaactaatattatcttttttattgggttgtagtaaaaatatcttaagaattttcttctttaataatggacggccacatcaaactaatcgctattaagagagactattgtaagactcgaatcattgacttaaacaaagaatgatagtattaaaaatatctctactattataacacacaacatatggta

SEQ ID NO: 202314 - DNA, 1646 bp, Cannabis indica
taactatcagaaaagaaaagaaaaatagctaactcataaagttttatttttactactccgataaaagaaatatcattagattcgaaatgagcttattttcgagtttgtgtaatattgtgctctaatttaattggtattatttcacaagaaaaaaaaacaaaaattaaaaataaagatctcttgaaccctaacggtttgaatattggaaagcatttttttttttttcaagtagagaataatatcatatatctttcaaaaaaaaaaagaaataatatcatataaatgaatgtggtaccattagcatagatgtaagcattttatttttcactatacaagcctttcttacaactcagagtatagtacaattattaccaaaaaaatacaaatttgtcaaagattttattttattttatttttaattctgaaaaattacatgtcggtggaaactaatagccattgcaattatttattaaaatccacatattttataagaattctatttagaatgaatatttgtagaaaaaaatagtaatgactatgtcaaaattgtccttattgtatataatttagggaaagtttatagtacacctcttaaaaggttatttcagtagatttcttatcagtttcgtcattgaggaaaattttttagtctattttttttcattgtcgcgtatattatataagattaatagtaaatttttaccaaattttgaatagtttacagtaccaaattttttttaacattgtaaactattcaaatttttttggaaatttacatgtgatcctaaataaagacaatgtacgtaattatgaaaaaaaattagtctataaatttttttcgaataccaaaacaaataggagacctaccaaaatacccttttaagagggtgtacagaaatttcttatattatatatccacaataaaaataataaagtaaaagttgaataataactcgtgtcattagattatatttgtgttaatcttattcaatttgatgtagcgctagctaattagtcaaaaataacatgattttatttatatcttgtgccgaaaaaactcaatcctaatttaacttgttgtgtttatttgtcgacgtattgtgttcatctctcaactaaatttatcttacaatacatgttgataaatattcaatatgattcatgattataacatatttgatttaattttttttgattatatccatttgttttgctcatttaaataatatgctaattaaatgaaaatatatatatttttaaataaaataatttatcacaatacaatgaataaaattcttaataccaattttaaataaattatgtagtgaatatattattagtcttaactaaaagagcattgctataaagtacttatagtgcttcgcactaggatgaagtaatgaagtgatgcactataactacataacaaactataatagctagattctctagttgttttttatgttgtaattttgtttttattttgagattttgtaattttactgcccataatgtagttaagtgggttgacgctaataattgtacgggaatagttgaggtttcgactattcctacgaatattttgtgtaacgactatgaggtctaatatttctttctcaattctagttttttttcaaaaaaaaaaa

SEQ ID NO: 202315 - DNA, 656 bp, Cannabis indica
ctaaaaaaaccagactgctgaactcatccacaccaacagcaattgcaacagcaaagagatgccagcaagcttgggcaaaatgacacccaagaaagcacatgaaaaagtcgtctcataatagacattacataaaggatatataagatcgacattcacatgttttgtgctaagttgaaccttcgtagggagacaacccgaacaagctctccaaaaaagtgaagaaccttcgaagggacatcaagcttccaaagctttttccagcagctttcatcatcaagatgaagccaattaccatttgaagcttgaagataattgtaagcacttttgacggtgtagaagcccgaagtttccatcttccaatgccatgaatctgtggatgttaagtcactcaactgaatactcaaaatcagttgagcatcacgctcttcaaacatatcttctatgagctatagcatatggtttcataaacattatataaatttttcaagctaaataaagtaaattttacattaaatttgaatcactttagtctattggatactagtaaaataaaagaaaagtccaacttattattcattaaaataaaatagaaatatttataaacaagtcaagatgataccaattaactctgttcttaaaggatttaacttgttaaa

SEQ ID NO: 202316 - DNA, 1949 bp, Cannabis indica
caaaaatcctaattagcctcaaaaatattatgctgaaataaccataattgatatgtgtatggtcaaagcaaaatccttatgtggaaacatatattcgcacattagctattttgcttgctttcagaccaaattcaccaatgaaactgacatgttttctttcattgcttgactatattagaaaatgcagagacaaatgtaattataaatagggatgaatgccaagaagatgacttggagctcccattgttcagtctacatacaattcgtactgccactaataatttttcacagaatagtaagcttggagaaggtggttttggaccagtatacagagtaaactcaccatttacctacttgtgaacatagttgtttttttggaaatgtacatattggaataattaatactttttattttcttttatttttattgttgtaatattttagggaatgttagaaggaggacaagaatttgctgtgaagagactatcaatgtggtctggacaaggagacaatgagttcaaaaatgaagttaaactaattgcccgacttcaacatcgaaatcttgtaaaaattcttggttgttgcattcaaggacatgagaaattgttaatttatgagtatatgcccaacaaaagccttgactatttcatctttggtcagaatcattttacctcttataataaatgcaatgttcattatgagttgccaattttgttctaaagatacaaactaacatttgcagatcaaagacaaggtaggatgttagattggcctaagcgcttccaaataatatgtggaattgctaaagggcttctatatttgcatcacgattcaagattgagaattatccatcgagatctcaaagctagtaatgtgctacttgatgaagaaatgaatcccaaaatttcagatttcggcttagctagaacttttggtggtgaccaattagaaggaaacacaagcaaagtagtaggaacttagtaagtcgatcctcttaacaatacatttttgtttacactatttatccatactaataaatattttgcatgtgtagtggttatatggctccagaatatgcattcgatggcctattctcaataaaatccgacgtgtttagttttggcatattgttactagagattataagtggaaagagaagtagaggttattactatgaaaacaatggccttaccctcattggatttgtaagtgtaaatacagaagagcttcaatgaaggatcttataatttttgttaaatatgtcaaacaaagaataacactaatgttcttataatttgttaggcgtggacattgatgaaggagggcaaggcaaataaacttattgacaagtgcttaagggactcatgtgaaaacagtgaagaagcattgcgttgcatccatattggtctattgtgtgtgcaacaaagtcctattgataggcctaatatgtcttcagttgttgtaatgctgagtggtgagagtgtattgcctcagcccaaaccaccaggctatttttctgagacggatatgttggaaggagatgatcaatctggattgagaaagtttctatcatcgtcttcaaaatgtgatatgaccatatcagttgtcgggccacgataagaatctaggcaaaaaatgatacattgattgcatagaaatttttgagaaattgtaagaagaatcataattggtacatattcgtgtgtatatataatgcacgtatacaaaaaaaaaaaagtatgtcatataaacatttgagtgcaggtaatttattcattcaatgatatttattgcagtcaattaattgctagtcattttttattatttttgagaactaaagaatataatttaaaaaaattaattattattataaaatattattataaatgtctaaattaatacactgatattataataaatgcttgattatattttttttatttcatttt

SEQ ID NO: 202317 - DNA, 2874 bp, Cannabis indica
ccgttactaaatttgaactaacatagtatttgatgtgacatttgcaagtgatgatacatacaatacattaatagttagggagttacttcgttagaataaagataaacaaaaataaacaaaaaataagaaataaaataagttattaagtattttaacttatttaataaaaatatagtttatttttttttttttttgtgtatttttatgttataattttattaatttattattatttgtatgtaatttttaattgttaattcgatgttgtttaaatgttattttcatgtaatatttttttaattttcgtgttgtttttataaaatactataaaaatatataaaaaaaaaatatctataaccgtaaataatataaaactttataaaaataatattttatataattatttcttattattaaacgtataaataaaatagtatataaattataaaaatgatatattaatatcaaatgtgcctttggacataaaactggaactatagaatattaaaataaaaaaatctaagttttttttttttatagaatataataataaaatttctaataaaaattagagttcagagaaggttaaaaaaattaaaataatacaaaacttttaaaaataaaccaaataaattgaaattcaattttttttaattatctaagatatttgtggtaaattttttttaatattataattgttacacatatgatcttaataaaaaaatagcggtaaaattattttatcttacgattttgttgtagttgtaccctttttttggacattaagtgttaaatatgtcgtcacgtgtattaaataagctaaagaaatatgtcgtcgcgtatttttgaactagcacttattgacacttaacaaccaaaaaagaatacgattacaacaaaattgtaatataagaggtacttttgcctgcactttttaattatagtcatatgtataacaattgtaaatattaaggagatttcaccgcaaatatcctttatttaagccttacaaaatgtgttttaattatttatttaattttgtttttttgaatgagaagagataacctcactacaatagaacaactaaatcagtcattacaacatcgttgatagcggaagaaacattgttgccaacaaaattacaatctgactaacaacacatatcatgaacaagacaatgagcggtgttgttagtagattatttaacaaaacaattttgaacattaaatagcgaatcaagtaaaattttatactctaaaacaaaagaaccaaacaaagaaagcataataattgagctctggatcgcttggacagcaacaagcaaactagttccaataataacatcatgccatcctttttttgactcaacttagagcctctttgatgccaataatctcagcaagattgggttgaagacaacttagtttaaacaaggtataaaagcctccaactgttaaccctcatcatcttaagcaaggcagccaattccataggcatgactaactgaaaaatagcttcatccacgttcacattgatctttgtttacttctggtttaatctaatgctcaacactagtattagtataagaatgaactaacagcgggtcgaaacgacgagaatgagcatacctccattgatcaagaaccactcgcacggagaagacctcaccttgttattcctagaagatcatttttggcctttcatatagaccatgaaaccaataaagcctcctctataatatttgcacaatccttacttaataacaccataaaccaagcattaaatgcagcaacatacaaaaaatccagtcaatactcgacctattccaacacaaatgggcaaaagcaagacactatgacatgataaattgattcatcatccctatgacaaaaaatacaatttaactccatgggaacacgctttatacacatctgagtatgagttagtaaacaaccagaaagtgtcttccaagcaatggagaacgtttggagggatattggctttccacaacttacgttagatattggattctatagcagtagaccaagcccctttttgctcatgcaaataatagtatgtactcttaattgtatgaaaactagaattcttatgcctctaaaaccaattatcaacaacaactgaagagctaaggaaaagactaaaaataagatcatgatctgtacagatcattgacaatctcctcatcctactccaaacagtccatggccagtaattgatttagcttagcatcaacaagactaggatgtaaagatatgacataaggactaattgcattaggcaaccaaggagaattgagaatattcatactcaatcccaagctaatcctaacatgaacccctgatttaataatatcttgtgtctcaaaaatacttttacatataaaacttggattttaacccaacacagcagagataaaagtttcaggaggatagtatatggctttaaaaacccaactaacaaaagaattctcaaaagcagaagtcaccaatcttgtttaccgagaagagtcaagttataatcacgaagacttctaaagtcaagatcactcatgcttttaaacttacacaaacgactccagctcatccaaataacacctttaaaacagttggaattaccctactagtatttagacatcattttctcaaggtcaatataggtctataaaggaagaaggaataccgacataacataacttggaagagcatgagcaacattttcaataatacctcatggtctgccttagaaagaaacttacccttccaactttgtatccttttctgcatgttctccttaaggaaacccaagattgttgacttattgcgaccaatgatacatgataatcaaagataaaaa

SEQ ID NO: 202318 - DNA, 1041 bp, Cannabis indica
aatcttaaaacaataaaagaaaacaattaatagcaacagtagaacaactaaaaaacaaatgttgaacaacagtgaaaacttaatacagtatacagtataaattaaaaattttagtatagcttacttaataaaatctttttatcattattattatttttgttatttgcaatgttctttttcagctcaatagcagaaacagaaagtgtttacaaaaatacgatgacaacccctatgaacatttatacaacctgaaatttataccacatagaaagtgttgccttcttctctcgtagatcgtagggcacccaaataaacatatcaacccaggcacttgaaaatcgccattagtagaggtgactccacttgaaggcacatctagatcaacaatagtaaattaacaacaatcaatagtttatttaaacttttataatactaaaattttgtaatatatactctttcaaagtaattatgtgttgcaaagaaatagttgatcttgagtttcttgtccagccaaaataggtattgtcaacactaatttttccttgtatttaatatcataataaatcaaacttggttattacgagtatctttttgccttgaaggtttttttcgttgtgattacaaaaaatcaacgtcaaaatgcttgaatattgtaatggtattataaaataatatgaaataataataataaaaaaaagaaataagaaaagagagaagaagaaaatgagagatgagattttttagtagttattttaatagggtgatccttatttatacaaaaatatgattagaatagaaaattaaatcaatgaaaataaaaaaataatataatcaagcatttatggtaaaaaataaaggggatgcattgatttagacatctataataatatttaataacactttttcttggttgtctataaaaattgtacttattaaaaatacttgtttgaaaaaactcggtagaaaggaaaaaggagtagcagtgtatattaactactattgatttagtacattcgtaatcgacgaaattctaatctatat

SEQ ID NO: 202319 - DNA, 579 bp, Cannabis indica
attggctatggcttgcacttgagaaggagtcaccacaacatcttcagttgattcactctggtcaaaagtgtgtggtcctccaaaaatctcacacccaattgaggcttaaacaacttggacaacttcagttgtcttttgtaactgtttattgagagtggcaacttgagctgtcaaagcagtaatggcatcaattcatgaatacaagcttttttcttcctagtggctctttcatcagaccattgacggttgttcatagccatatcttcaagaaattcataagctccagttgcatcactttttctcatgaatgttcctccagatgcaacatcagtaatggtcctagtagtaggacataaaccagtataaaagttttgaaccaccatccacttctccataccatggtgaggacatcttctcaatagatctttaaattgctcccaagcttcatataaatattcaccatcattctaacaaaagttatttactttctcccctcagtgagcaacttttgaagtagggaagaaaatagataaaaactttgagcctgatctgccaagtgactattgagtttgattgtag

SEQ ID NO: 202320 - DNA, 929 bp, Cannabis indica
ttttttttttcttttacaaagaaaagaattcattaggagattggtattggttaactgccactaatattataagaggagtatttttcagtgtctcatatctctctataaataatgacaataataaaaaaaatatttgtcattgacttattatgtcacattagagtatttagtatttttttttttttaccaaaatgtaaaaagaaagagatcattgctaattgacatttacgatatctaaataagactacataatatactgtattttatatatttttttcaaatatacttgataaaataatgtgtaaatatatgtataaattcgggtacatttatttatataaactttctacaaaaattgatacaatattcattcatggcatgtctcaacgcatgctgttataattataattatgatcattattatgtttgtatattaatatttttgtatactttaaatactacacatgaattcatgcctggcagcctggcatagacaatacatgtcaataaattaaaatgccttaattttcatagacattctctcccaaattatttttgtgtcctcaaacaaaattaaaataagtcactaagattttaagagtcataatgtttttcttaatgcttattccaattaaatccaaatataaacaccaactatacatcttttcaaaaaagaaaaaaaaaaccaactgtagctaacgaaatgcaccttctaattttttgaaaacaatatttttagggaaatttaaaaaatgtataaaattttgaaaaaaaataatacatattcaaaatatagaatctaacacaaaattacaaaaatacggaacagaataatcataaatgtaaagtttatttccaaataaaatcatacatttataattatatttttttagggtttttttttagtatttttatactttaaaatattt

SEQ ID NO: 202321 - DNA, 1844 bp, Cannabis indica
agaagcctttggcgaaaacatcacctcgtccttagaggccttgaacttgttacttcccttattttttatttcagaattttgactggtacttggtgctgctgcagcaatactagattgacaagccttcgacgatggtaactcaccctcggaacaagcttccataacagcttcaactccaacatagctctttgaggcctcaactttatctggaaacaatgttgctaatatttccttcttggagctactcaaactcacacttatgtacgcagcatctggacatgacttgaacggacaacattccattaaattcacgatcaacataggattgtcgatcttcttaaaagcttcagcaatcaaattcaccttgatagttcgactgttgtttttccttactctcttaagggcagcacagaaagagggtggtagttgttcagttatgttgctcttcttcattacattgacgagtaaagaataagcttagccgagtctttaaattttccagctttttccagcagatccacgctgcgtaacgtatcacctattagcttggcaatatttgcagcttccatgaaatttttgttttcttcttccaacagcaatagttcatccaagcaacacaatgaagttaagaagttccgaattgaatccatggaaataaactctttaacaaattccatcatggacctcttatcattgatctcacaataatgaaaagcacatttctctaaaaacatttgttcaattctgtcaatttcttcgcttctctctgcaatactgcactcatttgttgtatggtaatccttccaatttgtctaaaagagagcttattacttagattaatagattcagctatcacaagattcaacatactctcagtagtgccagttcctctgagcacaatcatgtttttactcaatggtttccacaactccgggaatatgtaaccaactatgttctcagtagaaaatctaatgtactttaacagactctcagactcatgatgcctcagcttcagaagtttttcatccaaaagaaatgttgcaacctcatagatcagagtaagagccctgcttttgtagaaaattacatcacaattctggattggaaagtcataaagaccttggagtctgtccaaaaccatgactccaaccgaaagcatctctgaacaccaatatctctgagctgcagaaacaaactggtgtaattcaatagatgccaacttgccactatctgatcttcttctattttttctgtcaggatcagtatatgatcttttatcaatattctgagcccactcagcctcagggtataggagactaaatattggattcgaattactgaaatccctccaaacacctaaatagttcaagcagaactctccataatttttgaacttattaacttttggggtctcaagacatctaagagattcaaatacaccaacaatcttgtccttccaaatattccaaaagtacacaagtgattctattgacacgttcttaaaaatcatgtcttctgaatgcttcataacatcagtaaccagttcctctttccaatagtacttggttcttaaagaaaggtgcatgtccagaatttttctagccgatagaatctcgccagtaacactattgtgcctctgagaagtaatcatctgattcgcgactgttatcaattcactctcttcatttgcaatgatatcagcctcagtgcatgtctgtagatttatgtctgacaagagcaactgagtgttaaaagaaatgaattatctaaaatagtttctcatacattgaaataaaggaaagagtacagattatatgtaggtacagacacctaatgaattgacc

SEQ ID NO: 202322 - DNA, 1026 bp, Cannabis indica
attcccgcctacccctacaatatttaggaatgaaactatagcaatttttatgcatgtagataccccaggagggactcgaacctcagactttgtgggagttaaccacatgcctgatcatttgagctatccctcttgggtggactttcggtaaatctgacaaataggctggtcatttcatggccataatttacgatgagttgtacatatccgaacacaagattttttatttaaattttgcaaatccaatgccaattttcatctattaacaaacgacatatcataaatttcaggcagataaccaaattgactcaaatgatgctcaatggtaatatttatacactgtagtataccaaactagaaaactgcaaaaatgatgaaagcttaatttttaacacaaaccaaacaaagttagtgataagtatgataacataaactacaaggcagaagaaactgattaccagagaaggaacatttggattgtcctttacagcatcacgtcgaacatttaaagaccgaaaatagtaagttcttgtagcttccagatctccttcataatatttaagatctccaattttgttgagtgaaacagaaagtgtgtgtgttatctacaaaataatgcaaaaatgaattgcattaagtaagaaatttggatgagatgtaaaatgtcaacttcacataataaggctcttatgaattacctctagatcatttcttggtagcttagatagaaactcaacactctcttcaaaataagagatggcagaagtggtgtcacctgttgctcgactgcaacagaaatgataagttaggcctgcactaaaacaatcacttaagaatacaagactatagttaggctcatttaatgaaaaacatggaagtataaacccacctcccccctcctttccttcctctctccctcttttttttttttttttgtgggttaggttgggaatttatcatacgtaacttcaagatcaatctaagtctgcacagcaattagatgcaagtcttcggctccctgaaccc

SEQ ID NO: 202323 - DNA, 582 bp, Cannabis indica
tcattgttgtccatcaaaggtacatacatattaacataacaataaatacgatttttgcactgcccctgaatatttcctctacttgtatttttctcattttttttaataatttgcttatgtcgctataacttataagtgtaattgcagtatttcatagctttaagcaacttaaaatttaacttaattggcattaaacatacaaataataacactaaaaaaacacataattaccctcataattcattgttaaactgttatttatgcatttatttttatttagaatcttgaactggcttaaattaaagttgtcttagtgctatatcaacaaattgtttaacaaaatgagcaaaatgcaactccaaaagaatatttgcaatgatttgtattgttcaaggaaaatttttgcaacagaagaaaaacaaaaaatctacaaagggtcatcgttcggggaataaatcctatttattcttaacagtatgctgacaccaaaattggttgggtaataatctttgatttctgtcactatagatactgtttcaagatacctgatagttatccactagcctcagcagcacctcttct

SEQ ID NO: 202324 - DNA, 1307 bp, Cannabis indica
aaggagattgaagcagagaatataatggttacagagcaaaactaaactatttattacttttgcattactgatcgcaaaaaaaaaagtgaagattaacaaaaatagagcaaaagcaagagtaatataaggaaataaaatagaaaccaattacccaaaagcaaaataaagacattaaaaaaacctaagttagaagtaagaagagaagaataccagtcacacacacacacaccatgagagtgagtcttgttaacgattcattcagtttcttcgtaccattttcaaagatgagagagagagagagtgggaatggtgcggttgatactataaatacacgatgttacagtgtgtccgtactacgacgtgcatgctaaatcaggccttattttaagctctcctcacactcaatcactctcaatctctttcactctctctctctctctcctacaaagttcatataaacataaaaatgggtttatggtttaattatgatttttctctttttttttttaatctcatactcgaagccttggcttttattgtataggcaaagtgtttaatactttgctattagtgattttttataattcttattaaatttaataattatgatttgatattaaattatactaataattttatatgcagctacagcctacattgatcgagcgatgtatatgaacacgacatattatacattacttattatcttttagttctagatccctaaattaaagttattaaaaagagaaaaagtttcaagttttagagtactatttgatttaattgtggtagattaaaagctctatttaggtgtctttttttttctgaaaaggtaatttaggtgtttttttttttttaacaatctattaatatttttaaggacaagtgttgtaccattataagaacataaattttattctaactggataaatcctgattaaattgtcttttttgtattatcaaattattatttcacatcattccaaattataaataaaaaatgggattgggattaggagagcaagaaatggatacaccaaacaatacatgctataaataaagtttggcattgatgaaaatgaaataggggtgaagaaagtgaagtcaaatgaatcgagcagggtcaacttaggcactttcacatttatggtgtgaacctaatctacacttttattttccttttctaacctttttagctattcttcacttgttgcccaagaaacacccaatttcattgcattttcttcaatttaacaccctcatctcacaacttacactgttacacactatatgattgctatagaaaa

SEQ ID NO: 202325 - DNA, 963 bp, Cannabis indica
ttttttttttttttggtaacaaagacaatatgtctattttttgatgtagtgattagaattaattatgaatttacaatgcaaatatttacaaatagcgtaagatccgttttacgaaccaaagatagcttatcgtctaatcgaatggtatgctttgtcaaaatatgaacggtcaaagaaagcaagcaaatgggagaaaaatgaaaaactacacttcaactcattaacttatcaagaaaagttcacacaaaacatctacaaaataaaataagatgaagaaaagtgaattaacccagcccctaacaatggtattaataaaactaatagaaaaattcttaataattagaagataacaactcttaaataaattatatttaaaataaacttattggcaaaatctttgtagcagtaggccctccacaaaattaacctatagattaataataataaataaaactctattactacacattttaataaaaaaaatataagtaatgtgaataaaaatagtaaaacaatctatatatacatatattataatatcaatacttgaaacacttatctatcaatctgaaaagtcatttgtagaagtagtgagcacaaaataaaatacttctcttatctattgaccatataccacaaatttatccttaacataggggtgtgcagaaagttatccaatttgattacatccgaccgatccaatcccaactgatccaataaaatcggatatccaatcataattggattggatcggacgtaaatttttaaaattcaattggatcggatcgattgttggatggaacatccaatctaatagataaccgaccaaaccgatccaattatcatctaattggtcatccaattatatttataattttacatattgaatatattttatttaaaatatatattaattaatttaatatatattatttaacacgagattaaagaacaaaaacttta

SEQ ID NO: 202326 - DNA, 1114 bp, Cannabis indica
agagagagagagaaagagactatgcctgtgtgagagagatgagtatcatacttagagcttgagagttaggactgagagcttaagacttagagagttagggactaatgctctttatatagtagagcttacatttctaatatcccttaaaaataggtaagtaaagctattatttaataaattaataaagttaaaatgactaaattgccccttaaaatagggaagttgctgaaattttccctctatttttgtgggattttaaggcctgattcgatgcttgacttgctgtccgtggatgaaagttgcatgccaaaaccctgccaagaaaaagctggtcggccatgcacttgccagagtgcatgatggccaaccatatggtgtctagaagctagccgacctatgctggccatagggctggccaggggggctccttgaggtggctagtttgtcatttcattgttcctcctaagtactcggaccacttgttggttaaagtgctaagtagatggcttggccttcttgttggcgaattgtactcccacgtgacattgttgttggccatgtgggcatgccacatcaggtgagaaaaaattgagataacatttgcccttcaaattcttgtgcgaacgtctgcgcggatagggacatttcaatttagtcgagactaatgtagccttaattaggaaaatcttgtagtatattttagcctttgaaatatttgcttttaattgtctgatcaccttccttagcagtaagttaacaacattactcttctgcatgttttttgttatatgctgcatggcaagtgagaaggggtcccatagaagctatataagcttctatgggaactcattctcatttcctacatttcgctctctctctacaaaaactaacttttgaaagctcctccttctctctagaggtcgacgccttgtagtgctccatctctcaagattttcatgctattttgagattcaagcttcccatcttcttcatcaacaatttctagtagtgggtaaactttcaaatcccgttctttacttgtttatttgatttttccatggtaattttgaagcttttctttgttttaaaaattttttgattcccacattagatt

SEQ ID NO: 202327 - DNA, 506 bp, Cannabis indica
taattaataatctttgccagcctaggcggctcatctcatttaaaaaaaaaaaagtctgggcaggcggctatgattgatgatttcatagaaagttgacttttcaaaagatatgatccatttcttttaacataaaattaaaataattattctcaaaaaaataaaattaaataagtaaccaacagagaaactcattaaagattatcattccttttcttttttattattattattttaaaaaaaaaatctacacttaataatgggttttataaaaattttatttacagcaaaatatatatgtaaaaatagttttttaataattaaaaaatactttgttttcattttgaatgtaaattacttttttttaattcattcattcattatatttggttgtattttaaaataatttaacgaagaactgatttaatttctaattattttcaattttataagaagtaagatctaaaatataatttcttaaagttaaaagtgtcattatactaaaatat

SEQ ID NO: 202328 - DNA, 956 bp, Cannabis indica
aaaaaaaaataaatttaaaattgtttaagttaacattaaatcactaaatatatatatttttatataattatattattattattaattttttattttattatatttaaaaaaaatcttgtcaaacgtgtcacattcgtgttaagcgggtcgtgtcgtgtttaacttgtttttatttcgtgtcaattcgtgttgacccgttttcgacccgcatctaattttcccgaccctaacccgtaaaattcgtgtcgtgtttgtgtgtcatgtcgaaaccgttttgccacccctaattgttagctatcagtttttctttttcttttgaatcagctgttttttttaggctaattaagatttttgtctcctgaactttgacatgtaccaaatcatgcccctgaacttttaagattgttaaaaatgctccctgaactattgaaattgttggaattaaggatttttgtcaaatttcattcaattttactatttcaaaaattgtttatgtactaaatcatgctcccaaactttgatatctaccaaatcatgtctctcgaactttgacacgtactaaattatgccctctgaactttcatacatgttaaacttttttactaaaattggaaaaaaaaaatccttaaaatccaacaatctcaatatagcacaggagatatttttaatgaccttaaaagtttacaaaacgtgatttggtatatgttaaagtttagagggcaaaaatcttcattaacctttttttttttaacatcaaccaattgtctttttccatctcattaactatttggactaaaaaataataccagatctacatattaaattgatcattttaaagtaagctccccaataaccccattgtcaccgggttaagttaagattttgctttatatattatatatataaaatataaatacagatatatatagatcattagtggaaaaacacaccaaaaa

SEQ ID NO: 202329 - DNA, 1119 bp, Cannabis indica
ctaccaaatcatgtctctcgaactttgacacgtactaaattatgccctctgaactttcatacatgttaaacttttttactaaaattggaaaaaaaaaatccttaaatccaacaatctcaatagttcaggagatatttttaatgaccttaaaagtttacaaaacgtgatttggtatatgttaaagtttagagggcaaaaatcttcattaacctttttttttttaacatcaaccaattgtctttttccatctcattaactatttggactaaaaaataataccagatctacatattaaattgatcattttaaagtaagctccccaataacccccattgtcaccgggttaagttaagattttgctttatatattatatatataaaatataaatacagatatatatagatcattagtggaaaaacacaccaaaaataataataacaaataatgggtaatcccacatttttctcctctacatttctaaatatggactcatatatatatttctctctctcttgttccctccaaatccgaataacaagaaccacctgaatgaacaaaactctcaaataagaaaaaagagaaaaaaaaaaatacaaaattcccaacagaacacaatacttttctttttcatctcctcacaattcaaatcttattcttaatatagatgatttgattagatgtgtttctgcatgggtttagtttttttacattgacattgctttgattgatcattactctaatatcggtttcaaattgagtaaaactaaaaaacattatgtgggatttgggtaaagtggaagaatttgaggcaagctttcaaaggtggctcttttgagaaaagtttgtgtttggggtgtgggaaaataccccattttgacgaaatgagaagagaattatatggacagattggtgggttttgaaagccatggtactgagaagaagagcctttcaatatcatgtgattgtttgtgtaattttgctttgtgcatttgtcattaggggctcacaaaataacaggaaaacgtttcaaacaaatgaagatggtcatgatacaccggaaattcaccaaaaaatggtaaataatactcaaatctcaaataataattttcttgatttta

SEQ ID NO: 202330 - DNA, 646 bp, Cannabis indica
aaaacaagatacgacacccttcataaccgaagtcgttaacaaataccatactatcaaagtcgttaatgtcatttttgtcaatccaactttctccattttctttttcttctttaggcttccttccctattctctctatatctaaacaaacatatagatactatatagtgtgaggaccatcaaagaccaaactgcatgaacactaatttccatggtaccaaacatattgtcataaggaccaactcctacaccttctcccataggcatggaccctctcctaaattaatggtgcaactatttcttgggcatttaatggggttgaggattcccttttaaaatttgacataattgtgtttgtggtattgctggctggccatgctgtactttttatgtattttaaatttataattaatctagagatttttttatggatatacaattactttttttatatatataaaaatacgaaccacaaatattgttttcacgttaatattatattatgtttctaccacacgaaattaggctctccatctcttttatgacttcttgaggtattaaaaaaacactcattgcatagtttggaagtgcttgtgccactgtttttattaatatctatttgcctgcccttgataagaactttgttcc

SEQ ID NO: 202331 - DNA, 548 bp, Cannabis indica
tttgggtccaaaagttcattcccaagggtctcctataggtcactagagtatccgtacttccatttccgagaaaatacaaaaaacaagcttcaaaagcaccatcagaaacggtctaccattttgggaaagtgactaaccgtttttggcaggaaacgactaactgttttctgcatgggtaaaaatctcgagtttcgcactctcagaaacaccaccgaaacctatccaaatcatcaaaatcattaattttaccttgttatgatattttggtcctcgatcgagtctctaagatcgtcaaacttgaaaatatttttatttcacaaatagctcatattatattcatatatactatataaatttctgtaattaataaattacacttatttatccacttataactgatttaaattttatgctacgatagattaataggatcataatcccactcattacctgattagcctataatatatatataaatcctaattatttaccattaagtttgtcgagatattacaaaaactctagtaacaccttcaactaaaagacca

SEQ ID NO: 202332 - DNA, 630 bp, Cannabis indica
cgatattatgtaagctatgcataaatctatttgatcagattacaataatattaggttacaaatgttttaattataatttgtctaatgtataataataataattaacacaatagttttgacgatttataaaagtaatttattgtcctttgcatacatttaatgatattgtaaaatgtatgctgaatttaactttaaaattgtaataaatttggctaaacatatagaatgagtcaaatttgtagtcattttttatatataatctttgcacatattaaaaaagatagctttaatgatgttgcaaaagatgtgtcaaaattgatacatagtcaaatttgatatacaataaatattatatttttgccactagttaatgatcatattaatattgaaagtctttttttttcttaacttatttaattagtttttttttattatatatatatatgtattcaataagaattaattcattttgttgggtttttgaattaatttaaacttaatgatttagaatacatatgtagaaattaaattaaattaaatataaattttgttcattttttgaactaaatttaacataaaaacacacacttttactagggtacggctatgaaatttagtgggccatagaaa

SEQ ID NO: 202333 - DNA, 1770 bp, Cannabis indica
aaaaattgctaattagcctttaacaaaatagaaaacccatttaataactttggtaaaatataaaatctaaaataatattttatattaatttttttggtgaataatattataagataaatatgcgtgtacacatttaccaaaagatacctggaccagtttcatttttgtttttaacaaatggacaagtttcattttggataattagaagagagaaaaggaaagaagagagaaaaaggaaagccaggaggagcacaaaactaacacatatatagtataatcttggagctttgcacgtgctatttatgagaagtaaaataagacgtaaataaaaaaaataattaacagtaaaaatgtaatttgtacattacaaaataaaaggtatataaataaatacatgtggtcttttaatattaactggatttttagtataagtaaatgacatcaattaaaatgggaaactgacccttaaatattaattttctctttttaaaataggtaggtaaaaatgaagacattgagacttatatatatatactagaaaacaaaccatacttcaagttctattttgtttagtgagatattaaattttaattgttttttatatttttttaagaatctgggtaactattattttattccaaaaataaatttaaatatagtaaaaaaaattataactattgaaaaagacaaccttaataatcaataaatgtcaaattttttttaccaaatatttacatttataatttacatgtcatgaaatactcatatatttatatattctcgttctcctttaaaaatatttcgaataatacaacaatagagatatatacatacatattaataataagataagatagataaaaattttacaatcttaaattaaaaaaatgtgaatgacaataggaacaaacttgtttccttcatcctagttttgattttattttccaagttgctaaatgaaagtgaaggaacttattatattgttacgttagtagatatttttgtaattttttttaaaaattttgaataattattaatcgtgtagctagcatttttttttaataataaataattataaattataattgattcataaaaaaataattataaataattatttggaaacaactttatagttagaagcttatttttaagcatatagttttatgatattttactattttttttttaaaaaaattattaactcaaaaaaaatattaagaaaaaggaaaaagataaatgaaaagtttaatgagtaggacattaattaaaaaattgtaaatttaaaatgtttaatatggtatatatagtcaattaactcgataagataaatgaagaaaacattagtttacaataatattttttgtaatatataataaatattaaatatatttttagtacaaaatagtttattatagagtcttttaatcaaaataaatttttctagaagttggattgtaccattttaacttttagttgtagttttttcataaattcttcaataaagtgtttttaacgcggcttgtcaaacacttctttatcacagttttttttaaaaagcagcttttgattttttaaatattttttcaacgggccctaatttagattttgtcttatccagtcggtgattcgaatattttgaatcaccactaatccgtcagattagaactccaatcaaatcgtgaatctttttgccattcttactttcaagtctataataaaagtaaagattgaaaaagtctgttgtatatttattaacttttttttttt

SEQ ID NO: 202334 - DNA, 1785 bp, Cannabis indica
catagacaaaaaaagaagatattcatctactcgaacagaataactgtaatcatatacgacaagcctcgagttacacatagcgagaagaccacctcgcattgcaaaagccacaaaaggaatattacgagacagaaaccttcccgacacatagtatgttttccttattaagatggacaaggaggataactcatatcaagcgagatacaaccttcccagtaagcactaactatctaaagattaaaaacaaagagcatttgggtggttattagatattatctgacatgtgactaaatgaaacgtgaggattgtccacgttttattaattgttagatttgaattaatcccaaataaataactaacctataaataggggcagattctatagaaaaagggacggctaaattaagagagaaaatactactactgaaattctaatattgtattttgtactcaagaaatatccctaataagaaagactcgtagagtatgtagattttaactataaaaccacgtaaaaaatatctggagtgatttaattatttattattcattaatttctgtgaagtatttattactaaaaggctaattaattttggttaacgaaaatctacattaacaatttggtgctttcattgagagcgttagttataaaacatagaaaaatcccttcttacaaacaataatctatccatatttcaatggatgataacaaccaaaacgatgggaattgtcctgaggaaactacacacagctctgggaaagaaccaatgggatctcaaagaccccacactactggaacatcacgttctataagacactatggttgtgatattcataatctagaaagaaggaatgaagacaccaataatcctacctagtatgtgcatagaaacgaggatgtttatgatccaacttggtatttatcgttagtagaactagaaaatagacaactccgataacgcttaaccaaatttatctgacgaaacactgagttgggaagaaaggctgcagcgaaaagggtgacacaaggaacaaatcctcataatcaacttgatcctagagtaagaagaccacgaggcagacctcgaggttctagaatcaggagacaggaagccaatcacggaaatccccaaaacacccaagaagaacaacctagggtacaagggatgttctaatggataatcagacaaataatcaagagcaatggcgagacgttactcaaggatcccaatgatttgcaaaccaagggaatgaacaaaatgacttaccagaagcttctcacaggaatgaggattcgagacaacctccacctagggattaggaaattcctcgtggcaacgagaaaaaccaagggactcaacctaggacaaatgcactacctccatgacaccttgagtgtccttctcgatcagagaggaaagatgtatacacgtatctaaatagagggcgtgtatctaaccccttttgaaggagacaaccgatacaagatgaagcaagttctagttcaggacactcaaggcctcgaggacacaatcgatcaggtagccaaatgggagagggaagtagaccttgacgttatgcttactcagaaagcatgagcagtatgcaaagctaccaatctgagagatacttatagacaaggtatgtgagtaattatgagcaaagatagcccaatcttcgcgagcacttgaatcaaatacagccagatctttgcgagcgactaaatcagaatgcacctgacttacgccgtcagcttaatgccaatcaacaataggtggatcccat

SEQ ID NO: 202335 - DNA, 620 bp, Cannabis indica
aaagaaaaacaaaaaaacaaaacaaaagagatgataaattgaacaaaaagacgaccgttatttattattagaatgaaaataaataaattaaaagatgaccgttgttaagacaactagaagatgcatatgttgtatttggtgagtatatatatatatgataatatatagaagaatcactgatccatgccggataacatattctgacactaataaccatcttcactcatttcttcttcttcttcttttttcttcttttggggtataattatcataatttattctttcaatttggatgtgcataccaaaacaaaagaaagttaccatgataagtaagttttgtcacaatttgagatttacctatgtcaatgtagaagttcttgataaataaatgttagtaatgtttttctactaattatatagaacaacattaggttaatcaaattatgataatcccatggatatagaaaatcgtgtcataatatgaagaaaaaagattaaagggagactaagtatacatttttttttcttaaaaaaatactattatttttagttccacctaacttcctccttgatggactacaattatataggtaatattattagagagagatagacaacat

SEQ ID NO: 202336 - DNA, 776 bp, Cannabis indica
agagagactaaaactgcagagtggcatattgaagtggtgaggcttctatcattctatcagctctgtaattcctttgtacaaaatgcttttagtttgttatttatgccgtcatagatgagggatctttagaaagaaataaagatttttatttgaatattttggctgatactttccttagcttgtgatctggtatcaatccatgaaaaagaataagattgtgattgcatatattgcttttagtttgtagaggactgcttaaagccagcaagttttctcttgctggaaactatttaaggggtacaaacaagttctgttgccttggcatgagagtcttgtcattcaagctgcaaggtaatattttttctctgcttcgactcttgcttgccctgaagtaagtatcaaattggagtaaatagtttctctctgcttcaagtttaacttgtttttcttttcctttttatgatgatgtgtcaatatccttaaagttaattgcatctgcatgttatttaataagcatgtttcatagtcaacttggcttttctatttcattgttattcctttagactatcttggtaatagcctcgtattaacgtggtttgctacattaggcaataaatatgatgtttgtatgtatgtttcctcatttgtttagtcaagttcatgttctttctttctcaaagaagtaggattgcatacatatgtgctgtgcagaaagctattgctagagaagctgcatgcagttgctgatcaccagcaactggcacttgatctctgcc

SEQ ID NO: 202337 - DNA, 587 bp, Cannabis indica
atatgtattagagatgttttaagaaagttgaatagtaaattagcaatattatctaaaatagatagtgtttttgttttgtcaatctttcgtggtcaaatatatattaaaataattttttaaaaaaaaaaaataaaaattcataaattcgttataattgtaatatcattattgaaatagtttaaagtgtccaaaataaatttagggatttttgaatatgctcggtagattgaaatattgaaaacaactataattttttaaaaatttacaataataatattgttattataacaccactataaaaaaaaaaattgaaaaaaaatattacaaggtatgatttaagatatgatttaataaaatgttatttttagtcctctaggttggatgggccttatgcccgtgcctaatctgccttaactcaggtccgactctgagagccctatacctcatcggtatgcaccgcaagttcgtagctcagctcatgagagtacccatccaattgaattagttatagttatgtattaatgaattgtttcaaagatagacaaattagaagcattctagcttttaaaacattgtcttctaaaaaa

SEQ ID NO: 202338 - DNA, 671 bp, Cannabis indica
taatataagatatcatatatatatatatataaaagatttattaatactcttttagaagagaatagtttaaaggttccaattatttcttttttttttttttttgaaaattagcgtagtttaagggtccaatattcaatataacatctaaaatatatatataatagtgttggaaagtttttacaaaaaaaaaaatattaaatttagagtaaaagtttataattttaactgttacattgaattttttataaaattactgtttttttataacgctaattttttttagaacaattaaaaaataattgtagaataactgtgaaaatttaatatttttgaaaaaaaaaaattaccccataataaaaaagtaaaaaaaattaagaatttggtgtaaaaattttatgtacctaataataaacataatcacctagctacctctatgtgtacaactgttgcttagtcagagttgtataattttctccacaacagaagacactttagaaaaatatatccaccccaaaataataattataaatatgttgtccccacatacaacacacatgcttaatttatttaagaaatgttaaaaaatataagaagaaaaaagactactctatttatttatatctctttcttgcaaaaatctagctaccctcttctaatttctctctctctct

SEQ ID NO: 202339 - DNA, 728 bp, Cannabis indica
atataattttatgattctgcacgcgaagcacgatttattttatagttatcattaactttaagccaagtcccaaaacttggcattttattcctagtaccatcttaattgtttgaattggctccgaacacacccaagcctcatgtcccaatcgaccacagttaaagcacataaagggtaaggatcgtacctcaaagggagccaaatcttgcaaccatcactagggaaaagaaaccccggacaaagaggtttaaaaatgtcacaccatactttgaatgtaaagaatccctttgccacaattctagaaatgtcaaccttttgaacctcgatgatgtcccctgccaagctcgccaaacgttccagatttttttgggtaatggagcgaggaggaagatgaagaatacgcccactaatcagaaatctgattaaaacaatctcccaattgagtggcatttgatccatctttccaagattagagtaccattgttgagaaaccaatgattcttggttaaaattctgttcatgtccaaagttgattgaaaggagaagactaagaacattgagtccttagtgatgagtttaatctcaactccccaattcttgtttgaaatcccccaaactcgatcaagaatcgtcttcagaagagaacgactcattgaacgattggagaacagacgaccaatcgcacaaagcttttcaacctcggcaccccatcttcattaatttcccat

SEQ ID NO: 202340 - DNA, 886 bp, Cannabis indica
gagagaaacttataaactaaaaatatttatagccttgagaaaaaaaaattgttcagctaagtgggctcttttgtattgaccagccttggtcaccttaatttcgtttcaatgaaattccaagtttacaataaaaaaaaaaaaaaagaaaaaattgttcatataaaaatattccatatacataaagttataaacaaccatttactggaaggcaaattgactttggctgagtacttgtagttagaaacgttgggaaaagttagatggttaattataacttacaatttttttttttaatctttgaaaatcaaactgttttttttttctctatatacaagtatatgtatttcatattgttttttaggaaacatttctaaaaacaaagctacaaaaaattagaaattttgacaacaattatttttttgaagtttttattactacttttcctttcaagtttgtttatctcttagttattactgttgagatacagagtccatacggttaggaagttagttaagggctgttatagttagttaataacagttatactgttgtacagttagttagtgtgttttctgttattattacttctgtataaataccaactcttgtatcataacagaacataacattgaataaagaattccttttctcttcttgcttctctctctgttttcatctttcttgtaactcaacttggtaccagagctgaaggtgtacttccatggcgacctcctccggtgaagcagctcatcattcaatcgttcctacaacaatgtttgttcctccattacgactaaatcgaagcaactattttttttggagatcacaagtgcttccagcaatacgagcacatgatcttgaaggaattctgctaaatcaaaatcgg

SEQ ID NO: 202341 - DNA, 903 bp, Cannabis indica
atatatatatatatattgatatcagatgttaaccttttagtaattaaagttagcccataactctagaaactaaagctctctttatggttgtaaatggagtaatgagcaacttttttaggtctaagtagttgtgaaaatgggaatgagataacaaaatggaaaagagaaagctttcactataaggcattgcttccactttgcccctaaattgggtacaaatattatgtttcctatgataacataacatgaataaatgcttaatataataattattttctcttctttcttggctctcttatttgatcattttttattttttttcattatttaataattgtaaaataagtgactagtttaggagtgtataatttgaaaggttgccatgttatagatattatagtgaggtggggtatatataatcaattgatgggttgatttggatagagttaggtacttttattcaaccatgccggcctatgccataatacccaaatacataaaatgccatacttttatttcaagactaattatttcaaagttcaaattaattaatgttaaggggggtaaagttaatttctatcaaatatttatcatgtgtggtaaagaaatgtagtaattagtatttatatgatttgtaatcacatgctacctattatttaaaagccaacatataaagtaattgaaaagctattatacaagttactatttctagcactggttttatttattaaaaatgaaagtagttttgaaagatgtttgtacttaaagaaaaagtaggaaaatatctaattgaaagtgtgaaagtaaaaaatatagtctctcaactttgttatcaaaaattaaaaaagaaaaaagcctctaaacttggaatttaaggccgtgtaaaaccaaatatattatcat

SEQ ID NO: 202342 - DNA, 520 bp, Cannabis indica
agtagatgtgtacatgataattactcatatattgtcttaaatgttcttaaagagataaaatttgttgtcaaatacaagttgtatagattatacacaggaaaattaagtcacaatgagttgaggacaattgctcatttgactagatagttttttttgggttgtggctggattgtttgggctgattgtggtagcttttggaatttgtaattggcttgttgattaatgaattttttttctttgacaaaaaaaataacaaaactcatcaataaaatccttttttgattcagtttttgttttctctctttcagctttgtcgtttaacagaattatatatattttaatttaataattattataaaatttcacattaactcatagtagtagtagtgctccacagcacttaaaagaaaaaaaaaagtatttatatgttttatttaacgtacatcgaagcaatgaatgatatctttagtatcacctcctacactaatgtatcttaattttatttttcgtttttaggggg

SEQ ID NO: 202343 - DNA, 1003 bp, Cannabis indica
tcataacttcttccaaaaacgctcatcattacattgttcaaagacccgtaatgcaagagtttcctgacttgaatttccccattcatctgcatcaagaccctcatggcttccaccatttcgaccccgatccttgcccgaaactcgccgaaacaggctattcgtctcgggctgaacaagtgggtcgcagagattctcctcaggttcctccagtactccccgtaaggagcgaaacccatggcccggtgaaagagaagctcgtaagccgactccttaacgggtcgatctgcgaaggctgagctgttcagaagctctttcgccgtttctggttggctcgaaacaacaaaacgggtgaatccgactgagaatgccattaacgatctcgctctaaagctttctgaaagcttagcgagaacccggtgggtcaaagacccattacagaaagccaaaaccagaccaaggaaaggaagacctgaaggtccaggaatagcggtgggagcatggccatggtgaccaactcgagacttggacagagcccaagcaatcccaccgggtgaaagccagaaagcgaaaacggcgacgaagagaaaagaacagagcaaaacgtttaagttgagaagcaacgacgagaacccgttttgaggaacgaataggaaacaggattcccacgacattttttttttctgtttccttttcttgtgtagcagtgtttgtttcgtgagaaaacaagagacaaagatgagaagagagaaagtgaaggggtgaggtaattcaggagttcagacaaagggcgtgaaggtgtgtttgtacaaatgattcggaagaggaagggcttatatagagaatactcatcatggaaatggtgcatataatagtgggctgaatgtaaactatttaaccctggttataaaacctgagtttaccatggttagcttttgcattaattcttccaaagggtgcttatatttacacccctaatctaaatacacttaattttattttattt

SEQ ID NO: 202344 - DNA, 977 bp, Cannabis indica
ttgtcaaaaagcctagtttaaccaatacaatgacttttcaagcttgcaaactgtatttggtggtagcgaattctcctctttaggattgtaccctagatgaaaaaaggcattgctaacatcgagttgatgtaagaacaacctatgaactgtagctaaggccaaaacaagctttacaaagactaatttagtgataggagcaaaagtgtatgatagtctatgccttcaagtttattatagcctttagcaacaaatctggctttagatctttctactgatccatttgcattgtacttaatcttataaatctattgttgacctcgattttagttaacaacagtaagtcaaattaaagcgatcaagaataattaagcaataaatatgaattaatattaagtaaggaaaatactagaattatagagattcagccccttgataatggtaatagtctagtctcctttagtttgtattaacttaagagtacataagcaataaggccttgatctctctcgaaagctcttacaatgatctctgaaaattttactcttgaatctttgatttctctcgtgtgtttaatctgaatgaatttcgtgtccctgaatagtgagatgaccactatttatagggattaattacatcaattaatttcccaaattaataagaagtaaactgtgaaaactatttggtttctataattacaatgagcgtatagaaaactaggccggttgccttttcttctttgatactgcatatttatcccatgaaaatagggatattaccgtgtctagcaagtacgaagatatgtggggaaagatacttaattggttccttgtgttttgttaaaatacacacttggtaccctctattttatataatgatcaattagtaccctctgtttgaaaaaatacacatgatgaggacactaaggctaaagatacaagtcaagttctagttagtccggtgacaagggcgcgagccaa

SEQ ID NO: 202345 - DNA, 1223 bp, Cannabis indica
taaagcagcatgaaagatggttgtgttttcatcaccatttttgatccaatttgttatagatttttgagctaaaaaattaataggctttatgatgttgagagtactaatctctgacacattgcgcattctccattaaaagactatttaacatgtctttatttagagcatcttagacaatcaacatctcttgctttacttgaatttttgccttatgtatttaattgaatccttagttattgatgctttttaatacttgtttaagccttttcaattttcaaactaacttgtacataaggagtaccagaaatcaattcctcccaactccttctaacctcctcacataattgtgagtgacttccacatattgaagtatcgaaaggatttcttaatcaaattcacataaaagaaatcaagataagactatgatcaaagctactttctgagaggaaaacaacttctaaatttggaagtgtgtttgtccaccttgagctcaccaaagctcgatcaattttagagagaattttttcttttggttgctatttattattccaaataaagatagaaataacatgagtacatgagatcctccatttgacattgtgtcaaacattctcaaaagctcttagaaggcatgttgtgagcctttttcttcactctttcatcatatgattcaatatctcattaaaattctttactaccatccaagcttcatcaatttcatttgttaggtcctttatgtcttgccaaagtatttctctctatgcctcctcattaaatccatacacaaaagtgatattaaaacttttcagggctatgaattgattgagcaatacaatgaatcatttgactcgtacacattcttatatctataaaatacatacaagaatcccaagccacaattattctctctttatctagccaagggttattatcattaaataaactaacatagagcgacccatatttttattcttcacctttatttctaagagactaactagtccaatattttttgattaaatcaattgcttaatttcgctatgtttcgatcgtgaagtcttgattaaagcttaatttatcaatacttcctatggtatttgtcacgacgttgcggatagtgggcttgctcctaaatggcttaagcctctaaatggggtgctcaaagccaatatggatgctacaattaatactactaacaatttttgtggttcgagtttggtgtt

SEQ ID NO: 202346 - DNA, 883 bp, Cannabis indica
catatttgtagtgctggaaaaaattataaaaataaaacatattttttcagtgcagtttgatgcgttgacaaaactttcctgctaatatcctatttcgcaggaaagttttgctagtgaaggataaaattttaagtcaaggctcaaccactaacttaaatttggcgggccacattttaccgaaaatgttttgtccgagtgaaaaccaactatgcgaaaaaggtccaagtttcccgagtaaaatgacctttcccaactagaaaatatcgataacttttgttgacgaatttacttgccagcgaaaaattcctcaccaaaaatattttttcttgtagtgatttataaaaattaatgagcaaataacattgagatattaaatagaagatgaccatcaacattaaaatgtttagtcaattataaaaaaatttatttaatttattaaattaattaattaacaaatataaaatattttaacaaatatacattttaaaatgaagagtaaacatatataataataataaaataatattactttgctaattaatataaagttttgggtaggtctatgatacacctcttaaatagttgttttaaatagactctttttttgttttagcattttaggtcttaattttttttttattgtattgcgtatgttgcagctataaaggattacttactaatttttttaaaaaaatttagtagaaatttatactgccaaaaaggttcaaatattttgttacacgtgcgattaattttttcttatatgcatagtgaacaattgtttgaactttattttcagcactgtaaactctttataatttttttgaaaattttatttgtgatcctacataggtataacgtacacgatcatgaaaaaaagttg

SEQ ID NO: 202347 - DNA, 1009 bp, Cannabis indica
aggcttgattatatatcgtataacacacttgcaataaatatatatatatatatatatgttaatgtgccatcataattcatacatacatacatatatatagagattttataatatgatgtatatattatcacatcttcattacaaaaaaattatacattgatttgatgatcttggagaaatattagctagagggaaaaaacagaaatatatactttacaaccataacgaaacaaagcatatgtcccccaataatattttggtgcaaataattgtggtaattgtccattattctcaatcatcaatagtttgtgagtcccatatataaacaattaaatcgtatcgttatcacataataatgtattatgcaaattagtcctacatgaacatataatatttttattaatggaggttggattaattatttttgtttgtggatatatcatatgtatttttttgggatgggggttttcatctacctctttcacactttttactctcatgaaagatcaacatattcaatatattatgtttggttggttgtaagaaaagaccaacatctcaaaggataatttatagagaatatcaaatttattattgtaggaaatcaatgtattccgaaaattcccctacaccaatacccaacgttcaaaaaaccaagagcaaaaccgacccttcccctttggcggataataatgtatttttccctcaaaatcctactccatttaatggtagtataaagccttcttttaatggctgaaaccctagcagccaaaacactttctcttctcctttaaccctagcagccacttctcctttcttctcaaagagaagcttcagccgaacctccttcctcttatctttcttcttgctgcagcagcagctcttcaatggcagaaacttgtgtgatttcttctttgttcagcccttccttcttgctgcaaacatagcagccgaaccccctttcttcctttcctccttctagtttcaaacctgcagaaaaataagaaca

SEQ ID NO: 202348 - DNA, 562 bp, Cannabis indica
ttttaattttttttaaaaaagatttaaattataaattttatagtatatatagttgttttatagattatttttttataaatcagttattttttatagggtttttttaggtatatacaaaaaagataactatattaccaaaatacagttgtcgaattttaaacatttatacagctcacaaactaaatattacaataatacttctttttctaaaccttcagtcgcacaagcaaaaaaactcacctacgcaagcttcgatcgataaaccagcaagccaaccgaaacaaaatctaacaggcggagaaccaccattaatttagacgacttcacttgagaagaagattggaatcaatctaaacacatgttgttttgtattgatgaaaaaagtgcagaaaaactggttcgaaactaaaatcctaaccctgaattctggttgaatttgcaaaacactaattctcctaatatcaatttttagattcctaaaatgtagatctattcgaaataaatttggagttcgtgatcaatccaaatcaagcacaaacaaaaaaaatgtatcaatacacta

SEQ ID NO: 202349 - DNA, 2886 bp, Cannabis indica
tatctctattaagccaagcacaagggaaaataatcatttcccttctatgcatttatagaagttataaattccatatatatgattagcgctcccactcaattatactatcatgttcctaagatatgagtattgtgtcgatccaatttgtcaactttaacgaacaactccaataacataataatatagtttacatcaaacctaaccatatcaggattaagatcaagatcaactatattcacttagatagatataacggtaagtttatgatatcttacccaatgccaatattagtctggtccgatgtatatatctgatactagcatactttgccacactacaagaaatgtcacttttaccagcacagttcgctactgcgctggtaaaagtaacttttgccagtgcatttcgcaaactgcgctggcaaagagatcaaagttttaccagcgtacatttacagtggctaaaatctaacttttaccagcacatttatgcgttgggaaaagtcttttttgccagcctttttcattttatgctggcaaaagttctaataccaacattgatttgccaaccccctttcgccaacatatcataggtaaattctattttaccaatgcaataccaacttttgctagcaccaaaatgtgctggcaaaagtgacatttcttgtagtgccaatgtcctgaaaaggacttaacacttatccaatgtgtaagtaaactttatcgctgactatcatgtcagtgtaaatcaagtgtactcacaaatcacaggacataattttgaaacatataatcatgattatatttgactgtgacaacactataatcatgagtaactatatgttctggacttgatagaatttatacattaaaaatataatcatgaaagaaatcatatgaaccatgcaacataaaataatttctaatcttgtattaattagtaaatctaattttattgaaatcagttttatttagggcataaaatcctaaaaaactctcacttgcactaatataaaactaaaaatgtattttaattaatctcaacaccttgatgttcagatcaagtgtagtatgtagtattatctttgtaataggatctaccaagttgtactcagcatttatgcaaaatacaaaatctaaaataatattcactcttagtatttaagtgtacatatattttaagttaagtttatatattattattccaaataacatacacacatggtgacttagccacgccaatttctattttcttttgtaaattaattagctaaaaactaaatatatagtctaaaagttagactaaaaagaaatccaatggagccatctaaaatataataatactctagctccgcccctcatgcattttatatatgttttctgtttggaaaaatacatatgtagtttacttatcatatagtcacaatattatcatgttgcaaaaacactcataaaattaatatatcttcttctttgttgaaaatatacatacaatatttctcctctctattcccatattaatatactccccaatatctctgtttaattactttacgagtataagttttgcagctgaacattttttttcttttattcacaacttcctttactaatttgattaaagagcataaattaacatgtgaacatatacttacggtgtcgcattccgattcaatttgcataatccaatttgcaaattatgttttatatatgcacattgaaaattaattttcaattgttgttgcatcattgacatactagattcgggatgacgataacagagtatacattggagtcaaatggcacttatacaaaagagtactccattgtaaagaaaattaaggctgatgtaaagtatagactcaattttatttaccaaaaggaattacaaagaaggatatagtgaatgggtgcgtagtctttaaagtgttaattgggttcatgatgtaaagggatagagcctttggtacacaaacaaagttgagcaatacaatattctgattcgtaaaaaaaaatcttactttttacttgtgaaagtaacacatatttatataaatatgtataaaattataaatatataattaatattataaaatgttaatacatatgtacatttttttattttgtgaatattgaaaatttcattgtattttcaatattttagagatttgtaaattttgtcttttttagtaaagatttataaattttgataattaatatgaaacaaaatggttttattaaaaaattactaaactagaataattgtaatcagtacaacgaactagatttgatgattaatttgagttgttttgaggattgtaaattaaatttgaaatataaaatatgctagtaaaataatataaggtattacttgtgtgtgttagtgtcagtgttattagaaattacccctatactgtttttttaaattatttttaaatttacggtttgtgtttctagagtggttgtagtgctagctagttgcaatatgggtttttatacaattttttattgcgatttagattgcagtgctaattacaatatgagtttttatataaaattccataaaaaggtaaaaaaaaaatatttagatttgtaaaaatgaaaaagtttatttttttttatgtaattagtccttacgagtggtttataattttgttagaggatcagcgtaaaacggtaaaagcaccctgagagcaaggaaaaaataaaaatgaacttactaattcgtgtacaaacaccaccaaacaaaagcccatatgagattatgtttccaccaattattcgacttgtggcaaacagcagccttggtcatgcacacttaatatgccaaacaacttttgccggcaacggcgattttgattttaattttctctgaatgagatgttgg

SEQ ID NO: 202350 - DNA, 793 bp, Cannabis indica
ataaatagttaataagattcatctttaacagattacttttaaaggatatgtagtaaaagatattggtccatgtagtgaatggacctgtctctctcttagttacctctgacaaacttcattttgcagagaagtttttgcagattttgatccagttgctgtctcaaagttgaacgagaagaagatattagcagctggaagcactgcaagctccctcttgtcagagctaaaattacgagctattatagaaaacgcccgacaaatatctaaggtagacattttcttctgatgttatcataaatttgagtttcttaaaatgctatgtatgagacatctctgcaggctctataaatagttggttgctcatatattcagtgaaatacaaaatgtgtggttaggattggggaaaaagaaagtcaaaatcttgcgagattgatcggtgtgtcatttatgtggaatcatcttatgcattgatcttgataaagaataaccctttattggcatatttttttaaccttatattgactagggaccacatatgcttgcagttgtctctacactactagaaatttaatgacatgaaatagatgcttaatgatcacttgatcaggtaggttaggtaaagatagtagttgagaatggtggtcctgcatttttataactcagcacaaccgaatactaccgctcatagatgtaaactttattattgtatggcacttgacttgcttgtgttatttggctagttttggatctcatagacttggcttgcttgcaattattaaacactgtataatgg

SEQ ID NO: 202351 - DNA, 820 bp, Cannabis indica
ttattctatcttaattgggttataagtatgcacctcaaaagtttccatcctattaaggatggcaccgccacagagctaacctctcaaagagccaagcataatccctcctaatgagaggctgtggtgaaattcgaactcttaactcgagcaacgaagataccaataaaaacactttaccattataccacacaataaatggtgtggtgtagtaaactttactctttagtagtgactaaagattaactttgattaattatgtaactttactctttactagtgacaactgacaattatttagtaacagatttacaatacgtatttttttgttaactaaatattatttcccttcatttaattctaagtgattggaaatacaaatctaatataaaataactttttgatacttatgtcaatgattgttctttaattttattgggtatttgttttattttgagaattataggatttcatcttaaaattaatatttggcttggctttgataccatattgagaatcatgaggttttattttaaaactaattggtaataagtaaaatagctcatatttttatatatatatatatatatctcaatactctaccatttattacatgtagaacaatgtttacaatattttgagttatggatacattccttccatatgaaattcaagtatagaaagggatagagtatagattacccattaaaatgcatgtagatctcataaaataacaaagctttcctaccttaaaaattgtcaatcctattcccacaaagtcaaaccattaaatagtgttaacaatcttaggtacagtcttccc

SEQ ID NO: 202352 - DNA, 891 bp, Cannabis indica
gggccgaaaaggctctgttaaaacagtgggccgaatagaattgggttgtaaaattaaatgggccgattattttgagtcggaatcgggctgggccctctatggcccgtgtaacccaacccaacctgtcccggtcctctgctccctcacttctctctctttctctctttctctgtctaaaactatcagaaagccctaaatcataaaacctcctctccatcctccgcctcgctctctttcctctcttcgttccgatcacacctttcaatttctcggatcttggtaagtgttttcatatgattcgttaattttgtacagacaactgattcttctctttgatctgattgaatttatggtaaagagatttgattactcttgataaggcttatagaagataatgctgttaattcttgcaatatgctttatcacttttgtgatttttggtttttcctaattctgtaaataagagaaacaaaaaagggatcagaattgtcgatgttggaaaaaaaacatgatattcggtaatggagtattgagcagtactgtatttgtatgatgttgcagccgccagccggagccaccatgtttcgccaagctaccagagttctttcccggccctttctctcagcccgagctcggcccttctcgaccgaagtttcggcggctccagccgttgacgcgtcctttgtggagagctggaacaaagtgatccctaacatcgacccacccaagactcctcttgccttcatgaagcctcgccctcccactccatctaccatgccttcaaagctcactgtcaactttgtcctcccttatgcatccgagctctccgctaaggaggtaatttcttgtttaaaaaccttgctctatttttctgtgaaatcacttggttag

SEQ ID NO: 202353 - DNA, 964 bp, Cannabis indica
gccaagtttaaaaaggttgtagtctcataatagggcgcaaagcaaacaaaccaaaacaaagagtaaagtggaggcaatgccacgaggccttacctgaatcgcctgctgcttggcagaatgggctagcatgaaaatgtctttgttattgtaggacgcccaggtcttcataggcagttcagaggtagtcatagctacatggtctaggatttcgactgcgaaaggtgaagcctctctacccaccttgtatgccagcctcttctctaaggcctcgacctccactgtaggccccacaggaggtggagcatgaacgtcctccaagattttggccttatggaccactgaccgcacactcgccctcttgcggacttgcagccttttttcctccaagcgcccttttagggccgtgtttgcctccctcttataatgaccaaattttagaatatgaattagtaaaggcaattagcgttaatttttgatatttctatatgaatttattatttgggtcccatttttagaaatgggcgtttcaattataatttctcaattctggatattttattaaactctagaggtattatttgagttatatatgaattatgctatttttacaatttttcctcggcaacgacgaaaaatgcgattgatggccatttaagtcacatgggtaagtctaggacctttttcttagtgggattattattggagataaataaaacaccgggtttgagcggggttatggtttttgaccattttacccctaggcttattttagcttaagtttaagtactaagggcattttagtaattttaagagggggattaggtggccttttctagagttcacagcttcccctttagtgctgaatattgagattatgtgacgcatttttgaaaataagaaaattaaaagaaaatcaaaattagggaaaaactcttttctccttctctttctttgttcgaccacc

SEQ ID NO: 202354 - DNA, 1404 bp, Cannabis indica
tagtattgaccaaagcatgaaagtttcatagaaaaaactcttagattccttggaccttgtcctctcaaagtgaccaatacatatggcatcatgagttgaatggattatatgtggtcaaatctggttattttttggctacacacttagaggagcagcaatctatagttagtggatcccattctatgcaatttaaaaaaaagaactggtcactatcattaccctcaaaggtccgcatcttcctttggtgtgcactacatgactatctccccgtggcttccatttgcagattctccttattgttcactgtgtcaatttgataaagaatctatcactcatgctttgttttttgtcatcgtcttaaacgggtatggagatcatcctccttccatcttggtgatatatttgcaagacaaatgagcctaaaggaactgctgctccatgcctcagtttcatggtctaacctacagttgaacaatttgcaaaaattttgtggagtatttggaatgagagaaataaggagaaacatggatcaaaaccaaaaccacacgatgttcttctttactttgctatcagctaccttgaagagtttcatgctgcacaagttgcaaaaccatctgttgttatctcctctgctccaactttggctcctgtatctaaaaatattccaaggttaaatcccccttcaagaaggatgaagctgaatacggatgctgcaattaacaaatttaacaacacttccggttttggtgccatattaagaaacaacaatggtgataccattgcggttatgtcaatgcctttcaaagggaattttcgaccgaaagttatggaagcaatggccttactatatagtctgcaatggcttaaggatcttcatttacatgttcactatattgagacagattctcttttagtggttaaaggattggagactacacaagcctctgtttctgattttcatattgtttgttattgaatatcgctcttttagtgtccaatttccctagagtgtatatttctcatgtttataaatctgcaaatactgctacttatgttttatcaaaatatgatcttttcgatggaaactatttgctcttggttggaggaagtgcctcctctaatatctattgtattataactcttgttttactatataatagcatttttatctaaaaaaaattatatttttaatgtttttactttaatttgtattattacgttcagtaatataaaataaatgcagtaagagataaattaattaattaaaaaaatatatgtaatatcttcaattattaattatatttattttgaaaaaagtttcacttatatttaaaattaaagtcctatatatacctatacacattactatatatatacgtagagataggggtgttcataaaaacc

SEQ ID NO: 202355 - DNA, 953 bp, Cannabis indica
agcaaaaccataaactcaagaaacaaatagataataaaaaaaaaaaaacaaatagaaagagatagagacagaactgtgggcctctgtctttctctctttatcttttcaaaaaagatcaccttttcaagttggttggttggttaaggagagaagaagaagaagtaatagaagtaataggctagttttgagctttttttatattatagtaaaaaaaagagtgtgtattttgaagagataagaaggagcatgcaaagtgaacaagaatggtggtaatttatagagaaagttattgagattaaaaaaaaatgagaataaaaaaaaaaaaagaaaagacaaaacaagaggaagctcatgaggaggggacgatgcctctctcactctgacacaacaatcatgcaagtgtaagcatggaaggcggccggttaagactcttattttatttatttttattaaaattgaaatgaaaaaaataatgtaagagaaataaaattattaaaaaaaaaaaagaaaaaagattttattttgttttagtgtattttggttgtgtgatggtggatatggcgtcatgtgaatgatgatggtttttttgggctttggcagagaggttaggggtattttgggaataaaatgagacattatgggtaagagagggacaattatgggacttatggctagggcttgcatgatggtgggctaggccgttccaagattcgcaatgatggtttggattgggttcgaaccatcatcacctcacctcttctcttccacacacatataaatatatatatatatataataatattatacaatacaacacacacataataatgataatcaatactattttgtttttattaatgctttttcttctttctttattatttatatttttcttgtgtgttgggaactgtttggcaattatcataaaaaaaaacaactacttcttctctctc

SEQ ID NO: 202356 - DNA, 779 bp, Cannabis indica
ttcaatttttaaaaataatttttatgtctaacataatatattttacaattttgcttacatactcagacactggacctggaccatggaaccggacccagaccccagacctcgaccccgaccacgacccgacctagaccctaaacctggacttggaccctggactcggacttgaaccccgacctcgacacagactcggacccgaacctggaccccgaactcggacttggatgtcgactcgaaccccggacaccggatcctttcctcagacctcgacttggactccaaacacctgaccccaaccccgaactccaacctaacctggactaggacccgtaccctaaaactggacccagaccctagcctaggttcgggtccagggccgggtatgtgactgggcctaggtttggggtctgggatcaagtctaggtttagggattgggtttggggtccggatctgggtctaggtttcaatttgggtctaggtctaggtttggatttgggttcgggttgagatccgagttcgagtctgggtctagtggggttcggtacaaggttagatgagttcatgtcatagtatggtatagaatattaaatttttttttttgtaaaaaaaaaatctaaaaataataattttaaaaaacttgagcgaaacactattaaatttttaaaataataaaaaatagttttttattctcacttttaaaaatacaattctcaaaactaaaaactaaaaacataagcaaaaaacctcaaaaactttccttccatctttttttttt

SEQ ID NO: 202357 - DNA, 1048 bp, Cannabis indica
tctgttgattaacatgtctgcaatcagtaggtctactaatgcctaaattatatttactgcaactggaattttcatcattactctagcattgattttcttaaatgaaaaaaagtaaagttcttgtccatgattgtaagatttttcttaaagaaatgtgctctgatctcttttatttgtcccatgagtggaagttttcacatttgttgtttgaaacattgtagcctcacatacatggatatccccatgttttagaggagaaggaccagaggcacgagaaggccataatgcagcccttgttggtaaaagattgtttatatttggtggttgtggcaaatcttttagtactaatgatgaggtgtattacaatgatctttacatattaaataccggtaagtttctattttactttattcacaagtaattaaatgttttgactataagtttggttaattatactatttgatctcatatgtgcattcacatgatactattcatacgatagtacaagtctagttgattggcattatatatctcataatgcatgattgttatttaaaattacacatggaggttctctagcttaggagtaacgtatttgcttagcctgaatgaaatcttttagggttggtccagcttgaagccaattttaataaggttatgggtggttaatgggatagggtggcctaatagctggctttctttctcctctgctaagtgaaggtgagcttttaggaagggttggttggcatagttagttacccggtagctagtgtagttttttgagtagggcttttttttttttaactcttgtatgcttgttatagtggctatcaatgtggacagcaaagcagggggtaattaactgaattaacacgtttttctaattttgtagagacatttgtatggaaacgcgctacaacatcaggcactccaccatccccacgcgatagccatagttgctcttcttggaagacaatgtaatgtgattggtggtgaagatgggcatgattattattgtcagatgttcatatcctcgatacaggtacgt

SEQ ID NO: 202358 - DNA, 1221 bp, Cannabis indica
gagaaggtcccagttccagctaatgaagagagccatgattatgtagctcgtgtacattatctctagaaagtaaccccttggtaagctgaagaagaagtatctcgaggtaattaatgtggatggtcacttatcatacttagggcagagtgtaccttgctattaacttttcaggatagccaatataacttcgatacttagaataatttcctcatagattgtataacacataggtttaatagttggtatcctaggttctatgtccagcttagttgcactagctcatattatgggattgccgagcagtacgagaaaaaattggatagggcatgccacccagattcaaattgggatctagatccaataaacccttatgatatattcatgatcatagagtctagggagtttagtaatcactatagtcctccctcttcatgatctgatgattatggtaactttctttaagtgggagtttattccccattctcctttttatttattcttgattaagtgttgatgtatctattggcctcgcagatatggatctagaaaaccttctcaacaattctggcaaaaaagggaagaagaggattgttgcctcggaaacctcattaggggtgaatatgaaacctccgaagagatccaggaaaaccactgcgaacaagaaatgtgcatcgcaacccataaatcttgaatttttagaagatcaggttcaagtccatactctagccattgtacacgctgaagaacaagctgaaggttcgactcatcatgctactgcgtcttcgggtgaagggcctaaaatggctctacttgaaccttcttgccccttgccaaacgaagcagggaacactggctcggagtactactcgcaatttaccacctcctgctggcaccatttcaaatccttccagtctagcaactggggtttgattaacaatggtagccctgagaaaatgttcaaaaggagtctcatctttaccctctcggtttgttcccttcttcttttctttgttatttatctttctttcgaacttacatatagaagaaaatcatatgtatattttccctttgtaggcatcctttttatctcatgtggctcagcgttggggtctccagagggtcaaacaattggaaactgaccttcacaaatccattgaacaacacaaagttgttgccaaaaaatggaatgatctcagaaggagatcacgcgattgaccaagg

SEQ ID NO: 202359 - DNA, 1217 bp, Cannabis indica
acatcaagcaagacacggattcggagaaacaagccagaaactttaaggagagtcattttatcagcttcaaggaagtctctaacttcatccccgatcattttggccaacttataggacttcattccaaagggaatggagtgaacatggatccaaaagggagaatatcgtatctgattgggaagaagagtgtcaagaccagcagggttggcactagtgaccaaacagtggtcaaaatgccacggctggccctcgatgaccctcctcatgtccccctcacaaccaaactcaaccataaacatcccattgccatactcagagaaagaaataggagcacgagtgatccaggcatttctcatagcttcttcaaaccattcaattttaatggttcgagtagtaaaaactctaaaaacaagacagaaggatttccccaattcaacaccctctcccacatcatctagatgttcatgaacgacagcctctttctcagtaagggacaacacactagccatattatcagcaataccctccattacccaacacaagaaaaacagacaatattcccagtaatactcagagaaggaaaatagaagcaagcataagagtaaagaacgccaaataacccacacccttaaatagatagaattagagaaatacctgcatgtggcaatcttataggagaagaaaacactcataatgatcatcctactctgcagtaatcctagcccaaatccaagagccttagatgtaatcatcgatccctccttgagaagccaaaacgacggcttcaattaaattggatgggatatacgaagagagagaacagaaaatccaaagagagaaattcctggagcgtgattctctgaaggatttaattaagagagaaggagaagaaaagaagagatacgaaagaaagaagacagtgaaattaattagaggttaaatcgcaataaatgaggaaagagaaagttattattaacaaatacaaacaattacaaacaattaaaaggaaaagatctgaattgaaagttagaacaccacaagggagagatcaaaactggaagggaaccagaagattgtaacgggatgcaacccactagaaagttccagagagagaaaagttttttctgaaaattgctttgattatggcggagaccgtttattgtaatatagttgattatagttgtgaggttgatttatcgttgttttttttttttttt

SEQ ID NO: 202360 - DNA, 607 bp, Cannabis indica
ttaaaattaaaactaaaggatagaatgaacaaaaaaaaaaaaaaaaaaaaatttatactggtatagatttaaaatccaatatcattaaagttagtacataatttgctatgtcgttagagtaaaataatataaaaattttataccaatttaataaaatgatgtgctattagaaatgctcaccttattgccacacttgtttattatgcacaatcgcattaataagaaagatttagagtcaacaagcacactttatttaatatataataaataatacttgtgtcttatgcgtactaaatacgaaattatgaatagatgtaattccaaatattcaatgtaattaggaaaattgattaaaaaaaagtaattaggtaaacaaattaaaaaggaacaatcaaaattaattttaatggaacaaaactaaagttattaatttgtggtggcaaatggaatacaatgccaaaaattcaaaagagaattaaaattaatctccacataacaccacgatcttaaatttggtattttttttttttcttcaatagaaaatttggtatttttcttagatcgctgacatttcctcttttttaattatttgtttatattagtgaaa

SEQ ID NO: 202361 - DNA, 788 bp, Cannabis indica
gtttcacttgcaacaaaaaatacagtttcgggcataagtgcaagaatcgaatcttagtttggtgttgagaagaagaggaagacgagtcagaagcatcactagtagctgagaataataattgcagcgagttggatgattcactggtggatgaggtaagcttgaactcactatcaaactcgactaaccctcgcattttttgcttaagtgcaaaacatggaaaagaatccttggaagttcttattgatataggcaatactaacaatttcattcaagaaaacttagctcatcggttgggactaatatgtgaggacaataagtgtttcaaagtttatacgggcaatggtaattctctgttgtgttccaaaatttgttgtgttgttgagttgtggctatagggacaccaattccaagttgatttgtatgtgcttcctatatggggattggatgttgtgttgggaatgcaatggttacaaaccctcagtccatgcttacatgatcataaggctttcactatggagtttcaatggcaaggaaaacggtgaagttggctggttctgcaaacttaggtgtagatcaattaacttttactcaatttcactcactgatcaatgaaggtgatgttcgagaggtgtgtcgcctcacggctatacccaaagttgacagctcgcaagcgtaatgaacaacagttgggaggacaatttgccgagagaggtccaagcattgatttcagagtttcaagatgttttaagagcccaaacagttgccaccttcaaggaacgagtagagta

SEQ ID NO: 202362 - DNA, 1467 bp, Cannabis indica
taattgattccgttaaagttaacgattttataagtatattctgttataaacataacaaaagttaaatgcacaacaaaaaaggttagatagacatttatatatgtactaggcggcaactacgtgcaaggcacgtcatatcttctttttgatttttaataaattaaataaagaaattattatctttaaaaactaatggtatacatgtataaatatatattttaaaatatagtagattgtaataatgatatttaaatgattttacaatatatttgttgcaagtatgattagttttttatcgatcatattagatactttttgtacttcatcattaagaaaacaaccccacatagttaaatatattgccttgaaactaaaaattagaaatatttgatatatttatataatttaatttaatttaggaaattaaaattttaagaaaagtagaaatttagtttagtaagtttgtttcttacctcatatcaattagatatatttcttggattctttttatttcatatgttgttgttacattttttagttgcttgagttgtattgcgactgctaatatatttacatatttaatgcttaaatatttaagatttgataataaatttgcatagaaggaaaatattattagagaattagaactaagttaccaatttcttctttagaagacatgtaggtgtataagtcattaaaattgactattttgtactcagcttgctcatttttgtcttaattttttggtaattcttctatttttgttgtagatgtaattatctattgatatagataatttttatattcaaaatggtcatgtgttttagtaacacgtgtattactttattttcaaaatggttatatttaaaatatctttccaagtgtcgatatcagattcaaaaattgtaatttttactttattttcctatagtaaagtaaatatataattataaataaatttaggaaataaaataaaaaatattttatgtttaattgagtattaaaataaataatttataagagttaagctttatgtctgtactattgattcataactacttatcatttttttttatgtccaattattggattgatattgttgattgtggcattctattgtttaattctatcattttaaattaaagattaataaatttaaaagtatattgttacaaatatggaaatttaataatagtataatttaaaatgattaaattaaatcacataaaattttgtatagtaataatcaaattaagaaaaataaacaaactctaattaaaggcgtcttctcctacttcatttctcattcattgtttgtatgaaactaaactctttacgtaagaaagagctcgacaaccaattccatcaaaaccttcaacctttattcctaagattttgagtttaaaccttataacacactaactacctctttaaaattggctgatacaaaagcccaatgggcaatca

SEQ ID NO: 202363 - DNA, 1148 bp, Cannabis indica
tgatgaggctcattacttggattgtaattgttaaatagaaatgaaaagagtaataatggttctgagacagtggaaaagcttggaattggacataggtcatgctctaaattttgaagggtattggccaaaccaaaccagtgtatagtataattctctgatgttctctgtttttttacatttcttttgtttacttaatgtttctcaccattttgatacttttataatgaatcaataaatgggcactctgcagtagaaaaatatttggaaatcagcatcataatcaacaactaagaaacccattcaagggatcatcttctctgtaaaggtatttttatttgttattgcagccagccaatgttgcagacaggagagccactgagaaagtttcagtttgcagcttccatgaggtactttcttatgtgactgatgaattcatttggacctgtgaactcgaagttgctcagctcaatcttcatctgccctggaagctgaatctcttgctttgcaattgaagagagagctgttgtgatgctgttttcggattttaataaacagaagaaagcagaggtgtttgcaattactgtaatgtttactttctttggtttagtcttttgatataaaacattgtctatatgtaaatcatatgatttttgaacaggagaagatccacctggttctggtttgttcaacaaggtgagtaggggagtgatgtacattaaaggaaatccgatacagtaaccgaaggcattgaaatcaatagaataaaacagaatttcatgatggccaaaattgatgcagtgggcttttttgtggcaccaatgtggaagctgttgagatgtcaaggtcagttcatacatacatatcattgatttttttcttttgtttacttaatctttctgaaaaagaccacattgcacttctgtttggagcttccatgaggtactttctgatcagtataaacaaactctttcatcacccgagttctctgattttacttgcattagttgctccttgcactactgatgaagtcacttggtcctgtaaaatcaaagttgctcagctcaatcttcatctgcactggaacctgaatctcttgctttgcaattggagagacctattgtgctgctgtttacagattttcaagagca

SEQ ID NO: 202364 - DNA, 1310 bp, Cannabis indica
gcccctaacttattaatttgaataaattttcaactttatagaatcattaatattccattaattaatcacttattaatttattaatttgaataagtaattttcaactttacagaatcatcaattaatcagttgattcatttattttgtatagccgtttatttatttatttatagcatagccattaatcactttattgttttgtggcattatttaattaattgatgaaattatgaaaaaataagcgaaacacaaacaaagacaacaacttgacttggtgcaacaaatatatacagacagattagaaataatttacgaaacttttttaattaaaataataaaaatcatagatataacatgctattaattatatatattaactacgaattgtatttccctcaaaccaactctgataaacatattgaaattgatagaagatacacaggcatgtgcatccaacaaaagcagatctaacttcaaaagtaaactaattaaaatgtacaaacagttatacagacacaatatatgatctttaccttatacatatatttgtcaaaaaacaaatctatacaaaaaataataggctatatagttgcatgtgaatgtatataggctataaaagattagaattaaaagcttaccaagtataatcatagcatcaggaaaggctcccaaaataggaagaaggaaaccaccaatgataccaggtccaagaatctgaagcaagaactcacttccatgggacaacaacttagccgaaaggaacatgaagtagccatacaccacaatcaggaagatgttccctagcacagtggtggtgcatggtaggaatccatacgactcgtggcagttattagactgcgaaaaccggtttagagagatcaaactcggtttccggccacttgatgagatgccatctgagaccaagtacgactcacctgaattagtagaaataatactttgtccggagctgctgcttagggttagtaacaaaagtaataatgctactaggaaaagttgaaaaacattcttcatagccatattgcttgattactaattatttgtgtatcatagcttagaatgttattgggctttattggctatatatatacagcttcaaatgagtaaataaaaataaatattagatgtaggggatttggtaaggattattcgaggcaagtagaaagaattcaaatttaagaatatggtattggcataatcttaaaatataaaaaactagcagggtaaagacaaagtcagtcctccaaattagaggaaggagatattaagtaggtgaaaaagcttaaattgct

SEQ ID NO: 202365 - DNA, 1331 bp, Cannabis indica
atggtcagaaccatatataggtaaatgagagacctttgccttgggaaaactaacacaccattgagggtcagctatcgctcgatcgagtcttttacgaatgtgctgagtgaattttcttgagttttgccaagtaaacaacggtccctcacatcccagatcaatgcctcctgaattgtacaaaaactcctttagaatttctccttctctgctgtggaaaggtctcccaccaattttctcacttgcctccaaaataacatttaaatcgcccattaacatccatggatcgctgccctcttgaattttaagaagaagccaattccaaaaatcctgctttagagccatataaggcggaccataaacacagaatagagcccatggtggagttccaagggatgaacttaccatggctttaaatcccgagtcataaacttccatcattctcaactgaattccaactctccaaccgatacaaaaaataccagcaatgcccaccgcgggaatacaacattgattgccaaaacacagcctttgcaacacttctaccataacctccgtgctcaccttagtctctgagaggaagatcacgttcgtgtccgtgtcccggataagactccgaagagtcctttctgcagggggcttgcagtgggccgccgaagccccctgcagttccaagataagcacctcattggggaggtgggggcacgcttccggccgcctcctcgccataaccaaaatcctgaacataattcactgggatctctacatagttttgtagaatatcttctaagttacctggtattgtagagttcgattcttgagcctttttccttttaaatctagttttgacaccagaatttatctttttgatctttcccgagccattaaaacttttcttgtttcgactatatttcctacccgtggctcctgctgtatcatccacatgcccactattgaatttcaaatttggctccagagcaaagggatccttttcgtcaggcaaaggggctgcttcattgtctccaatctcagtgatggagcatttcgaaggagatggagttgggctataccatgtgtggacctttcttttacgagtgcccaagaggtggatgatcaattctgataagtctggagggtttgaaattagcccttgttgggccctgaacttgtcaatgacatctggtttatagagcttaagaaacatctcttgtaattcagggttatccgtgggccacataattgggttatcattaggataattgtggggagtttgtgacatacagacccacgaatggggaatttcaagggcctgagtgatagtaggcccaatatct

SEQ ID NO: 202366 - DNA, 1699 bp, Cannabis indica
atagcagtattcgtcatagttacaatatcgttccttaaaatttttgaaaaaatctaaatagtttatagtactgaaaataaagtttttggtattccagtttaccacgtatgtttgaaaaatttcatacgataaactatttgaagtttttaaaaaatttataaagatgatattgtgagtataacaaacactgttgtaaaaaaaatattctgatatatattttctgacacaaaagttaactaagaagttgtaataaaatgttaacggtaaaattcatttattataagattaattcgtggtataaatatctaagtttaacttccggttgcaaataaatacctgttaacgcagattttcgttaaccaaaattaataagccttttagtaataaatacttttcaaaattaagagataataaatgattaaataactccagatatttttacatgattttacagttaaatctgcatactctacgagtctatcttatttatgatattttctaaatacaggatacaatacttaattgatgatattttttcttccaaaattattcgtccatttttctatgaaatctgcccctatttataggaatataggttgacagttatttacttggatcagtttaaaatgtaactgttcatgaaacgtggacaattctcacgtttcatttaattgcatgtaggataatatttgataactacttaagtaccttttgttcttatcattttcgatcgttaatgctgatttggacaattatatctcgcttaacttgagttatcctcattgtccatcttgatgtggaaaaaacgctaagtgttagcagatggttcgcctcgttaagtctttttagttcaaatcgtgaggtgactgtctcgctatacgtaaccggaggttgtcctgtgtaattgtatttattctactttgaataaataaatatcttcttttactatgtattctgaggcaagtgcgtgtctcgtcaatttaagttttaatagtcttttatccttatctcgcttaagattatatagttagtgagttgtgaatattttttattaaacctttgttaacgagttattttatcttgcatttaatgatataactttattatatcaggtgctttatattccactgcaagacacgtgtcagtttttgaagtgtaaccgaatttcgggtatagcaatacttaagtttaattttggcggttataatacctaagttatatttctagaactctatcggaatctaattattaaatattaagtaaattgctacgtgacaatctctaattggtccacatcatgaatttttaattttttcataaaaaaaataacttatatgtactaataagaaaataatacatggataataatttgacatttaacgttcaggtacttagaaagttctagaaatataacttaagtattattagtgccaaaaattaaatttaaatatttatttataattaaaaacttaatttaaatatttatgctttaaactactcttattatgattaggaaagaggtgcatccacatctcacatacctatacctattttattttttcaggtacatcatttaattttcccatcaaatatattgtacaaaacgacaaaaaaaacacataaattacaaaaagtcaaatattttggagtacaccccattaaatggttgttttatggttttggtaaaagagagattttt

SEQ ID NO: 202367 - DNA, 528 bp, Cannabis indica
aagctttgtttatactctatttgctgtttcataccagtcgcagcaatcactattacacaagtcctaagtttttttaatctgggtttaattaacagatagttctgctgctacggctggttccattgcttccatttaatatgttgaattatcttctgtctgtgactcctgttcgcatagaagagtatgtggtggcaacctggttaggaatgatggtgcgtattctcttcaaatgactagcagttacatgtttcccatttttttatgttgcttaatatgaagtaacaagcttgatttacaaatgcattgttcatgattttcttgttcaattattgccattgacgaagtacatcctagcatacctccagaatacttatgtgatgccaaggcatttgaactaatcttagttacacctcagcaactatcttatgtgagagctcatgatcgtctacctatagggataattttatataggctattccaagaaacaatttaatgtcattttttccctaacaatcaagtcaaggctga

SEQ ID NO: 202368 - DNA, 692 bp, Cannabis indica
ttttttttttttaatttgttttatttcttagtattttatgtcgtttgagattagtctcagagaattctgacaaaagaaacaaagagtggcccacaaactgattttggaaatgagagagagagaggaattggggttggggttgggtttgtttttgtttttctctgatttcattttcttattattttttcaaatggaaaagaaaggaatctgaggggacaatctgtgtgtgttttcactttccggtggggtagggcgtgaaagggagagaaggcaagagagggattttgcttgactgatatctcttttgacttaaaattctacccaataaaaaaactagtcataaagttacaactatagcaaaggcctcaaaaaatcaccagtttctgtctctcattgtttcacactgaatcatcaaatgtaaaatatttgtagaagaaggtttgctatgttgtagtttgtaggtttcttttaacaagcttcataaaatcaatatgtatctatagatttttctttttttcggtaaggcgttctgaaaatgtttttagcaagtgtcgatttgaagaagatagtcttgttgacaaaggactatactcctaatcttaaatatttgtctcctgttatattttaagtgttttaattgttccccacactgccactcagggagggagggagagactttactaactcaaata

SEQ ID NO: 202369 - DNA, 561 bp, Cannabis indica
ataaatataaatattaaataatgaaaaaaaaaaacagtagcaatgacatatagtgttaccttagtactcctatatgcactaaataaaataaaaaaaaaaaaatgtaactacataggttagcttaagtaaccaatagagggctatgagaaagtgcatatgtgtagaaaattttgcgatcaaattccaaattgtatataaacacttaaaaaaattaatagaggaaagttggagttgctctaaataataactatacatttaaagtgtcctaagccaatattcactgtagattaaaagtaagggaattctgatagggttctgatatttaattaattatttattcaaaagttattaagaaaagaaaattattaataaggtatagatatactagatatctattaattcaaaggctataattagaattagaaaaataaaaggagccggcggctactgagaaaaataatctcccctaacatatagtgagtactgattacttttcattcaaaaaaaaaagtacttattattacttatgaataaaaaataattactttgagtaatggttgt

SEQ ID NO: 202370 - DNA, 1014 bp, Cannabis indica
gatgtgtttatcaagtggaaaggactagttgaaaagcagtttaatctcccaatcaagtttgtccaagcagactggggaaaagagtatagaacatttaaaaagttcttagaagatcagggcattcattttcaacaccctggtccaagaactcatgagcaaaatgggagggcagagagaaaacatagacatatcattgaaactgggctaaccttgcttgcacaatctggtttggatctatcttattggtggtatgcctttagtgctgttgtgttctttataaacaggttacctactagagtcttacattatctatcaccctatgaaactctatttcataccaaactcgattacaatattctaaagtcctttggatgtgcatgttatcctcatctacggccttacaataatcataagatggattataggtcccagcaatgtctattcttgggatactccaatcaccataagggatatatttgtgaaagtaatgaagagcgtgtctacattgcaagaaatgttgttttcaatgaacaactttatcctgcaaaaagttctcctattgaccatcaggtacaatcttctcactccacctctttcccatttaatacatttaatactataccttttatattcaaacactaatgtacctgctacttttgaccataatatgtcctcacctttaataaattcacaccctttacccgagacaccaccctacctagacatgactcatcacatgtcactattccaacggctccttcatccactttatctcccaacaatgacatgtccatgcctatcactgtaccaccttgtactatacctataaactctacaaacaatgaaacccgtgtcccttcctccaccttatctccaaacaatgacttgtctattcccttgccaacctactctgatgctttaccaataaatcctagtgtcccatcttcacttcccaatgatcctactcctaccactattccattagataaaacaaatatcataccaactccttca

SEQ ID NO: 202371 - DNA, 1041 bp, Cannabis indica
tttagttggaacatgtctcattcagagctttaataacttgctctgaatcgctctcaataaacaaaaatggtgcttccaatcaatcgctatctatagcaccatccgctcaaaattaataatacttaagtccatatccaattgtggtaaatttatatttttactagtatataatctattttagtgtaatgacaacaatagctcgacaataaataaataaatattttgcttaaaaaactcatattttatattatttacatcaataattaataataactaattttacaacataattatttaaataatttatcattatttttttgacagaaaataaaaatattacattaaaagacacaaaacttaaaaggtcttaaaatacaaagagtagctcaaaagactaaacaactagatctataggaaaatccagacatcaaacacgagaccagggccggctcaagctttaggcagcttgggccattgcacacggccccccatttttttactaaaaaaagttctttttattattattattataaatacattaaaaaaaattatatttaaaagtttaaagacatatctttaaaaaaaaaagaaataaaaactagcaatgaaggtcttaatgtacacattttttttttttttaataaaaggcccaattttaatcttttgcacaaggttcccaaaacgtttgaaccggccctacacgagactcacctaagacaaacgaccctctttgctaaagagtgaacatatattcaaaggcctattgtaatgagaaaaagataaactatggaaagatttccacacttgatatacatcactaagcataatacaaaactcattatgacaatcaaagaagacggtaacataccttgaagcgaaaatgaaaacaaagaaaaaggccatgaaacaaagccatcacctttgcaacatgtggcttaaaggtaccgatcaacagaaaagtaccaaaaaataccccattagaatccgaagctactatcccccatcttaaaatcttaatcaccaaggccggcatcaacaaaa

SEQ ID NO: 202372 - DNA, 892 bp, Cannabis indica
cttatgtattttaaatttttaaaaaaaaaaattgttttgatatttgggttgggtgggccttaaatgcaggcctaacctagagtcgagcctagtataaagcttacaccacttgtagaggttaatataataattaactactttttatgtaaaaacaaattctattttaccggttgagtaatttgggtcactcccttgaatgtcgtgcagtgaaaagtgaatcctagagatgtaacaactctttggacaatttaagttttctattttattggtcgatcagataaatgaactaatattatactactgatcggtgatttcatatgtatcttttttaagtcgcgaataaaagtttctttctttcctaatactaacaaggctttcggatcatgaggtatatacgtggttaaaacttctaatcttaaacctttcatattcttacgagactgtggatttacttttaacatgtgtctaagatataaaaccttgtgactccaatctaaggtgtgctacttgttagctagagtattttttttagaggtaactgatagaattttgttaattttaaattgttaaagttaaaattttataatagaagtttagtaatttgataattcacaatgtttaacatttaattatgtataattttatatctaaatttgataattattaaaccagaatcattaaaaggttacacaaaaatatattgaaattttgattattttaacattaattaataatttaggaattatgatcaaaatgtatgttatattggtagatttgcatagaaaattaaaaaaaaaaaaagaagttaaaatgtatgggaaaatcaattaagagtaaacaaagaggaagcaattatcataaacgataattatgtacgtttttttttatatat

SEQ ID NO: 202373 - DNA, 822 bp, Cannabis indica
tcgtggcatccaccgagtgcacaagtaacaaaaagttgtgatttgtgtggccaaataagacttatttggatgaaaaggaaagttaaatttaagaaaacaagaagaaaaaaacaaaacaaaggtaaactcgataaaaaaaaaattacgcatggtgcataaggtcgtggtattcaccaagtgcacaagcaacgaaaaatggtggtttgtatgaaaaaaataaagagaggagtataaaagaaggagaaatgctaaagggcaccagtagtgtctagtactttcttatgtgttaatatcactattagtctaattaagtatcgggtcttatatagttcgatgtaataattttttaaggaatatcgttagttaatcgtaaagcaacatatctaaaagtattaaacactagtggtatctaatagcaatgcgaaatggacgaaggattataaatccaatcaacctagatgcaagagacagagacatagagatccatcagattttactcttaccaatctgttgttttgacatgacacaatcactcataaatatatatatatatatataaataatctaagctagagctatagcctataggtagaggtagaggtacttgttgttgtttgatttgtaatatgtgatcaattaattgaactgaaagtaaattaatcaaattctctgtaactgagtaccttcatcattcttttcttttctttttttccttctacgttaataatcaaaaacattaatttcctagtagtactacaatctaatgcatcgtctttttcctatagcctaaaaaaagactagtttatacatatatatatatat

SEQ ID NO: 202374 - DNA, 1305 bp, Cannabis indica
atgttgtatttgaatactttagatgcattcaaagtggtaactatatttcaaataaatttgttgattctcttgctatagatggaactatgtatgaaacttcttgtatagttacccctcaacaaaatggtggttgttggaataggcacattgttgaaacaactagttttcttttattgtcatcttttggtcctcatttttgaagggaggcattttaacttcaatccacctaattaagatgataccatcttccattacttaagtttgtttcctttcaaaaaactatatgggcatacacctgactagtcttctttgagaatttttggttcagcatgctccatgctttctcctagtgtagagcatacaaatttatagtcttgttctatagtttgtgttctttggttatagtgaaggactaaagggataccattgttttgatccaacttcaaaaaagttgcatgtgtcacttcatgttgtctttcttaagcatatacatttcttctttattcctgtactactcataatttgaccaaatcatattttattcacattaattctttctctgagcataaaagtcctcttgtttctcaagttccttttcctcattactctcacatgtcccaaattatagatactagtacttcgcaacttgacatttctaatcgcctccacctaaagttattttatatgttcgtgatatattggatcctcgcctaaagttattttagatttcgtgatatattggatcctcgccaagttattttagatcttcgtgatgtattggactctcctcgttatcctatacttgtaagccaaactaccatattttcctcttattctactcctttcacttcatttttagcctctatctagtgtctttttgggtcttcctccaatgaagtgagttactaaccccctttggcagccagctaaataaagaactttcaactttgcacaagagagatatttgggatttggttcctttaccttcaagtaaaggtccaattggttctctttagggtactatctttcaaaagtcttttgtttccctccacctctttattagagttgtatgcatactctaatgttgatcatgatcatgatcatgataccacaaatcgcaagtttgttactggcttttgactcgttttgggtgattctaatatttcttgaaagagtaagaaataaactctaatctaacaatcttccaataaagcataataccaccctatgtcaactactatcaaagaaattattttgttgagatggttgcttgtcaatatgagtgtatgtcattctcaacccact

SEQ ID NO: 202375 - DNA, 1492 bp, Cannabis indica
ttgaagtaatacaagtaaaaagaaagtaggttattacttgatatttttattgcttaatttcgtttaattattatttaatattctatcgttttaaatactcaacgggctaaaatgatttcaacattttttattatatttagttataaaattaaattataaattttttaggttatattttattattttagataataaaattattattttacattaatttagatcaagttttacagttgtatattaaacgatttaaaaaattgatacaaatatagggtaaaatcattttttaagcaccattataatagttatcaaataataagaatcttcgtataataattcagtaaagcattaagcctagctccaaactctgcctgtgacaaatctgaaaataataatttcaaatagtatgacctatggtctatagagaacctatgaagtagcattcatatcttctgcttctttttttttctttcttcaactgtgtagtactgtacctgatcagtctaccatttattccaacaacaatttatttattaaaaaaaaaaacttccgattacaacgcttacaaagcttgtgtttcccgatcttgcaccaaagccctcaatcattaagtccataaactattatatccttacccaacttgtatatataattaaaacattgtcttcttaatacatgtggttgccatattgatgataatttataaaagagaaaaaaaaaagaagaagaaagaaaccgtcccttgtctttataattaaaaaactaaaactaaaatcaaaaggttaaaaacaatgtgacggaagaaacccacaaatgaaaaatatatataaaaaatagcaaatataccatattatatttttataataatgtaaaaggtgttgaaagaagcaaagtttagcaacccatcaatatccacaccacacaaaacaaaaaagtaagatccaacggtggagagacatccatccgcggaaacacggagccgctcgcacccaagactttggaatctcgcacacaaaaggtgcccacatcacaaacaccaatcactaaaccccaaacaacgacaaactcaacccaccgctttcattttctctttctcggctctccacactcacacgacaataccactaaatacacccccaaaatacacactttatacgccctcacccactacttccactactcttaaattactaacctaaccttactctaacccaacctagtctctacttcttaacttaaccttaactctaaacataacccaccaccttcctttatttatgtatatatatagcttcctcctctgttcctgcccagcttaatttcagtttctccatttttccagcactctcgtttttataagtttcttgctcccaaagaaataaatctgtgtgtgttcatgtgaagtgtgaaacctgaaatcgagaacatattaatatagacataatataaatttatttatacacatacaaaaaagaaaaaaaagaaagaaaaa

SEQ ID NO: 202376 - DNA, 722 bp, Cannabis indica
tttcactcacaagcacccccaatacattgacccttttcatttattctcttattctatattctattaactttgggcctaacaagatagcaccactttcattgaattttcaacttggtataaaagaaatgtttggccataatacacatttttcttttaagtactacttaagcagccaagagggtgatcaaattctgaaattgactgtaaaagcgataaaaaagccagaaagctctgtaaatactattgttccatatattggccctgtaagcaatgaacagctccttcttataataagtcccaactaggatcctcaaataatgacagcaacaatatattaagatcgagagaaattttagaataaaacattatggaagtaaatagtcgatctggtatttgatatggtatgaaggaaataataagaacaaagtgatacctcaactctccctagagcaaaatctcagttataatatattttcataatccatctcattccttctccactcttatttaagctgcataagtggatcaagaccatttatccgagagcggattctttgaattactgcagccacacgattctgctggccggatgtggaaaggtcagatttaactgcatcacctttagcaatatcactgcttggaaatccatgttgagtaagcaaaggtgatagctcaggcaataaatcaattcctgctaatgctgcgcccatttgtatggacga

SEQ ID NO: 202377 - DNA, 789 bp, Cannabis indica
gtaagatttggatctgcagcaacattgttgcttcccctttggttttcttcttgagtacctagatgaagaacactattgaattatcatagaggatccataagcaagatactatctcaaacttgagaatagaaatctgaaagtcccattaggaaagatattatgtattccatgtgatagtgttcttgaagcttcttgacaccaccacaaatacatccattgtaggtacacgtgggtttgtaattaaatagttcttcccaatttgtttttaatttggtaaagtacacgctcacaatttgtgtttcttatttcagattcatcaaattctttcttaaattgtagatatgtggcccattcctttgatgaaaccgaaccttaagatcgatccatatcgcagctgttgtttcatcatacataatactagaaaaaaattccttaaaaacaaaactcagtatccaagaaatcacgatattgttgttcgtcatttagacattatacatgatatggttagaaggtgaaggtttagaaatagagctatcaagaagtcttaatttgtctttaacagaatagcaaatagcaagttgcattgctctactttaggataaatagttatcttgaccaataagtggctaagaggctagagtattaccaagattaatctgcatgatggagataatatgaattgtgggattttcaaagtgaatttctggtatgattcacctatgaaatttttggaaaatttatctatgtagctgtcacagatctatttccagcttgagtatgtagcttgaa

SEQ ID NO: 202378 - DNA, 1114 bp, Cannabis indica
agactgatggtttatcctttttttggttggccagggttgatcgtggttaccagaatgggtatgatcgggcccgtagtcgcagtcgaagcccagtaggctggagtagtcgcaatcgtgaacgcagtcgtagcccagacagggcttcacgaccagtacggagtttccatgaaacaatgatgcaaaaagctaagttatcttcaccttctctaaaaccgggtttcgaaaaggaaacttttggaggacctcctggagcaggacatgctaacggaggaggggctcagtgtgctaactacggggaagaagcagaagaaggcatgataccccaagacgagtaaaaaactggtaaaaggggtagctttcattacaccgcattttttgtctgtttcttttcgtaatgctgtaagtggaagtagggaggactgcctgttacaagggtaaacattggtttgtggattttgacccctacagtggtgttggaagatgaaattttttgttactagattttgggggacactatttacttatttagcctataggttttcctagagaccaacaccacctcctcttaactttcttccctagagaaaaggatacgggggaaggaagcaaacatagttagcctaatcacgtggatgtatttaatccctgtgtacgtacgtagtagttcctctgtgactttgcagactttggttactaatttatatatattttttttctttcgaaaacctgttaaccataatatttttttattatttattagatggatatggaagttatctccttatttttcttccgttctttcattttcattggaccagtcatcttattcttataaattctgttattctgctggctggtgcattcgggacttgtaataacgtttcatatcataaaaatacttgcaataacgttatatatctatttatggctttccatgtatatatgcaaaaaatctattatagctaaagtgattaattttcaatcacgattcgtatgatgttcaagctttggtgatgaaaaattatgaagcagctcccaaattctgaagtttccttcaaccaaggtcacgaaaccagttgaaaaataattatcatgaaaattctaggttgattcc

SEQ ID NO: 202379 - DNA, 1770 bp, Cannabis indica
ctcctgccagcgtgcagagtactccatcttacatttaacttcttgattatgtctcagaaatgattgaggccttgaaaaagagagtggggaagctcgggcttgtccccttcgactaaaaagtccaaaggcggtgagaccccatccaaggagaagggagtagctaaagtggtcattgacctttctcaggaacaaactatcgtagacccgtctgcctcaaaagtgactaagtccaaagattcccgaggaggtagctttgacaggcctgagcaggcgaagggtggatccgagctgatcagaagcgggtgtgaacagattaaggctccggccccacctctagtactgcaccaatagactaaaagaggtagagatatgctcactcactatgtgagtcggtcggtccctgaggtgaacgaacaattggctggggcagacaacgacctgtctctggagctagtcatgggaggagtcctgaaagagctttcgtgggtaagcctttcctgacattttccttttgtttttttctttaactagtttagattttaatgtctttttctgcacagattggtttgaagatggccgatgcctattcccgagctaagtcggctgcaactaagaaccttgccatttccagcacaatgtggacgaaagtggacttggccaagaaagacgccgaggaagcccgggttcaacttggggctgtgcagatagaggtgggagaggtcaagaagaagctccttgctgctgagatcaaagtggtcgaactgaccaaggatctgcaggacatgccatccaccgagcagctcgaggctaatattgcttctttatctcaagaagtgaccagtctccgacacgaaagagagggcctctagatccttttatgtaggctggaggatgaaaagaaattcaaggaggaggagcttggggccgatgttgagaaacagaagttggaggtcgagaaacagatgtccgaagtggtgaggctcggagggaaggtgaatgccctagagacaactggtctcgagattttttctgacttttagaaggccaatcccaaggcaaactttgattatctaggcgattccaaagacatgtttctcgactactgtgctgctcaggcggcctacgaggaatctgaggcgacaacttccacctctcccactgatcatagtgctgaagggccttctgctcaaactaatgatcctcaagccccttctaactcagttgacccatacaaggagcctgagactccatctatttaagtgcatcctattactatcttttttttatctgtccggccataaggcttttttaagacaaggtgaccgacaaaggggtctctaaacttggaatctatttttgatttttcaaacaaatagatgtttgggcagcctttaatcctgggtttgaatgcttttgttatccttaataaattacattctttgtttataatcatcgtgcaattgtgtttgttttgttttttaccaaatgctttgtacaagtataggtgcccccaagcaaccaagcagacttatgactcttggtaactttttatttattttttacaagtgtgattttttgtctattcggggtttttggttcgaccaaaccttttgtacgcactggatggtaaattaataacatactgacgaacttgactcaattttaatttaaataaacatctttattcatttattggtaggaaatgtgtctgttactgtagtaacttacatcaaggctattatgctggtctgatttgatctttagcttaac

SEQ ID NO: 202380 - DNA, 1770 bp, Cannabis indica
tacataatagtaatatctcaattaattaactaattaattaagctgtgacagaggtctctacagtgacttttcctgaataaacaacttcagctgattttatgtcaacctcccaaagctctggcaaagcttctcttatgttatgaatactctctaatgcataatctgctcctttaactcttgggtaagtgccaatctggttattcaattactattaaaaaaaattaagtatataataataaattaataataataaaacattatcacaattaatagagtgttacgaaaattaggtatcaaatttctcaccagaactgtgtggaggccaactcttttcctagcttggacgttcgtaacactatcttcaaaaacaatctggatgaaaatacgaataatataaataattaagtactgtggccataatatgatgatgacatgaactgttatttatgttgttattaagtgttgtaatatgatgatcttactgttctttgggtagtcaagattggcaatcttgagagccttttctatagcagattcggatggtttgcatacaattggtgactttggtagaccagaagtggtggggtttggttgatcaaaatgcttaattatgttaaaataaaaaagaaaaaaaatactcatgagaagacattttaacaaaagaaaaaaagagaaaacaacattgtttgtttacaatttaaagaatatttacttacaattttgcgataaggcatggtaagcaaaaggtgccttaaaatggggtcaggtttaaggttgtcatagggtagtcttccatgaacaaaactgttatatatgacaaaataattgttaaactaaggtaaatatgtaatcattgaacaaagatgaaagaaagaagaagaaaatgaattgaataaaataattttgttacctgtgatattcatcatagtcaaagtcatagccaattgcctgcaaaagataaaaccaaagaattttttaatccatgtcctcctcaaaaaataaataattgaaaattaaacaattataaattatgattaaacctaaatgataaatttgaaggcgtacccttaaaccagccattgtggtgccatagttcttgtaaagaagattacccaattgaccaattttgcttctgtctataccaagcttttcagccatatagtctgcacgaaaaaattcaattaaatgaccactatttcttttttctacatactaaatgaaagcatctttatctttaaaattgaatatttaaataattgattaccttcaatatttttgcgacattcattggcaagacctgcacttagggggtaaagggtgtcatctagatctgcaattgtccaattattatttagtcagcttcatattatatataatgacagagcttttatctattatatttttaagtcaaaaatgtataaagagagtagctttaccaaacagaagacaatcaaattttggcctttgaacttggagaaatcggtcatcaaattccattttttgtaagagaggaaaaaaataaaacccttcagaaacaaaagaaaaggtgtgagcaaatgactatgcaataggcttaactaagccaagcttatatagaaatttcatttattcaatctctatcaataaacgccaaaacagagagagagagagagagagagagagagagagagagagagagagagagagagagagagagagagagagagagagagagagagagagagagagagagagagagagagagagagagagagagagagagagagagag

SEQ ID NO: 202381 - DNA, 668 bp, Cannabis indica
atatagcagaaaagcaaacctggtgataataactggaattccagcataagctgcattgacagctgcttttacttttgcagtcatacctcctcttcctactcgagatttgtctccaaaagtaatttcatcttgatgtttttctttaacgtatgtatcgataagctttgattttggatcactcggagggccactataaagtccctccacatcactcaataatacaaggagatccgccttcaattctaaagccagaagagctgacaaactatcattatcccaaaaaatcccagaggaatcctgcaaagagcgctcatgaacaaaacttcacggtaacaactgaaacagtcaacggggatatgaaaaacaaatttacctcatatggagctcttctggtactgactgcatcattttcattaagaatcggaacaacccttagagcaatcagtgaattcacagtttcactcagttgctttctgaaatctttatccctaaaatcgtgatctgttacaagaagctgggctgatgtcacatcaagctgcagggtagaaaagaaaatttaattaaattaaaactacttcgcccagcaatcatcaaactttgtcagtaagtaattaaatccaaattccaaagtacacatgaaactccagaaaacaagaaaacacctgaag

SEQ ID NO: 202382 - DNA, 1320 bp, Cannabis indica
atgcattgaaatagtctttctttcggtattttcagtaaaataaaaatagaattaggaatagaataagaatagaattaggaatagaatgaaataaaatttaaaattaagaatgaaatgaaataaaatttaaattttaaaattctaaattctcatgtaagaaattacaaaagaaattatttcatcaaaaaaatgtaaatgaaatgacatttttaatattttaaattacagccaaataaaaggttaaatagaaaattgaaaattgatttatttttattctatttaatttcattatctctaaccgaacacaacttcagagtcaccatattatcgacgagtttgtccgactgacttgaaatctgttttccgactcttataggtactggtttcagaccccggaaggatggactatcgacggtcatttccgatcgcttatctatatgaggcctttgtcaatatggggaatgcagtgggcattatctatgccaaaggctattcttgaagccccaaagatcaatgtcatggacagaatccacttatctcctaatacaaatgggttaagaaaatctcacactcatggccaaacaggagtccgaaagatcgcgacaaaagcgaaatgtttcgggaattcggttttcaattgttcctgctaaatttgtaacatgctagtagttaaaatcatatgctgtaaagattaataatatgtttaatgcttatatagtcattcttcactttccttaattcttctctctcagtaagagctgagggagatttatagaggaagaagtgtagaaataagaggcaacaaaaaaaaaaaggaaaaagagaaaagaaaaagaaaatactgagtggtaattgagtagctaatttcatttgcattaaattttgtacaattcttttttagtattcattaattaatttatcagcattgtaaattttaggagtctgaaaaaaaaaataagtacatatatgatgattgatgtgttagtgtctaagagcactcgtagagaatttttaaaatatttatgaactttaaagcacctaatagttctctactatatttttaaaatacataattaaaattttatttttttctaagttaaaacatatttttacattacattcgacattagtttctttaaatttacattatttttttatttattttttatttcatttaaatatataaatattattatatatatctttatgaaaaaaattattattaaaatctaaaacaaataataaaatatatttaaaacaataaataaatattaataaatgtagaacatgaataatgaatttaaataaatataaaatgaa

SEQ ID NO: 202383 - DNA, 440 bp, Cannabis indica
gttctggcaagttcaagtggatgcatatgtggttggtaatgatgctagttttgctgttgttcacctgcaagtgcagactatggattcgttagtctcggttggctatgcaaaggttgatggtgtccttgaaggagaatggttaggcatcgcttgtgctctgcagatggcaatttcaaggaagatccctaaggtttggattgagactgattccaaatatgttgctctagcttttgagcctagagagcttccttatggttggatacctaccctctttttaacttttacctttttctgtgtaagtccttggtagatgttaaagttacttatattcctaggcaggagaatgagtgtgcttatgccttagctcgttgggcaaggatctctaaagttaagaactctggttttctaagagaagtggcccccttttgtggctactagtt

SEQ ID NO: 202384 - DNA, 538 bp, Cannabis indica
aatcctgtagtggatcgccttgtggtcgggcaagccgcccaatcggagtcagaaaaggcacgaagtttaagtgttgattgagtggaatatagaagtccttgtccagggctgcctttcaaatatcttaacaaatgatgtatagcttgtaggtgcggtgttcttggatttcccatgaattgactaaggttgttgacggcatatgttatgtcgggtcttgaaagagtgaggtacaataacttgcccaccaattgtcgatattgagacgggttgtcaagaggttgaccttgttcatcatcaagttttaacttaggatccattggtgttttggcaggcttgctgcctatgaaaccattgtcttcaagcaaattgatggtgtattgccgttgagataaaaagagaccatctttggcacgggctatttcaaatccaaggaagtactttagagggccaagagtttttagagaaaatctgttgtgtagtctctcttgtagttggtgtaggagagagatgttaggtccagcaagtattatgtcatcga

SEQ ID NO: 202385 - DNA, 769 bp, Cannabis indica
ttttaaaaaaaatcacacttttacattcaaatattttttgtatacttttaacatatcttactaaaacaatacaaaaataacaaaaaaatcgcataaatttacctaacaaagaaaatataatatacaaaaaacaaacaacaaataagaataaaaaacaagaatacaacataaaattaatatgaaaaatattaaaacagtaataaatgtaaataaattttaaaaactgtaaacatatttaaatttatatacaacaatatttttgttatttttgtgtatttctaaattaatctctgtattttttgaatagaaaatgctaagatgtcttgcaatttaacattagatcttatttatttaattattttaaatatttttttttattatccattaacttccgttaccaaactagatagaaaatcaattgaattaaactccaaattaaaacgaaaatcaagacataataatgaggctctagcaaaattataagctacgacattagttgatcatttaacaaagattatagaaatatttctcaaaagagcaagcagtcacttacaatattaataacatgtccaaataaatatattatagaaaaaagaacttcgcggggcttgcatgacacaaaaggagtcagtatttccagagacaccagttgccatagatgatttatcccaacagagtctcacgaacttccatgattacttcaactaattctagtttccacttgtccttgaaagaaagaattacacaccattcaatccgtttatatctc

SEQ ID NO: 202386 - DNA, 1016 bp, Cannabis indica
atttatatatgcctaaaatggggaccatctcgacctatatagttcaagatctgaaggctttggaccagctatgccctgaattatatcccttagttggtccaactgtgcttgcacagaaggatatgttgctgtagggactggactgattggacctacttggaggggttgcaaattttggtgtgatagggtttggccggccctactctaagagagtgtatggtggaggtcagccaaacctgttatgtattatagaccctggccagccactcccaggtacgggtgttggcttgggctgcccaggcctacattaggcaactgtccatggcggataagacctgcatagggcagggtctggccgcctatgactcctcggttcactgatgttagcagtgtgttggcaggaggtagattgcaccacttctcaaatcatcgttttgggtgttgccactcgctcccagtccttatcggttgaagattgacctttgggtgtctcgttcccctcagggacagagtgctcctctctggccggccatagggactcctacaagtggctggccgaccaaaggctagatgacgggggctattgctgagcctgagatcctttgtcggccccccatgtcgctaatttttgagatctggttgttctcactattagactccctctggcaagggaagatctatcctagtccctaaggaattgggctggtcaatttgtcgatagcccctccctaatctatcaactagttttccttaaggctgatcattgatgagatcttggcctcttccatcgattctctagttgaattaccttatcatattgttgtcctctctgttgcggcgatccagcttcgcttggtgagattaaaggatgtactcttggtcatccatccgccttaagaatttgcgtcttcattgagcgaatacatcataattagcagcgcgattcacttaggatggcttctctaagtttggctaacctaagatcttctcccgagtccacatggggttcaccattt

SEQ ID NO: 202387 - DNA, 779 bp, Cannabis indica
aaattaattttttttttaaaatacggtagtgcatcaataaatttctttttaaaaaggtgcattgtataaatttttcaataaattattgcatttcttattggtccatatcctggtatgaattggtgcaactaaaaaatttatgaattctgtgactgaccactaacatgattcactgcatatagcagaaacgaaattaaagaaataataagattaaaaaataaaaataatttatgtaagcggtccagtagcatactcccacgtgtggttggttggttgtagtgagacaaaacgacttgtcgttatattattagattctaaatgaagacagaattatttatggagtgaggaataataatgaattgaagaggagaggagtaggggtttagtatctgtgggcggtgaaagagagcacaaggattccagttccgctttggtgggtcaagtactcgtcagacacaccgctacgttgagctttgtgcctttttttcttattaatttttttgttgggtatggagcccgccttttgtgggcgctcctctcttactatattattattattatgctaatcacgtgttccaagcgtggacactagctagctagtggatactgatagttgatacggtcgcagaggttatttttattttattcttttggaaatgccaccagcagagcttattataaaactaaacattaatgcaaaatatagaacatcatattcatatccagatcatgtatgataaaatcattttttttttagagggtagatcttaggctatgtt

SEQ ID NO: 202388 - DNA, 1067 bp, Cannabis indica
aatataactaaaaacaaaagcacatgttgttaaaggtttgttttatatcagccccaagggattgcattttatttgttggatttgctgctccatattgctctaatgtaacaacaaatatcacactattttaccgtacgtactaaagtgcacgatatatatgtcctgcactataatacacagagcattcatttttttttattattattttgtataataatatttatatatatttaggaaaattctattaatacaccttattatttgtgtttttgagaacaatgacatgtgtaaacttgtaacgttgcaagtcagcttaccggccaattcactaagccaaaatagactggcggccgagtgcatgaacaaagccggattgggatctaaagttaactacaagcacaattggactctgacttcaaatttaattatcgctctaccatgacgaagtcagacctttaagattcgaaagaataatacttgttcaaataaacgaatgctcaaaagaatgcattcggatgccgtcaggtgtcatcccaaaagagtagtcgcaagggtatcacggagagtcgactgtttgggaccaatccaacctggctcgcttctgacaccaaatttcgaagaatcagaagtttgttccctgtgtcagacctgggaaaagcacacaacgaaaaatcaaaccacattttggctaacatccactactctgacattcactattcatgatcgacagcgcacgcctaaatatcaccatcaaatggtacgactccttacggatgatggttaccctccaaattggccttacctacccgagccaatgtcaatataataatgtattttaccccatcagtggatttattttacacttgtaagctctaacagtccgggtccaccaaagaattcgaatacatcatataaataataatcatcaccttcatacaaggggttagaaaatttggcaagaacactcttgtataaaatattccatagcttaagagttcaataatattaactcgtggactaaggttgtttaacgccataaccacgtaaaactatttgtcttctttact

SEQ ID NO: 202389 - DNA, 1411 bp, Cannabis indica
gttcaacttgcattgaaaagataatttcaagacgtatcaaactgtgtctaatagcatggctaaattctgaagttattaggtccaaaattaactcacaaggaagactggtacattttactcggaaattgagtaatgtggttaagtgatggttgttagaggacactgccacaatccatgtggcattgtatgcgagcattaacactccaaaacacatattttcaatacttatcaccaatattcatgcatttttagccgagagggaacatcccatcactctatttcaaattggtgcatttcaaccgaaaataactaattttctaatatttgtgggatattggcgtagaaacaaggagatttttatagatatttattttcttgtaatattttatatattcattaaaaagagctgtatacggaatttgttagtgagataccccgacatgtgggggatcactaacaaaccctataatctatatatatatatatatatatcaagtagaaggatgagctagagagcgacttttggacctttatatatagatcaagtagaaggatgagaaagagacttttggacattcttggagactcttcttctgattttttgaactctctcttcgaaatgttctccttgaaactcacttgacggcagccaagaacaccacacttattccatcatctttttcattgagtccaccatactcaatcgacaccatacctcaaaacactattgatacacatctttctttacactttattggtttattgttctcaagaaatttacaaccacaaatttagatcagatttatgaatatcaagtctcgtatgagtcttatattcataaatctcgattaagatttcacctagaaatattttgctatatttttatccatacacttttgagaatataattttggtgtgtcagatctaatcaataaaaataaaagtaaaacgcagccccattaccatcgcgatacgggggtgaactactataaattcattgtgtctatttaatttattgcgattttattagtcacattaatttatcgtggtcctttttatttttatgaactttttagatcagttgaccaaaaaattgcgtcaacaagatccatcagggtatttttattccaatcaacgattgtcacgtcgtgtaatattgtgaggatagttgtcgagtataacatattatttacttatttatttaatcaaaaagtggttcacacacgataatgtgtcaaaaaaaaatactatttaagttaaaaaaaatattcttctctcacaaagtctcatactttataatacttctgggttttctttcaaatttcacacctagatccatgtgttctttgtattcttaaacctctccccacaatgaacctttaatattagaatcacaaaaaaaaaaaaaaaa

SEQ ID NO: 202390 - DNA, 986 bp, Cannabis indica
ttaattcattctgatgtttgggggttctcctactttgtcgaaaccttatcttcattattttattacttttgtagatgattattctcgtatcatttggttgttttttatgactctgagttgttctctattctatgtgttgaaattaaaaatcaatttaatatttctattcgcactttaagaagtgataatgccaaagaaaagagtatacatcttgtttatttaaatcttatatgattcaaaatatcatacttcataaaacttcttgtgttgatacaccatcccaaaatggtgtagctgaacggaaaaatagacatcttcttaaaacagctagcgccttcttatttcacatgcatgttcttaaattgtttttggtcgatgttgtttctattacatgttttttgattaatcgcatgtcatcttctgttcttcatggtgagatgagatcccttacaaaattctttttcccaataaccacttgaatcctattgagccaatgatctttggtagcacttgctttgttcgcgatgttcgtccacatgtcaccaaattaaaccttaagtcattaaagtgtgtatttgttggttattctcgtcttcaaaaaaggtataggtgttattgtcctaatcttaatagatatcttgattctattgatgttattttgtggaaaacacgcctaacttttcgtcttcatctactctacttgcagagggatgatgatttatcggtatattctattacaactttctgcccctaacacatgttttgacgagtctcttgttcctccacttgcctcggtcacaactcctgacatgcctgcgcctcctctgcctcttattaaagtttactcctggcatttgcctccacctctacctcctccaccagatctaaccctaagcgatgatcttcccattgcattacgtaaaagtaaatgttaatgcacctatcctacttcttcttttgttaattataatcatttttcatcttat

SEQ ID NO: 202391 - DNA, 747 bp, Cannabis indica
aatagttcatgaacattttgtgagacttttctttgtcaacatgtagtatgtcccaaagaaggacatcttcaagttcaaagtctaccgtgaaatgcatttattcaaattttgtctacaacattttactattgtctatgttgaagtggaattaagatctctaataaaaggtggtgtttcatattgtgttaaatcaatctaaatttaataggtcaactaacttaatttatattaaatatgctaactacttttgttgacttagttaaaaatttaattttttaataaataaaaaattaattgatgtgtcactactgttgaagaaatactttcaatacaatacagttaaagtgacacaatactaagtactaacggcatctttcttaattagttatcttcaatttaaatatataattttaaaatcttagatagtgttggtgtgattggtatagaatactaatccaattttatgttttcaaattttaaaatctgcgggacctaccataaaaaacttgattggttactcaatttggaaacaacctcaaatttataaagggcattagaaaataatgatttgacattttcaacttgattgaatatttttgtttttcttctgacaattactttatactaggaaacaaaaccgaacggttcgagcaggtataatttagtaaactaaaatattaacaaataaaaaattacaaacataaataaaattcttataaaattgaaattataaataaatatataagc

SEQ ID NO: 202392 - DNA, 1227 bp, Cannabis indica
tatatatatatatatatggattaatttcccttattttaatttgatttcatgcagacatttaatgggggaggaactttctaacttgagtgccactgatctgcaaaatctagaaaaccaacttgaaatgagtttgaaaagtattcgtgccaaaaaggtatgtacactttagccctacgctatgtttggaagttaggttttagtgagaaagaaagaaaatgtagaggaaaacaaaatgctgtaaataaaacaacaacaacaaattttcatgtttagtatgcaaagaattaaaaaaaaaaattgattaaacaaaaattttcatatcaaacatgatttttttttccttttttaaattttcaaaaccggcctcttttttttcttcaccgaaattcaacttttagacataaccttaaagttccttctctttgaatgtcatagagtattatattagtcacacatgcttcttattgttaccttataattttcttcaatgttaatacaggaccaaatattaactgatgaaataaaagaactaaaccgaaaggtacaaattgactcattttgatcagtttcagttttggcctaattaataattttatatttattattagcttaattattatatatcattatgattattacagggaaatctcattcatcaagagaatgtagaactatataagaaggtagacttactccacaaagaaaatctagaactacaaagaaaggtacttttttttttagagaagtactttcatattattggttaatgagaaattaattaacttatttgctagtcctaattatttcaaaagtaaaaaacattagttacttttctacttcaaaccaaacacataagtttgttataaggttgcatttagttaagggtagtatatatgatatggaaatgaatctattttcattattttagcataatgattacttcattttaaaattaaaaattattaagtgaaggaaagaatatttcaatttttttaggtaaatactattttattaagtcccgtgttttacaaaaaattattaactagactctctattttgttaaatgataaaatagatcttatatatttcaaaatagtacaaataggactctgaactgatttttttgtcaaaataaaacttaatatatataatctgatctagagatgttatgacaaaaaattaattacattttcaatattcattctgttaaaaattattttcaagtta

SEQ ID NO: 202393 - DNA, 1037 bp, Cannabis indica
aggagatgcagacccctcattggatcctaactatgctgcaaacttaaggaaaaaatgtgggccaactgattttagcacaacagtggaaatggaccctggcagctacaaaacattcgatgaagattactacactcttgtagacaaaagaaggggcttatttcaatctgattcagctctccttaatgatcctaagactaaggcctatgtcaaattacaggcaaccacacaaggctctacttttgctaaggattttgctgaatctatggtaaagatgggcaacattggagttcttactggaaatgctggtcaaattaggaagcattgtgcttttgttaattgattgatgtatcatgtgtcaacaattttttaattaaataagcaagtttatatgaagtgtaaatattttggaatatttgaatgtttcaaagtataattagctgcaactaatgggtaggcaagatgtaaaaagtaagaataacatatggttaagaataagtaaatcttgtatgatttaatgtaaacaagtcatgaatgatttaatgtaaacggaagaaaagattttgtgaaccataaaaaaaaatgagtggatgtaatatcttgaatgcgaatatgtatttctttactcattacatatatttgcaagtgaattagaatcattgggattttattttgcattttctttataaaaatttgatgtgaaatgaataaaaaaaaaaggtaaaaagaggttgccattttttttaaagcaaatataatttgttaaaccagtcaaaaaataagattatacctcaacacgaatatcatctatgttgaacactcgatttggaaaagaataaaatgctctaacaagacaataagtaactatgttagcatatcgtttaataaaaaaataaggaaacattatttgaggacacaagaagtttatgacacttttttataataactccaaaagaagaaaatataggtaatgaattttagaatagcttggaatgctaccaagcaatctgactacaactccactttcctccatgattgag

SEQ ID NO: 202394 - DNA, 1291 bp, Cannabis indica
gtcgctttcatgattgcacagctggtaaggatactgcatttttcctttccatatataatctataattaagtaaatcagaatctacattcataagaaacttgttataattctgctttgtcttccaggttgcaactctaatagccgtctatgccaactggaactttgcaagaattaaaggtatcagttggggatgggctggagtcatctggctttacagcattgtgttctacgtgccactcgacataatgaagtttgccatccgttacatcttaagtggaaaggcctggttgaacttgctagacaacagggtaaggatattctcttacagattaatgatcaacatatttatttgaaacttcagaagagtaaagctaagaatgaagaaagatttatcattgattttgctaaatgtgtaaacagactgcttttaccaccaagaaagattatggtaaagaggaaagagaagctcaatgggctcttgctcagagaaccttgcatggacttcaaccaccagaatctaataaccttttccctgaaaagagcagctatagagaactttctgagattgcggagcaggccaagaggcgagctgaagttgcaaggtaagctccgtttctctttaaactatgccttgtgctgttttttatgtgatacatgtttcttatatggcatcagaacattttgttaaaactctttctttttcaacctatggtttcaggcttcgtgagcttcacacactaaagggacatgttgaatcagtggtgaagctaaaggggttggacattgacacaatccaacagcattacactgtgtgatcatgttaatccaacaaacatgaattcggaggaaaaggactgcattcaaatgatgtaagtttagagagcagaagggagagagagaagacggcaaacatgcagatcgggagaaaggcctagttagttaagaattcctaaaatatatggagagaatcattgtgctatatataaactctcttgaaatggtttagatttttccttatttcagttggcagcagaaaatgtgtgtttggtttcttcttgctctgatgttaggggccaaaataatgccccaaagtttttcttttcttggtttttgtaatcatttccctttgtttttttatcatacacatatttgtctttctgtatgtttactattacaaccacaaacatttaaccaatatttggtgccttctaattgttagaagtagcatacaggggctcttttattgccattcaaatcttttcccatgattttatttaccgagattttgaaa

SEQ ID NO: 202395 - DNA, 957 bp, Cannabis indica
tctcatttttttttatatataaacgacctctttttagattttatgctgtctttctttttttttttttttgagacaattttatgtttatgtatgtttaatttgaatgtatatattttttttcaaataatacgcttctgaaaatggtaatttggtaaatacgtaatttttcattgaaatataatagtttgttttgattgtggaggaagaagtttgttttttttatttttttgctgtgaaatggaggaagaagttaagtgacgtaaagttattgggtttgatagttaggtgtgaaagctattgattatctagaacaaagcttagacgaaacagattgcccatgtttgagtgacaaatggcctattagtaagcatttattattttatctgttttttttttcttttttttttaagaaaaataattatattttacgaaaaactttatcagacaaaaaaatcatcaaaagaaaaaatatattgtaaaaatacgtgtttgtaataaaagacaaaaggatgagataaatacaatttagaaggaaaaataataaagaaaacaacaaagtctaagttcatcttgataggccaaacaaaataaaattgtaataaaacataataaatacattaataacaaatattaatgtatctctctaaaccaaggggcgcaccttgatttaatttaggcttttctctttagctatatttatatgatgattaaaattagaccaacaacaatgccatgtcgtttacttttcagggttttaagttgatatgccggtatcagtaaataagaaaaaactaataattaattgggggtagaagttgcttctacatcatgtgaaaattgagagataaaaaagttattatgtctttctagaaacaaacaatatatttatttcggggaacatagtgtggtgaaacttgtgtcaaaatagttgaaagaagaacataatatagaaggata

SEQ ID NO: 202396 - DNA, 1126 bp, Cannabis indica
ttaaggttgattgctgattcccataatcacgtgattttgattgactatcatgaggatcacaattaactgaattagtgcccctaaaatccgtaggagcattaacagagggagatgctgatgtcgactgcttcgctggagcatgacctcccttgcctgaccggagccatggagaggctgtcaaaaaactttgtcgtctcgtcggagccttcatctctatgctgtatggtttcactatgttctcaatcggggtagcatatatcttctcacagaaacgttcagcatgtcccatgacaccgcagatgaaacaaaatgtcggaactctttcgtatttgaagtaagcataaaaagcttctccattgcggctgcgaatcttcattcgtcttttcaatggagcattaacattaactcgaactcgaacccgaaggtaatcacgccacacgccttgaaaattgttaggatcggactccacgtactgaccgatatagcgagccgcttcccttattgcccattcagttttgaatccagttcgcagatcgtggatttgaacccacatgtctaacgtgtttatgtcaatcgttctaggatttccacctggttcaagcctttcaatgagtagttgtttgcgatcatacgtccaaggactgccatcaatcacccttttgatatctatctcatgatagaactgaaaaagaaacctgttttgatccagaatcttaatgaaaatacctcttccaggcttccataaatcagcaataatattttggaatatctggaaatcagagacttttccagacagcattcgacccactaggcaccatctgtcatcaaaattcaattcttcttcctcgtcgcaatcgtcagccagggagacttcatgttcttcctcatcttctaggcatatatcagcccaccttttggtcaaagcataatcttctttgctagaggaggccatagcaaaactttggagccagtaatcaacccttcgacacacaaaaacaaaatcactctacaaggagggacaaaacactctctacagggagagactcgtggtcatgtgtttgttaattgtaaagatacaatccacatttattaaaatgttaattgtattgtatatatagtttttttt

SEQ ID NO: 202397 - DNA, 1119 bp, Cannabis indica
ctctcacaatgaaatctccgagtgttttctcttagatccctctttaaagcaattttttcgatcccttttacagtgaaggtagatcactttttatagggcttaatgcatgacagaaggtttcccttttgcatacaatatctataattggtaagaatatttattacataatttgaatacctgagatgagggactgagacaacctgccatatccctctgatacaatcccatgattgtaggaattaccttcatgcttgggcttcacgatactattctaaagtagtcaagtcttggtacagagctcggagaactaacttcatgctttgcttggatagtctgccctttactctgctcggacaagcagactatgtgcatgcagatatgttgcttgaagtctgttcggaatatttctctgcccaagtacaaggaatgatggacacgtatcactcgtacatgctgccacttcatagtgaaaaaaatgggataacaaatgcttacttaaagcatcttaagtttgatcaccatataattgttcaagttatgattaaaaacgcaaatgaacaaacatattatgttcaaatagaaagatacgaggcaacaaacgaaaagaaataaataaaaagtaaagctgaccatccaacaatgcaaatctgtctttacaaaattatttccacaagaggcaaaccattgtctcggccaaaaaaccaatttcctaaataattaaaagaaaaaatagttaaaaaccaagcctacatagtaggagacttggacgggtctttatcttcttcagactcaattgcctattattcttcttttaaggctttctcgcaataggctaagacttcttcgagcccctcccccaagaaacttaagtccatctcaggatttgccatccaagctcggtaaatggattgttgagcaacatcattgcaccgttctttagcattggcctcagcgccctcgagcttcatagtggctgcattaagttcttgttggagtgtattacaagactcggacttgtcctttgcttctttgtgggcttcctcaggttcagtcttatgagtcctcttcatctcttcagcctccttggtcagacggaaaatctgcttttggtcatcgttc

SEQ ID NO: 202398 - DNA, 1409 bp, Cannabis indica
tccctctctcaaatcgcaggaaaaaaaaaaagtttcagatagagggagagatcggcgttggggttgctctttcgggttggggttggggtcggaggggttggggtcgtggtcgacgggggtgagggtggtgatcggcgttggggttgacgtgggtgggtgagggtggttcgggtgagggtgggcggttggggtgagatagagggagagagagatgatgcagagagagagaatattgtgaggggtattttggggtttgaaaaaaaggaatagttttttaggtttaaattttggtttaaggaaaaaaattttgattcccttcttttattattcatctcttttacatcatccacacgtgacattctcataaaatatattcaccaaaactaccacaaaatatgtgaaatataattatatatgatatttatttgaggaattaaacatggttgatattatcatattggtcgaggattagaccatgggaagtaattaattaattagcattaattgtaacatatattcaacaattaataatattcaaggatagtcgttgtcgttgatgaggattaaattaatcgtatgagcattatggtggaaaccttcgtactcaaaatattaatatgcatgggtagagttttcttaaggatattttctattaaattttttttaatattagaaatttattggaatcatactcacaattatatgtataaaatgtgttgagtcatcaaataaataagtcaaatttatatgatctattttaaaataaagtttatgacttaagagcatgcttgtcatgattttaattatgtggataccataaggacaatttctattttgatgaggggccaaatagaaatagtcaataattattagcaacagttttatctgttggtaatataagaggtaatatcaccaagagaataagtttcagagaaagatttttaatgtaaatttgaagatcatactaattaaagatcaaaccattgaatactctttaatctatattctatcgtttgattttcatgaattaattagggctataaatgttcttaacacatttatcttatgttgctgctgagttgttggctattaaacatgcatgaaattgaattggttgatctattatcgttggagcagtgtatatgatcattgcttcagatttaaaagtacgtatataaattggggagaccggcctgagatttatggtgaatgggattaatttattgattgctgatatttgtcttttgatctatatatgtcacagtttgatattgtgggtctcttttttcacccacgttctactaatgaactgactcattgtatagccaacaatattttgagttgtaaaatttctgattttcaagatggaagggtgcctccaatggttattatagaattagctgttttga

SEQ ID NO: 202399 - DNA, 838 bp, Cannabis indica
ctcctaaattatttgcctcatctgctcaggacgattctctctgtttttcttgtactgactgaacttcccttgtctggtcaattcctcaattttgtactataggaaccaaaattccagagttgtgtggacaatatctttgtggtacttgcagaactttttggggtcccttttgtcacaatttccccgattgggggcatttttttgaaaatgccattatgttcctcgattgcataaatatggttgtggggagcagatagttcaatgtacttaacaaaaatgtgggccccttttccttcttggggatgtatcatttttggttggggacttggcaagctttagacttcgtcgcctggatggactgtgtctcttggggcttcgacctctggagttttttgtttgtaagcttcgggaacacgatcttggtattaaattcacatttatcctttcttctttcaaattttgctagagaatcctcaattcttttgtgcggttcagccatggcaaagaattccaccaatgactcgagttgtcgcgcctgcaattccttccaaaagtccgttcttggtagagcacccctaattaacatacaaaccaatgaaaactcaggggccttcttgaactttgttatttcaccattaaaatgcttaaaatagtcttgtaaagactcaccagcatcttgtttgatattggccaacattgtgtatgacagtttgtatgtcatcgtgccctggaaatgcgtcaggaacaaatctaaaaaggtctcccaggttgatattgatgcctcagataactggctaccagtcgtgggcattgtcttccaaagttgttgcgagtattc

SEQ ID NO: 202400 - DNA, 1048 bp, Cannabis indica
ccaaaaatttcataattaaaactccaaactgtctgtcaatggcatttcaccaccactctaatagaacttaacctgcagttaataaaatttttaatccaaaaataaaattattgaatttgatgggggagagttgtaaaccttccctccaagtaattattgactgaaaatttcgccgaaacaagtttatcagaactcgaaaaagatttcatcaccatctacccttcacctcctcaaaccgaatgggagtgtaactaaaattagccgccgccagatccgtacttctttccgaacacaaccagctgcaatttgtcgtaaccagagagcacaccagcaccagcgatagcacgaaggatgttagcaccagcacccttgaacagagacttggcaccctcgtttttcaagatttgggtgaatgcatcgaacgagctcttgtacttgacagcttcaccagatgtcatcatcattcttctacggacagtgtcaattgggtatgaagcaagaccggcaccgttggtgatgagccaaccaagggcaaagctagcaaagaaactatcctgtaaaacatcaaaagcacaaaacatcatgtcaattgttatgaaactcaaagctcaatcaaatgaaaacactatcaaacataaatattatctgaaactttattcaaacatacctgcatgtctccggtaaggaggactggcttcagagagtcgtacaatccaaagtaaagaccacggtacacaatgataccgacacaagaaatgttgaatccacggtagagaccagcaagaccatcagtcttcaaagtcttcttgtagacatcaactagaccattgaattgtctttcgcctcccttcttggcagccttggcatcattagcaagacgagtacgagcatagtccagggagtagacgaaaagaagggaagaagcaccagcggctcctccagatcccaagtttccagcaaaccacttccaataaccatccctgtctttcttgaaattgaaaagcctcttgaagtaatccttaaaggcaaagttcagggcctggtaaaa

SEQ ID NO: 202401 - DNA, 854 bp, Cannabis indica
tggctcgtctaccctaagaattgagctaggccgggccaaccaattattaataaatatagttatatatatggcccttataatttattatgtatttaaatgtacagattatggtttatttaacgtacggagtaacaacagcagcgactcaagcatcaatcatagcgataacaggtcaaaataatttccaatggatgaaattatgtaacagatttacaagattttgtatccaaatgggtggagccatggtgtgtggttacttagcttgctttctcatgattttagtcacatctttctctgctttttaattattttcccttattcaccaaaacaatttctcctcttaaagcccataatctcatcttcatgatctactcactaatccatcattattattattaattaattacatatttaatgtgtatgtacatgcaaattgcaaagactctcacatgatctattccatctatgtataattagaagatttgcttattaatttaatagcatatgattgagtatatagagaaaatgatttgcatagattgtactaattatgtagggttcaaaaatgtttaaatgctttaagggctcgtttggaacgccgtattaggtcgtattgtattgtattgtattatattgaattgtattttatacaatatttttatgtaaaactatatgtggtattaacttttatggacacttaaatacataatgttttagtataaataaaagtttaacatagtattatataaaaatataatacgtaatccaatttaatataatacaatacaatacaatacaacctaatacgacgttcccaacgagctctaagtgaattaattaatacaattatgtcc

SEQ ID NO: 202402 - DNA, 1121 bp, Cannabis indica
tagactcttggaagagagcctgagaaaggaagattttaaaggaatcaatctgagtagaggtgggccaaggctttctcacatattttagggccaatattaaggaggtctggttaacaagtaaacaagttgaagactttttatttttttcagcaaaaatattaataagggtatgcaaagaaatctaaaagaggcgtcactttaattaagtttattagcctattccttttggtgtactccatggagaccaccaagctctccaaagtaatggtgagagatttctggtggagttttgagaaaaaaaactaaggaatccatcttaaaatttgagaaaaattatgttttcccaaatctcgtggggcatgggcttccgtaaagccaatgaaatgaaccaagcttttctaaccaagtggggttggaatattttgaatgggtgccttggaagctaaatatcttaagagaaagaattttgtcaactgtagctacaagagctttaactcgatcttgactttggaataatgtcgtcaaggcaattgaaatctttagaaaaggtgtatgcaaaattgtgctggatgggaaagacactagcattcgggatgacccttagatgacttatgggaatgacttttattcaaaattcagtggggtgttgtctgtggggcttaataaagtggctgtccttttgatggataatggtgagtgggaccttcaaaagctgtcctaatttgtttcaccatgacattgttgtaacaattttaaaaggcagcaaacttttaagtgagggttgtgaccaatgtatctggactaaggagactaatggccgatttttgaccaagtcggtgtatctcactcaagctttgtaatgtgctccccttgcgaagtctttcctgctcattggaaaaattagtgaaacatcctctccaatgctcttcctattcgatctattctagggaaacgtatgtgtattaatgacactcactgccctatttgtggtggctttgacaaatctatggaacaccttttcttacactgtgacttcacattttacttttggcgttcctccccttttggaatttttttccatctctggcaatgggactcaaatgtgggattggataaagttc

SEQ ID NO: 202403 - DNA, 620 bp, Cannabis indica
atattactttcagaagagtacttacgctgctgaattctctgtaaacactttcgagtgagatcaagtcttattgcttctcatctcataagtgaaatacaatcaaagtggagtaggttattacaattaaaatgggatcgaacttctataaatatcatgttcttagtttatgctcttatttcatatatatatattctgtctaaatttaatcaatatgaattactttcaaaactccgtgtcgttggcaagaagcgtggtcaatattttgatgcttttattgagagtttaactcaagacaatcaaggatggttgtataaacacgaaagggtaacctaaatgaaataatagaccctatatatggtggctgattcgaatagtcaaactcctacaaatttgagagatccagttacaaattattcgaacaacaactctcctagaactggtgccactccaagcattcaggagactagaactatcagtacccattagaggaataatttctcaattaaaatatccgtaattgagaaattattcctctaatatctattttttgacaataagacttatttttctactaatgcacataatattacaacatatacaattagattttgtcaatctta

SEQ ID NO: 202404 - DNA, 2428 bp, Cannabis indica
taatacaatgataagtaagattgcaaaccaaatttgatataaaatcaactatttaacaacttgaaatttttaataaaaaattaattggttgagtaatgaaactaaattaaaatggaagaaattaaaatatgcttaaaatacgattgcaaacactagaaaattaactgcaagaaaaaatatcaatggaataacatcctgtctaaactgcccagattgctattaattaaaatttcttacaagctcatgagatttttccaaaacttatgaaataattctattatctaatccaatatattcctatattaaaataggattcaagaacataatttaagcatcaattcttaaagttatgcaaagtagtaacatattcttattttacttactaagaataacctaaaaatatttattctattgcatcatccaacttgtaactgctagatttagtccttaagtactaaatctagctttataaattgttattgctggccaaacaataacaatcaatcttttgtccttctccctctttattgctggcaatttcacaaatcaattgcattcaaaattaacatagcaagacataggagtaatatctattcaagtcacaaaaagattagcccataattaatttaataaccatcatccaaaataaagtgtgtaaatccatgactattagtttagtttttataaaagttgttgaaagataaagagtagaaatgagaggaagaagataataaaattaatggagccctttattttgtccttcgccttctttaatgtgaatttcttctttttgctactccttctgtacttttttcttctgcaattattttttctctccaagaatgatagcaactaatgtctccctttcttatgtggctagtacactttcttttttaggtcattagggtacaaattcaaaccctccaaaatagaaagcctattatcttcactattttaatttttctttctttcttttattactcaaggatgggtaatattttaagtttgggtgtaataactctatgatatagagatatttatttagtgatctttaaacttaatttttcatacaaaaagaatattgaatgtgttgtttgttttgtcaatattgtatttttatctaccttttttattttcttatttaaaaataaataaataaataaatattcagcttataaatgttaattaattaaataaaaaatatttatattcaaactcttcatttattatagttatattattaaaatattaataataaaaaaatctttatatacgtatttaaaaaaatttgaaaaaaatattcaaaaataagtaattacaatattattatatattagaataatttatttaaatcattattattattattattattttataaggttaagttattatttattatagtaataaataatttttttttgttattatacactctagattgcctagttatttatataaatttaaaactttttcaactttttatttatttgttcaataattttttaaatacttataataaaatttaaataatcttgttgtctttctaaatcaattcgccccaaatgcatgagagcacaatttccataagcaaattcatatatcctaagattaaaataacaagaactcagtttcagtgacttaacaaaaagtttaaacaaaaggtccaatgtaaaattagcctcataaatattccacctaggcttttaaatatttattcaatactagaagcacctccatcactcttctctgcttttcataaccagctcagtcactcttctctgctttggtcaccacatcatttccagtgttttctggtgagctcgagcgtcccttctgaagcagtgatccgcatggcatcagtatagttccttcttcaggttcaaatttggttaccagcttggtgtcatcttcagaagatgatttggcgagcactgcattgacgacatttggctcagcctttgcatctgggttttgttgagtagagagaatccggtttacatcattacaaagggtttcaattgcagcaaggttcttctccaagttcagactagccggtttgttggccaaagatccctgaactgattcggtggtggtttcctcgacaaccttgcacatctgccagtaagaaggtaaaatgatattcgattattcaaggcaaaaatacacatcaggaagacagcaaagccttttctcatttattttagggttcttttggaatctatgcatataatataatcacaagggttacctcgttataaagctgaggcagttgcaggcgatctgaattatcatcacaagcagcagcagctgttacttcaggacctgcacagacaaccagaatcttactcacctcaagccaatcgagatactatgtaatacgaaagcacacaataagtaggcaagcagatctccagggtagcgtaat

SEQ ID NO: 202405 - DNA, 1371 bp, Cannabis indica
atgggcacaatgtagatctacaatacaaaaaaatgatctaatctacaacaaattacaaatacaaaaaggtaaactaaaaaaaatacgaaaacagagatttctacctccattgattacaaaatacaacaaaaataaccaaaaagcaataattcgaatcatattgtgcagataatttgaatacaacaagatcaaagagaaatcgaatcttaccaaaacgaatctacaaaaaatacaaggttaacaaattttttagtgattttcttcctaattatattgtttttcagtgttttcttcatggttataatattttttttagtgtttgaaaatcaaattaatcataaatcatagtgaaaattagttgatctgaagaaattgatgtaattagtttccaactgaaaaaatattgatgcattcaatgtcatttattatttttttctcagtaaacatttattaatatgttatttttgaagattaaaatggttatttgggattagagaaacaaactacaaattacaaagtacaaattaattagtttacaaatgaacaactacggttgcattctatatcatttaatgtttcttgtcagtaaacagttatttaaaaattgctttgatagataaaaataattacttaaaactatttatacaatttgataaaacaaaatgagtaatttacaatagaccaactacagttgcattcaatgtcatttactgtttcttgcaaaaaaaatagttgtttataagtttttttattagattaaaataattatttgcaactattgatgctacatactcataatgaatacaaaaatttaaggacatggaatctctgcaaatttcggtacagggcaataactattgggaagacaacaagtactatgttgattacgaattaagtggaaaattactatcaagagattgtacttatgctcaactagtaaaaataatgatggagaaactacaatgcaaccctaatacaacacaaatacaattgaaataccaactaaaggaaggatgtcaaccactacaaatcaaggatgataaaagtctattgttctacatatagttattaagcaaagaaattgatttcacgcagtacgcattatgtgtgaacacaatcaacaacacagaaacacaagcttttttggcagctaaccaatcaatgatgtaaaatagtatgatgatgacagcatatgacaatcacttagtataggcatatgtgtagcaacctttataacaacacaacaacaacaacaacaacaacaacaacaacaacaacaacaacaaataaacaactactatctgcaccaagaatgtgatcagttcaagttgatgctattttggtcgatactatgactttaacatcagagtc

SEQ ID NO: 202406 - DNA, 2181 bp, Cannabis indica
ttcttcaaaaagtataattgatcgtattattttcatacatataagaggctaaaatggctaagaattattcaaaaagtataattgatcatattatttcaatacattttactcagaacttggcaagttacatcagccggataacacatttaaacacaggatggttgaaatagagagtgcaagcaaaaattatttcacattatgtagtacacaatgccacacaaaaacccaaagaatagcagcctaaaaaacaattggtcatgtgtgagtggcattttctatctctgaaaccttccatgtgaaatacttgccacattacttttctagatattttagaaaagagagaaaaaaaaaacaagcaaaacataatatgtatagcaaaactgaagcaaacaattgcaactctcacaatttcagtgttcagatttggcaccaaatttttttatatagattattataaaattgggaagaagaatacaatggcaactgcaacaaaggatctaatacttagcatcacatatcaacacaaaaactttttcaacgaaagattaggcagacatacacaatactgaagcctaactctaaaataggataagcttgtgaaactgaacaaaacacacacacacacatacaaaacgaacaactttcgaaagaagaaaaactggcagcgttattgcccaacaaacctacccatttcagaggtagataattggatgccaacaattcatcaaaaccaaatataaagtaaagaagttgtagtataaaccaaaaagcgaataattttcctttaaccaaaaaaaaaaacaattatggaaaagaggagaaaatgggtcgaaaccgatcatcaaaatctcttaaattatcatggaagagaaaccaaaacagttcaaaaatcaaaaaaaatttgtagacaaggaaatgatggtcaaaacacctgttaacgaaactgacctagggattttgattacacacaactatatatataattaggaataggatgatacctttcgtggccagtggtgtttgaatatttaaccacaccggagtctcctaattttcttatcgaggaatggaggttgagacggaccaatgagaagacaagaaagatagagcgacgtcggagttcaaggtggacaaaatgggggctgaaacgaatgggcatcggaattcagagaaagaacggcgtcggagttctcaagaatgaaaaacagagctagaaaattgatttctctctgaaattttcgatcaagcaagctgtgacatgaaatggggaatgaggttttattatcagtgctagtaaccatgtaactatatatatacactagattttgttcggtctatttatgatcagtctctagttaatttcatattaaatttggtctgatgatgaatcttcaataaatctgctctatttatgaattactctattttgagtaatctcgaaaaagtttatccttctttcctatgaaagtatatagtgctactcggtttctaaatttctttcttttaaaattggcctcaaatgaagaattttagacaaaaaaaacatatttcctaaattactctgctttcatcgggtaacaaacatcttggttctaaatttttctcatttaattttagataaaaaattacagaattggatgaagaaaattttagaaatatgaagttttgaagaaatagtttgtaactataacatcagtcttcttatatatggttgattttggtatgccttgacactcaattctttttgttatttctttgtcaattaatttgagtataacttcattctaatttaattgaatatctatattttagagagaagaaaaactttaatttactttattaattgcagccgaaaagggattggctgttatatatgtgtacagtttgtacaaaggaagatgtgtatgccccttaacattaatttctttttttaaaacataattagatgagaaggatgacattcaaacttatatatagagagagatatgtgggtgtgagagaagaaagaagaattggagatgaagaatcgcagataatagttttgatttcttgtgggggtaacgaatcgcaaataaaacaatcgcaatatgtattttttttttttttttttttttggaaagaacgaaagttcacatgtattttggtttggatggaaggaatggtctccgttaaagttaacgg

SEQ ID NO: 202407 - DNA, 680 bp, Cannabis indica
tgattagttgatacgttaaaaattcttatacaatggaaggttcaaacgaaaacacacttggtcaaaattatttgttggtctttctatgtgtgtcattttcataaatgtgaaaataaaatctgcgaaaatgaaatatagtcccacattgcttttaaagagttttttaccttaattaactgttataaatattcctcggtaaatttagttttaaacgcacacaaatatctaagagttacataacttctatttagaatattttttctaaattactcatagaggtatttataattttctagttcaagaatacattattcgcagctcggtggtgcgcctcgctatagaaatcctccagcactgagaagaggatgcaaagttattttaaggaaatcaggtgctacacaggcttctgaaaaattatcagttgggaatacatccacggtcaatttctctcttctctctcttttttaataaatatattattataattatgcttagtttaatagatatttctttttttttcttcatcactttattttttattttcttttttgtaaaaaaagaaaaaaatattatattatattactttagactagagaaggagaaagagaaaaaagataagccagttacggcgcagaagcagcagatgacttctttaatttgtttttggttctcatataacc

SEQ ID NO: 202408 - DNA, 782 bp, Cannabis indica
actgttattcactttgattttgaggaaacaagttttaggttttcttaatttctttgtatataaggtcaagaaaatatataagttaattaattgtgatctggtataatatttccaaaagatccctcctatatgattttgatgtggagatgaagaaaaaatagtggggcatgcattattggattgtcctttctatagggagtgttggaagtcctcgacctgggcgactatgtgggtgaagtggcaacatctagctattcaggatgtggtggctggtttatttttgagtttgtcaatctaagaagttgaggtaatcgtgtgtttgttatggcttcttggattgggacggaaccaagctcgatatggagaactatatatacacattccataccaagtgagtcttgatattaggtctcttctttttgagtttcagcaagcttcaaagtgcaccactattgctactacctaatcgttattagagcagcatagttagggggaatctcgagatagttattggccaaggagggcatggtatctgccgaagctaggtgagtttaagttgaacatcgatggcggtgtggatgatagaaaggacagtttagggtttggggcaatgtcaggggtctttaacaaagtctttcatggcttagcatatctcccgtcaacctcctttcactggtaaacttatttccatcttggaagctctcaaatggtgctatcatgattcatgaacatattcaagtttcgtcatttgaaagtgactacaagaatgcaatttagtgatt

SEQ ID NO: 202409 - DNA, 849 bp, Cannabis indica
taacactatttttataataaaaatggggcgtgttccttcgttcttatcttcattaattattttaatatttgtttctatcttcatttctacatatcaccattgagagcggaacgaaaaatcctcattggtgcatgtaatactcatgaaagattcatttatttaaaaataaataaaattataaataaaaaatacaaactacacaaaaattaaaatattatatatattcttaatttaaaatatttaaaaatttacaaataaaattgttatccctatttccgaataggttcaacacggaagtagtaagagggggccacgtcggatagtttggaaacatcccggattccccaaagttttaagataaaattagggaaggcctcagggtatccggaagagcgcatccgttgtaaaagaggaatcaatccttgaagttgtaatttgacacttctaatacgcggaagcatatgcaaagcccaagccttcagggagctctcatgaattgggtatttcaggaggtcccaagttgcacttccaggaagcaccttgtggcctaacccggaggcacatttgacggttacacctcatctaacaccaagtcaaatcttgtcccctgcatcaaaccatagttgtacgcgtacgtgcccatgtagtgcttattgtccaacagcttgtctgggatattgcttttaaaggagagatctttgaacgacacgtgtttgtgtcctcacgtgataacctgcatcaattaagcatcgcacgatggaagagtcacctaccaaatcaatggtcagatggtcttgtagtattgcacagcctcatttgcatgctcagtaaggaaccctagtggggtaa

SEQ ID NO: 202410 - DNA, 2599 bp, Cannabis indica
aatgaatgggaccatcatgaagagggtcagatgcatgctcgtctattctggattgcctaagaacttttgcgtagaagctgttcttacaacatgtcctctgataaacagatgtccatcttcagctacaaactttaaaacccccatggaaatgtggtatagtcatcatgcaaattaccaaaatttgaagacttttggatgcattgcctatgttcatgacatgaagagaaagttagatcctagagccatgaaatgtgtattcataggctatccaaaaggagttaaaggatacaaactttggagtcttgaaccaggaaaccagaacagatttgatcaaagagatgtgatctttgaggaagataacgtatacaagctcaacccagtaatgcttctataattagagatgagagaatgcaatttgaggtggaactatcatatagttcacagcagggacaaccattacaagcacaaggagatgataaataaaacatctcagatgatgaacacacaccacatgatgatttggaagatgaaatgaactaggaagctactaccagctgacaagagacacagataaagacctcacaaagctccccaaaggtttggatttgctgacattatttactatgcactgataattgaacagtgtgacaatgaacattgaagctttgcaaaggccatgaaatcagctgataagaagagatgggggaaatcaatggatgaggaaatagattccttgaagaaaaaacttgggttttggttttaaaacctgtacgaaggagagtggttggctacaaataggttcttaggatcaaaaatggaattcatggagtagaagaggtaagatacaagacaaggctagtggtaaaagaatttacatagagagaaggggtagattacacaaaaagcttctcacctatgataaaacatacctctataaggttgatcctaacactaataataatgaatgaccttgaattggaacaaatagatgttaagacaacctttccacatggtgaattggatgaggagattctaatgcagcaacaagaaggctatgtagagaaaggaaaataagatcatttttacttgctcaaaaggtctctctatggcctaaaatagtcacctaggcaaagggataaaagatttgatgaattcatcaccaaatctagattcaagaaaagtgcctgtgatagttgtgtgcatgtcaaaacatcaaatacaaagaggactatgttcttacttttgtgtgttgatgatatgttaattgcaagtaaaataatgagcgagataaggaaaacaaagacatgctaagtttagagtttgaaatgaaggatctcgtacatgctagaaagattttgggcatcgagatactcagggataggaaggaaaggaaactcatgctatgttagagggattacatttcaaaggtgttgcagaagtttgggttttcagaagtaaaatcagttggcacaccaatgacctagcagataaaattatttcacacacaagctccctcaacagagtctgatcttaactacatgaaaaatgtaccttactcaaacttggtaggaagcttaatatacatcatggtctgtaccatacctaatttaagccaagttgtaagtgtcataagtagattcatgaggaacccaagcatagaatactggaatataacaaaatgggtggtgaggtacttaaaaggcacattagatatgggactactgtacaactcaaactctcaaatacagaaggttaaagactttgtggactttgactatgtaggtgatatggacactaggagatctcaaactgactggatttttctgctaggtaactgcataattagttggaaagtaaatctccaaaatattgctgcactctccactactgaggcataatacattgcctgtaatgaagcaataaaagaagccatatgactgaaaagaattattagagagttgagcttggaatagaggcgcattgaagtacattgtgatagccaaagtgcattgcacttattcaaaaataagatgtaccatgaatgaacgaagcatattgatgtgcgactgcaattcattagagatttcataagagaaggaaaagtgaagctcaagaaggtttcaacagaggagaatgcatttggcatacacattaaacctctccccactaccaagttcagacattatttgaacttacttggaatcactaccattagtggtttgtgattcaccctctaattttttgattatttattgttttgttacacaagaataattcgaccaaggtgaaaattgttagtcgtggtctgtttattcagttagtacagttagagggatactagttaataagtcaaacaatttctgtgtttgaccaaaagttagttagtctgttatgtttccttttagatcaactataagtaagtgtaagtctcaccatcaagatggtaacttgtattcatttcaaattaaactaataaaagtattattcattctctcaaatctctctcaatctatatctaggaactgaaggcaattcaatgtgcaattctgagagtgtgaatgcatttgtttgaaatcgattgtttcctaataccaattaa

SEQ ID NO: 202411 - DNA, 725 bp, Cannabis indica
gagttgtttatgcctaatttttaattttataaatcattttgagagtcaagttgtattgaatagtacaaaaagtatgcagtgatttgtcctcttacacaaaatttactccactaccatggccctagcttatcatctctattatactattccttagtgttgcagttacagctctaaaattcttaaacagaagtaggaataaaacaaagaaccaaaacatatattagcatctatacaacatatggtatatccaaagcagaaactaattgtatgtttattgattactttccactaatcatatattcatgtatctgattttctaatgaacaaaaagtacaaacacacttgcaacaaaattcccaattactaaaattgtcaaagaataaatgaagtgaagaacaaataatatcatcagggtcactatatcagaactactaaaggaaaatataactgaactggaccatttatgaaaattctatataattcttcctagtctaaatggggcagacctaggaacaaaacaaaagaggaaagtcaagagagagggaataaattatgtccaataagttaatcctttaaaattagaaaaggccatgctgaaaatggaaccgcggaaacaaggaagctaccctaaaagacaagctatgtaattcatcgaagcttccattttccaaaaaaccatttataatattaatagaaagccaagaaaaatataaatttaataaact

SEQ ID NO: 202412 - DNA, 721 bp, Cannabis indica
ttttgtatctcttttctaagcggtttgttgatgtttactttatgggatgagcttgaaaatatatttgaagctttcttgaagtgaagaataggcaataagtaattttttcaataggaagatatctactttaagcatatatcaatctcttgtcgatagtttatacgggatgctgagtactctcatgttctcaaatcacgatggcattgactatgtattcagttacttctaagtatatccccaaacctttgccatccaaaggctttgaaacgattggaggttgtgcaagttgcttctttagctcctgaagagcttctttatatttcttggtccattcaaaagttttgtttcatcagagaatattgaagaaggggacgcacttcttgttgggaatacttatacaagatcatattatttttcatctaaattattatttaacgtaaataattacctataacatgttatttaagaccttagaattatatgtgagagttttagaatacttatagtggttattgcactaaaaaatatgactcctttcattcaatctaacccttgttccattctgtcgcaaagtattagcaatcattcaacccaaatctccatagaactcaaaacaaaccaccaatgttatcacaatcttcctcaatgatgtaggtgttataacagaattctatgtacaagttttgcaaaacttagttggatttcgaatttactagaaata

SEQ ID NO: 202413 - DNA, 1200 bp, Cannabis indica
agtttatacattgtaatgcgtcaatcttcttctattcttttttcataaagctttggtctcttttgatattattggggtctccttttccacatctggtttcaaaaaaaaaaaaagaatggagatggacacggctgagtttgctcggagtagacttctgatgtcaatttcacaaacggaggttgagtttcattttaatattttaatgttaaatatattaattataaaaataattaaataatttattatttttgaaatttaaaaactattcgaggctacaaagtttcttctaatacttactattagggtcgataagttgtctaaaaagtataagttgctatcccaaatattgatttcaaataggagcgattttcaattgttttagggatgataaaagtcgcctctaagactcatttttagaggtcactttttgtgttgtctatacaaaacagtattaggaatgaagtattagaagcgataatttatgggcgtagtgtgtgtttgtgagaggagtataattaacatacatttgtagtattattatgggggttttatttgttagtgagatctttcaagaaaagaaagtgaaatttccctatatagattaatatttagcgtggtggaattggaacataagattagcatgcggtgtccatatggttagtgttgctctcttaagtataagtggctggtagtgcttaggtaggctaggccgcaccaattatgaatatgaaccaagaaagccaattattcagaaaatgccaaagtccagtgagtgactaagtgtaagagtaagacatccaggcgacccaatccacaagaaatgctgaattattgaggccatattagtttagggccatgaacaatggcaaccattactttaggatattttctattttccaaattttcattacccatttacacatttttgtccacttttctaatcattcaggcctcaaaagctaaaaggaaactccaaatagaaatgatgagaaggacccttcgtgaaagtgataggttaatgctagtttataattttctcagcatagaaaaaaaagtaccattttatattattttgtattaactaaatactatatatactagccaccagttattaattgccctatataaaattataatttcttccaaccatatgtgaaaatatatttaatatatgtgatactattaaaaatttaactttta

SEQ ID NO: 202414 - DNA, 1111 bp, Cannabis indica
gcacttctccaaatgcaagtaaactctgttgtagattatcatatcagtaaaatcctatgtctgataaatctaggaaactttattcacatagtcatgtttactttccaatgtgttgacgacacaataaacaggatcaagtatgtgaaaagggtttcagatgaatttatacattatgtacatataatcatgaaataaatcatgtgaaccatgcaacattaaatgttatttctgatctatattaataagtaaatctgattatattgaaaagagttttatttagggcataaaacccaacataacgcccgtacttttataaaaatattaattttatttacaagcgttaaacgcggaaaaacataatgtcgcatttttatttaatacttgaaaatgttcacaactggccagtgttcgtacaaaagacataataaataataactaaataattgcgacataaacttaatagcgtaaataaataataaagcgccctagatcgcccgcagttatatggtcctcagcgagttcacacacagcgtccaaagttccactcgccaccggcattctagactttcagttactttggtctgcacatggtaatttaataagggtgaggtactaaactcagtaagaaaatgtgtgtcaggtagtcacataaataaaataaaacttaactaaaaacgaaagtcttaacaatatctaaaacaactaaggaaatatgagtgatttgccaatccgggatacaatcattctttgcaaacgctgaaaccgccacttgacaatccgagaacaaggaaatatcttcccacttcagcttagacacccacgataaaaccaggaaaatggcttggaatttcgcatcaagagccgagggagaggatacacattgggaagcatagaaccacgaattatcttcattattcaacaaaataatagctaaaccagccttgccatcgcgccatgaagcatcagtgaagatagagtaccttgtaggactgaaactgatgcacgtggtatcacttcccagggttcgaatgctagtgccatgcatagaggaacctgaatactccttaaacatagcagcaatgcgggaggttgataaagcaccattaggaat

SEQ ID NO: 202415 - DNA, 1281 bp, Cannabis indica
ggaagctttcttctccacgccaatgggacgatgcttcggatgccacaccgcgtgctgggtcttcccgaggttagccgaagctcgagcagttcctgtcacaaccccgcttggacgtcgagaagagataggaggagatctctgcaagccaaaagcacggtcgcctgaggtcgccggcaacgataacacaggcccaccattgtttcttccagccgaggaaactgagtttcgagtgataccagatgaagggccagagaacacagtcaggtaggaggattgaatggagagccaagggccaaacattgggaaagggatcccgtcaacgttcgcaaccgtcaccggcgacgagagagtacagcctctgcgttggtgccccaaacgaccacagaaataacagaaaatgccaatcttttcatatttcatctgcacccatttcttcaccccaaaagctacgtcaaagaaacaacccgaaaacaggggtttatcgacctcaacatccacctgaaccttgagaaacttgttccaagacgccggcctgtcttcctccaattcgacttggaccaccttaccagccaacccccccagcaggctaccattagccttggaaaaatattcatggggaagattgtgaatttgtaaccaaacacgcaggaacttgaagtcaatcggaccattactggatggagtccaggcttgaagaaacagggtgtacccacggacacaccatggtccattatcgagggcccaattcctatgatcagagcactcaaaaccaaacttaaagacattggaagtcttctcttcatccacaagcgccacaacagacactggtattttccagcttttggccacaaaatcagtcacatttacttcctccaccaccatgggagcaacaactttcccaaacaaacagcacgaggccagagccttaagagaactatcagaaggagttaggttgacagaggtttcaaggcaagaaaagcatttgcctttatgaggggaggatggaataatgattgacgccataaatatctaataaaggagaccaacaaaaagcttttgacactcaagacaaactcaccaacccgaatcttaccaaccacacaaaccaccaaaccgagaatggataaaaaaaatacaaacgggtagagcaggttaacaaggcactaaacatagaacacacactcaaatacaggataaacaacacaaacccaatgaaaaaggcactacaaaaaggcagctaacacacaaagaacataacagaacgacacaaagaaaaaagga

SEQ ID NO: 202416 - DNA, 1129 bp, Cannabis indica
tttattttttttctaaaaaattaatcgttatttcaaataaataattattttacaattataattatgtttaatcctataaattaatacgatgttcattataattgataatataatctattatgttatattattgtacagactcaatggatatgatttatgcaactatcaaagaatttagtgatttaaagaatatccctcatcaattttcttacttgcgtcaacaactcgcaactttatctcgacaagagaggaaattaaaattgcaagttaagaaacattcattaagaatccgatctcccacaataaacaataactttgttgctctgcaaaagaagatgtacaagcatgccagattcaagcgaaaagtgactactatctatagtagatacaaacatgatttaccaaagaaaattactttgctcctagaaatagtgatatttttcgcaaaatctatgaaattggagaagattctacgtcacattcaattgcttcaatcaaatggtattattaacattatcaatactacaactttcattcatatataacaatcaaaatattttattatagtagtaacataacaatatgtttctactatgttccagtggccaatcttttacaatcaaatgaagggattaatacccacacatcatcaagtgccgaaaaatgccttcttcaaataggtatattcacatcaaaatttgttattgttcgttaatatttatctttctaaatttacaacctctaatttattttatactttttaaataacaataaatgtccaacaaataatacagaagatagtggagaagtaaaaagactttgcccctctgtcaatgaaaacatacaaagctccataagaatttcattgaatagtgtcaacccaaaaacatgtattttatgtgaaattacatgtattttatgtgaaattataatactaatataactatgaaggcttatttaacaatttaaatatctataaaataggtaacattccttataatcatgattacgaaattgatggaattaacagctatgtccatcaaaatatccaacgccaagagaatcatggtattgtaacgattttattaaattataatattcactttataaatttcaatattttatttgt

SEQ ID NO: 202417 - DNA, 597 bp, Cannabis indica
gttgcactcatagtctcttaagtaggcaggtggtctgacatttcttgtggatttttgtggttgattatgacttgagttgtgtggagtttctgttctgttgatagtagcaggagcaatgtttgatgtagagataggatcttgtgaaatgctatgatgttgaggtgttggtgtctgcatattggggtttatggtagcagcaatatttttaggtactacagtatcttgaatgctgtcagtaggagtttctacagaaaaatcacttacataggtgttagatatatgagaagaaggtaaaacaagatgagaaaaagggtcaacaccaatatcagaggtgttaagagtgtgaaaggggaaaatatgttcatggaaaatgacatttcttgaaacaaaaatttgtttgtcatttaaatcatagagtttgtatcctttgatgccttgtggatatcctataaaaacacaaggtcttgctcttggagcaaacttggtgcgattagcagttagagtacttgcaaaggcaaggcatccaaaatttcttagattggaataatctggtgcagtgttgaataataactcaaaaggtgttctattgtgaagtag

SEQ ID NO: 202418 - DNA, 1541 bp, Cannabis indica
ctaacaaacttacttagatacgctagtcatcccgaccgattgactaagatacaagtcatctcgaccgactgactgagttatgagaatcactccgaccgacctactgatatatgagtcatctgagtgaccaattgagatacgagagtcatcttgatcgatcgactgagatatgagtctttcgattgaccgactgagatacgagagtcatcccgactgaacgactgagatatgagtcatctcaacggaccgaataagatacgagtcatctgaccgaccgtctaaaaaagatacgagtcatcccaatcaaacgactaagatacgagtcattccgactgactgactaatatatgattcatctgaccgaccgtctgaaaaagatacgagtcatcccaatcaaacgactaagatacgagttattccgactgactgactaatatatgattcatctgaccgaccgacttagacacgagtcatcccgacccaccgactgagatatgagccatctgactgagatacaagattcatcccaaccgactaactgcatgagatatgagagtcaccccagtcgaccaactgagatatgagtcatctgaccgactgaatgagatacgagagttatcccgaccgattgattgagatatgaatcgtcctaatggactgactgagatacgagtcatccaaccgaccgattgggatatgattcatctattcgaccaactgagatataagagtcatttcgaccgatcgattgagatatgagtcatccgaccgaccaactgagatataagaattatctgaactgaccgactgagatataagtcttcctcagaacgatctaagatggaaattatctaagatcgattcgaattaaatataactttgacacatttaatgggattattaattttgatttttctaatctttcatgaattttatctgtatttatttattagatattttttatttttttaacaccatgggtctcgtgatggctgattgatttttctcccaaagaagtatcatttctcatatatttatatgaaaaaagtggatttattatttatcattgcattggcatatatatctacttccccaaatggacccactttaaaagaatgagtacagttatgcatgctatatgtttttctaggtttttggagccttggtagcatataatataatagaataaatatagatcatatataatagatgcaaacaaaaatttgcaatccattgcataatcacctactcaaataattgtcctaataattctttctagtatcaaatacaagtcattgtcaatgaataggagaacacaaatttgagctaattaattttacatcaaatagttaaaggagaaaaaagaatctgaatcccagtagttatttatttattttataataataatataattataaatatgaattattaataagaaaattaaataaatgtccagaatcaacatttatatgtcccatgccttgcttgtcgacttggaaatattattcaacaagtaagttggaacgaacacacaacaaata

SEQ ID NO: 202419 - DNA, 1170 bp, Cannabis indica
tcactgattcataatctcaaatcatcagtagatttaatattcactacaaaatacaataacaatatgaatggaatattatcatcaaaaccacaaaacaaatatgaaaaaaaaaattgaatattaattggtttcaaaattctttcgtgggtgagaaagagaattgaaaagacttcaatctaataaaatgttgataccaaaaaattaccactaattcataatgccaaatcatcaatagatttaaatattcattgcaaaatacaataacaatatgaatgaaatattaccattaaaatcacaaaacaaatctgaaaaaaaaatattcataatcacaagtaaaaactaatagcgaaactatgtaaataaaaatgttggattattgacatgaatctgaagatatacttaaagcatgagaatataaactcatgaatgtcaaatttaaaactcattgtcgatctcttatccccgacccaagccaccacaaaccagttcgtcgcctccatgcaaagcttgatgtcgtcttactcaatcctatatgtattaaaaaaatatattaatttaacacgattttctttaacaattaacactaaaataattgatggtaatcaaagtaaattcaaaattgtagcttgactataagtaaagtaaaattctatatatgttttttttttaaatgaataattctataaatatagttagtttgaagaattttaaaaaaaaaataaatatgttaaattataagtttagttttgagatattttcatattttattattaattaatataatttataaatatacttttaaaaaatatataaattataaaataatattttaattaattagatatttcaaatacctaatttttttttaataatttacaattattataaatagatatttaatttttgtagtcattataataattatttaaaatataaattagatattttaaatatccaaatttttttataaatttgaatatttggtacaaatttaacgtggaggttggttattatcctccatttttatttctattattaattaatgtagattttttttttaaaaaaaaaaaagaaattaatgtagattaaaattgagaaaaaaattgaaaaaatagactttattttttcaatagcatgcaattttatgacatgtcatcctgccttcttccc

SEQ ID NO: 202420 - DNA, 1843 bp, Cannabis indica
ttttttaagttgagatatttttagggctatatataggcttttagggcccgaattttagtacatttgaactacgaaattgagagagaaattcaaagagagagagagagagagaaagaagaagacggagattgcagcattagttgttctacattgttagttttttttttcttcaccttaaactcttactatttattataattttattataatgtctagttccgagtacttctttttagttaagggttatttcaaaaccgaaacatgaatttttaattttagtgatgaatgttaatttttaatttccattatattgaattgcttctattcttcaatatttaatgtcataattattaattatattaatcttgtttagaggttttaccttaatttattgtcattttaggattattattcacctaatagtctaggattctaaatttttgtgataaattgtaatttctaatattatcaaagtttattgcctaaattaatttatctccattaaattaatttctaattgtttagaggttttctaatatatgcttcattaatttattgcctaaattaatttatctccattaaacttaaagttttatctaagttaaataaattacatgcttcgtgaatttagtgcttaggtaaaaaagttaataattgagtgcttcgcattgaatacatgtagtagagagattgggataattaattggtttagaattatatgcaagattaataatttgattggaaatctaaaattacattcattattaaaaattaagaatgattgttgacagtggaaaataaccttttgactatttatcacatttaatttgctttttaatttatgttactttattgtcataattaaaactccattttctaattcttgacactaattattgaataatttaataagcatagtcttcgtaggatcgactcttacttacatttatactaaaataattagaagtatcgaaataaaaataatagtaaatttgattggatatacgacccacatcaaatttttggtaccgttgctagagactattgttttattttattattcatatttaatttttattttactaacttgttttcactttaaaaatcacaggtgtacatgtctagtgcagacaagactcaagagagactatcaagggtaaaacaatatcttgagtcatcatctgcttctcgatcattgaagaatatcactgacaacccactttttcaatctcttggtcctgtgaaagagccactatcaactgatctagagtttgattttgatgactcggtcaattctcacaagaccatggctcaaaataggatgctaaaagagttggggtcgcgccaaatcttgaccaacaatcattgtgcatccattatccaccttcggatgttaattttgaactgaaatcaacccttattcacttgctgccatcttttcatgggtttctcggtgaagaccctaacgagcatttagaagagttttatattgtttgggttgggacgggtttgggtgggttaggtcgagtttcgggttgggctaggtttattttttaatatctcttttttaacaggaaaaaactaaaaaataatataattatacaatatattattatcatacacatacacaaacacaatacacaattatacacaataatacaatgtattattaatttctattttacacaaatacattaattacacacaatctaattttttttttacttttttccaaaaaaaaaaaatacttacatataattatatgtacatattacataaactaacacattaccaatttaacacacactaacaaaattattattaaaaaaaagacatatatata

SEQ ID NO: 202421 - DNA, 1538 bp, Cannabis indica
tacctcaaagcttctaggttgaattagggagtaatatcaactagaaattaaagaattttggtgaagaattcctcaaatttggctggcttggcttcagaaaaactttggaaatgaatcaggccttactggctaaatggggctgggctctccttttgaggatcaatccttatgttgcaaggttttgaatggtaagtatataaaaggtaggcctttcttgaattattcctacaagaattttgattcaaggttttggaagaatattgttgtgaaatttaaagaaattcttaagtaaggactgtaaacttattttggataggaaagatactaatatatgggatgatccgtgtattattcatggttagaatttctatcctcaacttactagtactcgacctgagggtttggagaaagttgcggatttgcttttagcaaatggagattgggacatatccaaactccatgctctttttgacccataaacaaccattaacatcatcaagggtggtagatcctacagtcaggatagggataagtggatatggactaaagagtcgaatggcttattctctactatgcctatctagtttaggccttgaatcgtgctcctctttgcaatgttgctcccgctttatggaataaaatttagaattctagtcttggagcatcacaaggtcctttggtgaaacattctctcaaatgcactgcctattcgatccattctagttagaagagtacacattgtggaagtttcatatcctatttgtggagagggagaggaaacgatgtaacttcttttcctatattgcaactttgcctttcacctttggaggtcatcaccctagggtgttatgccaattatggactctgggacctgtgtctgggattgggttaaatttttgtggagtctaaaggctagaggtgtggatgtacaagagttgctcctttatgctttgattgtggtggatacgatctggaaagcccgcaacgacaaggtaaacaataattctatgtgtaatattaaacaatgtattgactctatctatatgtgttataccgattatggttcttgtctgtttacttcaccgaagacagttgagtctcttgtttggtcccccgaaagattgagtcaaaatcaactgtgatgttaaagttagttgcggttcaatgttcgtggtggctttggctagagaccacacatagtcggtcttgtgggtggctaccaacatgctcaacttctttgaccctctaagtggagaagctgtgacttttttgttagccttagaatcagcggtctctttgaagcatatttttgtgttgattgagagtgactctaagacggctatcaatgtgctaaaaagaacttattccagtcggggtattgataactatgtgatttaatgtaaatatatctctaatcttttgttaagttaaaattttttatttattttatgacaatgtaattttgtggcccataatgttgcaaagtgggctttcgccaaaaatgtaactagtatatcaatctttccgctataccagat

SEQ ID NO: 202422 - DNA, 2339 bp, Cannabis indica
attgaatatagcatatacaatgatatgaaatgcggaaaataaactgtaatcatatcaataatatatgcaatgaaaggatcgatgtacctccagccattgatctttgagcttcaatccctgcgatagcttcggtattggagttcgggcttcctcgctctctcaactctctttagatggaatttgctgaatgaattcagaatgagtgaggagctcggggaccgagaccctatatttataggtgagatactccatcagtatctgcgccacattaattgtcagaatattttgacaattaattcaggaaatcaaatcaggtaatgaatatagaaatctgaccatatatagaatattacataattgattttgtccagattcaatgaatataaaatattcatttatcagaaaatcaattatttatttatttccttaaatagaaaatcatttccttaattagaaaataatttccataaataaaaatattctaataagaaaagctaagcactactatagcagacatatgttggtggaatacacagatacgtagtttagatttttaatagactcagctggaaatcaatatatataagccctgaaatgttaattattaaataataataataataatacttaattaaaagtaataagaacactagtcatcatcataattaatatacaaacacattacacacaatatattatatattattaaaaaggtaaagatatatatagtacaggtcatggctatatatactttgccacattgtaagccgtactgtacggcgtgacaaagtcgatgtacaagcactatatttggattttacaccttcaaattataaaaccaaaaactttaataataataataataataataagccgaggacgatcgatacccctatgtacaccatcctaataatattatgtaaattaattaaaacccagcagccaaacagggacttatgaaatagggctttaattattagagagagatttaattaagcaaagcccattaagctacacaattcactgtttggcatggggtaattgggcttgggcctgggccttccatgttaatagcacaatgacctgtttggggtaccacaaattggttcttgctcatcctctcttcattttgatcattttgggcttttttcttatcatcagaagtgttaattacttgaacctcagccatcattatggtgtgattatgattatcatgatcaagtttttcatcacctaattcagatttcactgctaattgttctggaagcttttgctcttcaagcataacactcttgttttttctatactttatgtatagtgccatttgaagaaatccaaagatcaaacccaatatgtttggaatctgcaaattaattaaggataattaattaattaattaatttaatacctcagatattgataagatacaaatcttgttacactaactaaaaagagaagaagatagagctttatatcaaagttactccatataggtcacttcatgtcgttaattatatttttgttaattattaattagttcattaatacatatgtaaataaatatataatatgatacgtgttcaaactaataattgtagtagcactatacataattattaaaacttttctctacactaattgctatctatgcatgtttttatatgtatatatttactttaattatttgccaacttatttaattttatggggcacgtagcataaaacaaacaaaaataataagttaggcaacccaaacatatctctaattaatttaattaagtgcactttttttctttatattcatgaattaattacggcatgcatgttttgtgtgtaacaaaattaatgcactagattatcatatatcataggtaattaattataacacgagaattaatatatatatatatatatatgatcaaatcaattaatatatatgtatatcactaaaaacaaataaaaaaagtttgtcccccttccttttttcttcttcatatattttgctttttgtatcttttttatccttccttttttcttcacattaaggtttgtctcttcttaaaagataactttgaaaaagatttttgaactgcttaatttggcaacttatgaagtatatgaccaaaccccacaaagaaaaaaaccttaattagtattataattaagtatgattaaataaattaattacttaccgccacacacaaatccttgagcattataccgtacatgagccacataacggcgctaattgtgagaaaaaatgataaaggaaacggcataaactccacgctcttcgtgcgtataacaaccctctatacaaaaatattaaaattaaaata

SEQ ID NO: 202423 - DNA, 1205 bp, Cannabis indica
acatgtcgaagtatattaaggcttataaaatattaacatcattttgtaattattgttatttaggtcacaaaccaatctaccatttaatggtagaaaatctactaaatttattttaataatattagtttaaagtaaaatttattttaattaaatttaaaaaaataatattatttaaatcaattaaaagtaaataatgaaattgaattaaaatattaattttatataaatcatatcgtaaagataaattaaaaaaaacttaaataaaataaaataatattaatatttatatattataaagtaaacagtactaaatcaataaaaatagttagatagccactttttatatataaaaatatactgctaacttaattaccgactcaaattttctgaagccagctggctttgatatggtacttatatcatttttgatccataatgttgacttggtagaatacaaattaaaaccagaaaataagatgcatctgaaagatcagtaaatgatcatctacacataacaaagtagatacatctaacaagttaagagatgaagaccaaaacataatttgctacaacaaaaactatggcccttacaaatactattagatacttcgaaaacaatatactttgctttgctataacttaattcatataaaattaattgccactatgttaaagaaaagcaaagaatcttcattcctcccaaagacccttttatttatttattttctttttctcttttccatttccccttctctgccagtatcgtcaagggccacttttaggattacataactaaaatttaatgaatcttaacaaactgaaacaagtgaaaatcactaattgacaaattaaaataagcattattaattgttatatagaaaggggtttgatccaaccatatatatcatgtgaaaatgccaaatgttgggcctatattaaagatttaatagtcaggttaatctaactagctaactacctagttgaattaattttctagtgcatataataagtctattgatatcaaatcatatcattatataattaaataatatgaaaatccaatcccacaattttaaaatttctactgtgtgatgtcattgtgtcatacttcatataaatccccccttaatttgttatagtcaatttttttatgagaataagagttgtctaagcttttgacgtaaagtctatatattttaatgtct

SEQ ID NO: 202424 - DNA, 737 bp, Cannabis indica
gtaatttaaaactgtcaagattaaatgaaaaaatatattataataataataataattaaagaaaaatatagaataggttaagtttgctgacatcagttagattcccaataataaaataaaataataaatatgaaaaaaaaaaaattaattagtaattttttcttaattttaaacttaacatgtactaaaacatgttttttaaacttaatttttttcgccgttaaaaatagatttaatgactttgtctactatgattcaattttgctatttgaatgattatttatgtactaaattatatctactaaattatgtctctcgaacttttacatgtaataaatcatgtccacgacaaaagtcgttaaatctaaccatttcgatatttttccattattaaaagagtatttttaacgacaaatgacataatttagagggaaaataaaataaagaaataatgaaatattgactttgtcttacttttacacgctatatactaggagaaaatataaaaaaatgtattatctcaaactcttaagttccaactttaatttcttttactttttgtttgaacatttggcatgaaactaatctttggttacggaaataattatataaggatctaatccttttttcacttttgcagcaaaagaatattaatcacggtattaccaacttcattagaatggaatatgctctttatagaaataagtttcgttacatttaacaaagcaatagatttc

SEQ ID NO: 202425 - DNA, 670 bp, Cannabis indica
tcctccaacctgcgaagaagactttggagaccatctctctcatcttagatactggtaacttcctgagacaaagaaacattttctgcctcaagctacgtggtcgatggcgtatcttgtagctctttggttagcttggcaaccctggtctcagcaacaatgactttcttattttcctctccaagttccttcctcatgacctcgagctaggcccgtgcatcctcagcgtctttcttggccaagtccacgtcccttcacatcgtgttagaagtggaaaggttcttgacagcagccgatttggctcgagagtaggcataagccatcttcacaccagcctgtacggagaatgcattaaattctgaactattttaagaagaatgaaagaaaagtgatagagggaacttactcgagaaatctccttcagaactcctcccaagaccagctccaaggacaattcactgtccgcccaggttaggtgttcactcacaacagggagcgaccgagccacgtagtggtgaagcatgtctttgcgtctcctggcctccgcgcacaacaccagagtttgggcaggggccctagcctgtttggatttgcccttcacttgctcagatccagtcttagcctgcttagatcagcccgaactacccccccccccccccccgcccgcccgact

SEQ ID NO: 202426 - DNA, 1455 bp, Cannabis indica
cgagcaagagaatccgctacagagttgtcaacctgagggataaacgaaacaacacaaacatcaaataacttgaccaagttacaacattcaacaaaagctggatacgaaccccaggcaaacggcaaagcttttgtctctagagctttgactgctatttgagaatccgatttcacctgcacagtgttggctttctgatcgactgcccacttcagagcctccacaattgccaaaaactcagcttccagcacactgtcaacagcaatatgctgcaggatcacgaaaccctcctcctgcacattctgaatttgaacagcacaaagccctgctctgccttcctgaactgaagcatcaacacgcagccgcacatcccaacaaacctgagagtccaaggtagaggtgttgctcacagcagagtaagaatgctgtagtaacaccaggctgaactccttgaacctttgttttagcagtttgattgattgatccaggttcggattgcatcccttgaatataaggttgttcctgcattgccagatatgttctatgacacaggcaccaaacaaaattagttcttcgatcttagactccagcatccacatgaaccattcttcaaaattcagcgtacacagattgccattgagcaccccccacggactggtaaaccataaacaacgggcaaagtggcagtccctgaagagatgtacatcgttctcagtttgaaagcccacaaaaaacacgagccttatcactctcctggacataacccagcctgttctttagaggaaggcagccatttaaaattctccaaagaagcattttctgcctagcatggattttaagtttccaaagatctttccaaactttcttttcaggttgaaatctgtggttttgagcaccccagtacgcacttttcaccgagaatcttccgttggtacttccttgccaaaacattgtatccctgcttccatacatgggtcgaattttcagaatggcttctgcaacttcggaggagaagcactgccttattagttgcacattccagctctgtgtgcccgggatgaaaaggtctgcaactgaggtgaaagcgtgtgtaacattgtaagaaaatgcctgtcgaacctcctccgggctataccttggcacccacggttttgtccaaatgtcaatcttgccatctcccactaaaaacccagtgttctttacacacaggtcccgattcatcagaattcctcgccaaactttggagtcattttgatttgcttctacactccagaaatcttgaaccttacaatattttgttgtcaaaatattgacccaagccttactgctattctccccttccagtaagtaccaggccatttttgccaagagcgccatgtttacatctttgaacttccgaaagccaagtcctccatttcgtttgggttgacagcaatctgcccaactcttccaagcatg

SEQ ID NO: 202427 - DNA, 731 bp, Cannabis indica
agataggcaattttaatatataaagatatacttttaatttttttcattttttatttgatccttttttttcactcactattttttttttctctctctttctcttacgtcaaacttttttctttttttttttcttgtttatcaatacattgattcttcttctttttctatatgtatataagtgtaatctttctgtctcaagtcttttatctcttttttttttaacactctttcactttcataaaattttattttattattattttctaaaaaaaatagaaactcattctatatcttttttttttctcttttacattttcttattattcacattcaaactactttatactatttttctttaattcatcataaaataagagaattttaattaatttcttttaacacttactaaactaattaaaattcttttcatcaaagataattcatatataattattaaattttaattacacatttagttttttaaatttccttctctctttacaagcaagataaaacaaatacattttcttttatatcaccctaattaattttctatctccactatgttttatattctttttaattatttttcttacctctatactaaatataggattaaatttgggttgttgtaaagttgttttatcattgtattttatattttgttatttttgatacatatatgtattttacttgtttatgtttggatagagtgattaatatttgattaa

SEQ ID NO: 202428 - DNA, 538 bp, Cannabis indica
attcaccagtttgatatcacgatttacttcgaataacctgaaccctcccccactgccttgggttccggcaacgccatgcaaatagacctcaagctcgtgtacggttttcttagcttcttttaagtacggtgacagaagggtgtctatgactagctcccgtccgacgtgggcgtaatctaataggaatggaatggggattgggaggtcagggacggggtctttcttatttctcacgcgcaggacgtgaaggttgtggaggttgaagaaggtggccttgaaaccctcgtttccaaagcgtggacttgcgaaaacgatggcggtgactggaaacgccttctcaaggcttccagtcggcttgttgtagtcgttgaaaacaacgtcagtggcggcaagagcagccattgcagcgcccatgctgtgtccggtgaaggtaatgctcacttcttcatccttatattgatctaccaattctctaaccgcacccagaatctgttcatatcaaaataacttatcataaaatatatgtgaaaatattcaa

SEQ ID NO: 202429 - DNA, 683 bp, Cannabis indica
aataagaaatcattacactaataaaaacaaataccttcaaatattaatggcgccttcctcacgttcctttaaactgggagatcgagtagaggttcaccaacccggccatgcatcgagcggcccttactttccggccaccgttatccgttctccggtcaagatgaaggccaatgttaccatcctctacgttgagtacggatctcctcatccagtggagaatccccttagggaaatagtcaatgccgacaatgttaggccattgttgcgggccgagcaggtcgttttcgacgcaggcgatgatgtggagtttttctttcggaacagatggtttcgtggtgtggttgtgagtatgaatgaggataagttgaggtacactgttaggttgcacgattcaactcgatcaattgcaattgtatgtctacaccgcaatttaaggcttcatagggaatggaataatggagcttggaacccacctcttccaaaagaggtacctacttatacctacctctcttatcttaaaaatttatgtaccttaaaaaataatcatgatcatgattgtgttgattttattaatttgcagaggactaaaaggaccattccaattggcaaggacccattgaaggtcaaggaaaagagtatgaaagtcaagatcagtgccctaattaaggacaactcattggaga

SEQ ID NO: 202430 - DNA, 1049 bp, Cannabis indica
aaattggtctactaacttaacttaataacaagtcaagtattcatttctgatagatattcaagaagagcacttcttatttccatccactactatatactcctctcaataccttgtaaatttctacttattaacacatccattcctcttgataatctctggaataattactaattttgtatcctaatatgcatctttctagcgtactttgtcctcactcatacgctttctaagatgactccccagaaaattttccatcttgagattaccccaagtgaagtatgcttaactccaaggtaagctcatggtggtttatcaaaaagtagatgcttatttgtcgttcttaattgtatttcttgttttcattctttttcattgaatacaatatttctaggaatatacaccatgcttgtagtacttagacatttcctctataggaatcatacacacctcaatgagtgaaactagaacttgtgactttggtagggtcttatacatgaataacatgcaacaccaaaagtcattaggttattataattttgttatttgtgaaaaggtatttcaaagggagatttattgtctaaaacaagtgttaaaagtatgtttattagataaatagagatttaaaaagtttcaacccaaaatttgagaggcatactattctgagctagtaaagttaaacccatctcaactatgtgtctatgtttcctttcagctctcctattttgagcttatgtatggggacatgaatgttgaaaatgaatgccattagctctcactagactttcaaacacctgatactctctaccccaatcacacttaatgcttttattttagtttcaaattggttttctacaaaggctttaaaatctatgaatgcacactataacaaatataatttctaggggtgaccaattttgaggcaacgtaaagtcgcctcaaatgaatgtcgcccctaaagaaacttgattttttttaatctgtcaaacattatgtcgcctctaaaactattagaagtgattaatagtgaaaaataaacatttaataagctt

SEQ ID NO: 202431 - DNA, 765 bp, Cannabis indica
aaggggagtaggtcattacctaatatcacaaggtggtgaacctctataacaaatctctgtgtttattgctttttcattctatttgtgtaaacacgtggaaagcatcagatttatacgacccagctctcagttgatcattttttttaggtcaacatgttcaaaatatatttaattctgtgaggatatttaagcttgaaatatatcctaatctaaattgagaaaagtattttgtttatttgtggaaaaaaatacaatagtcaaaaacattaataactcaaacaaagcaggataagatggcataaaatatatgtaaatatagcaatgttggccattcaacaaagcaaataaaagtaaatattacataacaagtgccataaggggtaaaacattatctcggcctcatggccattgtttgaaagttaaaacaataaaaactaagtcaacatatttggagacttagtgagaccttcttcttcatcttccttctcaaccttgccttctttagcatcattggcctcatccttcttggtctgctcataggaaactcaagtccatctcgggattctccatccaggcactgtaatggattgtttggctatcaggttgacccttgccttggcatccaatttagtatcagccttagcatgggcttgttggttggactcgagaagttcctggatcatagtttgagcagcctcgagattagccttaagggccttctcagatatctcctggttctcaacatccttttttaacctagagatt

SEQ ID NO: 202432 - DNA, 1376 bp, Cannabis indica
gctatgcaaggagattttatgagaccaaggattgatgaggtaattatacaaagtttgtaagcaatgaaatcatttttatacccttaaagggagagtttcagtagacttttgatctattttgacatttagaaattttttttagtttatatttttttttgataatcgtgtatgttataattattaagattacctgtaaatatttaagtagtttacaataccaaaaacaaaattacatattttattgtacgctcaattgttttttcttatatactatttaaatcttattttcggcattataaattatttgagattttctaaaaatttacaagtggtcttaaatagttacaaaatatttatcatgaaataaaattaaattagaaaaaaaaaattgaatgccaaaatagataagaattgtattacagaaatttccaataatatatacatatttatttattggtggagaaaaaaaaagtattttaattgattgctatcaaaggagaaagattccgaaataggcttttaatacagtttgacttgttggccaccaaatgggaataataatttacagtaaatccaacttttatttcttcttccattgatattatttgttattctattgggaagaaaccaaaaagaaaagagaatataatttcttgcaattttacttatttctcatcattttggttcacatgaaaactttattatctcagcctaattatgttttatacttttctttttattgctatttaggccctacttacctgtttcccaacaattttagctaattatgttgtccagttgtctttcacactttaatttctttttttttttgttttattacattataattttattaattaatttttaagcttattgtcattcatacaggttgatcaactcctttctaaaggggtcaatgtgaccatatacaatgggcaagtaagtaattttcttactccttcacaatactatctatggattacttatttgaataaaatgaccccttgattagtttattggctaagctttagaaattgggtttgatcccatttggaccaccccacttgtgatgttaccatttttggctttggatttttttttgcctacttgacaaaattaaagcatgcttcatttggattaatatatgaaataatattaataataactcagagaccattttggattaggtgactttcctttattgagccatatatgcactcatatttttagcatatgattcaataagagaaagttactcaattcgagctagtacaagttttaatttactaagatgacatttacttatgagataattttggttaaaagaataataataactccgagattatctcaagttaggtgacttttttttattg

SEQ ID NO: 202433 - DNA, 2349 bp, Cannabis indica
gttatttcatattgtcctaactcaatcgcccacttgagcagccggccagatgcctctgtcttttgcaaaacttggaacaaaggttggtcaatgtaaacttgaactagatgagcttagaagtagggccttaactttcttgtggctaggatcaaacagtaagtcaatttttcaatcgggcggtatcgactcttcgcctcaactagtcttttgctgatatagtagactgaatattgaacattattgtcttctcttatcggtgcgatgcttacagcatgctcagtgactgcaaggtagattcctatctcttttccatccaaaggttttaagaggatgtgaggttttgcgagttgcttttttagctattaaaaagcgttcttacattcttctgtccactcaaatttcttgttacctcaaaggatgttaaagaaagaaatatacttgtctgttgattttgagataaatctacttcgttcagctatccgaccagttagacattacacttcttccaccttcgttggcgacttcatatctagaatggcttgaattttctcttgataagcctctattccttgagcataaacagtgaatcaaagaaacttacctgagttgacgccaaaggaacactttaagagattaagtttcattttgtatttttgaggattttaaagaattcatctaggtcctctatgtgccctcagccattctggatttgatgagcatgtcatccatatatacttccatgttacgcccaatctggatcttaagcttcttattgactaacctttggtaggtagccctaacattcttgaggccaaatggcataactttgtagcagtatagtccaacatccgtttggaaactagtatgctcttggttgggtggatgcattcttatctaattatatcctgaataggcatccaaaagcttaggatttcatatccagttgtagcatccacaagctgatcaattcttggaagtggaaaacaatcttttgtgcatgccttgttgaggtcagtgaaatcaatgcatacttgccatttcttgttcgttttgtgtactagtacggggttagctacttaggtcgggtagggagcttcaattatgtatctatttatttggagctttttgttgtgaaaattatattgataattgccacaagtgtacacattcacaaacaagtaatacaatgataagtaatcaaggttcgtatccacaggaacttttacattaaatgatgcaaaatcaactgaaagcaattcaaaaatttgaaataaaaagaaagcaaaagaactaatcaattcaagagaaaaattcttaaccttaattctagagttgagaaataatattttaagctaaataaactaaaattaagaagccaaaagtgattaaagttgtgataatttcagatttagaaaatagacttgggtggttaaattccccctggtatgttccaattgatacagcaatgacttagcaatcctgttagagttaacatatttcaaaaaaaaaaccagcaagttttttccaaaacctgtaatataccattcataacatcaacaatgcattcctacaaggtagcaaaatatgcctatatcactactaattaatacctaaaagagaggtaaaaatcatgcatcaattaaatgggttcaactaggtcttacttttccaagtaagatctagcttagtaaatgttaaatctggcaaaaaattaaatacaatcaacacttcatcacatctaattgaacaaagataggattactgcaaccattgcaaatcacaacactagttcatacaagggttcataaccacccaaatctcaaagatcttagttcatgtttgaaattaaaaacctaaaacaagaaattaaaattttcatggagctaaagagaatatcaaagcgtatgaaatgatacaaaatggaagaggagagcaaaagaaatgagttgatgagctcaaatcttctctattgaggttgccttcgtctgcttcttcttactctttttcttctcttctttgtactctcttttttttttctgtacttcctttctgaaaaagtcgtactccttccttcattcaagtgcaaccaccatctatatctctatatcctcctggctgccccccatttagggcactaaagtttacccttattagagatccaagtcattgtccacttgtccttctttttccagacattggctgactcattgtacacatttttaccacataagcatcatttattcctcattaacgccagctggaatttctgcgaaaattgacttattgcgcttgccaatggctatagcattgacagtcagcatcaagcattttcctgctctttttcttctt

SEQ ID NO: 202434 - DNA, 600 bp, Cannabis indica
ataaatacactacacatatacatttacttattgcatgtcgtgtattattataaaattaattcactatttgttattattatagtcttattaagtaactatattttccaagaaaaaacacagatagtggtgaccaggtgtttggaccttttatttagtgtacatacttattttggtctgaatgtattgtgtcgatgagattatggttggacatgagaggctgcatgttatgttagataatcgatttattactcaatctgtttttatgtgtgctttctttgcatgtcttccattttcaaaccatatacagacttggctgtctttttccactcatttattcaggttaatttattattattcataccataaaatcaacaacaaaaaaaaaaaaattacccataaatatatctcttatattaattgtggttatctcgtttttcaaaaaatgtagttttcttcattaaaaaaaaaagtgactatctaaggaaaattatttgtttaaccgttttttttacttttctattaaagttaacggttaaaactaatacagttaaattaatacagttaaattaatcaattaattaatttttttttaaaaattaa

SEQ ID NO: 202435 - DNA, 846 bp, Cannabis indica
aaagagtgaaattggaacttatgtttttgatatggtcgaatgcaagggaaacaagctgttccaaagatcctcagctgtgagtaatcgggcttttcatgaaacagtgtttcaaaaggtgatttcatgtgtaggattggtgttggaagtctattgatcaaatgaacagcagtttggaaagcatccacccaaaatttgagtggcattgaggcttgtgcaagaagagttaggcccatttcaactatgtgcctgtgtttccactcagctctcccattttgagctgaggtgtgaggacaaggatgttgaaaatcaattccattgactttaaacaattcagtaaaggcttgaaactcaccaccccagtcagttctaagtgccttaattttcctatcaaattggttttcgacaaaggctttaaactgagtgaaagctgccagagcttcatcttttgttcttaatgggtacaaccatgtaaaacgactgtaatcatcaagaaaatgaatgtagtacttgtagttggtgtttgaggctattggggaaggcccccaaaggtcagtgtgtatcaattcaaggaccttagtagctctagaatttgacagcttaaatgggagagcatgagcttttccaaattgacaggctatcacagaaatgtaaattttcattgcttaaacaggatacattagaaacttctaacactttctttaacactttgacagaaggatggcctaacctcctatgccaaatgtcattattggaaagtaaaaactcactactaggagtacgggttacattttctttagacaacacagaaacaccagtaaacttgggtacagttttggaattgttttt

SEQ ID NO: 202436 - DNA, 616 bp, Cannabis indica
gtgattgatttcagaaccggcgttgatcatttttgtatccacacaggtggtaaagcggtgattgatggaataggagtaaacttagatctgagtccgtacgaccttgaaccggcgagaatgacacttcaccggttcggaaacacatcggcgagtagtctgtggtacgttctagggtacatggaagcgaagaagaggttgaagaaaggggaccgagtattcatgattagctttggtgcgggctttaaatgcaacagctgtttatgggaggtagtgagggacttgaatggaggtgaagaaaatgtgtggaacgatgacattgatgagtacccaccagagtctttaacaaacccattcatggaaaagtttggttggattcaagatgaagatccaagcaccttcaagatgcccttatgagaataaaaaaagaaaaaaaaaaataaatacaggtgatatattcatgatgatgatgatgatggtgaagaaagatacatatttagtgtcattataattattacttattattattgttaatctcaatggttcatgatcagtattattatttttcaccaatctagttagggtttacaaaattcgtttaagaaaaaaaaggaaaaaa

SEQ ID NO: 202437 - DNA, 595 bp, Cannabis indica
actataaataaattatagaacaatcaaaaaagaatttcatgaaacagttaatgaagttcatataatataaaaagtaaaaaaatttaaaccgttaaaataataaaaaaaatcgtgttaacatatttttgtaattttttttataaatttttgatctgtaaaaaaaaaaaaaaaagtataatttattttgtaaacactctagtaaccacttgtttctgctgttaagttttgtgtataattgattgattggcctactctacatgttgcaaattttcaaatcttttgagatacattataattttgaatagtgacatatatattttaaatgatactatattgattattattgatatatatagaaacatattaaaattatcgtggccacaaattaaaaaaagacaaataaattattagaaaaaattactagctattagctatcaatcttatcttgttagaccattaaatttaaaacattgatctgagagcattaaggtgtccagcactattataaagtaacattttgtaattgataaatagttttttataatttttactaaagtaaaatatgtggaaccaaatattaaattatactaataat

SEQ ID NO: 202438 - DNA, 1034 bp, Cannabis indica
aataataatattacacattaataaagtgctagacactatgagtgccctatattttttttgtcttagcggtcaatggtcaaaatgttcattataataactttagtattttacataatgatatatattttgttaggaccttcgaacaccatttatctccacatcgatatttggtaatgatattaatccgctttgagcctaattaagccctcatggatttatttttgggcattttcttaaaatgtctcattctaatggagatagtattcatccttaaatactcaagatccttctcttttatagctaatgtgagactttagttgtacatccaacaatcaactccttaaacaaaggaccaccttgttttccctcagacgattacatatctaaaccttgagcaaaccactcaagaacatatttccaactcccttgaaaaattgcaaatcgaatctctcgattccaacactcaagatctccttgaataaggtagatgatttctttcacaagctagatttgaactctctttgaatcagatctgaacctctgacggctctaggagcaagcttcacctcctttgtttggcattctgagaattcattcacactactaatttaaaatctgactctgataccacttgttaggactgttggacactatctatctctacatcagtacgatattgtccgttttgggcctaagtcctcataaatttatttttgggcacatttccaaaaggtatcattccaatggagatagtgttcatacttaaatacccaagattcttctcatttctatccaatataagactttagttgtacacccaacatatctcatgttaagaaatctttccttagtttatctttttctcattgtaataagtctttaaatatcattgctcactctctagcaaagagcgtacttattttagatgggtctcgtatttggtgattggagcttatcctataaatttaattgtttgattttgtgacttttagactttatgtcgtataatgaattatttttatttttaaaaaata

SEQ ID NO: 202439 - DNA, 507 bp, Cannabis indica
aactgccttcccactcgagtgcagcttattcatcgtcatgtacacattgattcggcttgtcccaggtgtaatcgagaagtagaaactagcgcccattgtattgttggctgcaactttgcggctgcctattggagtttgctggtttgtttatggacagcactggttctttgtcatttggggattggtttcagcatcagttggaacgctggagtagcagcgaaaaacaattgggtactatgctttgttgggctatttggcaagataggaacaataaagtgtggaatggaaaatctggttcggtcaaaactgttgtggctttagcaagaaataatcttgaacagtggttgtttgctcaagagaaaaaattttcgcccctctcttactcgattgaggatggagagggggatgagcaatggtgcgctcctcatggtgatttttataagattaatgttgacgctgcaacttttagtgacaaacacagatttagttttggatgggtacttcgag

SEQ ID NO: 202440 - DNA, 1833 bp, Cannabis indica
  modified_base (32)..(32): a, c, t, g, unknown or other
ctacatataaccccctaccccccacccccccncccccccccccctcctctcattctttgatcttttcccaataatattaagatcaatatcagccaaaaatgatccccgcccatatacatattttcatgaagcaatactactactattgctactactacttccccatagtttcacagttccaagcacaacccataaaatggcaattattaccacaagaataggaaagaagatgaatcctctatttctgagtgaactctttacggtttcagaatcactacctgcaggaacggttgttgcattcacagcagcattgattctcaacctactaaagctggacattcgttcgaaagcgcgattcaccaatgcattttcggcagcagaggcaggggtagtaggtatggactccacaaatgaccataaagtagaagaaaaccaactattgttaccattattatcgttgccactttggttttgagtcggttgcaatgaaaatgtggaagtatcacaaactacaccaaagaataaccaaaaattaacaaaattaagcaatgcaaatatcatatagctaacagaaattctcatatagctaacagaaattctcttggatacgttaggttttttttctttaaaaagttccaatcattgataaaccaatgatacatgagagaagggaagatgttttagaagagagcttttacagctggcctaaaatcccaattccacataggttctgtgccacaggaatggtgttcaacaaccaaatacacaactcaataacatgtttaatcatttgaagctatgcaaagatttatatacctgaagacggatcagggtgagagccaggatcaaactctgcagaattaaaggcacttctctcttgattatctggctggaactgatactgatggttcatctggtttgcaatatcttgatacaacagattattaattgggtctgtgccttctaaatacatttgattatttacttggcctgtgccttctaaatgcaacagacttgtatgttggtctgagccttgtaaataataaagattagtattttggtcagcaacttcaaaaagtagctgactaacaacctcgtcttcgccaacttgttcagaacttcttcgatactgatacgagtttaccacattttgctctagggaatgaacgtattgatgtgaaatccttgactgatcatcatcagctcctatatcattcaaaaacatggtggcatcatgaaacaggtccaactcagataatccatctacctcctcaaactgaaagttctccagtggtttctccgcatctgttgtagtaggttcaggaccaaaaaggtcatccatctcaataaagtcttccacaggtagtacgtaaacctcctgttcataaatattgggagaaaatgcaacctcagatggcacatgaaattgcaattgagagatatcagaatgtgtgtgctcaaagttggcctgcacattattttgtacaccgctgacatggaatgaatcaacaggttcttcaaatgaaatttctctgctgagtgagtccaccaaattactctgcatatcattgttgctcaaaacctgctaaataaaataaaatttactagtgcctgaatatataaaaaagctagcagactgcagcttcttatgctcaaagtaattaactaattcaattattaaacctcaatagtggaagtaagttaaatttcaataaattaagttattgtgtcagtataccagttcaaaattttctttatctacaaccttggcttgagctaattttccttattatggtgctgttggctcttgttttccttgttaacaaatcctta

SEQ ID NO: 202441 - DNA, 667 bp, Cannabis indica
ggggttaaggggtacaagttgtggagcattgagctaggtgatcaccaaaggtatttcatcggtaaggatattgtgtttgatgaaaaatctgtgtacaaagacacactgaggtctgctacaaagtccatgaatgaggaataatcaaagaggtccaagtttgaggtggaacttggttcaagttctaataaacaaatgcatcaacctgagtcaaatgatgttgtaattggtacacaagaagtggatgaacagattgaagaagatgaaacagaaaatgttgacacagagttgcagcattaccaacttgtcaggtatagagccaagagagtgtcaaaggctcctagcagatttggttatgctagcattgtccattttgctttgaatgttgcagaaatgagagacaatgaaccaagatcatatagggaggccatgaactctactgatagtaagaaatggggaacaacaatggacaatgaaatgaattcactagtgaagaatggaacctggattctaataagaagacccaaagaaaagagaataattagctgcaagtgggttgacaggcactaagacatgattctggtgtgattcagctagattcaaggctagactggaggcaagggattttacacaaaaagagggtatatattatactgagatattctcacca

SEQ ID NO: 202442 - DNA, 587 bp, Cannabis indica
aaaaaaaaaaaaaaaggacaacacacacagatggagaatggaacgaatgccaggtcctcgtctaatgaacgacatgctactcctcccaaacggcgacgtattaatcataaacggcgccaaaaggggcgtcgctggttgggagagagcaagaaacgcgtctttgaggccattcctgtacaacccaacaaaaccacaaggaagaagattctctctcctcagccgcacaaacatcccaagaatgtaccactcctcggcggtcctccttcccgacgggagagtcctagtaggtggcagcaacccaaacgaaaggtacactttcagaggcgtagattacccaactgagctaagattacaagctttcactccctactacatggacaaccactacgaccccactagaccctcaaacgtcactttactcagccaacaccttaacggcgtcgtttacggtgcagagtttcacgttcggtttttcatgtataatacaacaacaataagcaggcccagtcgcgacgttgagtttgtggtttacgcgccgccgtttacgactcactcaatgtcgatgaatcagaggttgttgaggctga

SEQ ID NO: 202443 - DNA, 968 bp, Cannabis indica
tattaattaatagtcgactatatatgaactatatatatagctttaaatttaagttgttcaatatttgatttgcttttgttatcttgatctaattattaattgatgatgaaaacatattagagttgaaactaattgaaagtgataaattatatatacatataaattagttataagaaagtgatatttatacagttaaaacatatataattataatatttagccgacattatattattgtgataaactattttagtatatatgtcaacattttttttttttgaaaagggtatataccaatatgattaattaatgcaccctttaaaatcaaatttttcgtcttattaattttcttgaagttgaagatgaaataatttccaacgaaaaattatgtacattatattagaaaatcatgattatatttaaagcaatatattaactataaggacaaaaaaacaggccaaaattttctgtataattgtggccatgcacatgcatataatatatatatatatatatatatttatacataataaatttagtacagcaagttgatcagtttaatttctaatatatagcaacgagaaaaattaaaattaatgttgacgtacgtaccttaaaattttctacagaattaattaatattcatatatattatagaaaagattttgtcagacttatattatatatatattaacttctctactcttatattatttaaatgaaagaaaaaaattatttttaccctcaaccatgccacttataaattttacctttcgaataactatgaaaattattataaaatttcttggtccttcgatattgattcgttttagtttcctaatgtaagattgataataataatctactataatttggaagtgcttatgcaaatatatatatatatatatatatagatatattataatatactataattaatagtgtaaaattgagtactctgacctaat

SEQ ID NO: 202444 - DNA, 710 bp, Cannabis indica
tcaaacctcgaattttgaggaagcaaaccacatgcttgactatgactattcgaggtacccctcttgggtgaaagcgagtttgattgattgaagccatcaaccacaaatggtttttacccttattagtttaaaattaaggtaatgtaatttaccttaaattaagattgtggctcttagtagctaactggtgcccaagttcactccttaactccgcaatagaatcagcacacacagcctatataaataaatatatatagagatagtatgattcactaaatcacataaatctaaaaaaaaaaatgagataagaaatttcattggaaaaaagaaaaagttgtataaagaggaaaataccaaacaatgtccaaatcgtccaccaccaagtgcaatttcaaaggacttgctcaaagcttcatctatcaatctttgcttctctaataagcttttcatccctttacttatcacttcctctaagtccaaaccaagtaactgcccaaaaccatatatattacagcttcttagagttaataaaaatgctttaagagataatgtgatacataaagtgttgtgttcattgtgttaaaaatactatgtaaatatctttgcaatattatatatttctattatcagtagtcatgctgtcatggtccaaaaaaaaaaacgctaaactatttgcaggacacaacacaaaacagaattataactatcta

SEQ ID NO: 202445 - DNA, 1536 bp, Cannabis indica
ttgtcgtttcacttgtttagtgtcatagtagaagaagatgtcacgaccttatttccatccagcattaatatttcaaatcgactacttggatttctatttcatcccttcaatttgttggacaactgtggcttaattaatatgtccataaaacactaagagcatgtttgttgcgttctcaattttcaatttttaaaattgtatttttaaaagtaaaaataaaaaataattttttgtcattttaaaaatttaatagtattttgtacaaattttttaaagctgtttttaaaattttttcttactaaaaaaaattaatattttaacaccataccatgacatgaactcatccaagtttaggtttgggtatagtttttgatctaggatctgagtatgcgaacaaaaatataaaaatgtaatatgttaaacaaaaaaaaattgaaatatgaaaataacattttgatgttttctattttttagtttttaaaactcaattttaaaaaactgtctttaaaaaattttgtcaaacggctcctattgtttttaaaaactgtttttagttttaaaaacagtaaacagttttaagttatgaaaccaaatagcctctaacattatgctgtgacagctaaaaaaagcttatgaaacctaacaacattgcttgcttatttgatttctttttttttttttcaataccaagattacactttgtaaacttacaatagattttccttcaaatccatgagagagatttagaaaggaaaaaaagaacacactatgattacatatagagaaacattaaaaacaaataaaaaaacaacaaaggaatctcaagtttggcacaaggagaaaatgcttttgataatggcattggctgtgacaataaccaatatcaattgattcagagaaaggcacaaggtttggccttctttcgccttttctttggtttcggaggctgcaagacaaccttgattgctgcatcaaacacagccttcacattctggaaaaagttaccaaaaggccaaagttagtttgagaattacagaaaaagctaaactaaactcatcaaatttcttacatactattcattattattaaagtagacaaaagataaaaaaaaaaatgtaactttggcaaatttcaaagacaggttaataataactggtaaaacagagaaaaagggtgtaatcaaggaaagggaaatgaacagtcttttcataactttagaacaaatgctcttaaaagtgacaactgaaggacattaattttgaaaaatgagtttcaaagagctagaaaagtaaatgcagccttggactaaacaaatgtattaaggtaatatatgaactgtgatcactaatcatagttatgctgcattcaaatctactgttgattaagtatttatttgaaacacttcttttttgaattgagaaaatggaaaacaaatttaaatacctttattaggaaactagaaagctagagatttcatgtttaaaccattatgaaaataaatgaacctgctgagtcttggaactgcactctaagtaa

SEQ ID NO: 202446 - DNA, 1190 bp, Cannabis indica
aagagagaaagagaggcgaaagatagagggcagcaagtttcaaatggaggattttatgggaattacgtaaatattatctcattttaccaatatcacttattttaagtttagaaagcataaaaattcaaatttctctttaaaacatacaagtaaagtatcccaatactgtatatatgagattttttttaggaaactcatatgaaaggtcctccaatcctcaaatattacaaaaaaatcactaaaagacgttcttaagttattctcaattcttttgataaaattctcaattctgaaaataattttgtcttgtgagttgggcgtgatgtggtattgattttcacggtgattaggataggcatgcgactcatcgaaccttttaggaattactcacatttacatattttttcagcttcaaataattaaggaatcagtcgcacttttccagctcactccagcttcaaaattaagctttaaacttactcaattatactttgttttttttgaaaggattatacttttttgttgtactaactcatgaaatttctacaattgtgtgaaaaattggtgtcataataaaactttaaatactagatggaagaggggacaatcacaatagttttacttttttgtttctttattttattttcatcctcaaaaaattatttaattaattaataaatgtggaagagtttggcagtcacaaatggtgacttcccaaattgatggtcgttttgcaagaaactgagcaaagtcattcttttctcttaaaacctaaacataattacattttttatgatttaattaattggtggaaaagttaattgtcatcttttaaacaatttattttattaagttatttttttccccactaaaattatcaaaattgcaatcgggctctttattttttttttcctttttcacaattttttcctactttttattaccttacattttccactgaattccaacttacaaaccctaacggaaccatattattattccaaataatatttttcattaaaataataattaagaaaaagaaaggtcatttttagaagacaaaaaaaaaaagttctgccgaaataaaaagggtaaataccattttggactctatgttttgcaaaagttacagattagaccctgtgttttgttaaatgacaaaatggaccatgtattttctaaaatagtaa

SEQ ID NO: 202447 - DNA, 570 bp, Cannabis indica
aaaaatgaaataattcataatttccaaacagaaaatataccttgatatcattatgagacagtttctactcttttagttcgacacaagacttgagtgaagaaccgttcgaatctggcaataagaaagagaaagatggaaacaagaagaagttcaagcttttcaacattccttacatatcaaggaatattgccgagatatacatttgagttaagaagttaaaaccacgcaccttgggcaaagattttacatttatcaaagagtcgccaatttcaccaattgggtttttcaatagaactgcaagacaatccccaaaagaagttcacaattatatttccaatcaataactaattcagataatacttcataaaatgttagaacagtctggtatagatggaaggaggaaaaacagagaggggaggcctataactgataaaaatagtcataagagataggaagacaggaagtgaaggatatatgcaaagagccatcgaatcactgaatggaccatcaatcttgatcaagcttgcaaattcaactaatttcattatctgcgcagagaaaaatgagaaa

SEQ ID NO: 202448 - DNA, 620 bp, Cannabis indica
ctattataacaaatcaaacatcatcttgtttcttttcacagaaaggtgtaggagaaaatgaaaatgaatcccttcgtgttagtgttacgtgtgtgttgactttttaacttgccgttaaagatgggtactaacctcaaagattttttcgtagagaatttaaaaacagtccatttgatctaagaagtagtagtcataaaattatcaaaaaaaaaagtagtagtcataaccagaacccacttgaaatttaataacatggtccaatctttctttttttctagaagaaatgcattggttgttgtgtgcatcattagctaatggcattacatagataatgtttttgataattttttactagttttcattttttgatttattcaactaaacaattgttactttcacttcacttcaaaggtgtatgataagtatgattttaatactctatctttttaataatacttattgattattttacatttttaaatcatacatatttactattttaaacttaaatttatttaataaaattttatcaattaaatcaaattattttcaattttatcaattattttcaataattaaattttattttaaagtatatacaatttcaaaatacaaagtac

SEQ ID NO: 202449 - DNA, 1122 bp, Cannabis indica
tgtagtatgaattttttttatattgcttgatgtgttgtgtataagaatttagagtatacacattgagttattatactccatgtttgtctttgtagtgtttgattataattattgaagatctgattttattttaatacataaacaagtttatttggagccctttgtctttagatcagaaggaatcgaatcagaaatagttggaagatgtttcttttctcttttagctgataagaaggcttccaaactttcatagtaggacttcaggcatcctctataggcgtttgccaatagccttagttttcttaataatattcttttattctgctcaatattattttgatacacaaaattgggggaaaagaaaaagaacaacaacacttcacaaaattgacaaaaaaaacttcctataaatagaaaactcatatcttctgaagccaatttcgtattgtagaaacacacaacattataaaccacttctcacacaccacccaaaagcaaagtaaaatacaatctttatgtttgtcgttagcattccaaaatagcatttatgcgttttgagggcttttttggacctacaatttcgttttattttttgacgtatgtttcaacgaattccatgcttttgtctaatgagaggcttgtattcataattattttttagactctctattctaattccatgattttctccaatggcaaggtcaccagtctggttgacagagtttcgtagaattcatctgttgcaagccatggctaaagtaaacttaagtgataaagatttaaaaaagttattgataaaggatcctacagctagacaaattttttctcaggccctatgtatgtgcctattctttgtttctacattcatcttatgtattggaccttttggtgataaaaatattccttggctagcaaaaatagacaagttgcaaaacatggtggtttcttcaactttttagctagagatctaatggagaaataatatgagaaattcataagattttgctttgattttttataagatttgtttccaattttcatctcacagttgggccagagaagagaagaggatttgttatgaatttagtattcctactttttaaaaattttgctttattttta

SEQ ID NO: 202450 - DNA, 517 bp, Cannabis indica
cactaaggacttgataactcggcctccataattctaatgagtgagactaacattaaggcctaatatgattttgtttacttgcaaaatgatcttttgttagattgtccttcaattcaagcttatcacttcattcatgtatatgactttgtcagctgtttctttcaggttgttttgagttgtctggtagtagtatggggtcttcgccttggactgtttttattgttaaggtaaaagctgatatgtttatttcttgtttatccacagattctctttgatattttgtaaattttaagaaactatcatatctcagcaacttggattcttttgcatagaatttctccatttttcatcgtttctcacatttcgtgaatacccagaaagaaagacatttaaggaatcggtttggttcaaggaaggataccaaaaaattgatctttattttagttgtaaaatttcttgatcaatatgtgatattctgaattcttattactaatgaaatcaaaatgatatctggatc

SEQ ID NO: 202451 - DNA, 1120 bp, Cannabis indica
ttgtaaatatttttgaactgaaaactttaaggtttatatattatttatttatttttctaaataaaattacaccaaatataacatttatctaattacttcagtttcaatcaattaaagtatttaattggatttgaacttggttattctgaattgtttggtaataaattaagaaaactatatatacttgtgaatggtgatggttggatttgaacttggttattctgaattgtttggtaacaacgcattaattggttcagtttgcctatactactatgtacaaattaaaattagaatagctattttaagatttttgacctaactatggttgtaagtttgtaactcataacacatatttttagcctctactcttaccccataaatggctggtgagaagagcccatatatacacattagcttattaagtcgactgagtaagaaattataaacccagattaaaatgagtaataaattaagcccaatactatcaatgaatacaagacaactccaattgtcaattgggacataatactccaaataatgctatactaatttacacattgtagttcattgttgaaaagaaattataccatgaacagtacatgtacaccaacaaacactattggtaagacaccaaaccatgttagcaaactttttttcttcttttggatggattcaatagtggatgtatatgtatattgggttggttggaggttttctcaatccaccttggcttattgtaatattagcttttcattctctatgatatagtgtttctgacaaaaataaaaataaaaatagtatattttccattggctataaatgcaaaaacacttggaaagaaaagcaaaagtatgaaaagtggtgcaaacaaaaattagtgtcaaccccactaacatcagcgtacagggcttatatatatatatatgacaagattgtagtaggttgaggtttcaagaaattataattatttttttcatgtgattgtctattacattataattataataaatattctatcacgacgtagatgacaatgttcaaaagattttgttacattcgtgattattaattgggtaaatattattttggaccttctgttttacaaaagttaccaattgga

SEQ ID NO: 202452 - DNA, 1503 bp, Cannabis indica
tgctcatgccattgctagaatgcgtataaaccaattcgttcgtctatgaacaaagcgagatgcctctgacgagatacctttagcgagatgactctaggccacgttcgtatccactactttgaagatgagagtaacaaacggttatgcaaatttgtagctatacacgtgttaaaataggatgtggtcaaagcccacgattctacgaatcagttatgtatttcaaattcaaatgtaaataactgacaacctatatacctataaataggggcagattataaaaaaagggacgaaaaatctttgagagaagagagatcactgattgtaaagacctttaattctgtatccagtaatatctgaataagatagactcgtggactatgtagagttaactacaaaaccacgtaaaaatctggtgtcattattgtttctattattcttcttctcaaatttcttatagtttctgtgtcaaatttatcacaaaaaaggcttattaattggttaacaaaaatctgcgttaacagtttggggctttcattgtgagcctacgtgataaaagctcagaaaaatccctcctaaccaaaggaaattttttttccatgggtgatcatgatgataacgataacaatcatcctgaagagactaaccgtcgtcctggaaaggaaccaatgggttcacggagaccacccatttcaagaacaacatattcaacccgttcaacacgtttgagaagaagccaacgtggtcatgatcaaaacccagaatctgggaatgaggaaaccaacactaatgctagaggatttgtacctatgagtgaaggagcttatgatcccactagatatgtaccattggttgaattggaaaattgcaaaccggcaacgtctagccgatgccaaccacaaaacgctgagttggagagaggcagccgcagccagggcaactcaagaaaatgttgcacaaaccaacctgatcttggagtaagaagagcacgaggtagaactcggggctcaagaaccagaaggtaggagatagctcaggaaaatccctagaacactaggaggaatggggaaactggggatgttccagaggacgaacaacctaacaatcaggcacctcgacaagaggtacctcggagattctggattcacaacccaagggaatgaaaacaacgatttacctgaatcatctcgtagaaatgacaacttaaggcagcccataactaaggaaaaggttatccctcgtaataatgagagaaatcctaggacacaacctagggaaagtgggttaccaccgatgcatccttaacgtccttctcgcactgagaatgaggagacatacacgcaccctagcagagggtgaacatttaacctcccccgaaagagaagaactatgcaagatgaggcgagtgctagcttgcgacattcaagatcctgagatcacagtcgatctacgtgaggaggggatagatctcaacgtagtaataatcgagaaagtatgagtcataca

SEQ ID NO: 202453 - DNA, 1257 bp, Cannabis indica
agatttttggtaatagatggaacttgaaggacagaattaagttgtaaagaagctgaattttttgcaggtaaaaaggctttaccaatatgggaaatgaggagtttcttaccatcgcctacagctacagtttcttggccagagtaagggacaacattatcaagaggagcttcattgtaggagatgtggtgagtagcacctgtgtcaacaaaccacccttgatcatcaccaaagtcgggtactgaattggccaagaatgcagcaggatcataatcaattatatgttcagtcagatgagcttggggttgagtgtttccagtaggagctttgggggtaacccaattcttgtcaaatctatagtggcatgtggggggcagtgtggccatatctcatacaaacttgacacagtggacgatttgaattgacagatctgggttgataagagggctggttcccacgattagcaaatcttgaggaataatcagcaccagatcctctccctccattattatgagacctgaaatttccatttcttgaaccaaaagtgagattggcagccattttggtggataaatccagcagtgtattgtgtctttccagccgtgtttcatgagccaacaatagagcttgaacttcttcaagcgacaggttatcacttcgagaggtgataccggataccacggagtcaaattcagggccaagaccatttagaagatgaagaaccagatctaaatcggagatagtgtgaccagcaactgcaagggaatcgcagacaacctttagtttatcgatatagtcagagatagattggttacctttcgttgcgttagagagttggctcttgagttgcaacagtcgagccttggattgactcgaaaatttctgttcgagggctttccaaactgcatttgaagtggtgtaacttgccacagttccaagaactccttccgtcatagaagagcggatccaagagagaagaagttgatcctttttgcgccattgttggaaagaggggtttggattgccattaaccagaaatcggggtggagagagatctgtaagcaagatttcatcgagctcatgaccaatcaccgtgggtaaaacttgggacttccatgccaggaagttgtttcgatcaagcttgatcgtgagggaagacgtcagggagtgagagaagggattccacgcaggagtagcagtagcaggagtaacagttggatcggagatgctggcaggggacgagttgtcgcctgatgaagc

SEQ ID NO: 202454 - DNA, 652 bp, Cannabis indica
ggatcaatggtgggaaaataaatgagttctgtactggattttgaatttctgattaagatcatgctatgctaaacatttgataactataatgtgcagaaaaattaaaggaaaattggttcagttaatatggataacatctctaacctgccaattggcctagtaatgcataaggcacacttttttcaaactttgagaagtgacttttcttccatttgaaccagccagctgaaggtatctctaacatttgagtcacaagacatttaggagcatttgaacccattgatgtgttcaagtctctaatctcccaagttgatgctatagccaaagtataatatagtagtaaaagtataaaaaggcaggcatgttagtagataccaatagaaaacaataataagtcattttttttggttgagaaattgtatactaccaaggttcccaatagagaaaaatcaaatatcttacgattaatttttgtgcgacgatatccagatttgggaggcttcttcttatttacagcaggtacttgtaagattgctgcattaaagtatggtaacatatatcagccaaatatgaaggcttccaaacaacatcctctgttatgatgaaatacagtaaaagagattctttccattcttttatttatttttatttt

SEQ ID NO: 202455 - DNA, 1761 bp, Cannabis indica
aatcttggattgccacctttcaacaaaatggaacaatttttttttaaaaaaaaaatacagtatacaatatattaatgggcagtaaaaatgtaaatttatgcgtataaaaataaaattgtaaaaaaaaaatagaaaatacagtgtaaattttctaaaaaaaaattgcataagtaaactagttgtaataactagttatttacatgagagagatgtaacctcataagctaatttctttttataagagaaaaaaaatcaaactggagaaatcaatataatacttaaaataattttattaagacaatatattaagaaatcatttactttcatataatcaaaatcggtttacttaataaaaaaaaatcaagttacaaatatcaaaattcatacataaattttacatgcttatattctagttactctatgaaatatggaacaacacaataccaaaactaataccaattataaacttctcagaagttccaagactcaaccatcaatccacactattgaaaacagttactatccattaaaataaaatattggtcgcaaaaaaaaaaaaagtacaaaatagaatgagaacatttggcggtgttgttattgtcatcagaaaaatcgtcaaagtattcgttacgagaaaatcaccagggttagatatcaaaattgtcatcgatgttggacattttgacacactaaaaactagttatatttactcaactatttaataaaactatgatagagaaaccaaatatttaaatcaattaaactgaagactagaacgttagaactaattacgtaaaacaacaaaagcaagatcagttgctaatataacccaaaacaatcaaaagataaattaaaacataaaaactaatttttaacaataacttacaaattaaattacagaaactagttatattttagatggttaaaaacacaaagctaacaattaaatacagaaacttattacataatacaaccaactaaaaaattgaaataaaaacataaaacaataaaataatatattgaaacacaaaaactaattattttaaattaaagcataccataagaaacatacaagtaaactttaatcactaaagctagctacatcaaataactaaaaaaaagtttgacatagagaaacattttacattaaacaaccaactaaaatcttacacaaaaaaatcgttcaaaaaaaacaaataaatttaaaaatgaaacttaggaccaattacaaacaacaataccaaaaattagacacaaaaaattaaaatataaagactagatattcaataaatatatatatatatatataaataacaaatagcttattaaattaaattataaaaccagttacattaaataatcaattaaaaatattaaacaaaaaaatcagataagtaaaaaaaaaaattcaaaactaatacataaaattcaattaccttaaataatcaattcagaaagaaagatggaaagtgagaagaactaccaagaatactcaacactagagagagatggtgcggctgcaatgaatagtaaagatcctattcggaccatttgtactccttttactccttgaatgggttaaattggactatggaacttctgcttttttggtttatttttctgggagtgatactgtatctggtttgtacaggttcgaacttggaaaaattagtctgtacaactggctgtacagaagtacttggtccatatattgtaggagtagtaaaagtagttgacgaaggataaatggatggagttgtc

SEQ ID NO: 202456 - DNA, 1037 bp, Cannabis indica
ttagaatagcgagtactcagactttaggctactaaatagacaaaattgaaaatagaaatagaaagaaaacaagagaattatagtagttcagtcagaacttgatctgcttagtccacttttagtaatgatttcagcttagtttatttgatttggatcacccatttatatagaaaacaagtgtcttttaagattccattactgatcgacttagaaccgtttttacaataaatgatagtatttaattagaataaacgtttaaagaataaatgaagaaaatttttattcgttcttgaattaagtgcagcaacgtatgcgacttgataagttgtgaattgcccgttcatattccaacacgcgagctcgcaggctctatggtgtttgtacacgcaggatggcctttgggcctattatttgattgtctgcgttcatatttgatcgcatagtcagactttctgtgttgagcacgtggaacatgcgagtccctgtcgagttgtcaaacacattagtcattcagaccaaacctatgtaacgaaacaatctttactagtcgtaagagaggcatacttgatcatcacatataattggtatatgcgcggtcagtattaaatcctcttggtcctacttattcctttttactatgtaaggcataatatgtgattagacactgtctcgatcgcatctaattctcataagtttacatcaagcgagattagctctattagagctatctattgacacgtcatccttttcactgggaactggatccacatgtcagttatctacaagactgtacttatatttctaggcaaaaaattcgtattataacacatgcccctagttttgcgatgataattgtttgtcaaataacaaaactattcatgagggacaggctagttgttctgtcacatgacgatgactcttggttgtcttgttaagggttttgaaatgacagtcacatttattattttatttttccaatctaccacgtcatcaaactctttgggattcgtgcatgcgtgttttgagataaccattgg

SEQ ID NO: 202457 - DNA, 557 bp, Cannabis indica
aaaaaaaaaaacgttaaaaaaggaaaccaccacaaaaaaatggcaactataaattacgaaaattaactcacgaaaataacgttatttttgaaaaaagtttccaaacttaggtggcacatgaaattttcccttttttttaatgtaatattagtatgggctttttttagaccaatctctattctttgaggagattgatttaggttttaagttttttttttgccaaatgtgaaattatgatgattaagcgttttttctttcctgttataagtacttgcttaatctagtataatattacatgagtagaaaatacaatctcaaaatcgagtttttaagactcaaaagttcaccactcccatcttttaaaccctcaaagaacttttgcttgcggtggaccggtggtggtggatcttcctcgatattagctttgttagcattccatcgcaatagttaacgatttatttgttatcgtgttattagtggtagaattgtagccaaatgagtgactgaatcagcattacttgggctacactggatatgtggattaagatttcttcgtt

SEQ ID NO: 202458 - DNA, 4698 bp, Cannabis indica
tttttttttttttttgaattaccaagtggtgggcatatgggcatatttatataattttaataattaaattattgtattcaaactggctaataagagttttaattaggttgacgcttataagcaacgatttccatcattttaatgacaatattttttaatgcaatttattcttttgttgcaatctatacaaagtcaaaattttgaatcatagatataagtataaagggaattctctttttgagtagttgaacatcaaagagtcatatgactcatggtaataacgatttcatccttgtttggccaaaaagcacttcttttttttttttctacatttttaatatcaaataataatgtccatggatttcatgaaaagtggcaaagttcagaattccattaaacacattttggttgcagtttgaaaaacctctacccaaactcatttggtaaaaagaaaaaaaaaaagtcagcctggtttgactaattgaaaattttcaaaattaattttaaatatatattatttaattaacaaatgataaattaaacgttggaactgaggaagaactgagctatagagcctgttacctaatacctatcctgagaactcgattgttggttagctgttgcatctgtgttcctactccgatttctggatttctagggattgacataagaaaataatttatcatagactgccaataataatactaataattattataataaataaaaggttaataataattaataaagaagatacaaaggctggccattagtacccaaacagagaagaaaaaaaaagggtcattaatttgccacccccaaattattattattattattatttttgtaagggccatcacaaatttattgattttacttttttttttgttataatgaaaacaaagtggaccccaccataaacgaacaggatcagaaggatcaatcacagttttgggtcagattagaaccctgcacacagccttgaaaccaccactctttgtctctagccattcatgcatgtaagtcaaaatatttaagaaaagtaataaaataagaaaacaaggtgaaaaaaaattaaaaaaatcctgttttgtgaagaaaaaaaaaaaaaaaatccaaataatgggttaataatatgggatgagatgggatgatgggatgggatgaccgtgagagagtgggagtgtgattttgagtgttgagatctctatgcaaaggaaagaaaaattagagagaaagaaagggtcggtgtccataacgtgggaatgagacagtgactgatacagtactacacccaaattccaagaccagacccggcccgttgacttgttgtagcaggtgacgaaacctccacctgccggtcaccaccaccctctcaagtttcgttaatcccaataatatataaccccaacttcacctttttaaaaccaaatcatattatataaggaaagggagttaatttaaggaaaattacttattaaaatacagtgggaaaaagagtctttatctattctatattccacagatctcatttgtcatatgacatttgttttagttagaaaggagaatttggagagaaaaagctttttttgattttggtttttgggtgacttcataaagagataaaggaagaaagaaaacaatgggaaagagaaggatggaaagagagagtaatccattctttttgtccttttgaataaaaccccacttcttcaaacaatttcatccccttttctttcattttcttcttcttcttctttcttccttctttagggcccaatttcgagttgttttttctacttagattttgaataagtgaaagacgaaaaaaaaaatggtgactggttggagaagggctttctgcacttctataccaagagacagagaacccaaagttttgacagagagacaacagcattgcgacgatggaagtagcaacctccgtagccccaaaatcacctctaaatttgggtttttctctaacccgtcaacccctcgtttacaatctcaacctgtgtctactccaagtctccgatgccggaccaccgttactgccgccaccacccccaattcctccctacccaatagcccaaaacttcattgtaacgtatctacaacaccaaagaagaaccaccacaaccccagcaacagcccaagattattcaatttgtctaacccaacatctccaaaatcaccatctagcttctcactcctcaaatccactttaagactctctaaggtaagaatcttcatctataacctttttcatgtaacgtataatactcataattcttgtttgtttgtttgtcgatgattcagtcacctctaatacaaccgtttttggttttgacattgcagactcgatgtggaatatgcttagagagcgtaaaagccggacaaggaaccgccattttcacggccgagtgttctcactcttttcactttccttgcattgctacccatgtcaagaagaatcaaaaccttgtttgtccggtttgcagtgcgggctggaaggagctccccttcttatccttccaccatagccagagcttgcaaagttctggagccaataagatcagtagctccgacccagtgaaactcaaagacgtcaaagccaagtcgttgagggtctacgacgatgacgagcctctgatgtcaccaacctccggtacacgatttaatcccattcctgagacggacgaagacgaaactgaacaaggtgatgaaaactccgtttccgagttccaaggcttcttcgtcaatccagctgccactacgagattagttaaagacagtaatcgaaatattggcaacgtcgagatgaggcttctacctgatgcagcaattgtgtccgtggggagaaattacgagacatatgcggtggtcttgaaagtcagggctccagcgtctcaggctgcgaaaacaatatcttcgtcatcgattttgagccctgggcaaagagctccgatcgatttggtaacggttgtggatgtcagctccagcatgagcggtgccaaaatccaaatgctgaagcgagctatgcgcctggtgatatcatccctcggttctacggataggctttccattgtcgccttttccgctacttcgaagaggttgctacctctgagaagaatgacaaccaccggaagaagatcggcgcgtcggattgttgacgcgctcggtaccgtcggccagggcatgtccgtaagcgatgcactcaagaaggccgcgaaggttctagaagaccggcgcgaaaagaaccccgcagccaccatcatgatgctcctatcggacaacccttcagccagcgaagatgatcaacatcgccataatcgaaccggtcgatccctctctccttcggtgtcgtccagtcgcttatcttcttacctcgatgtccccgtccacaccatcggattcggagatccttcgtctgaggatgcgttcactaagtgcatcggcgggcttttgtagcgttgtcgtatccgatctccgtctgcagcttggattgatagccggttcatctttcggcggagatcgctgccgtttactctttgaccaatcggccgacggtgctagggtacggttccgtccagttgggggtacctgtacgcagacgaagaaaaggaattgctattggaactgaaagttccttcttctacttccattggagcgcatcaccatgtgttgtcagtacgatcctcttaccgagacccatcgtctatggagctagtttactccagagaacagactctcctcatacctcgcgcccaggccgtccgatcatcgtcgtcttctccgaatatcgagcggctgagaaatctccacgtggcgacgcgagcagtggcggagtctcggcgtttggctgaacacaacgatctcactagcgcccatcacttactcacttcagctcgagctcttctcattcagtgtggctcggcttcggctgaagagtacgcgcgcggcttggaagccgagctctccgagttaaacaggcttaggtatctacatcaggcgcagcaaagccagagacagagaattactgttacgagccagcgagattccaataatagagcagaagataagtctgagccgcttacgccgacatcggcttggcgcgctgctgaaagactggctaaagtagccattatgaggaagtcgatgaacagagttagcgacttgcacggctttgaaaatgcaagattttagtattttattttctcttttttttaattttttttttaattttaaatatcttgtaatacaaaggaatatatttgaatatatctggaaaaggaagtaaaaaataaaattttaaaagtggaaaaagaaaaacaatgattggagtaagagatggagggcccaggcccataataacgacaatcggtacccgacgtccaggcccttttctgcagtggaaaggaaccgatagtgagagagagtaaaatgagtcagtacctctaccctacttggaacttattcaacactattgctctctttcattatttgtctttattacttctttttttttttttttttaatttttcttcccaagagccaaaccaatgcatctaatatactatatgagaatttggggtaacaaaattgataaaacaaataatggggttcaagaaattgtgtttttttcttcacttttgtaatgtggttgttgggtctaatccatcaatgttctaaaaatat

SEQ ID NO: 202459 - DNA, 845 bp, Cannabis indica
aaaccgccaaaactgcgaaaaactacgataaatcgctcaaaatcgcctaaaatcgccaaaaaactgtccaaaaccgccaaaaaaccgtactgtcggttttatacggttataatttctaaacggtcggttacgatttttgtaaaataaaaaccgtaactgactggtcggttataaaattgtaaaaactgaccctaaccgaccgattttcacccctactccctaatttgtgtgggtcctactactttcttcctttccaaaatttattaaataattgtatgggaaccaataccataccattaattcctatttcctttaaataaatatgtcattaaaattaagtgcaaagggaataaaaatattgaaaattatgctacatttactctaacaaatctatcatacatgatatatgtatgtatattttgtaataacaaatatgacctttatttgtcttccatttttttaataggaataacaaacactgtttttttttttaataattcttatgtataaataattacgtaaacgatttaattaattatgtgtgaatatatatataatatatttctcaaaatatgttaaatatttacttatcaaataaaaaaaaataattgagagcatagtttaattaggggctttttatttatatttttatgattgatttttttatttatttatactagcctcaaaatttcattatatttgctccatagaatccaaatttcaaacaaagaacatttaataaaaccaaaaattaggaatcataacctgatttcagggttttaaacatttaatcacttttacggtttatataaaataaatagggaaattatcttatatactgtttt

SEQ ID NO: 202460 - DNA, 2269 bp, Cannabis indica
gcctcaagttctcgatgtggggtacagggagaccattgggccttctcctccatctttcttacactattgagactctcgataagatacaagagagtggactagttgagaggcgtccagtgtggggttccatcgagagaccaataagcgcatcggttggccatcaaattggatggcatggtcagagcgccacattcaataggggcagtgctgcctttgcacccttattttagagatatagctgcttacttcgcgatacgttcaacacaaatcaccccgaaaggtatcaagtacctgttgaccatgtttgttctttatgcaaagctaggctagcctcagcctactccgtatgagattggatataattttgacttgaagtgtgcttcaaagaagaactacacggggtacttctacttcagtcagattagctatcagtggttgggtggcaccaacaatacgccttttttgaaagctggggatatgcccggaactacttcattgcctaggatatccaggaggtttgacactgccattttcagagggtgcccactatcaagtgctctatccccaccctctagatgagggatagagaaaacaacattctttccctcctagtagagaggagaaatatactgcagttggccagtatggctaactttcagaggtacggcttgtatacccccgagtcttgagttataggggtcgagagccaatcaagtggtttaaaatggagtccccactattgaggaaggtagcccaggaggtgggcatattctcaatttggatgatgacgttcctctttccgagatagcccaaaatttagagaagagagagagagggccctcctccagcgcttgacttgcaaggagactgttggggatgcccctctgtagatctagcctggaggccagggttccctcaggcctatttgtctcttggctacatctagaggcaagggcaaggctgccactgatgatttagatgactcctcttctaaggatgatagtagttgattgcaccatcttttatatttttgtcttgcattgaatatttgtaacttgtattctgagtttattacttttttttacagatatgtcttccagactcagaggtctagtttgaggacctttggacgagccttcgggtcgcctaagggtcaaggtagcctggaccacctgctctagtgatgctacagggtcttctcttcctcttcctcctcctgggtctgagccatatgggcagcccatgatcattgaccctccaatgaggaggatttggccttcgggcaagggcgcctagaggcttagccgagaagcagagttggccatggggtaaaaagaccatggaggcagtttgtaggtgtctggacagagccttacctactatggagaatgagctccaagagtttggtgatggcgagccggagaggctctcttctatcagcctctaggagttggccttggtaagttggacatttaactttgctcactttttagtatgattcaggactggccgacaatatggtgttgttgtatgggttttagtgacccactttgagggaaactaaagattattagtgacccttcattgcaggtcactaatgtgggttactagaaaagtaagtttaagtgactctttaatgtgggtcactaaaaacttttaaaatctcttcgtgcgtgtcacaatagacttttagagtcccaccttgtgaaactctaaaaataacaacaactcacagtgcgcgtcactgtttctattattattattttattaattaatttcctaaatgcaaaaattaatttttatttatttaaattttacattttatatatgcaactcttttttataattttgataaaactaaaattaatattagttttctttttcttttttaaataaacgcaataaattataaaccaaaataatatacatatttttttaactgaataactcatcaagacagtgatactaagaaaaaaaaatctagaataaaaagtttaattacctgaatgttacatatagagttcatcgattcaatttgattcaacaaaaactattaaaattagttacataatgggcataaatctaaattttaacccaaaataatataagaaaacacaatatttagaataggtaaaaaaacccagaaagctaaaaagaaatcagatccaacgagcttcaaacatcatgaaagtcgagatccatgacgagctttaactgctgtcgaccgtgaatgctgcacagaaaagagagagcaagagagagagagaga

SEQ ID NO: 202461 - DNA, 1647 bp, Cannabis indica
tgaaagagggatatctgtgaggttgatcaaattatgaatatgaatatgggtttggtttgtttgttgtaagtttaagaatgaaggaagggtagttgttttgctaaatattttgagacaaatgaatgaatgaataaacaaaatgagggaagggataattctcattctcaacagccgtttaattaaatctttattaatttaagagatgcaatttaattaataataaaaccactaaaaacaaaaaagtaattactttgaaatttggaagtttacctactcagatcttatctcaactgtaagcaagcttaaaaatcagcagtcagcagctttacataaatatctcttcttttgttttgtttttgtcttttatatataacccaaattcataaaccttaataatcttagaattattttgaaaaatttagttaaatataatatttatttaattataaaagatttttagaaaaaaattgaaggttgtgatgtgttttttacagggttaaattaaatgagtttgaaacggaataaaattatgttttttaatttatttatttgctcaaatttgtaaacagtaagtaatttaaaagattttactgttaaaatttaaatttaaaagattaaatataaattaaataatagttgagaaaatttaataaaaaaaaaaaactcataaattaaatggtggtggtggactggatatgggatgggacaagaaagtgggcttgaagcttccaggagaggaaaatctagagacagattaattattgttgtcttacacgaaaccaaaatattggaattttgaagaaacctcaacattttttttttatttgtttaaaataataaaaataatttaaatttagataaatcttcattttggtcctcttctttcgtggtgcatttcacttgtaaaaaaatatttatatatatatgtaattattattagtaggaaaaaacacgtgtgttgtatttttatttgttatctaacgtaatttgtttatttatttttttgataaatttatttatttatttatttcttttttgtaaagagttttttttttttttttaagaaaagttgtattctttttgaaagagttgatctaacttaatttacgaatctaatatagacacgttagagaataattgaatgctaaatcataaccctggtatgtattaaattaaattataataacattttagaaagtagctagctacatctttcacccaaatatagttccaagtagtatgtctttattactctaaatttgttatgaaaatgacagatttgtcctggcattgatgagtttgaatgactccctaattttaccggtcataaaacaataggaaaaaaagaagagtttggcaagggtcaaataaacattcacactgtttttaatagggttagtaaattgcctttgagttggctatttccttgaataagacaacaaaccaatcagaagtactatttacctttttttcttctgaaaaatggactcattcaattaacaattatgaagatacctttagaaaaaaaaaaaaaggaagaaaacattttatttttaaatttttttaaaaagaaaacactttattcacacggtcacaacaacgactagccaactttgcttcaaccaacgctgaggcaaaaaaaaaaaa

SEQ ID NO: 202462 - DNA, 974 bp, Cannabis indica
ttctgcaattttttagtttcacggtgcaggtgcagtttgagaaatttaaattagaaaaatcgtatatgcgggttagttttaaaaaatagtcaaaagtcgcatcacctacaccgagaacacccctatttaaagggttgtttagagaatttgtagttggatttgtagtttgatgataatgcctttggagctactaataagttttatattgaatacaactttggatgcttagactaagaaactatatactatatacctaaacaccaattgttctttgtccataataaggttataaaataccaaaaagaaaagagagagaagaagggaaaaaaaaaaaaccaataataaacaaaatatagtaatgcttaaacaagaagcaaactggtatgagattttatgagatctaatatatgtactttgaatcattgagtttgctttgatatatactttttatgtgtattttaatgtataaacatacatagagtgctattacacatcattcatcctttagcagaattaatattatgcaagtaatgaagtacactagaaagagtttataatatgtataaattatatatttgtatattaaaatttctgaattgagggagacatttgcatgagctttcacatgatcgaaacttcccctcgaattttgtctcactataaaatctgcacttaaaacaaacaataactcgttttcttttgttcatttttgtaacttataaaaacacttgtttaagtgttcttataattttattcggagatttgtcaatgctaattgccattaatttaaagaattgatcattgatgatatttatgtttgataaaatgttgaaggtataaaactaataattcggtagcttaacttatctaatgatgactaatatgttagaccagaattggttggagtggggaagtattttgatactttgatttggccttatacgaaattacaagtataagttttcttataattt

SEQ ID NO: 202463 - DNA, 1032 bp, Cannabis indica
ttgaagataaaattcattcatcttacatggataaacacactgaatagcaaattcctggattctgaacatgaaaacaaaagaaacaaattatagacatgagtaaaaggcataccgtactatatgtaacaacatctggtgttaaaccgtcctgcttcatctgacaaaagaacttaatgctgtgatcaaacttgccattcctgaccagactcccaagaacagaattgcagatgacgatattctttttggttgattcatcttgaatgctattataaacttctaatgcacccacaggattgtgattccctcctgtgaactttatatagttgctatatgatgaaggacaaatcttcttattttgttgcatccaatcgaagcactgcaataacagcaaacgaatcatataaaaatttatacgaaaataacttcagtttttattcaagtattaatgaaattaaatcaacaatagcaattacaccatcttccattcaaaaaatgagaattatgaggtagctaaaagaaaaaattacaaaaacacacactatttatatacttatatgcagaaagaaatgtgtataaaaacagatattatgtcaaattaaattattattatttttcttgaaaagatacaagggtcatatgtctaagactaaccacctcccaaatttattagggagcgtcacttatggcagaggagtaggagaactaacacacatatatgtacataaactctcatataaaattatcatctaaccacttaaaaaccaccattcttaaacacatttcattatcgttaatcatatatttaattaattatcgaaaatctcggtcaacaatgctcaagtaaactagattaggtacataaactctcatataaaattatcatctaacgaatgtacaataaaagagtaacaaacatattttctagttctccactaaaataaggaaaagcagaccatgaaattggcaaactaagaatctcaaaaatctagtttgtgtcacgcttaaatcatttattttatttcatttcatttt

SEQ ID NO: 202464 - DNA, 799 bp, Cannabis indica
ggacattggaccccgtaagggaatgattatgacaatcagtagtcccgtgatccgtaactattaatatcaggtaagctgtccgatctcacatcgtctgaggaaggttaagtgtgatgattctgagactgtgtgggtatggaatacacagttgaagatgacttatatagattgattggtgctacctatatcaacaatgtgcacatcttgttttttggtagctcatcacgaaagaactccgttattaagcgtgcttgacctgtgataatttcaagattggtgacctcctagaaagaattcccaaaaggcatgcgagtgaggataaagcacgctggaaacactcgagttggtctatagggttagtcgttagtcctgaaaacagccagagtgacgtactcatgtataaatgacataaatctattgggaaagacccaatgaagacttaaagcatggacgttacagcgaggcttagcctactttagcccaaaccagacctattcttgccatcaccacagtctaagtaaattatatattatacatataataatgttattttttaaaaaaatatttaatagtaaatattatttttttgctttttttccaaaattcgtatagtcaaagccagctttcaagattattcttgaagtagaaactgtactctttgaatattaaagatcatttagatgattttaataagggaattcttaattttgagaacatccatatcaaaattgatcgaccaaacaatcattgatggtcattgatggagtcactcaattgttcatcaagactacatcaagga

SEQ ID NO: 202465 - DNA, 1777 bp, Cannabis indica
gttctttgattagcaaagatagtgctgcaattgaaaaatcactgtcgcgtgccttagcattagggcgttacacttgtagcctcagtggccatttcgtcaaggccaaactttgccaattgatcaaattttgtagcatactctgtcagcgtcatactgccctgggataaccatatgaactattctgccttagtagcttggatgtattcattgtaatacttcataaaagagggtccaaaaggcatcccaggtcatgttagtgagatgatgacctttagaattaaaccacattttttaaattgttagtttattattataaaataattaataaaagaacacatgtggcatccctatgggacagggcatttcaatatgatatctgagaaacaaaggtttaaagatcctaatgactactttgatatgtacattggctgcgaagattcgttcgactcatggtatagtaactgttaattcctagttgattattggattatttcttaactttttgaattatctacttacttgaatgtgcgagctattaaaaaagcatgataggttatacataatggttgttgtatatttgtgcgtatggaaatgtttattagcattggttttggtttgaaagattctaaatgatggaaagttatggttgcaagtgtattatgcacccaaggtgatttggtagggttaaccgcgagcttttcgggctcggggctagtggtgagggtgcaaatcctccactaccacaaaactgggcacaaatgtacgctgcaatgtaagagaccatctggtagcaaggtgatcagatcaatgagctgaaagagcaacaagcttggcctgctcctaatcctaatcctaatcctctatcacctttattaatgtcacaggatacgagaaatttcctagagacgttgtatgagcggttaaggaagcatattctgccagtatttgaaggtggtgctgatccacttaaggctgagcaatggatgagcatgataccatccatctttgactttatgcgtgttgaggataatgatccagtttttcttttcctttacctacaccacagagcacctgtgagtcacaaagactcaacaagaaaagtagataaaaacataatcaacacataaagaataaaattaaaacaatagcatcatatgactaagcagtcactcaagcataatgtagtaaagataatcaatttgttgttttataagacaaaccgaccctaatactttataaagcatccttaccactggttaccaacgagcttcatatgtcactatttgttaggataattttagtctctaagttttaggtcgtattttcgagtagtgttcactctttgtttctagttttagggctattttacgcttgttttctttgattttagatttctacgcttggaatgtataaattggacaaatttcggaaaacagtgatctacaaaataaggaaaattttgaaagagaataaagtgggaacttcaagcctaaattagactattgtctgataagattttggagaaagtcaaaacataaaagttttagattcgttttttttttactttccaatggcatcttgaatcagctcatttggagttcgtatgagaaagttatgcccattttactgaaagaggtcgaaagtagaaaaaaataaatccttcgctgtggtggggaaaaaccttcccgcgatggggattggcagagagctttggaaaattttggaaaaagttttgccgcgacggtcaaatccttcaccacgacgaagctccaatgac

SEQ ID NO: 202466 - DNA, 571 bp, Cannabis indica
gtataagtgatgtcaggacaagataaagtcaggtagagtaagcgtccaatgagctgtctgtaagatgaaggatcttcgagggtggtcccttgttgatcatcaagttttgttcttggatccatgggggttttggcaggcttgctgcccgtgtagcccgtatcttcaagaagttgcagagtgtactttctttggcaaaggaagataccttcagtagatctagcaatttcaaagccgagaaagtatttgagttgtcccaaggctttgagttgaaattgagcatgtaaagaactttgaacttgatgtaggagttgaatgttggggccagtgatgattatatcatcaacatacacaagaagggcaatgaaactctcattctaaccacaggtgaacaatgtgtaatcggcttgggattggtggaatccatctgagataagagcttcagaaagtttcttataccattgtcgtgatgattgcatgagaccgtaggtagatttttgtagtttgcatacgaggtttgaagtgtcattagtgtcgggaagagataggccagggggaagagtcatgtaaacct

SEQ ID NO: 202467 - DNA, 1845 bp, Cannabis indica
tgaatagatcagcagggaggcctattaggtttgtgtcagtcttttagaataattctttgaattttgaaggaagcagcttgcaatctcatcctgatcatgaatccagttgtcgccttttgttttcttgatgcattggatgaagtttcctcttattcttctaacaattgtggatgccatgaagaacttagaacacatgtctccttcttgaagccattacacctgagatttttgtttataatggatttcctctctgagtaaagcttcatttagctcatgcttcgtcatgtgaatggcgctccaatcctctgggtttcttctctcagtttcctccaatatagcaaaagttgtgatgacttgctgtcgtattttcttgaagtgtttcttattccagcagttgagtttgcaacaagtgttcttcactttccgatgaaagttaatcatggggttaaggtgcattcttgtggcccacacgcttccttgaccacctaaaagcatcttgggtcatgagcccacatgttttcatacttgaagagtctatttttacaaatgactccaacagtagtatcaaggataatagacctgtgatctgaggtagtggctgaaaggttgtggatcacagcattaggaaacaaaactcgccaatccgtggaagtaataccacggtcaagacgggcacgcttcatagctgcacatttgggggagttcatagcacctttttcccaggtgaacccaggtcccaggaatccctggtcaatcaggctagcccgattaaccatgcggtgaaaatcaaacgcatatacctcgatgagttaccaggtcttgagtaattgaagcactcattgtcatgaagtgtgccattcatgtccccgagcaacatgactggtttagtatcaaataaaaccgaatcacccatctttagccaaaaatattccttttcttcgtatcttggaggaccatatacaccatggaaagtccaaggggccccaagagggtttgaggtgatttcaccaaaaattacaaacttgtttgaggatagaatgttatagactaaccctttcatccaacataaaacaaagccccccgagagacccaccgaaggaatgtaatgaagtccctcaaatcttaatctgtgacaaattctagtaaatttactttttgcaaatgtagttctaatagtaataacatctcaggttgatgttggcgaattagcgctgccaattgtcaaaccttcgtggaactcccgagaccacgacaatttcaggtaaggatttttatggcgactttggagaattttctaggcaagcctttaaagccccaaaccgaaaatcctcattgtgagttttctcatggctctcacaataagttaagtattgttcatctatttccgtaatgtggcatcctgatttctgttttgaaattttttcaataactacgaagcgattaagtcaatggctttcccttcccattggtgatgaattgtagctgcaactccatctttagccttggtaggatttctccacttgaatggcttcggagaagctgaaagcgattcgtccttctttgatggatgtcctctcctcttctgaccatggcttgatatattgtcgacagaggtcttccctcgtggtcttcccatgcgtttggggggaacttgttgttcatggcagctagaagcaaatgtcgtggggtttcaggtctagtggggtttccacaatgttgggggtactatccgactgcttactgtcgagtgttcccatggttggatagtttccattgtgtttttgatcatcctctgcaaccgagtgtttccccttaggtagcaactatgtgtctgtggacggagag

SEQ ID NO: 202468 - DNA, 1066 bp, Cannabis indica
acaagctaccacactacaagctccaacattacaagctccccatatacgaagcatcaatgggtaattaattttttttaatcttgtttgttgttgttatatttagtttagaatgttgttttaatgcttgatcagtgggttgttgctgttattttgttattttgtgttgaaatacttgttgtctgtgaatactgtatttttcctggtttcagtattttttttccttgtccgatggggtccgatgcccaccagatggtggtgatacatagtgaatgtaggatgacaaggatgaaagcccgattgggcccgccgatgagtgtccgatggggtccaaaagtgggtttgggacatttttttatggggtccgatatgagctcgattgggcccaatggttggttcgatttttggtccaacatgggttttaggacattaattggaaaactaaatttactaacaaaagtaaagtttggtaggtttagccatcaaaatttaaatttggatagttaagtacaagtaaaataataattaggagagtttaggcgcaaaaagctctctaaaaaaaatgtgtccttactataaatgattgtgttagtgtgactttccaaattatgagtagttatatataatatattaaaattatttattgttttatgtgatggataatgtgattagttgggtagggtaggtggggttcattatgtgttatatatttggccttaaacacattttacaaaggagaattgttaaaaaaaatatgtttagcattttcttcagtgttattgatgtaattaataatatcggataatcctatataacttaagaaaataaacttttagggtaatatcgctaaccaatcaagaggcgccacttatgaaaagtaattgagcactaaataacacaaaaaaactctttttaagtccctacgaataaggtgagtcctaggcacgggcctaacctgctcttagtccaggattgagcctacatatttctcatcttgaacaatttaaaatatttttgcattaataataaaaatttaaaatccaattttctaatttacaacatcatctag

SEQ ID NO: 202469 - DNA, 523 bp, Cannabis indica
tcaatagacagtaaacataaaaaagaagtttgaacatatcttataatttgtttgtactccaaatctaataataatatataatgaaaaacttgtccatgttgggccaccgtctaatattcatcataaaacatggataaaaaatgggcatattttatgatactttcaatcccacaaggtctcctagtgaggacccatgtctttttagttgccaataatttaaaatttctgacatggtgcagaaagttagtgtatatacttacttggtaattttatgtttaattaacccagtaaacttcatttttctgatacagttagagagagattctctgcatgtttacacatgcatgcatatatattttaacttcttaataattagggttgagtttttttttttcttttcttttggatctctgaggcgttgggaaaagaataagatataaaactaataattgatatgtgtagagtcactcacatatgacatactctgcaatttaaactaccgattaaagaagaagatattaaa

SEQ ID NO: 202470 - DNA, 761 bp, Cannabis indica
cccaaagtgtacgccactgaccccatgcgagccataatagggaacggaccgaaataccttctacataacttgttgttaagacgtttggccactgtccgttgtctataaggttgtaacttcaccaacaccagatcacccagctgaaattcaatatcccttctgtgtttgttcacttgttggcacatacgatgttgagcttggaggaggttgtctttgagttgctataaaatagtgtctcgagtaaggagatcgttctcaaccacttgaatggtggtggaccctctagtataggctggaatggttggaggacttcggccataaactgcctgtaaaggagtcatcccaatagcggagtggtggctggtattatagtgatattcagcccacgagaggaacctgctccattgctttggattgtccgctgtaaacgcccgaaggtattgctccaaatatcgattggtgacttccgtttgtccatctgtttgtgggtgatatgccgagctcattttcagcttcgtacccataaactcgaacaacttcttccaaaaagtgctagtaaaaattgggtctctatcggaaacaaaagatcgaggcaacccatgtaatcggatgaccatctgtgaaaagagatcagcgactttggtggctgaataatgagttggtaacgcaccaaaatgagcgtatttggtgaaacgatcaatcaccaccaaaatgttagtgaccccataggaatttggcaaccccacaatgaaatccattgc

SEQ ID NO: 202471 - DNA, 2030 bp, Cannabis indica
ccgaccctccgcaaccaactgaaagtgcaaaaggctctcatccatggtgaaacagatgaactccgagaaagtcgtcgtcaacttccaaccaaaaaacgaatagtctccgacgatgaccaagttcaggaggaaccacaacaaggagcggttattacacaattccccctcgtttacctaccgggtattggggaaattgcccctttcggcaacaactcaaaaacggtatcaatcctagagctgcaggaactcaaggaactaatctctgccagtacaaaagaccctcccaatcgcaatagagctcctgggaacaaatcagatgtgggagaagcatgccaggaaaatccaaacgagaacagagccttgaaaacgactcctcacgactttccctccccaggccagcaggtgaccgcaatggcagaaagcagcaaaaaccattcccctttgatgaagaccgactcacataatgagggaaatacatctcaaagcggccaagaaggcctcatttctaagcccacgagcccatatataccatacagctcatccatattaggctctcaagcccatattatggactggccctccaaggagtgctgggcccatttaaaagcccgagaactattcaaaggagaccttacagtggataagttctttcgtgagcccaccttgttcaaccccttattgggtattgatgactttagagtgtatgaacactcacaaggcccacgcaaaaggaaagccatggatggcattttattcaattcttcacctgactccaaaattcccacacagcctacctcaaacttaacctcccctgccctgaaccaagcttcaattcacacctcccccgagaaattaacgatcccagcccccctcgaaggattcgttaatggtcaagaggatgttgtggccacggccaggaggcgaggaagaccgaggaagactgagagcccctctgctctggataaccggactccaagaagaaggggaagaccatcgaagaactatctatctgccactcccaaatcgttcaagtggaagaaaacaccagtaaagatgaccccggaatccaccactgtgcaacttcacaaggacggtaagctcttcgatttgaaagtggacttggacaaccgtttgttttagtcgagaagcatcaaagtctcaaaggtacctgctccataactgagattgaggaggatgtgcctcctagaaacaatgatgagaaggggaaaaacaagcaggattttcaattcggggctatggagacttgcccgaaaaagtcttcacgattgccatgaaaatctttgcttggaactgtcgtggtctcgggagcaccgcgacagttcgtcaatttgcggccctaacccgtcaacataaacccgaattgatgatactctccgaagctcgtctcacaacggcaaaattcaacagtatctgtaataaactacactatgataaccatcattatgtggcccctttgggtcgatcaggtggccttggcctctgctggaacaaagaaattaagtgtgacattgaattctcatccaagtacatcatctctgcagtagtggaattcgaacctaagggcctcaaatggtctttgcttggtatatatggaccgccccatcgccaagacaaagaagctttttggatccaagttggggatattgtcgatcactccttgagaccaacccttctcattggagacatgaatggaactctcaaggactctgagtgctttcactatgcaaaacaaggcaactccaccaaatatgcatttgactttcgtcgaatggttcaaagagtgggtctcatcgatctgggattccaaggcccttgcttcacttgggccaaggatagaaatactgctactaatggagggtcaaccaagagagctaggctggatcggggactggcaaaccccgattggcgaatccttttcccgaatgcaattatcaagcatctctcctcaactggctcggaccatagacccctccttctcgattctaccgggggagttcgttgtaagagtc

SEQ ID NO: 202472 - DNA, 1080 bp, Cannabis indica
aagtatatttccaacatcaaggtgtcaaatacaagtgagataattcacccaatggtactgtgaaacccctataggcgaccactgccatctttttggcttaaaacatgacaatgctctcttctaccaactggccaagaaacaatgtggtcaaaatagttttctagcatccatatgactaaactaagtaagaaacaccatcaaaagtttcccataagccatgggcgaccactgccatctctttggcaccactgatgggagttgtctcctattagggttttagatgttgaaatgaggttttgggatcctgggactcccaaaatatgattcatcgtcaaaaaagatgtcaaaacacacctgaggggtctgaaaacatgcacggtcgagaatcgccacatggacgtggcaatggtcaaatttggagtaaaaaagtaaacaatgcccttgattaaaatagacacaactctctcaatttttaccccaatgacttggttcaacttgcattggaaagatcttttcaagatggatctaagtgtgtcatagtcatagcttaattatgaagttatcagctcaaaattgactcacaagacatgctagcatactttaatcgagaattaattggtgttattaactgtaaattattgtgagatgttggagaagtggcatcatatgtgagaagtgccatcccaaaacacctttctccagcacttctctccaattttatgaattccaagccgagaattaacatctcttgtcactcctctccaatttagaaatttctagccgaggggtgacatcccttgtcagttgtcactcctctccaatatttgcatttccaaagcgcaatgacacacaaataaatttaagacaaggagaatatccaacttcaacaacaatcccagtgtttatggaatatttgcctaagaatatgggatatttttatagatacttatttttctattttttttatttcattatttagaaatagatacgatatttgaaagtgagacaccccgacatctaggggttcactaacaaaccctaagtctatataaaaataatgatatactggctagatcgatg

SEQ ID NO: 202473 - DNA, 1723 bp, Cannabis indica
acaatagactaacatgctagatataactggacataatctgacatacaaaaacttggaccttacaatctcctccatgacagaatatgttcaatgacaacaagacactatgacagttaccaaatactaccacccatagttaaacactcaaaagataaccatcaacagaaatgataagaacataacataataattgtctttgcagcagattaacaaaatgaaacataaccaaattataagaactttaaacagataggatttcttccccttcattgaacatgagctcaaggtacatcattgctttttggctccccctgagaaagtgctgctgaagaatcaaggtgagaagtagtagcaactgtagaaggattagttaacactggaggttgattagttaccactggaggaatgctagaatgaacctgagacacttgacttaagactggagcagaaatttaggctccccttgaacatgtgttgcattacaagacccatctgaggatgcattaaacgattctcgatgaaactttggaagagatatatcaatggatggagtgaaaggatttccatagtgatttttcaagctagtggtcttgataatctaaacttgtttgtacatagagacctcaaaagccaactgacgcttttgatcctttttatatcttctcacaaatgatttaaattttgaatacatttggacctaccagctaaaatttgataaacctttgaacatagaagattttccttttgacggtttggaagaggaaggagtaatcgaggaagactttttgtgaactactgttacaaactcttgttgagaactggattcgaaacttcataatcataagtcattagtggaggttgggctgacataagcacttgttgaatgagactttggaaaaggaagtttgttccttgtaccagtgatttttgagacttccacaatcctttcaaatatgagagatggcacatcaatggaagtaggagttcccatagcatagagaaatttcccaatgtcaagagtgactgaggagaaatgagagttagaaaaccaattgttcaatgcaacccaatgaagaaccatataaatggggttaaatgagtggctaaagtttcttgcttttcccaaagataatcatgccttccatttagcactctacccattatagtttgatctggattaaaatactttgcacaggttggattctttactgagttaacttttaatatgcatgtaaggtagaaggaccaaaaggaatacgtttactcgtgacaaatgtactaacacaacctggatgctcttcatctaacataaatctgtctaaatttgtataaaattcacgaataaaagtggaatgcgatgtagacaaattagagacagtgtgaacccatatcctaatctttaaaaatttatgaaaattagaaaaatctttcaaaataatgatttgttcaaaccataaatcacgactaccaaaccaacattgataaacagatgcttttgagactaaggttttaggcaaagctttctttttggattttgtagacaagggtttgggaaatggatcatttgatgagtctggggatgtagagacaggtttgattttggtctttttgggagagggttgataagtgggatcattagaggattttctttcaggcacattggttttaagagaagatgactgaactttttctttacctttaacttgtaaaaaaggacggggtg

SEQ ID NO: 202474 - DNA, 1090 bp, Cannabis indica
cacagtaagctcgcaactccaaagagaaggtggaaggcagtaataggctctgaaagatggtaccacaaagatatatagcgaagaaagaaaagaataaaaactaagtgaatagtagtaggagaagcaagactaaaaatataaacatcatatgcaatgtctggacaagtaatagtgagataaaccagactgtcaacaatggtgcgatacaaagtaggatcttctcaaggagagccaatcaaaaggaatactgatcacattcaacttagagggagtgtcaacaactctagtatcagtaagacgagcacactcaataatatcagtagtgtactttgattgagaaagaagataactttttagagaaaagataacttcaatacccaaaaaatagcgtagagaacccaaatccttcatctcaaattgagatgctaattctgactttagcatttcaattccctgtaaattatcccctgtaacaatcatatcatcgacatccaagaaaagcagaatacgacctacaaatatgcacttgacaaataaagttgaatcatgatcacttgaaacaaaactaaaagataaaataacagtagagagcttttgaaaccatgctaggggagcttgtttaagaccatacacgactttttttagcttgtaaattttgccttgcttttgaggagcaccaagaggaggaaccgtgtagacttcctcatgtaagtcaccattgagagaggcattcttaacatacattttagatatagtctattggcgaactgatggcattgctataagagtacgaacataagttatttttgtaataggagcaaaagtctcctcaaagttcataccatactgttgtgaaaaatccttagccactaatcgagccttgtatcgttcaatagatcgatcagacttgatcttaattttatatacatccaatgagaactaatagcatgtttaccaggagaaaaaattactaaaccccaagtatgattcttttgcatagcaaatagctcctcattcatagcacgctgccaaagggggtcaatagtcgcctctttatagggcaaaaactcagaaagacaatgaatagatg

SEQ ID NO: 202475 - DNA, 749 bp, Cannabis indica
gtaaggtttttaggtttttttttttcttttcttcgtttttttttttcgctaaaagcaaagagttcaatcaaaaggagttaggccagtagcccaccgcacattacgccgccgagccggccatctaagaggtaactaacatacttaccacaccaagttcatattcattgttgacaggcataattaaatccacacacacaaacacaaattcattgttgtaagtatgaataaaaaaagagttaaaattttggtaccagtttctgcagatttcatttgatccaacctatagagttagtcttttggggcagtaaatatatctttgccagttgtttttttgtttgtttgtgtacattttatgttccacacattcattgtaagacaaatgcatttatagcattttatttgcaatgaaagacctttttaaacttgataaactaagttggtaacttataaagattgacaatctatgttacacaaacgggtctattatattacaatttattttgaatttagtttatttttaaaatttaattaggtcaaagattatttttttcttatctttatagccatatgtgtctagtaaaattcgctaaataactaacgatacaaaatactaaaatttacaaaatagttttacttaatttactttatgagaccacggtaatcgcacggtgtaaatttatggttgttttgcgccatcaaagttgttatgatcgcacttctgcagccatacaaaattattttgttaataa

SEQ ID NO: 202476 - DNA, 1380 bp, Cannabis indica
atggtaagaaatttatgtgtagtatatttggaaaattgatagcaccaaccatttatttatctttgttgttattggctaattattattattgacagagagaacaaaaattacaagattgaatatgccaaaaataaagataaactcaaaaattgatacttgacattataattgagttgacataattatatacacaatacaataggaaagtacaatgatgagatcaatgatggttaatagcccatataacaacaacaaacaatttatataatatatatttatatatataggcttaatataaattactatgttcaagagagaacaaagctttaaactttggtaaaattcatgcaactttactacaacttgacatatataacataaacaatatacattttcatttttaatatattatatatatacataatcagtaaatataacatataattatatatgaatctccaaagaatgagggagggaattttccctgaaattataaagatttgtcaaaatgtttttatattaaaaaggaaagttccatttctatcattattttaaaaataggatagatattatataaaatatataatattaatttacaatattgttataataataatatatattattcaatttgtagtatataataaaaaaatacttattatattttacttgtgtgattataaataatttaattaatgtacatattttattttattttcttaaaaaaatgtaatgtaattaaaagtaatatacatcattaccattttatataaagagatacaaatgaaatcctttaaggccacatggtttcacattgattcttactattcatatctagtttattcattaagaaaattctggtatatatacaggccctaaaaacttacaattaatataacctttttttgtaaaatatttattgattttgactgatgccaatatttattgagaagttggtcttttatgagactttctctttaatatatatataactttttatttggtaaactagaattaattttcatttacaaaagcacagaaaaacagttgacaaaatagaaaatatttattgtagaatatattaggcatagggaagttgtctaggaatttcacaattttggtacttaatttattatagctaggttacaaacttatatatatataaatataaatatatataaaagctggcatgcataataataatgctcaaaattttccacaggtggtttttatgaaacactcattttcattcatgtaccaaaaaagtcttaatgaacatgaactcacctttaccttatccttaagtcggcttgtattaactctagagtagtttagaccactaccccattcatgttttcctatatagatataaatatgtat

SEQ ID NO: 202477 - DNA, 896 bp, Cannabis indica
ttaaaaaggtaaaaatagttttgtaaaaatatttaaaagattaataagcattaaaaatgtaaaaaaaagtagccaaatttgtcacctagtgtaaaaattccttaaaaatttcccctgaactattgagattatcgaatttaagaatttttgtccaatttcattcaattgtactaatttagtgattgtttatgtactaaatcatgctccccagacttaatatctaccaaattacgcctctcgaactttgacatgtgacaaatcatgctccctgaactttcattcatgttagactttctttactaaaattgaacaaaagtctttaaatctaacaatctcaatagttcagggagatttttaacgaccagaaaagttcagggagcatgatttggtacatgtcaaagttcgggaggtaaaaatcctaattagccttaaaattattataactgcaacatataaattgaactccaaaaacctctctagacatataaaaatgagagagaagagagaggaaaaaaaataagtaaagaagttatcgaagtttttatttatttattattattttgttattaagagtaagtaaattttggttaaatagtttgttacattatttatttattaaaaaatatataaaaattttaaatattaaatattaattttgatacaatttaattactaaattattattaaataaattttttataaatatgacaacaatcttccatttagcataactactacaagtgagatacgacgataataataattttggaatgagtgttttctatatagatttattaatttttttttagatttttattttgtgtgaggattctttatttttatttttttttaattataataattgaatatatctttttgtttgtttttttttttgt

SEQ ID NO: 202478 - DNA, 1116 bp, Cannabis indica
cagtgtaatttattgggcaatattaattttgggcgccgttgccgagaaaattatgcgctacaagaagttagtatggtttgtctgttttttttattattgtaaaaaaaaatcatacaagtaagaaaatttataacattgtcaattaaattaacttcattatagattatttatttattattttctttatttagatttatcatagtcttattttagctataggtatgttagtttttcttttcctttattatttctttaataaacttttagatctaagattagactcttattatttttagattggcatttacctttttaaataaatataatgtcaagaataattgggcaatggtgaaagttgtaaaaattgagattaagaacgattaactttaaaaagtttgtggtagagtactctttacactttctagcaatctccgggagttctaataaagtgcgggacgaagcggtaccttgacaaccttcccaatctacttaaaaatatctcatgtatataccctttaattattagatagttgacttttatactaattaaaaaaaattatgaacgatttgaatatttatttccattatatcttgcttcattaaacaatgaaaatcttagtgctattgaaggtactagtaattttatcaaactagaattcagtaattgtgaggaagctttccaataccgttcttttttcaggaatgcgaatgccaaaaagtggattgtttggtccaatatagttctgatgattatatttggaagcctgagtacgactataatctattatatatgagtggaattgtgaagataaacctccttgatattctcataactctcagcattaatacaatcgttccctagatgacactatattgttaagttataagtatctatggcgaaaaattgcaagatgttgaatgacttacatgttgagttgacacaagttatgcaagttttgagcaaattattttgtcacttggtaagtttgcatgctaattgttctcctctataaccggtgacttaagaactaattaacctccaatactacctttcacacatttttaacgaggtaagtgtaacctctatctgtaatggtgaaaattttaaagataaaa

SEQ ID NO: 202479 - DNA, 1269 bp, Cannabis indica
ttttttaatttttttttcaatattataccactctttagtctttaatactcctttcaaaaaatgtactctttaatattgggaattattttgcaaatacataaaaataatatttttttttgaaaagaaacgtttagtcataagcattagatttcgcggtcattacaacaaatattcttaagaatagtaaaaatctcaatacaactatataagttatgggtaaaagcctaattagccacattatgagccataaatttacaagatttagtcgaaaaataaaataaacaagaagcaaaggaagcagcgatacttttacaaaataaagagtagttttcaatttcccgtcggagatccaagccgttgagagtgttgattactatctttgaatcgctttccaccaggataaaatggtgacctttctccttagcgaactcaagcgccaagcaaaccgcaacagcttctccacacagggtatcagagaagtccattttggccgtaaacacccaaattaacctgctcaggtaatccctagcaaccactactatgcacatatgctccattctggaaggggcgggttccaaacagcaatggggtcggggaggatatagggataatggaatctctgtaatctgcataagagtgagaaataaaatcaattacattgtttcacattatccattctgttattgtgtaccttgtcattccggacccgccaaatcgtgtcaacaacaatagaggcatagaggaaaacctcatcagtatttacattcctacttttcagattccacagaaatttcacccagtcccacatgcgaattcctgttcctgtaacggggaaaataccccatggagaagaacgccttaaatggaaagccagattacaatggaggaacagatgctcggtggattcttcatcattaccacatattgggcatttagtgtccttaatatagaatcttttgagtaaagccgccctaaccggaagggcatttgagaggatgctccaccactacataaaaataacataaacattataaaaatatgttttcacagaattttagcctataattatctaattgttatataaagaaaccaccaaataccggaggccacttcaatctaagaagggtatgtcagcccatatttgaaataataattttagcctcatagcggcaggtgagaatcgatttttagatttcccgaaagaataccttggtaggtcatttttttattgtaatatcaccaccacctagggttgggcatccgatccaa

SEQ ID NO: 202480 - DNA, 2322 bp, Cannabis indica
gttactattttttgcttttcaaagagaagaatgtacaggcccctgtaatttatgagtttttgtttctttatgtcattttcttttcaggtaggaatacatgtattattatgaatgtcataattaaagctttagattacatgtgtattttgctttcaattactagtagccattagattgtaaaatatgtttttaacactaaaattactttccgttctgggtaccaaattattcaaaaaaggatacatcaagtaatagacatctcgaagtaaaagctgtttaaaaaaacttgctaaactggtcctaattcatctcaaagtggaccttttcttcttactactcttttctttgatttctcctaactcccttattcttgtccttgacaatttccatgctcatcttctttttcttctggttttcctttgacttcttcaccaagcttcatcatcttcttcttctggagagtttcaatgagtctaggtagaactatattcgggtcattgcttctcataatctcctctgcaacctcagcaggggtcacctcaacctcctcgatcaactcctcaacttttccaaataaatggtgattttttacttgaagatagttaaaagcaagagtcttaaacccagatggtgtgcagtaagacatgttgatatattcatgtccattcggcctggtctcaacaatgcagggtcaagtttggccttgtaattagttgtaaacactattattctctctcatctccacagcttgaccataacccatcaatgaaattaagcagcccagatagagtcagctgtcaaatttcagatatgattcaattaataaaaatcattaccaagtagtcatatatgaatatgatacagtgtagaatggaagaaagagacaagaatataagatctcttatctcacctggctgtcattttgaccataactaccttgattacatcccctgttttccaactgaacactgcaatcaatatcttcaatcacaagtatagatttattctcaatcgaaaccaacaatctcctaagatcagagtttctattcaaatgggtcagctccaaatcatagatattaaacttgaggtaattaaccatggcagctatcaagctagattttccaggttaagttgccagaattaatggcggatttccaccttgttgggtttcatttcggttgtcttccttagttgatcgttcgaagcttccgaaggtgtgttttctgattcgtgcggctgaagctttagaagaagaggtataattataattttgaggaaattatactctataaccactttattgcacctgttttaatttttaccttccttttaatattctttgattttctaagttttgttcccgttatagccttaggttagtgaaaagaaataaaattcaattacacctctaaataacacgataacctctgtcaccttctttctttttcgaacaattgacgattctggcccagtcttccgtcttttgtgggcgcacattttcacgttcatccctcagtcggcggctcaacccaatcctcaatgtatggtcgataaggtacccgaagaagagtttcgccatattagttataaaagtaaagcaaggtacttattggaaggatgtggtaatggataagcataaatgtaatgtgatgatgattggaatgacaaagataagaaaattcatttggatagtaggaattatatttttcttaatgcttgaatttgcttgctttattttttattgtagttatgattatagcgattgtggttgtaatcggtggtagagtaattggaggaacgctggcaatggtagactcgtggtggagctagcgtgagtttaatttctatggaggagtcggagtcgcctgcaattccattaatcaaagtcgtggggtatattagacagttcaattataaaaaagagtatattttaattaaatttattttgcagctatttttagtgaatgtaaaataaaaattggtaattatcaacttatccctataattttttatttgtagactgtataaatatttaatgagccgactcactggattttgataatatttttatctttattatatatacataaaaatgctctatatataagcacatataatattttcaaatttttaagcttgacagttttaccatgttatatatatagcgttctgttttcaaaaattgaaaaaaaatagtatacaatataccgtataaaaaaatagtaaaaaagtaattttttccttactacagtaaaattgaaataaaataggacaaaacagtatggtgtgtaagttcctctgttgtgcactcaagcaccaaca

SEQ ID NO: 202481 - DNA, 3232 bp, Cannabis indica
gatttttgtctttgtatcaataagtataccaaattaaacaatatagacaagaaagaaagtaacgacaagaagctccacattcaaaagttttgaaataaaaaaaaaaaaaaatctagacaaaaaatatttacttttttttttctttttacacaataatagagacaaatgaactacattgataggtaagaaaaagacagctactgaattaatatcttgtccgaaagagtctattaaattgataaccccatacatataggcgatgaactataatagcgatctcatgatattggttcttcaaacaagcacaaataaaaatactgaaatatctaatttgtttacgagcacccatataaataaatctatcatatcagtattagaaatcaaatcatcaaaagtcccagatcatcatttctttctcacatatcatcaagatcagttcaatcagtcaataataaaaagtaaataaatcaaagaaatacacaaaagggtatcactaattttttgatgacttttctgggtcttcttcaatttaattttggtcgtatgcaatagaaaccataccttggtagaagagggttctgtctatcaagagagtaagccatgaacccagaagagccaaggttgatggtgaccgcagaaggatgaaccgatgtgaagtgacgagcgaggaagccatctttgagagccgaaaccgattcagagtgagggctctgaagagcatcggggctctgtgccaccgatttgtcgaaaactgccaacattttcaggatccttgatcggaagacgaagaaaaaatgaatgagggaaacgaaaaatggatgatgatgatgatgatgatgatgatgaatgaagatgtgtagattttgctcagttgaatggagattatataaggtaggagagttggacaagattttttttatttttatttttatttttatttttaatggaccaatacgagtctaatttattgttccaatattacccctgctttgacaaaaaacgttcctggttgagctggcatcttatccgcaatgtcttacttctttctattcttttccttttccaaatctaaaaaggaaaatcaaaaagacagaaaataggttctatattattccagcatatttaataattagtcccacccaaaaatatttagcccaccaccactcattaccctattaaatatgttattattatttagtattacatagttagtatatatatattatgagcaagagatatggtaaagattaacaaagaattgacttatttgtaaagtttatttttgaagggacttatttggaaattttgtactcattttctagttattctggattttgtctatattttttgtttatttaatttttcaaattaatgttcatacccatttttattcgattgttttgggattaagtcgaatattctctgttcatttttttgtttttattatattttgttggttgaatctaaaaattatgtacatatacatgataatttatatccatttcgattaattatcaacattctgtattttgtggtttttaaagtttgttattatttatagaatcaaacataaattttgccaaaattaaaaagaaaaccacactttcaaaaaaaaaaaataagtatataatatatttttaagtgggatgctatttataaaattaaaatatgaagaaaataatgtgtagtggttttaagtattttacaatttctcatgtagaattttttacattatttcattctaatagcacattaaattggtgtgcactaaagtttacaccattaataatattagattttaaatctacactaatttaatgttaaactttcttttttttttttgctattttaactgtttattttatttttattttattttaaacaattaatcttatattttagtcatcaaattaaaatttatcacaaaaatagtaattaatttaaaacagtgacacatttaaaaacacaaaataacaataacaaaaatattaatattaaataaaataaaaacaacataacaataaattataaaactaaaaagaaaaacataaataaaaataaacattaagtaaaataataatttaataatcaaattgatcacttgaggatcatagtcttgaaaaatatcaaaatatttgttgtatggacttgaagtattttgagaatcttgatatttacaccaaaactagccctagtgacgtagacatcaatgtttgacacgtggctagaaagaaaacatcccaaagttgaatagttacgaatcatagcagttgacttaaaaggggtccctagccctacacagttggcttcgggaactccggataggtgtttggatcatgccaagttatttccaactcaccatcttttagtattctgaattaagaagacaagaagaatccaagtccaagacttggaagctgaaaatacacgaaataacaccctagaagtcaacctgagcgcctagggttttcacccagtgacaacacccaagttgacattctaactggggtttaagttttcgggatttgccttagtacaaatggctcaaactttgtacttggacacgaataagacatttcatgaacatatttgaggtaacaaaatcagaatcgaagcagtttcaattctgagcacccggagcaccaggtgccccacgcacccatagcccaagttgacatattgtcaacctatggcactttcaaccacaatactaaagaactatcctgagcattttcttcgtcttcatccaaaacatagaaataagtactttttggggagaaacagatcaacttgagggccaaaatggggacccaacgcccaggttgacatgggagctgggcatagcgcccacgttgacactttgactacccaggccacttccattagtatttcagatgaaattttcttggcatattctctgttttcgtcaataattaagatttgagtgcttttgagaaacaaatggatgcccaggttgacctggtgttgggcccaacatccaggttaatactttgtcaacctaggccatttttaaggagttttttttagagtcttatgggcatattctctattttcattaaagattaagataaaaatgtttccaagaatcaaacggagtcatctggtggccagaaactggacccatcgcccaagttgacacatggcactaggctatgtcaacctaggctatttttaattattttcccaaaaaatgttccggtcattttttcca

SEQ ID NO: 202482 - DNA, 1368 bp, Cannabis indica
ctaaatattgaggaaacatcaaagctaaggctttagaaactacccaaactagtaaactggattccctaaatggaaaactggttcctcgggtcctgcctggataaacggttaaccagttctataaaactagcagaattggttaaccagttctttgtagaaaaccctagaaacctcgcatctctctcaagacattctgaaactcaactaaactttccataatacctataatgacaccaaacaacaataatcaagtaataacaacatcaaatatacatagaaacttaaaccaccattgttggaccaagcttgagttttcaaactcaaacttgctcaacttctcatcaaaccaacaaaactagctgagaataaacaacaactatttctcttttatgcatgattcaacctagctacaactttctaaaaacaaagggaactagggctagagcttacctttggatcttcaccccttcaatttagctagaattgacaaaaaattgatgaagaacaccctgatttcccttggttttgcttcatccaaagtaagaaagagtgaaaggtcaagaggtatgatttgtcttttctttctaattgtttattgtcttaatttttccttaacacaaaagataataccaggtttatctcaatattagtggccaggtttagaaggtaattgaataatccacttctttccaaagtaaaaagaaaaaattaccctttccttaagcttaagtaagtaaatggcttaggggtaaattagtctaataccataccccgcctaatcctttattttaacatcaaatgcacggttgtccccctaaatcaaaggttttaagctaacccatgtgactttaacggttctccatcgcattttctatcgttactgagcaaaaatcataaaaattataaacttcacatttagcagaaataatacacctaaagaaattataactctaatccctattttctaaaaatgggacgcacaataaatataattatgcataatcctaaaatatcaataattaatgctaattgtcctactaatccataatctaatcatgcagtcattacaattatccccccattaaaaggattttgtcctcgaaatctaacctaaacaactcttgatattgagtcctcatgtcgaactctagttaccaggtggcttcctccaccttactattcttctagagtaccttgagcaacgctgtggtcttgttccaaagaaccttttccttcctatctaggatttgaaatggttgttcctcatatgatatatccaactttagttctaaggcttcgtaactcaagacatgagtcgggtctgatacatattttcttaacattaaaatatgcaatacattatgtata

SEQ ID NO: 202483 - DNA, 2147 bp, Cannabis indica
gtaaaacaaaactaagcatttgcatggggttcttctcaatcatttatagtaccaaggtcaagtatctcagcagttgcttcctcgataaaagcatagtcaagttgttcaatcctcccaccatcaacatccaaacacatgtgggcacggtaagtttcaatttcaccaaccacatcccaatattcattccttccagcatagtactcaatcattagttctccacaagtcttgataacaacagttaatgcaacttgttctgccttacagacaaggtcttctgcccttttcttctcgtcaatcaacccttgcttcaccttcttaagctcacccttcaaagattcaatggtttcttcaagttcacgctctttttctacatgctttccattctccaatttcaggaaagcattatcagcagtcaattttgttctcttctccaacgcaggatagttttcccggatgaataacatggcttgaagaatctacaaatgctataatcaagttttaataactaaaaaaataatcaatcacaatttatattacaatcaataatgtccttaccttgtaaccgtcagccactccattgctggaaaccccagttgaaccaagcttaatcaatcgtgctcgatcagcgggatggagaattccatctacatccccttcaatcgacaaagggttagaatagactgatacagtgtgagggattcgaagaactgcttcatcaacaacctctcagtcaagaaagtcggcattcctcttaattgtagtgcacgtaccaagagaagatagagtcgatggagcatcagtgaagttactctcagaaacttgtttggactcttcagtcttcaacttcttagttgttgtcaatttgtctctatccatggcatcgctagctttaagaattttgatcgtcctcttttgggacatcttgtctgcaaacatgcgttgctctttggtcatgtgagtcaaaatagtaaacttacttccaaccttctcgagttagaagaaggatgtgaatgtgttcaagggattgaagtttagagataccttcttctataacgtcttgtgatttttgtaagcaacctttggggagaaatttcctaaaattacggtgctcctcctttatagattaaatatccttgataattcgatcaacaaactcgttcgtattaggttgaaccccaaagtcagtatctgggccaaggactaaaaagacattaatacaacatacatagccaacacaataatagaacataattcaacactcactcaatattttccaagagaatgggaaactctttccgaacaccaaatggatcaaagaactaattcttctcggcccctaactcaaataaagcatcacctctaaagaagcaatatgctttcttccaatctgaatcgtcggccttagtcaaacaagttacaaatggtttcttcctagtgcaacaaaaaagtagcactccacccttctctttttcgtgctctttagcatagtaacgtttcctaaaaattatggggtctactataataccaaacttttcagtaaaatgttcaaggctcaggagtaacctccaaccgttgggcataagtttcccaagagatattccataaagactaagtatctcggtcaccaagggaatgaaaggaaactgaaatccacaatcaaaagctgctttgtaaagacacacccaacctcccatatcccagtcggctctcatgagacttaggcagtctcatttccacatttgagggtatgtcataagaaattctccattttttcaaattagtattcgtcaaaatacattcatggttctcattaaggaacccggtaggctcactagagcactcatctcgacatccgtccataccctcatctaatggaccaatcagataacctattatctctgggtcctctccgttaactatgactgtttcacccacatttattttttcacactcaggattttgcacaagagttactcgctcaagtgggactaccacaggaattttgtcactctaagatcctcaatcaaacaatctgacaaaggccttttactattctttattgtactatccatgttttccgtagcatgagaaacacactacatagaaaagctctacatggactactagcgacaactcaatacttggac

SEQ ID NO: 202484 - DNA, 1006 bp, Cannabis indica
aagaaaataatacgtggataatgtcttaaaatttaacggttaggtgtcttcaaagttctaaaatttatgtatttacttgtacttagaaattaaatttaaatatttatgccgcaaattactctataagaatttcatatgtttgatcttattttgacctttctaattttatggtctaatacttttcaaattgaatgtatactatgtaggtaaggaaattgttttgatattttgggttcttgtgtctctttaacactggttttgttttggtcattgattgtataattatttcattatggtttaactctaattgtaatattaacttttggtttttgaataattaaaatattgccatattgggactctgattactgtcctttgccatcatcattggaatcttatcaccaatttgtatggtgacaatttcctataaagagaataaaaagacaggacaccaaaacagtaccttaattaactgtttggtttttttaagcaacaaacaacaattatggttcataattatgtatctatatttatattttaatgagaaaattgcaaacaaaaaaaaatttttaaaaaaaagttcatgcaagtaagttcttaacttcaaaaaaataactttcatagtccttaaattcaagatttttgtaagttcattagtttgagatttttctacatcaaatgaaatttggaaacttttaccgcaattttctgaattttaaacacggttagaactagcaaaagaaattttaaaattgatctaagataattcattaagatatttttattggcagcacttgcaccgaaaaaaaattagggtaattaccttaaatactattttttttgatttttttttcttcaaattttatagttttgatttctagagtggttgcagcgctagttgcaataaggatttctgtatgatttttttgttacaatttaggttgcagcgctagttgcaagaggagtttctatgtagaattccataaaaaatcaaaaaaaaaaaact

SEQ ID NO: 202485 - DNA, 1064 bp, Cannabis indica
ctatattgaatttagtttctatacgagtctatatgagttgcttagttagttgttacgtgagttgctatttagaattctgtaaaaatacaagaaaaaaactgcttaaagtgtaaaaaatgcaaaataactatattgaatttagtttcgggttgctatgttaattttttagttgcgatttaaattgcattgttagttgctatgtgttattatgtagatttctgtaaaaaatgaaaaaaaaaaccccttaaaagtgtaaaagtgaaaaaatcgcttgaatttatagtgttgagtgtaaattgtgaaatttgttaaagtgaaatactaaaatttgtaaaataagcaattatgatggtttatagtcattttatgaccataatgatcatttgcaatcgcacagtttaatttattgtcgtttctacaaccatacaaggttatagtcagaaaacggcactacttattgctttattgaattttttcacttttaaattctaaacaatttgatttttgaaaactccatggacatgatgtgtaagaaaaattatcaatttgactgttagtgtaagtagattaaggattgaatttctgttagaagattcataatgagaaaagtgtttcttcaataaaatttaaaaagagtgatttaaatgatatgtgggagccttactttcttaaaatgtagcgatcgagatagaatcagaccgattcgcttatgacctctccctctatgtcctgtggtttctatcttgaaataatgaattgagtttggataagcatttaagatatgcaattttaattaatatgttgttttatggtcgcacagtataatttttagcgaacaaaacaggtaatgaagattcacgccccattggctcacgctgtagggaccccatctcgtttctctcgagcttgaggatctttgctttcggtatcttttcccttatttccattttgtatgtggatacttggttgagaacccataatgaggctcatgagatgggaaagtctcaatctttgattgatgtatataaggaccagttgttggtggctttgaaagctgattcttg

SEQ ID NO: 202486 - DNA, 1092 bp, Cannabis indica
agatcctccaagcgtgcttggcaagtaaagctcaattgtgattggttaaggactgaaagccaaggcctccataaaatttggaaacacaaaggctagaccaatctttccaatggattttgtgttcttattgttgcgtgatccccaccagaacttagatataagtctttagagagttttataggtggctttggggaatttaaagtaagacatgtcataggatgggacaacctggaaaatagccttaatgagggtctcttttccagctctagagaagaattgaccattccaaacattcattttagatgcaacattctgtaccagataatggaaaaccaaactgttcattctgccaatgcaatgtggaacaccaaggtatttactcataaaacactcactgcctaggcccaaagagtttctaaaatagtttttagcctcattgttggtattaggagaaaacaaaataaaagattaaaaagattgatcgattgactagtagccctatgataagtggttaaaatattggtaatggtagtactagacctctcagtgacaggggtgaataagatgttgtcatcaacaaagagtaaatgagagattataggagcacttctacagatcctaagactcgagaaattgttactttgatctttgacacggatggcagctgagagcccttcaacaactaacagaaagaggtaagggacagaggatctccttgtctgattctcctagtagaggtgaatttttcagaaaggttgccattaatcgagagacaataattaatcgaactttgacatgtactaaatcaaattctctaaattttcttatttaaattagaaaaaaaaatatttaaatctaataatttcaacaattcatgagaaatttttaacaatattaaaaatttaaaagacatgatttagtaaaaattaaagttgtgaggcaaaaatcaaaaattaacatttatttttaaaaaaaaaactccgtttttatattattgtctattgctagttaactagagcagagacgttagggtacgaaataccaattgttttaatgtggggctatagtctccactaacaaaaatattctttt

SEQ ID NO: 202487 - DNA, 1276 bp, Cannabis indica
ttagtgtgacactatagactacaccaaatatatttttattacttttgaatatttaataatatatattataaggaaactttttgtatttatatattttgtgtttattcctaatatagtaaaataatgtaataataaaaaatataactttagtgtaatttttagtgttgtgattggaatagaaaaaaattagtgttaaaattctattatttttgtgttgatttaataccagatttgatatttaccattggagatgcccttaggacaagtttaatggggatggtttttaagttgcttgttaggtatagggataggattgggatgaggtggagggaagaaattaaaaataggaatttgactaaatatgcttacattaccttaaaaaaattctcctaaacttatacttaccaatatttgtagcataaaaaataactttagtgttatctccaaaatagcttcccatttacatcacctccctctctcttcccattccttcttcctttcccactcgacctctactccactaccacaacaatttttttttcttctcttcactcattttttacactacaagctactacactacactacaatactacaagctaccacactacaagctacaacactacaagctcccacatataaagcatcaatgggtaaataaatcatttttttaatcttatttgttgttgttatatatagtttagaatgtttttttgttgctttatttgtgggttgttgttgttatttgctgttttgtgtgttttaatgcttgctgtctgtgaatactgtatttttttctggtttctgcttttttttgcctggtccgatggggttcgatgcccacccgatggtggtccgatgtactataaaagtgggatgacagggataaaagcccgattgggcccgatggggggttcaaaaaagggtttggggaaatttttttgatctggtccgatgggcccaattaggggccgatgggggtccaaaaatgggttgggacaattttcttatcaggttcgatggggccctattaggtccgatgggtgtccgatcagggggtaaaaatgggtttggggcaattttttttatcaggtctgatggggcccgatagagtccgatggttggcccattttcggtccaacatggttttggactttattttttgacggggtccgatatggggccgatggtggcctgatttgggccgatggtgtacaaatttattgcatttttaagaatttggataacttttgtgtgagatttttgttctaaattg

SEQ ID NO: 202488 - DNA, 576 bp, Cannabis indica
ttagctttaataccaacttaaagaagacctaccaacaactatatatttataattcagaaaactctaatctctttatttcccgatacctctctttctctgtctggattccctcgtgcagcgttggaaccagactagagtcaccatctctggcacccctctcacctcaagaggacctcgagtcccttttcccgaaaccctgaaaatccccaacctcgaagcccagcctccctcttactccctttctcctctcaaccctttcattatcacgaagttgccaccaccatcagctcaggcgaagccaaacctgagaacccaaggaaaacccgaagatcttgcaaatcctctctctctccctatttttctctctatttcctagcttctctctcatcggagctaatgttttctagccccaattgcgtcatctccagtccagttaagtcaaacgagctatggaaatgtgttcaccttgtcaagggcttcgagaatctatggcccgatcctccatgcacctcctttgagcaagaactgccaccacacacgatggagctccggggagggtctaatggtttgagatct

SEQ ID NO: 202489 - DNA, 864 bp, Cannabis indica
tacagtggggacaattgttggtgacgggcacatgtcgagcaaaagcttgcacttggtggacaaaatgctcagaggggtcgtcgaacaaagtagaatattcagaggatggtgcgcacactaccatggtttgacatagggaacaagatctaattttgtgtcagacaagaataaccgtcataaagccattcggctctcgcctcgcatatggattccggttctccttgcacaattggcatttgtcttaaactcttcgcatgaccctccggcatctgcctgcacttataggtaaattagtcttctctgggaactggaacaatgataaggctttcgagtctttgatggtcatttgctttgcaacaaatctttgtacctctttcaagtcagacctttctcgagctagcataatctctctgtgaccttctgcaattaagaagacttagtcggtgatcatttgaattgttgccttctattttttgtcacgtgtccttcattcgaaaacacagataatagtatttaaaaactgaaacggtttttacaaactaatagggtgcatctggccaatttttttaaaaacaacttctgaaaactgagttacaaaaactagaaaacagacacataaaaatattagtttctattttcaaaaacaatttttcatttttttgtctaacatattcttttttacattttcactcacatactcggacccgaaccctggaccaagacctagaccccgatttcggaccccggacacggcctagccttgggactgatccggccgtggactcgaacatggcccagggatcgacctgaccttgaacctcgagtctgagtccgagttcttgttcgggtctaggtctggggtcg

SEQ ID NO: 202490 - DNA, 1427 bp, Cannabis indica
aatggccaagccaaaatttctaaccggaaagataagctgatattggagaaaacagtgcaaagatcgaggaaggactggtcaaggaaactagatgatgcattgtgggcctacagaacaccattcaaaacacctatcgaaatgtcaccgtataggttggtgtatggaaaatcctgtcatctgtcggtggagttagaggaaaaggcctattaggcaatgaagaccctgaacatggatttagcagctgcaggagagaagagactgctacaattagatgagctggaagaattcaaaaacgaagcatatgagaatgcaaagatatacaaggaaaaaacaaagaaatggcatgacagaaatctggttaggaaggaatttcaacacgggcagcaggtcttactttttaactcaaggttgaaactttttcctgaaaaattaaagtcaagatggtcaggaccgtttaaggtggtcaaggtattcctatatggagcggtggaactaaaaggcgagagtccagaaacttttaaagtaaatggacaactgttaaagctttacttgggaggtcaaatttaccaagccaagtttgccattatatagcgcctctttgaaatgtaacttagcgtccggctatatggcgataaagacagcgctcttgggaggcacccaagtgatttacttactttgatgttttttcgagactttttttttagcatgttaatgttttgtaaactttcagacgtttgttttaagttaaatcatgcaaagcatgaaaagttgaaaaagaaaaaagaaaaaaaataataataatttttcgggccatcacccagtggtcctgaccaccatgttccatggtcgcgtcctggggttttacagaaagcccacaagttcgagaccttaagtagtcacgactagcttccaccatggtcgcaacccattttcatggtcgcgactacaggtcttacatagagccctaaaattacactttgatccatggtcgcgactaggccattatgtggtcgcgaccagggatcgggccgaaaccctaaattgcctttgaaaaccctatttcaaaccaaaaatcctcatttcatttcacataaaccctaaccgaattcatttttctcccagccaccaaactcatctcacaccctaaaagcctaattccttcattcttctttccaatcttccatacccatcacccaaaaacacattttttctcttcattcttcactttccttcaaatatcaatccaaaaattaccttttttcactaaattccaaaaatgaatatttatcatcttcaacctctaacttttcatgtgattcaacaacggggtggatttatggcattctcacttagtaagtattattcatttcaatatattaattgattatgtgagtttcccacaaaattgaatagtttgctatagtatt

SEQ ID NO: 202491 - DNA, 1263 bp, Cannabis indica
tcggtggtgtgtgggcgatggtcgcactatctgaatgaatgaagatccttggattcttagaggatatccttttaccctttgcacaagggttaggattcttgaaagagtcactcttcatactttgctgaatgaagacggaagttggaaaactaatgagattcttagttggtttcaccatgatgacatttcttgggttcttggcactcttcctaatattcatagtttagattcaatgacttggagcctcactcctactggtcagtatacagtggctagtggatataagttgagagagcaatccagatattgttggttgctctgataattcaactttgaaaacttggtggtcgtttatttggggatctcgtctcactccgaaaataaagagctttatttggcgagtattcaatcattggatcccagtcaaagtggagctatgcacgcgcagaatgaccatcgatgctcaatgtgactggtgtaaattgcaggaagaatctttgtgccatgccctttggctttgccccgctattcacaatatatggaagcaagttggtttctctcaatatatctctccatccctcaataaggctccagatttcctcttaatgttggctgagtgtctctcaaaagatgaaatgatccaatttatattgctgtatcttggctgctttggaaacggcaaaaccgatttgttttccaaaataaaacccctactaatgtttattagattccctaggcgctggaggtcttgcacacccatctgcagagagagccaacgaaaattaatttgtagaaaaataagcagtcatatgttcctgccagccccctcctcttggtaaattcttaataaatattgatgcatctatcttgccgatgtaatttggggtgtggtataggtgcgataataagggatcataatggagctttagttgcggctgaaactcagtttatccctgggtttctttcagtgatgttggcagaaactgctgccattcaattgggcatattgatatggctttgcgttggtcttgtttggatgtttgggtaggagctgattgtcagtcggttgtgaaagctctaaagaacggaaagagtttacaacggactggggaacttggttcataatatcctaaggatcagtagcaattttaataaccatagactttatttttatcttagaaattgtaataaagtggctaatttgtttagctaggtgggctagattaacccaagtatctaatgtttggacagatgttttacctt

SEQ ID NO: 202492 - DNA, 1129 bp, Cannabis indica
taaccaatcgcaacgcggcatgttgagaatgtgctagacactactagtgtctaatagcaatgctctaaactaaattaccaccagtttgtaagggtgcacatgggcctggtccctggttggctgcagttgaaggtgttatattgtgtgacatccaatgattccagtgtggggacattatgagccgtacatatttattgaactgtacaatccaatcttattttccacaaaactgtaatgattgagttgaattgagtttattggggttgtggtaataaaagttcaattttttttttattattcatactacagctatttaatattgtatttatgaacatagtatttgatacaatttatcaaaattttaattaaatattatatttaatggcacctgaattatggctttatcacatttggtgggagttgatagtagggggggtgtttataatctggaggttaaggtgaataatgaatgaataatgtaattttaaacctcaaatcatttggaaaggacagtttttgatggtcagtcatagtggtatgctttggtttgggctttctctctgctttgttttctatgtatatattctaatcctttaattctagtgataggttgagattgagtcacaccatagtccctaccaaaattagggcattgctttcatcattattattgaggcagccagcaaagactgtctctatctaccccaaataaatgaaaatgaaataccatttatgttggaacccactttatataaattcaatcttatctataaccatataacatattaaaagcctaactaaaccattaacaatcaaagtccaacatttaatatggatgatttttgtttatctcaaatcatgaatgcatttggctacatccatcattgtcttggtttctctattcctttaacgatctctaattcttcaaattaagactagaactctttattgggaatggttgtattggagcttggtttcatcttgtgcaaatgactcattttatttaggaaaattatgatgccaaataatagtattatataagtaaatatttttattttaaaatttgtagagaaatgacttttttatttttttgatacataagaaaaaggaaaattactccatatattat

SEQ ID NO: 202493 - DNA, 605 bp, Cannabis indica
ttaaaaaatattattatttatttgagatttcagaatacaaccaattaattatttgactacaacaaaattaccctatgtaggtcatattaatgtgtcttcttttatgagagtattgttgtatgagttccatgtgattatttgtttactgtttaagacttgttctttttgtcgtatggctttaaatgatcgaggtcactagtagggattgaggaaaggtaggagggttttgccatggaggacgaagaggaagcagtgttgcgatatgaaaagaactatctgttattgatgaggaatggtgtttggttggatgatttctcacaaatcggacatttaatattctaccaaactatgcaacaataaaatgacatcttcgtggcaacgtagggcacacgctgtatgtgaaagaattgaatcataacctattttttatttctagttttatcatgacattaatattactagggtggtagaagatagtccatggacgtttgatcgccttcctttgatctttgagcgagtcaaacaaggaaaggatccccatttgatcgagttgtaatttgctattgcatgagatgaaagtgggttttattttatatatatatata

SEQ ID NO: 202494 - DNA, 1136 bp, Cannabis indica
  modified_base (6)..(6): a, c, t, g, unknown or other
  modified_base (15)..(15): a, c, t, g, unknown or other
ttttanaaaggttanaagggggaaaagataaataaaaaatggaaacttgatatctggaacagagtccaaagttgtgattccgcacttacatcaaggatttcttggaattcacatcaggcttaacaaggcctcgctggtacacggacgaacccgtacggttcgtacctgaagcgatttgattcggtacacgaagatagagatagcaggagatacgatgaagaagacgaagattatgatgatgagtcttcgatccgaagaggccgaacccccatgtcggtctggctgagttaacggttccactcgatcctttgggcgattggcacccgatgcaactcggcgatctcgtttcttggccatctcgtaagtcagccgaactaaaactatcgagtcgagtgagtgaaagccataagagtagagggactacttcgaaacaggattggcgataatctggtgtggccaagtctatcaaaagtaattcaaatcaaaataatcattaaatatctatctcagtttataaaagctgttttacgaattctcaaaaaaaaaaaagaaaaaaaagctgttttacgacactgcatataataaaaacgacaataaaataggggtttagcgctttatacaaaacaaaatatttctcttaagccaaaaatatcttaggggaaagggttcttgtccttgcagataaaccctgaaacggatttcttttttctccggggaaaaccccttaaacctttttggtctccaatccaagtcggtacccttcaattattaaggtgagttatctgctttcttttcttaagttttttttttttttttggtggggggctattttctttccttatcgtttcgttagttaaacacaatcgatagtaacttgtaatggaacccaagctcttgctttctacaagcaaagcctcagtatcttcttctttacccttcttcctatctttcaagacttcatttcttcgaatacgcaatgattctgtcaaaacccatttctctggctcaacgattcaaccagaaaagtcaccatttttgggcagaagcctggtcttacatgaggagagtaagtgttttttcagtaaccccagaaaacccatgttccatttgggccaatagagctgtagtgaagagaa

SEQ ID NO: 202495 - DNA, 1142 bp, Cannabis indica
actaactactaagcatagtgggagtcatctagtacattgcacgataagttctttgccaaacgttggtgtctcgtggaatattgttttctagaaattataatttaggggtgtttggtatgcggcttgagtttgggggagtagagttaagaggagtttagattaaggtaatgtggaactcattcaagatttcaagattaccttgaaataaagctaaattgtgggactcacctggaaaacacaaacccccaagtcattaaaaatagatttaccaaacatgggttatcaaatggattgcatttgatataacctttcccaagttattaaacccccataacaaacaccccttaatggttcaattgaacttatccattgtcccttatgttgtgtataagggttcggacaactcaatcaacaatgagaagcaatagtgcacaagtattatgctttgatatttctaccttatgggtcctagtaaatacacatgatagatattttaatgactagttcagtgaagaagtttttttttttcctacagtagctttatgatatatatttttttaactttgcattgttgttttaagcatctaaataataatctttgttcaggatgttcatgagaggtatcgaactgaatcccatactgaggccactggacgatttaatgagcggttcttattatcaattgcatcatgcaaagcatgtgtggccatggatgatgagtttaatatcttaccaatttcctctcatataaagtcaatcaccccagttcctgttaaggaggtaaccttttccaaaatttaatatttgtttgtaggaataaaagtttgtctagatagcatgccttttcttgtttctttggaattcgaaaacaaagaaaacaaaactggaaggaaacaagtggcatgtactttttggtgtatgttgagataaattgggaagagaaaaaaatgagagagagagaaaggggggagagggggagtaataaaagagataaatagttggttgataattgaatattatgattttgctcgtttaatgacatttttcttttcatttggtcggttatcaaaggactcagaaggtctatcagaggcagaaaaggatttgaaagatttaaaggagcaacttattgatgattttcc

SEQ ID NO: 202496 - DNA, 642 bp, Cannabis indica
cccaataaaatatatcaactactaccacaccagctttatattaatgtaggctttaagcaaaattaaagggtgaaaatgagagagaatatgaagcacaaatagtacaaaataaacaattttttatgcctccaattaaacaaatttctagttaggttataccagaaggatgttgcttccaatgcccaaaaatatagaataggtttgttggagacttttggagtatctagaataggtttggtctattactcatgcaaattcctcttacatttttatggttttaaatgagaaaccacagcttccattgcctctccctcatttattaccaacctaaataagttgaaagagtttttgtaaagaaaataaattcagaaatatggccaaacgaattaagatttatttgtctattttttgttcttgttcttctgtttttattatattttacctataaaattaacagcttattaatattaactaaccatattaggttagttgttattttttttagaggaaaaaaattgttttgcaaacattcttgtttgaacttttattttaagcaaatataaattttttattaatttactaataaataaaaaagaacactttatttcaacaaaaacatcaccccaattaatttgtgtacat

SEQ ID NO: 202497 - DNA, 945 bp, Cannabis indica
tatcatttaataaaacagagagtaaacttttacaaaacacacactataacaaattttacttttagtcaatataaaacttgtgactaaaattaaaaaaattgtgactaattataaattattattcctatgttgtgactaaaaaatttgtggccaaaggtattataagtaaatgatatattgttagagaattggtgtgatgggaacgatgtgagaacagtgaatataacgttaagagcggttacaaattggtcatgtatgagaaagctgaaacaaaagcatagcatccaatatgtctaagactgagcactagtggctcgatctttagaaaatgaatctaaaatcaagtccttcctttggaaattttgtcataattggcttcccactaatgttactctctcctttaagggtttgaaggtcgataaaagatgtaatagatgcaattcgagaaaatccaaaaatgttgctcatgcaatttggtgttgcccttctatcattaaattttgaaagtgtgctggtctttgaaaacaactcaaaaatggtgtggaagctgatccatcacctttttgtctcgaatttaaaaggattacaagtatgattaccctctatttatggttctttcttggcaaaagtggtatgtaagaaactcttcaattcatgatggcttcaacccttctccgctagcccttatggagtggttccatgatctaattcatgactacacaaccgagagatagcccccaatctcatgtgcgtcatgatcacaattaagttatatggaattcgatatttattaatagtagtaatgttatcgaggaagatgttaggcacgaatagtatcttttaacaattctctttattttatatagatacaataggagagagagagaagaaaaggaaaggtgcggatcaccctaggtgatcatcaaccaccaaaccttataatta

SEQ ID NO: 202498 - DNA, 636 bp, Cannabis indica
ttggggcgtgaggtgcacacacaaccagggtgagttcgatttcgactacgcactttcttcaccacaaacgttaaatctttcttacatcgattttgaacaaataatgagttccttaaaaacctctcatctctttcaatggccccaaactcaaaaaaaatctaaaatttcatctttagtctggtatcacagttgttagagaagtagatttgtgatttaccaatgttgatcttttgacccgaccaaccacaatagtagtcaatacactcttgaatcactctcatattttccatgtacgctttagcaaagataagagtgtcatcgacatacattaggtgagtcactacgaggttattcagaaagacccagtgcaacaaaagccacttttaccgacgcttaagctcgcctacaaaagtatgtgtaactcgacggcaaatgaccttttgtcggcgacataatgacttgcgccggcaaaggtatttacaccggcgcatttgtttgccagtataacggactcgttggcaatacgtctgccggctgatatgtctctgacgatgttttgccgatgatgtaacgcaccggcaaaagttttggcggggattagggcatttggcgcccatttgtcgccttatttttgcc

SEQ ID NO: 202499 - DNA, 1860 bp, Cannabis indica
ttaaaaactaaaaaaaaaaaactaccccctacctgacaacttaaaagttttaggtcccgcctaggctaggattaagggtccatagacttgacggtttaatattttttattaatctttttctatgttcaaataaaagtttataggagtcttccattaaaagttagtgtatgaaaggaaatagccaaattaatttgaataatgtacaataaaaatggtgagcatggttaaaagttgagcatggggcttggcttgactgggattctggcttggcagatcatatggttcatttctatactgagttattcactaacctgggtgttcagggacacgacattattgatgatgttactagctcaattactcaagaaatgaactctaatttattggcaccggtgtcttttgaggaagtaaaagtggctctttttcaaatgcacccagacaaatctccaagttcagatcgaatgactccagaattttttcagaaatattgggaggtggtgggtacggacgtggtgaatctggttagacaatttttcagctctactacacttcctgatgatctgaacaacagacatctagtgcttattcctaagaagaaaaatcttgaagttataggtgatatgcgcccaattgcactctgtaatgttgttgcaaagttatttcaaaggtgatggctaatagactcaaggtgcttttgaatgatgttatttctgcatctcaaagtgcttttgttccaggaagattaattacgaacaatattatggtgtcatttgagatcatgcattacctcaaaaggaaaaatataggtaaggtgggacaaatggccttgaaactcgatacaagtaaggcttatgatcgtgttgaatgacctttcttggaagctttgcttttgaaaatgggttttcatgccaggtgggtgcagttgatcatggccttagtcatctcggtcaggtattggattagttctagtgggtacattttgggaccaattgttccatctcgtggtatccgacaaggcgatcatttatcaccatatctttttattatttgtgcggaaggcctatctactctcattcgcaaatatgagtctaggggttggatcaaagggtgtcaggtggctcgtggggctccttcagtctcacatatgtttttcgcagatgatagttatttgtattgtcgggctcttgaggtggaagctgaaagaattatggcacttcttatgagttttgaacaagcgtctggccaaaaggtcaatcgtcaaaagtcctcaatattctttagtaaaaatactcctatggatgttagaggtagggtgtgctcagggccggccctaggcataggcgggctaggctcgcgcctagggcccactcattctaggggcccaaataaaaaatatacctttttttaatactttttaaaaataccatttatctttatagtaagagcccaattttttttgcctatggcccattttaactcagggccagtcttgggtgtgctctattctttgggatggttgaggctggtgatgatggcttctatttgggtcttcccaacattatgaaaagagataagaatgtggtgttgggttttctcaaagaaaagatgaggaaaaaagttgagagttgggatagcaaattcctgtctcgtgccggtaaagaagttcttttgaaatcagttgccttatctcttcccaattctgcaatgagtgtcttccttatccctaaatgtatttgtgaggatctcaaaaaaatgatgcgcaagttttggtggaagtctaattctaaacaagggaatggtatacactggatgagttgggaccgtttgtgtgttccaaatgatcaaggtgggatgggattt

SEQ ID NO: 202500 - DNA, 1181 bp, Cannabis indica
tgtcagtgcgtttctctctctctatccttatcttacaggtgtacggcggctgtgccttcgtgtggttcaaacggagtggacgaagcgtgtgggtgcaccaaaaagagtcgtgcccgggaagtatcataaccccttgtgcgggccgattgacccacgctatcttaaagagcgtgaaatgcacggacgaataagatagaggtttaagcggttcgttagtcgacgtgcgagtggacttgcgcaatcactttatggcggggagttaagtttgtaaatgtttgaaaaatattagcaggcgcttcataagcgcgtgagttacattctctaagtcggtggcggtggagtgtttttaagtctccggttgagttttggtacgcgccgctaagtcggttgggggtgaggtaagctaattgttgcagattcaaagagggctttattggtttcaactttcaagattaaggcgctcgaatcggatactatctatgatccaagctttttaggctaaaatccaaaatggattttgggtttatgtccagtccaccttttaggcccacgtactccacactcctcaattcctttatcttttttttggttaatcctcaattcctttatttgtttaagcttttttatgggtgctttgtgaaaaaaaaaaaaaatgacttttttcattaaaaaatatggaaaggaaaactccatatgttattttttaaatttttttaaaagatttacggttagagttgtttttgtagtttctctagtaatttttatgtggattgttatatgaattttgattacgatttaagttgttctgtcagttgctataagagttttgtgtggaattccgtaaaaatgtaaaacaatataattttaaagtataaaaatgaaaaaatctctatacaaaatattatttttggtaaatttttttataatttacattaaaatattttttttttacatttttacagagtttaataaaaacaacacaaaaataattagaaaatcacatgattttttatttataaaatgtggttatctaaccatttttgttggtttcctttttatttataaattttaaaaataaacataacaaaataaaaattaaaaatatcactaactatatgtgcaattgcacatacaataacctagttataaaaaaatcatctaaaataatattaaaacaacat

SEQ ID NO: 202501 - DNA, 695 bp, Cannabis indica
ttggtattgacttgtattgataggttataattataatattatctttaccataaactcgactccaacctcgatcctgaccttggaccaagttcagggtccacgtctcagtccaagtttggatccggagctgggtctgggttccgagtctaaggtcagagtccgagttcaagtttggatttggtgtctaatatcagggtccagggttcgggtttagggttttgatctaatgtctgggtccaaagtccaaggttgggaccttggatttgggtcttgggttcggggctaaaattctgggttttggtcttgggtttggggtcggatgctgggtctggtacttggggtcagggtacaggtctaggtctgcatccaaggtcccaagccaggtctaggtctgaggtccagggtccaggtctaaggctcggggtcggcgccaggtccaaatttagggctagggccaggtccaggtctaggttcaaggccaagaccaggtccaggtttggggttggggtcggtgccaggtccaagttcatggccagtgtctggggctaggatccggatctgaggccagagctgggtctagagttgggtccgagtttagggcccataaaaaacaatttttcatggaattatttaggaaatgacaagcactacttaatcttttctttttattccagccaaaaaaaaaaaaaaaacaa

SEQ ID NO: 202502 - DNA, 914 bp, Cannabis indica
aatcttttctctgtttcgtgttactaaacaaaactacacaaacaaaacagtcgaagctatagtaaataaaaataaactaaacacatttttacccatggattcggatctgaatccacaaagcaccttgagccacaatcttgagtcataacactctcatgagatcgacttggcactaaaaccaaacgatggaacccaaccaatgccctactatcatgcctgaagcacctcgccaccattttgtccttgtcgactgaaactccatagccacccaatacccaagtcgacccttaacaatcatttttcaacgcctcacaaagagaacaagagggaccaaaaatagagaacatccttatcgatgctatgtaggtgttgcaaaaaaaaaaatgacgatagtaatagtaatattaatgaaatggtaacgcatgtttcaataataaaaaaaaattggcatagcaatatttactattaaaaaataaggtgcttgtccttgtgtcagaccttgtaaaggcgcacagcaaaaaagcaaaccaccttttgtccaacgtttactattttgatattcactgtgcatgatcaacaatgcacacccacttgtcataaccaagtggtacgatcccgtatggatgacgattacacctcaaattgtgtctcacctacccgacccaaagttaatattttattgtatttaccccatcagtgggtattagaatatgaaaacaactgtgatgggtccgagtcaactcgagaaagtgaatccctgcctataaatatggtaggaaccactcatgtcaggatattttgggtgaccgcattcccattctaaaaaatagtaaatacttcatagccaaagagcttaataatgttgactcatagactaagattagggtcggtggggtagcagggctcacgcctaa

SEQ ID NO: 202503 - DNA, 582 bp, Cannabis indica
tgtttttttgttgttatttttatatatttttcttataattttgtgttatttttatataaaactgtaaaagtgtaaaaaaattgaacatacatatataaaattcttttaaaaaaatagtattttatgtatttattctttataaatttgcatgggcttgggtttgggtttgagtttgttgaatatttattaatgttatatcaaaggttttttaaatattttggaggttgtgctttaattttaaaactggactttaacaaaacaaaatgcaaagtataaataatatctttcaaatattttcatgttaagattacttagtttacaaaattaagtacagtgtactaaagaaaaattaatttcattgattaagaaagttaacgaaataattatgaaaattgaaatctatgtgataatgactaatggatatataaatcaaattatctagagcatccaaaatgatactactctctaacttttatttttgttaaagaaaaaagaattggaatgtatgtgatagtatttgttaatgtttcttttctttcctcccataaataataattctaatttttaattttttgatgaaaa

SEQ ID NO: 202504 - DNA, 1319 bp, Cannabis indica
ttattgacatttgcatttgatgaagcttttgggggcacctagtttttatcaaaccgatagttgcaaactggtgtagtgtgtccaaaacgaagacaaagctgacattgtggcctattgttggtgttgggaacacgaaagaatccacgaccaccagtcttggaaacctgaggtggtctgtaagaaccatttcttgaattgctaatggccatatttgcttgcatctgcatagtcagatctgtcataacaccatgatgttcaaggcatctttcatgagagagcatgagagcttgaacctcctcaagattctgtaaatcgcttcttgcagtgattctagacacaacataatcaaaatttggtccaagaccattgagaagctgaagaataatttctttttcaagaatttgagaaccaactgctgcaagagaatcaacaatggattgaactttgacgacaaagttagagatcgacaaaccacctttacgtattgtggaaaattgactctaactgaaggagtcttgccttggattgactgacaaacttgtgttatagagcatgccagacagtaatcgaggtttggaagtttaaaacagtggcaagaattccttcagtcatgaaagaacgaagccatgagaggagtaattgatcttttcgtttccattgagcaaaggcaagatttggtgcacgagtaaccaaatttgctggtggtggattcccattgaagagaatttcatcgagttcgtgaccgattacagtaggaataacttgggatttttaagaaagaaaattagttcgatcaagtttagttgtcaaggttgattgtagggagtgagagaaaggattccagctggagttcatctggactgtaggggggatcatttgtcagaatttgaccagtaggagctccggttgcaggatcaacagaagtggatgccatggaggagaaggatcaatggcaatctgataccatgtaaaattcatagatgaattttgagaaaaagagagagaaagagacaaagatagaaacaaagaatgcgaaagttcaattatccacagaacaaatacagagtatttatagagtacaaaatactctatttacaacaatattaaaaaacaagaaaatgaaaacaactgacagaattctattatataactaacaactaataacagagtttttaatctggtttttcattaacatattgccatcctattttcaatccatttttagcttattaagtcctcctttaaaccctatataaccagagggcaggattaatacttaaaacaacagtaagtataaaaatttagcaggtcacggatgt

SEQ ID NO: 202505 - DNA, 811 bp, Cannabis indica
gcttgaatgattgttgttcttcatttatttcatttcagatatttgaccttgttgcttgcattttttgcttttattcttgatttattaacgttgaaagattttgctttcaaaattttcagctgacatatatagaagaaagaggaaagtacaacataatgaaggaatttgatgaaacaacaatttggacgagtgatcaagtacctcttatggtatcatataataaaggttttttaatctcaagctcttttctcttttgttcttattttggcttatcattctgacactgttgtgttgtttataggaaagaaacaacactcggtttgggttgtagaagtcattaattctaaccttgaagcggaaaatgctaagtttttggatgctattccttccggtgtactacagaaacaattctctttccgtagaatatggcaagggaagggtgtgcaaacagctgcttgtaaggtatcactttattttttttagattatccatattgctgttttcttgaagtgcatatgatggtactttgtaaaactttacccaaagtgtagctcaaatggtcaccaatatgatttgctccataaggtctgaggtttgaatccctccggatacccacataagattgtagggttaggtggggaggcctaatttaaaaatataatgatagtactttgtaaagattgccaagttcatttcactttttgtttaagtatcctttaaatttttgttaggttttcctcgcaactgatgacgatgcagctcctataatttgctttcttcaccaagagcaaaggaaacttttgtccgtaag

SEQ ID NO: 202506 - DNA, 1804 bp, Cannabis indica
tcacaacatttccaacagtttctaatttggttttacaaggaattatgccacaacgtacactaatacatttacgtatatgtatgctatgttgtaatagttgatgcaaggctgctttcaagataagttaccacgaacaaggatttttacggtaagtagtcaatatatttctgttatgtattcttattatctgattttacccaaattaacttttcatcagcattaattctgtccctactttcttaattattagaatttgctataaaggtgttagagagatgtagatcccagattttagaaaaagcagaagatgagttaggatggactcctcttcactatgctacaaacatgggacttacaggcatggtatacctattcttgaaagttaaaagatcagttgcttacatcaaagataaacaaggcatgacagctcttcacatcgcggcaaggaaaggatacattgaagtgatcaaggaattgatggaagaatgttcagatattggtgagattttggacaacaaagatcgaactgcacttcatattgctgctgaacacaattgtcactctgcggtacgtactttactgaatgagagaggtttcagttatcttataaatgagcaagacaatgaaggaaatacagctctacatgttgctgctattcattctcgttatggaattatgaatagtttgacaagtaataaaatgaccaacaggagaatgaccaataagatggggataactgcgtttgagattcttctcaaatcaacaacatttacgggttttataattggaaaggtacgttatgtcctctacttaagtggattcacttgtctatagacttgtaactatagtatctatctaaaactaatctacaataagacttatagatataagactaaataagatttatttaggctgtttaagcgttaatttggacaacttttctattccctttggcagtttattgttggactaaaattgtggctggccaagaataaagaccctcttctaagtttgaaagacactggatttaggatggtggaagaacatggaaaaaacgaagaaacaagtgaagaaacccaaatagaaaagacccgaattgggtggactaattaaagaaaatagtggtgtagatttacaacacatgcaaaacatgaacttggtggtgaccacactcattgcaggtatcacatttcaagcagtcataaccatgcctggtgctgcccaatacaaaactaaaaaaggccttggagctttcaaagctttcatgatagcggattctatggctttcggtttttctgcaggctctttgttaatccacttcatctttgcaatgttttccatgatctttggaaggagatttagatatcctactatggtcacaatatctttcatctttatttccttattttttttgtgtgtgcctttgtcgcttgtgcaaacgctttgttgcacgagaagacagagctaaggagtctgcttttagagactaaaataggttggatttctagtattcctggaaattatgcactcgcagcattctatctcactacattttatgtcttcatcaccctgagtaaatgtacaacttttctctcccacccaattctaggctctctctgactatgaaacctgaaagcctatcaatttaaccaatgatttgctaggctttgaaggatttccattttgatttagtcaatggaatggaataaaatgcaactcttcatctctttgggattgaaagctaatcctgtaatgataatgtgaaagtgtaaagctaagctctctaatcatactcataggtcag

SEQ ID NO: 202507 - DNA, 1343 bp, Cannabis indica
ttgatttgtatactataaattattttttttaggtgtaaagaaaacgtttcataccctacttaaaaaattatttataattgaattatcaaatctttcataatttaacgtaaaaccttacagtgatgttctattgatgcttaataataaattagtaatgctttaacataaattttatattagatacatatttaaaaaaaattaattataattttcactcccaaacttcaacatattttaaattatgcttttaaaatttttaagtcattaattttttttaaactattgagattgttagatttaatttttttttctttaattttatttatttttgctaatttatctattgtccatttatcaaattatgttccttaaatattaacatgtaccaaagcaaattataccctctgaactctattcacgttagactttcctaaagtaaaattgataagtgttcttaaatttaataatctcaatagtttgagagaaatttttaacagcttaaatttttttttttcgatcaaatatgaatagatcacgtggtacagatttcttttttactccttcgatcatattggcgatcccaaagatcacatgttagttaaagagatcttatacctcaacttatcttaaggtaattagggtaaaaattctcatcatacaactaataccacttacaagctagtctttaaataatattggtataatgtcttgtaaccataaagaaatgtatgttttaagtaattttaattcttatgaaatggaagccaatgcactcttttacagtctaatttgggcatctcaacaacagattgactcatatttattaaggtgtagcgataaactatatacgcattagctttattgtttgcaccaccatttccctttgttttgtgtacaaaattaatactattatttatttatagttttttaaactttttgggatcacatagggaacaatattttcagacacacacactactctctctctctatatatggatatagatatgtacataaaaatacttgggattcttcacatttagataacaacaaagaaataaatcaaccacgtacaaacttatgctatatatggtagaattcaactatacttttacccttgtaatttaaatccttatataatatagagatgatttccttttcttcgattgctataattcaccaaaaccagcttcaaccatatttcgtaactaatgaataagtttctctagcaaaactatcataacatacatagttaattatataataatagttccttcaaaaaagaaattacatattaacaagtattatagtactattttagatctcaactccggcaccggtaac

SEQ ID NO: 202508 - DNA, 1154 bp, Cannabis indica
tgctccaaggactcaagttattctcccaaacctcaagtttattccctaatccctctaagactgttttctattgcaataacatgagtgataataatattcaaagagtacttgatgcttcgggcttccgaaaacatgatcttcctttcaagtacttaggaataccaaccagtccaaagagaatttcaacagctaattgtagtatcttaattgaaaaaatagtggctaggataagaacttattggagtacccgtaatctatcatttgcagggagagtagttctcatcaactcagtgttaatagccattcattcatattggtgtcaactcaagaaaatgccaaaaaaagttgtgaatgaaatagaatccatctgtggtagttttttatggaatggaagtcatactctcttaggtacaatagatgttgcttggggttctgtttgtctctccaaatcggcaggaggatttgggttttaagagaatctcagattggaatttagcggctatgtttaagtatgtttgggtcattacaaaaaaagaagacaattttatgggtgaagtgggtgcataatgtgtacattaaggaggacaattggtggtcctacagggccaatccaatagccattaaagacaatacagtaggaacgtttgatgtctcctaagtgctgaatgacaggtacaaagtggctaatggtttcaatgctattcggcatattgcttgcaaagttgaatggaattcaattgtttggagctgattaaacatacccaagtatagcttcattctttggctctctatgctcaatagaatcaaaacaaaagataggttgatgcagtataaagcacttgagaattctaaatgttttctctgcaatattgaagatgaagtcgtgacacatctattttttgattgtctattctcattggactgcttggaaaagatcaaatcatggctgaattagagaatgactgccacttccctagatagaattgtaaggtggataaggaagaacaaaaataagcaaggtgaagaagtctaatttttgatgctgtcattgcagcccttgtctatgaaatatggcgcacaagaaattcaattatgtggccgaattcctatacagaatgtagttgttaaagtacaaaaacatagtgaaaaaaaaa

SEQ ID NO: 202509 - DNA, 757 bp, Cannabis indica
tttattcttctcaaaatattccttgcatatatttaaaagaatggggtaaaaaaaaatctgattcttcatgtgaaattagtttttaataaaataggtatcttttgaacttataacctaagcaatcatcaaaatccaacaacttcataggctaagaatcagtactagtgttatagttttttttgcaagaaaacaagttcgttataaaagtagtttacaatgctatattttagtgcaccttactaatttataattgtaatatgaatggatattatttttggcttaatgtgtttttatacatttatacaagctaatttaagggtcttaactttttttaatgtaaattaaaatttaattagtgataaaagagtaataaaaaaagttaagatttattgtaatctaaatttaacatttgttcatcgaagtttcgttaattaaatcaaattgtttcgatgggatgatatttcttctttcttggccaaatctgtctattcattatatgtttcgtggtattcaattttttagatgcctagccatagttagtcgtttgattatttttttttatttcatatgtaaataatggagttgttatgtctcaatttttattagaagattattggcccataaattgattctcacatgttcatttagtttggaaaccaagtattcttcacacattttttatgcttgatcgccaaaggcttattaaatctttaattgaggttgatgctagggttttttctttccttttattgtaaac

SEQ ID NO: 202510 - DNA, 875 bp, Cannabis indica
tctgatgggaactgagatttaacaaaataccaattttctacattctacattttctcttggtgtatagccaacaatactacagcaaaaatcccttttaatatctcttaacactacaataaaaatgaccttttgcttcagtttttaagtgatatataaattttttgtctcagttggtgtaaccgatgcaatatctatagacgcaaatactgttgtcgaaaaaagatgaaagtcgcaatttaattatctacaaaatttacattaaaattagtcacttgtcataattttcaaaataaatgaagtgagaacattctcttataataacatgatacctcaagaagattcaagcccataacaacagctataaacctaattggtaaccattactcgtctagctgatctgctccaaaggcttgcaaagatgagttgtaaccaccttggcatagagaaataaaacaaagtgaaagaataaaaaggttgtagatcttgtttggttaacagcaaaccagacctatatatatagaagctgatgttgtcaatgccactagcccttagaggaaatataataagatttatgaattttaaaagtacaaagtaagtgttaaaatgtaaattatgaactcattaaaaataaaataaaaacaatcatgcttaaaaatacgaacttaatgattcaattataatcataacaccataaagaaacaacacaagcaaatatagtagttcttatttccttggtttatgataacatcatgcaatacattatagaaaattagacaaaaagtttctaataaatctctttcaaaagactgaacaaatgagagaaaatggtaaaacatatcatgtcaagctatatcttgattaaaagaaacaaaatt

SEQ ID NO: 202511 - DNA, 584 bp, Cannabis indica
aaaaaaaaaaactctttaattaagaggaaattgaagtatgagattatagtttcatatatacttttagggctattattgaactcagaacttggtcggaaaagaattgggttggatcagacatgattatatatggttatggtgaaaataattatgtgtttggttttaaaatagattgaactatttaagaaaacaaaattatctgtcaactctcccttttctgagtcaacaacagttccaattcttgttaatcaacaatcaatgatcacaaaagccaaaaatagtattagaaaaccaaaatcagctcttgataatcaacaatcaatgattacaagagccaaaaatagtgttagaaagccaaaaacattcatgatagctctactgcctaccaaaatctcagaagctttggttgatgcaaaatgaaactctaccatgaatgaaaaaatgggtgtcttgaaaagaaacaagacttacattattgttcctcttcctgaaggcagaactctaattgggtgtaaataggtgtacaaaatcaaagagaatcaagatggatttgttgacaagtgtaaagctagacttgtggccaa

SEQ ID NO: 202512 - DNA, 530 bp, Cannabis indica
tgcagcatgcactgatgaagttgtatgtttgttttctttggtgtttttatgattacatctataatttatgcctgtattttgttttgtacaggaggacactgctaggcccggtggtgcaccaggccaggctggacaacgcccagcaggaggagccccagccgctgctcgcagttgaacaaagtaacatgcattgttctttttccttgagcatcttcaagttcgaggctttagttattggatgttaccttaaaagtcttttttggtttcctttttattgaaagcttcttttttggtttcctaattcagttcgctatgagacttcagtgtattagtgtcttgtggatttttgctagcgttcttgttattggttaatgaatttaaattacaatttacaagttaattcaagaaattttccgtgccaatcttactcttcctcgtatgtttttgtaagtggttattttgtatttgatagtaccgaatctatcgaattgactagtaatgataaagaaggtatattatttcgtatattt

SEQ ID NO: 202513 - DNA, 564 bp, Cannabis indica
ttaataaatttttacatttaattatttttaatagaatttttacacacttttaatgttttatatttttacacttttttattaaaaaggttaattttgctcctaatacattgtacaactattataaaatttgagtcaaatataattttaacttattttttgaattaaatttaacataaattatacaccaggagatagatataaaattctatagtgtaaaaactaggagatttggctgctagaaaaataaaatagtaaagtggtttcttagaagaaatgactcaagataatacgtcaacaattgtattgaacaaaataagtatatatgaatattttttaaataagatatagctgctatgaactgattaatttaactattattagtcaattatacatatatgtaagaatagttttgagaccaaattaattataaatttaattgagaagtcaaaactgaatagatgtattggcacaaatcaaaaatttacacccaaaagtatcaacttgtaacacaaccataatatttaaaactccctaacaagtactattattggaaaaatatataaa

SEQ ID NO: 202514 - DNA, 2914 bp, Cannabis indica
agtgaatagtttcaactgtattgggtagtcagaagttagttatttgctgacatcatatcagcttctttatcttcttgtaacaactttctgttgtaacctttactgtattaattccatcatatataaataatactcagtgagtcttagctgtaagtaagctaactcacttttcaccacatctcatctttccaacttggtatcggagcctctggttcattttttttcctttcttcttctccttctctctcgagctttcatccatggcgtccacatcaaactctgctcctagagctgctggttctacatctgctactggcatcaccgacgctgcttctcaggtcataccaaaccagatcgttcccctgaatctctgacttgatcgatccaactacttctactggagatcacaagttctctcaacagtccgtgctcatcaactcgaaggttttctcactggtgctagagcacggcctccagcaaatgttccaaatcccacagatgcttcaagattcatccccaacctagatcttgcagactcgatgcgtctagatcagttcttgatgagctggctcttcaactccatctctgaagctatgttaggacatgttgcaagatgtgcttcttcctctgaactatggaatgttctaatccagctctaatcaatctcgagccagagtcttgcaactctgtggaatgcttcagacgaagaaaggttctacacctgtggatgaatacatcctaatcaagacaccactaccacctctgttcagtttggatctttagatacctctgcagcctcatcatcctccaatatgccgttaccaactccccaaccatccttatctccaagtcccaccacttctcaaacaattcccacaaacaacaacttttccaactccactgctgacacaaccgaaatcacaacacctgctgttgaaataccacatgttcccccacccattccccaaggccaccacatgcaaactaggtcaaaatctgggatctataaacccaaagtttaccttgtcactgcctcacaaaatccagattttgctattccaaaaactgttaaacaggccttacaatcacctgagtcgagactagccatggatcatgagttctatgctttaaaacggaagaaaacttggactcttattcttcctacaccagacatgaacattctcaccaacaaatgggtgtatcggataaagtttaataaggatggaagtgtggagaaactcaaagcgaggcttgtagctaggggtttttaacaacatcctggtttggacttcaaaggcacattcagtccagtcataaagccatgcacaataagagtgatgtttgctttagctgtcacttttggttgggaaatacaacaaattgatgtaaacaacgccttcctaaatggcgaattgcaggaggatgtctatatggtgcaacctgttggctatgaggatgagacaaagccaaatcatgtatgcaaacttcacaaatcgctttatggactgagacaggcactccgtgcgtggtttgataagctaaagcttgccttagttaactggggctttcaacagtccctctctgatacatctcttttctatactgagaaaaatggctctgcactattagttttgatctatgttgatgaccttctaataactgggggaagtgcaatagccatcacaaatctcatcaaggacttacataccaatttttcactcaaatctcttggacctgtcagttatttccttggatttgaggcctatcgaaatgcttctagtttatatcttacacagtccaagtacgcctcagacttacttgcaaaaattggttttgaaaatgccgaaccatgtgacacacccatgattttgtccaacaaacttgcagcacttgatagttcctcttttgatcaacccgaactatatcgcagcaccataggcgccctccaatacctgacttttacaagaccagacttggcttactgtgttaataaactcagtcagtatttaaaagccccaacagtgaaccattagaatgcttgtaagcgagttctcaggtatatcaaaggcactccacaccttggcttacattttaaagcagctgctgttttggaccttcaagctttctctgatgccgattgggcatctagtttagatgatagaaaatctactagaggtttctgcatgtttttgggaagtaacttggtcaattggagttcaagaaaacaaagagcaatagctcgctcaagcaccgaatccgagtacagggctcttgcctcagctgcaactgagtcagtctggataagctccttgctcaaggaacttaacatcaaattacataagaatccaccagtgctatggtgtgacaatcaaagtgctcaagccctcgctcaaaatcctgtatttcactctcgtacaaaacacatcgaaattgatgttcattatattcgagatcaaatagcagctgccaaactcgaagtgtgttacattttcactgaagaccaaactgccgacatcttcacaaaacccttgtcttcaccaaggtttcagtttctttgtacactaagtatagcttgagggagggggggggggggggggtggttagtgaatagtttcaactgtattgagtagttagaagttagttatttgctgacatcgtatcaacttctttatcttcttgtaacaactttctgttgtaacctttattaattttatcatatataaataatactcagtgaatcttagctgtaagtaagctaactcacttttcaccgcatctcatctttccaactaaaaaaaactatgtattgaagatttctatagtaacatagtaattaaacttcaaaattagttttttttacttttatgaaatccacataaaacccgttgctatcggagcaatctaaatcgcaact

SEQ ID NO: 202515 - DNA, 520 bp, Cannabis indica
tttgagaatttgaagaagaatatcactgctactgctactactgcaggtaataaatgtgtccaaattagtactagtaattataattagtattattgtatattgacttttatttgtggtaggaaatttgagagtggagtctccattaataatgaagccttgttgtgtgggaataagcaaagagtattcgtgtgggagtttggatgaaaatggggcaaagaagtatagtgtatgcaagaatcctgagctatcttttttttgggacatgattcacccttctcaaaatggttggtctgcagttttttctggactcagatcttctcttcataatttaataattaattagtgaaaataatcattattatatatataaatgcaagaagtagtcttaatgcagacgacacgtgtactgcaccctatttctagaaaactaattctagtatggtgttatggaaagaaaagagcttcaaattaaggacctcaaattgtaataacttcattaagtcaaaatcctatatactca

SEQ ID NO: 202516 - DNA, 768 bp, Cannabis indica
ttttttttttttttggactttagggttgaagtggtgatggtggtggttggtattgtgtactatttttttttaggtgatttgcagaagagaatgagagtactgagaaagaagttttagactttagtgagaagtgaaagaagaaaggaaaaagtgaaagaaaaaaaggaaataatattttaaaatttattataatttatttgtttatatttttaattatttttttatttcgtaaattttttatacttaaataattaatcttatgtgcactgttaaaagtttcacatgtgtaagtttttgtacatattatcgtccacatagcccttaacagctgatatgaatacatatttgggttacaacgtaggaggatttgacaatcaaacgaatgagaggtaacaaaatagtagaaagcaaaacagaatgtgggttcaaagttttaccgctaattaaaaattagatttgtgggattaagtgtacctaaatgtgtaatttaggtggtttagccgctaaaatccttttataccttttattttttcaatatattactttaacttctctttcaaaatatatatacatatatatttgtatgtatatgagttttggcgaccctcacaactatcgttgcacttaatccttcaagtttaatttttatcagtaaaactttccaaactataaattattaataaattaagtgacattcgattaacggtcactatgaacagcttatgtgaaaaccttggtatacacaggttaatattgatatacacctta

SEQ ID NO: 202517 - DNA, 687 bp, Cannabis indica
acatattttcaaaagaaaaaaaatatttatactcatccacgttttctacaaaaatatttatatatactcatccttcccaactactagatctacattaaatatataatgataaattttaataaaaaaacattttctaatcaaaattttaattatatgctaaatttaagaaaaaaaccactatatctacattaaagtaaaataaataaataattttaaattatagcataagtatagatatattaagttttccacattgttctacacttttttttttaaaaaaaaaaaatacaaaaaattatttcttcttcctaaaataaataaatactttagaaaaaaaataacaaataattttttaagaaaatcacaaatcatacgtgtatatataacaatgatatatgagtttttttcacaatattctacatttttaaaaatatatatatatgtattttataaaataatatctacaactaccattactttgtttctcaatatctttatataaagttcaatattattctattcgagaagaaaaaataacaaaaatatagctcccttcatattatttcttttcaattcttttcaaatatttgtattttctaattttgatcatcttattctaatttattcattcatattactttactagcaaaaaaattacgtgcgaggcacgtatactaaattttatgc

SEQ ID NO: 202518 - DNA, 1372 bp, Cannabis indica
ggcgttacaataaaagtttctgattatcatggtaccatatccccaagatcaccatacatacatatattaaatctaaaagtaaaatagatgaaaagatagtttacctctcaaagcctattagggtatcctcgagtctttttcgtatgttgtattcttggaacagtttcatcaaactcacacattattcttccatatcttccatcacacacaagaactagtgtgcactagtaggataaaatgtatatgaagttcttgttggattctcaacacatgagcaagaataatttagagtgtttgagagaaaagactaaatcaaattaatccttttaggctttttaaaaagttatgctaaaattcttgtcccttaatttggtttacccggtatattaaattaacctaataaaaattttatttaattaattatttaaattcaaatcttcttattaaatcatatatagcaatttgagtaaataatacaaccaaattctagggtcggcgctggggttgggcccatggtctatgtttgtggtcgaggttctcttctgagcccgggtataagtcagggtcgagttcagagtccggagctagggtcaggatcaactttatggtaaagatagtataatttttacatatcctattaatacaagtcaataccaaagtattatattaaataacacagtacaatgttccaaacaaattccgaatctgtattttataggttttgaatttggtatgagaattacggtatttcatatttgtggaaattaaattacactcatatttataattaacgtgctgagctgtaaattatataatattcacttattcttactttattctattaattattattattattattattattattattattattattacctatgtggtatggaaatagaatcacaatagctgctagaattgacaatttttaactgaaagtggattattgtaacattcagatttcaatagcacaaaatgttgtaaaatacaagcgaattcagtctatttgctttgcactcaagtgaattcctgtccatccacagcacaatgccccttcccgccaatctaatcatattacacagttaagagtctcagtcttctgggacttgggaatgtcaaccttcatcttcccagttccagctgagctttcttgcaagttgttaatgcagctaacaaaagttggccatcactaacatctcggcgatggctgctatcgattccagcatcagcatggacacagcaaacaatgtgcttgtgcttctgcctgtctgcagccacaatctttcttttcctgcacttgcattgacaaattaactattaacatcacctggaccacccctattctttcgagtttcacgtctttact

SEQ ID NO: 202519 - DNA, 1230 bp, Cannabis indica
ggaacaatctcagcccatatgatgtaaaagtgagatttttcgaattagatagaaaaattaaacataaaaactcaatttttttctaattttacccattcatgggtaaatacccattaaaagtgcactcgtatatatttatataaacttggattcaattagtatgataagaaacaacagtaatcaaggcctacagttcaaatgtaaggggcactgctttactttatgataagaacattcatttctaaaattacatcaaatacatgcatgtgccccccacacccaacaaaaaattaaggatagctctgtcaaggtaacatgaactatggatccattttttcagatgctgattaaggcatatcttcaaatgtattggtgcccattctaatcatgattttgttaatacaaaaaaaactcgtgttaattttaaacagatatggtcgcattttggagagcgatgatttttactgaagactgacaaaatgggtcaaaaagaatatattccatgagtgaactgaaagacagagtagcttgatgagatcagagtagaaggatacacatgtctttggggttagatatatggttagcaaggacacatcaaactccgagcaaaaaacaaaaagaacacatcaaacattttagatgttacaactgcatgtaagttaagtgcacggatgttacctttgaatatataatataagcggcttaaatacccattgattgaacagtaaagaaggaagatggtacttacaagcttaccaagtttgaaagaagaccaatctgatcactgatagaccctttcaagccttgactcccaaggtctctgaaaaatatttgacaacaaaaattccgaattactggttaaggttgaaaaattaaagccttagtaaaggaataatatcttaaaggaaaaagaaaaaaaaacacaagatgaagctgtagaaaaaaaaaaaaaaaaaactaactattaaataattaagttcccaaaggtaacgttcctttattgctattgtgtatagtttcatcgatgatctaaaaacaacataaagtttttttcactttgtgtctatgctggctgctgaacagttatgaattggaatgttgtctccataagaaagatttagaaggcctttaaatggactataagtccaacttactggctgttataaacccaaagaaagtgaagatgataagtagatagcttacatttgaaatatgacgagggcagttcca

SEQ ID NO: 202520 - DNA, 1017 bp, Cannabis indica
caggcatcactaggcgtcagtgtgcaagcacactaggcgcccatattgttgacattcgcctggggctcgttgttttgtcattcaaacaacattttggctctaggcatcagtcttatttttccctaaaaataagatttggatgcttctggaagttaatatctcatgtacatgtgacgcgcaagtccactgacacccatgtgcactagtgatcacccgagtgtcacctatgcgtcactaagggatcactggaaatcactcgtgcatatcgagtaaacttgctaagagaatttccccaaggtcaaagaatgaactaaggatatctatcacgttattcaagaatctaaaaaatatgcctaaggcccaagaaactgaaatctgggcgcccaggttgacgtttatgccaacttgggctcctaaaagctaggccaatctcaaagtcacttttcaatagtgcacaccgctttgctaaatattcataattgtctcaatttttatccaaataagactattcaagtaaaaaattaaagctcttttcaagacgcatctaagtgtgtctcaacccctgtcacaattttaaagtttcaaacctcaaaatttgctcgcgaaatagtgcaggatatctcaacgaattttgtgtgatttttttattattttattgtaatttaattggatctaatttcctataaaaagaaagctcacctagcttatttttcacactatacataccgttctagaatatcagagcttctctctctataaattgtgaagtgaagctagagttagtcattttttcctgcgttctcttgtaagaaaattgattttttgtgataatagaagttttaggtagacgtagtttcattactttcgtgataagagaagtggattactgtttatgttcataccttcgttggctgcttatcagacagtagcgtcaacaatatttagttatatagtgacatgagaaattcttctatgattgtactagtggttttttttttcctttaaagatgatgtaat

SEQ ID NO: 202521 - DNA, 2195 bp, Cannabis indica
atgtgtacaagtggtataaaatggtccctactatccaattgctacacgcacaggcataatgctacctacgggaccatctagtcaactttacattacatttaatttaccctagtagtgggatttaaagaaaaatctttagcgagtcatgggtctgtccatacctgccacctaacctataaatatccctttattttcatgcaaaggggtcaagccaacaaaacacatatctaaaattttgttgagattacccttgatctttttcttcttcgaaaaagaaattaagggtaaagagttagagttatttcctgttaaatagtgtaaacatatcaatatcgcccttagagacaaatagactaactcgtgactaaggtttattaatacctgaaccacgtaaaaaatcttcctctcttaatttctacatattattatttctttagctcctaaatatcttgtttctaaaaattttggtaaatattttggtgattttattgagagctgaagaaagacgtagatccctgctactgccatggtgttcacacgaaagatgcttctcaaaaagaccctttggtaatggaggaagtaatttccctcttttcggagcacacctagccgagtgatgcgagatgtggaggtacgtctaacgtgaatgatcaagaagaggacctagacaaactagcatgaccatgttggtgacgataaggatactgagaaccatgaagaggaagaaaacgaagataattatgtcaaggatggatattacaaagacaattatcactatgatcacgatcctgaggtggtccaagtgttcaatgagctacttgaaactaaacaaaagttagcccgtcaagagaagtttactcataagatggaaaaaatgatggatcgccttcgagataagtttggagatctagatgacgaagattttgatgatgacccttcgctagagtacatcggaggaaataccaaggaaaaccccgctaacgctagaacctttgctccggtacaggataagggaaaggcaaaagtgggtgaccctaagaaattctcgtgcccctaaacctccttggaaaaatacgaatcaacccaacatgctttctcaagtgtagaagacggccagtgcctccaggcttggacgtccttctacccagaaaggcactgtaatgcctaagggagctggtactaaaataccaaaaccaaaaggaaagagagaccgccttagtgatttgttaagccaggacggtggggtagaacgacagtattttgatgatagttagtccaccgtggacctcagaaggcgtttagacgcaaaatatgaaaaagctaaaattgagaaggcgaggccatgtggtaacgaccttaggatccacttgaatgacaaggttcgtggaagagatctcctggacagtgatccaaagaggttggaagaatagatagctgcattgactaagttggtctgaaagtaaagtgggacccttactgattaagaagatgaagacctagagccttgtgtttggaaattcacagaagcttcactcctggagaactttaaaatgccttcaatagagttgtatgatgggcacacagatccaaagactcactaggccgaatataataagataatgcaagtgcccaaggtaagcaatgacgctaagtgtttatgcttttccttgaccctcacttagtctgttaaggattggtggaaaaggttagctcccagatcaatctactcttggaaggatttggaaagcttgaaaagtttcattcaacggatgatggaagcgaaaaccaagaccaaagtgaccgacgacatgaaactcgtggccctatagtccaaacttgcagtaggttctctgttgggggggggggcaagatgcaaaggagaactgagacattttctgagtttatggctaaggcacaaggctttattagcttggaggaggcctatcaacaggtgttcgaggtcctttcggcactagcccctgtaacctccattctcaaattttcctcgtttcgcttctattcctaaaacatattgtatactcgcacgatttacgggccctcctcatcggtgctcacacctactcaaaaccatttctctaggtacggagcaacacaaactagatgaagtgtggctctcagacaatcgaaaatgaaagctcccaagcagtacatgagtcaatcccgaagcagagagt

SEQ ID NO: 202522 - DNA, 674 bp, Cannabis indica
caagaacttgattacaaagctctagcaccattctctcattcactctctctccctccgattctctctctcaaagtagtgaaaaagaaagatatttataggcatagtttacaactgaaaataggagcaaggaacgtctcctaatgcccgaagtaattaactttcagagttagttaaaattagttaagttagttgtaggctagtttagagtatcaacttccacaaattctaccttgattctcaaaagtagactacatgctcccttttcacataagccttgatgatgttattctcaagaatttcagcaagtaccaatattcaacaagctaagacaatgtatcaacttgctgaaagtgagaacctttgctctcatgtctgcagggttatcacttgtgtgaaccttttacaaatctaaccctgtgtttactcttctcatggtatacaagattcttacacaagtgaattaatgaaagaatatcagaatacactgttcccttgtccttgagcagctataattattgtaggattccctgtagccagattgcttctttgaaagcctcagtggtggccatgaattctaattttgttgttgaaagtgccaccacttgttgctgttgagatttccaacagatgcaactcttattgatcatgaacacacatgatgttgggattttatg

SEQ ID NO: 202523 - DNA, 635 bp, Cannabis indica
ataaaaaataaaaaaaaaaaaaaaacctaagacccaattgaaacacaacaaaaaaacgaagaacccccccaaacatcatatcactacataaagcattgataattagaaccatgtagtttcttttctggtcatgtcatgtgatcaaacataacaacttacaaaagaactgaagaacaaaaaagacatttacccggatttgaagagagaagaatgagagctgaagcagccagaggaagagacttgtgaaaaagtgagggagatgaagaatcatccgtagaagaaacaagagtgagtggcgtttttctagttttagaagtgttagtatggaaagtgttgagtgggttttgtggagagggggcaaagtgaaaggaaggaagtgagagagcgaagactgaagaggagcccatgattaattggtcttgcttgcttcctcctctcccttccactttaccactccaattttggtatggataaactgcttgtgctattcttttaataacatttatatatttaaaataaataaaatgctatgggatttttattttgtaggcgttagcttagcccaaacacaagtttatttacacaactagccactaggcaacgcgcggggtaattgtttaaaaactttttattta

SEQ ID NO: 202524 - DNA, 1509 bp, Cannabis indica
gcgagtttgtgtctggacatgcacgtcttttttcatcttaagcttggcctccttggcctccaacttcttccaatgaacactagtagagccctttaacccttgcatgagtgaggctaaccatcaacatggcctaaaattaaaagaaaaactggttagaaacaaaacaaacctagccgaccaaaggagtttactggctggccgaccccttagtggtgcagcgttagccaaccaaaactcactataggccagacatcccctgtcaactcaacattttgagtaaaatcaaatatacaacttatagaggagatgtccctgagggcattggatgtcaagcactccaactcctcgtcctctagctctaggagctacccatcaacgctaggtaaagtcctaccaatatagttctgagcggcctcaacaatcctttactagttgatgaacaagctccccgaccagacctctgagcccctttgcccaaaggtctacgtggaggtggatttctccttgaaggggggtccatactcactggctgattaggttgagcaggcctaaaggagggggaggcagtggagatcgagtggcatcggaagatctggtagtccaggccaccttgacctaaggatgacccaaagaagcaccaccataaggctctgctcctaaatccctcatcctagaagccatgtctgcaaaaaataaaataacaaagtctgaatacaagttatcagtattgaatgtaagaaaaagtaaaaaattggtactatcaactaccatctaagagacaatcatcctcgaaggaggaatcatctgtaccactatcattgacagttgccttgcctttgcctctagaggcaggtgatgggtgagcaggccttacaaaaccttggcctctaggcctaatcaacaaagaggcatcaccagtagtacctccgcgtgccaaacgttgtcaaaaggcactatccctcttgtccatggtcttggcaagcttctagaggggaacgtcatcatctgacttaggtgcataccttcccccaagcaagcctcctctatcactagggtatcatttgggcctctaaaggggcccgtagctccctcaacaccaaacacaggagggtataaaccatacctccgaatgttggcctcacaagccaacctgagtacgaaccttctctcgacagggatggacaagatatgattggctctatccctcagctgaagagtaggaatagagcgagtgtaagtcgacaccctttgaaatcgctgattgacttgctggatgtcccatgcaatgaagtaattctaagaataccgtccaatcttcgacaaagcattgttattggtgctacccagccactggtagcccagctggctaaaatagaagtatccagactggccttgcctcagaacagacttaaaatcaaagaaactatccaatctcatagagtaagggctgatgtcaacccgaactctgtataaacgcacaaacaatgaatgaaacatcttatgcccttc

SEQ ID NO: 202525 - DNA, 1419 bp, Cannabis indica
attaaacttagatatttatttacgagagttgtatttatgccgcaaattactctttttattattaataaaatatgtgaagggatatcttaatgtatcacgtatcatgtggcatgctattgatttaacaaaaaaaatgtagcatgctattattattacaatttagtattaaatttgacgtattttaatttgataaatatataatatagaaaacagctaataacaaatacaacgcactatatatcgatatacaatattatatgagacgttggataccttaaggtgcctaagtgcatctctagtggggacatctaaaaggagtcgcaaaacgtattattgtatcgtattcgtctcatgttttattaatttaatctgcttttatatatttcgtgttaagcgtgttgattcgtttttcacctgagtttaattttttcaactctaatacgagtcgtaaaaaattatatcgtgtttgtgataacttattttaattcattttgccattagtgaaactggagttgaaaatgataaatttagtattcattagaaaaattatgaatatttatttatatataatttttttatatgtatatataataaaaatttaaaattttaatatattttcaatttatgtttaaaaataaatctaaaatttgttaacaattgaataattaaatatatatattttttataattatattattattaattataataacaaccaataaaattaagaattgttttcgaaaagtatatatttattgagttggtcccaatactaaattttggcatcaattcaactattgagatgcaaagcttacttctcttttttccatctcatctcattttaattatatataacaaatacttgttgtggcatcatatgcaatgacaatttacaaaaaaaaaaaaaaaaaaaacaaaaaaaaaaagatagtcaacagtagcattaattaaaaaagtgaagaaccccacaataactgggtttgatttttgttagacgagatcgacctctcaatacagcttcttctacccaaaaaatctctctatatttataaatatgtcctggaaaatataatggtatggctaaaaaaatattattcgttctcagtgtcatactgttagtagtataattaaatattaaattttatttaatttaaaaaatagatttaaaaatatcgtcaactaattatgaaaattatttataaaaaatactaagcattactgatacttaatagcaatattttattatcaaatacacaatgtactaataagtattactaataagcatttgatgatgaatatccataaatgaatggtcaagatcaatgagttggcaaatcacatgcacgctttcaaattgtatgggtttgtgggtacgttgcaaatgacgtttgaactgatcacatcattctctaatcacca

SEQ ID NO: 202526 - DNA, 1442 bp, Cannabis indica
tttattcttaataataattagttgcccatgcggctatgccctaaatttattttcttgctaagtaaaagaattattatatatacgtgcttacaaactggattaatggaagaagatcatttatagagagtctacatcgaatacaagttgcaaatagttgacaatccacaatattacttgatctatggaatgtttcttttttgaaatatctgcaagatttttttggtgaatccagtatattctccaggtattataattaatcatatatatatatatatatatatgagtatatactcaattgttggctattctattaattaatattttatccataatattctttgaaaaaaaaaatgtacaaacataccaatttgaaataaatatatatttgaatagaaatatacctaaatgtgtcatattactaaactattacaaaattaacctttagaggtaattatttggtaataactaataattaagaaaaaagttaaatcatcgatataatgagaatcgttggtagacgacatatgtcatcagttatttagtaataactactgtcatacatcattggcagacgcccgtcatgatatggcatttgttaccaaataattggtgccataagattttataaccttgattgaagattcatttcttcatcttcctcatttttcatcccagatcgaaaccctggaaaccatcaatgtccaccacttaaatagtcgaggtttagtcattttagggcctttttactcatttttttaaaaaaaaaaaatctcatttttagtacctaaacactacatattgttagtattatactacaaaaaactgctacttttagtaaaaattttttagtcacaacataatttttttgtgaatagtcacaacaaaatgttacttgtgactaaaatatagtatttagttacaagttgtcactaatttagttttagtcacaataagtattgtgactaaaatacatttagtcacaacaaattgtaatttttgtgactaatacatttagccacggacctttagtcacaacataggaataataatttataattagtcacaattttttagcttttagtcacagttttgttgtgactaaaagtaagattttttgtagtggattagatcttttttttttagtattttagtgtaaaagggagctttgaggtagtggttgtggtagttgtagctccggcggccgatattagaagagaagacattgaatctcaacgtctatattaagatgaaaatctaatctttaatagtttatattaaggtacattgcattattttttattttgtaaatttttatggctttaacttgtggaaggttgtgagttctttgggatgcggtggtgtggtcggatttgtggtcggtattggtggctgaattttagtaataagataaacatatagtctttaatagttttgttataatt

SEQ ID NO: 202527 - DNA, 1406 bp, Cannabis indica
cgaaaataaaattcaaatagtcttttgcacgtatgacttttattctaaactactagcactgctttctatattataaattattctgaatttcttaaaattttaaaagatatcttagataactataatgtacatgactatgaacatagattagattaaattttatttctagatatcgaaatagatagagggtgtattggtagatcccttttaagggtgccttgtggaaacaccttataatttttacctaactattttatattggaaaattcttcaatgcatatgtctaaaaccggtacactgatgtaaccctatttgtttcaacattcgagagacttttttagcctaattttttttcatatacatgtatactatacttatttaacatatcctacaaaattttgagaaaaataatttaacacgctgaaaataaagttcaaactatttgtttcacgcgtgatacttttattttatacgtgtgtaaaatagtcctttttgaatagtgcattctatattgtaaattattctaaattttttaaagttttgcaggatatcttaaataactttaatatacatgactatgaaaataaatttgaataaaactttttttttctagaaattgaaaaatataagggtgcaccggtgcacccattttggaagggtgcattgtaagagcaccgattattctttatattaaaataaattaaaggaaaattttacagtgcaacccttaaaaaggatgcactgttgtacccctatctgttttgttctctgaaataattttttcgtcaattgttttctcatggtcatgtgtgttatagttatttaagacattctgtaaaaaatttagaaattcagtaaaatttaacatattgaaaacagagttcaaacagagtgttgtactcatgattattttattttctacgcgtgtgaaatacattgtttgaaccatgctttctatattgtaaattattccgaatttttcaaattttgtaagatgtcttaaataactggaatgcacacaaatatatataaaaaaaaacttaactaaaaaattacttctaaaatgaccgaaaacaaagaagatgcatccgtgcatcccgttttaagggggtgcattgtagaagcaaccctaaaataaatttaaaccatattaaatatcaagtgtttctataatgcaccctactaaaataggtgtactgatgcaactcttaatattttttagggtgattctacaatgccattaaaagggatgtactgatgtacccttgatttgtttcagcatccagaagaacttttagtctaattttttttcatattcatgtacgttataactatttaagataacctacaaaattttgagaaattcagaataatttacaatatagaaaataatgttcaaacagtct

SEQ ID NO: 202528 - DNA, 944 bp, Cannabis indica
atcatttttacgtgtaatacttatgattttacagtttaatttaatgtgtgaatcatgtaacttaaatttaaactacaaatatgagggtatttttcacatatctcagtatgttgtttggttgaataaccgacagagtaagccatcaatcatagttggacataccaattaatttgtatatatgacaaggactataaccaaatatcaatcggttggtctgatccctgaccaccctacttaattgaagaaacactacctgatcaatggtatacccatacatccaattaatttctgtagatcttgatgaactctaaaaattcacacgtggctattgatatttttgatcgataatatataaaaaaaatgttgtaaacaaataactattaaatttatttatttatttatttatttttttgagaaaatgtctgttattataaatcattatctagctgtaatgcctgtctagctaaaccatgagcggtttggttagcgtctctcttaacatgagaaacacaaacattagagaaagaggataataaaaagttacatcagaaatcaaatcaaaaaaacccaaattttgtgaaatgcatccattcaaagcattaacaatcattaggcaatcagtttccacatagtcaacaggaatttgatattgctttgcccacgagagaccaacaaacattgctttaacctccatttcctgtgacttaaaattgcctactgctgatttagacattgctcccacaatttggccagccgaattccgaacaataacaccagttccaattttgctcctcgaagaatccaaagttgcatctacatttaacttgaatttgttctctggaggaggctgccatttgataattagtagtggactggtgcataaaccagttactggtgttgaaattgttggttttgcagcaaaattgacacactgaaattgttgt

SEQ ID NO: 202529 - DNA, 1443 bp, Cannabis indica
aactaacaaattcactaatcaatgcattgaggcaagtttctcacgatggattcttcaacagtttactctacgctctttagaagatggctctccaatgcctgtgaaccaaccaatattacaagaatggattttagttggcgaagatgatggcgaagatgatcttgagtttaatggtttcatagcctcgttgcaagacattaagattaagtgggaaggggaagagtgatttctagattcaagttaatgacccgtaatggcagacagacgaagatggagacccctgaaaaatgaacggtagttactaatttcctctgtcaattcgaagtatctttgaaatattccaccctcctcttcgattattggaattcggtgaacatagtccattgctccttcagcaaactccacctaactcaaactttcaccaaaaatcatccaaccatggcgtagaggactaagcactccaccttcattatttctatacagaaccttatggtagggccatggatatagaacattcacatccatttggtcttctttaggtattggaatgtcttctcttttacagtataacctatacagctctggcaaaacccacatatttccatcttttcatgtgtccctatcgaagcgagatacctcttcaccatgtcttaaaataaccacatctttacttatacttctatttttcaggaaaggctgcaaacaaattacatttgtagcttatgtcaaaataataaaaaaaaaattacatttatagtttattaagaaaattggataatttataaagaaaaaacagaggatatacctcgcatgaagaaccgtccccccctccttccccttccctttccccttctccttccccttctccttctcctccttcattttcactgttgtcttctgattcctcatctaatggaggaggatccgtcccatctattaccaaatatagatatatccatttgtataaaacaaaaatatattattaccaaatatataaattcttagagcaaccacacttaagtaaacatagttcaccacacacccgcacaaaattccctcacacctattgaaaaaataggataacttacaaagaaatataaaattcagtcactagctagtgagaatttaaacataccagtgccttgagcagggagcacagcttcacaacacactatgcaatcctgaaacaatcacgaaagaaaaataaaaaaaaaaacttattctgtagaaacaatcacaatgtttagctagcaaggaaatttctattttcatcaacttgtcttggatgactttttgcaactcttatctactaaaactagtgaatcttactactactgcactaatttgcaattgaaggattattggacacttctctcctgttatagttttgatctaccgaaagcaaattccaatagttaatagtgactgaccagtgacttctat

SEQ ID NO: 202530 - DNA, 2142 bp, Cannabis indica
ttttgtccgtacaaaaacttcccccaagtcacaatagattttaaatttgtagatttggaggaattagaatattctttttttttttttgagtaatttaaaagtatgttcaaagaaaacaatagaataataaaattcgaatattttattaaaagtgaagaaagacagatttttctctttttagggtcaaaaagataaatatttactgagttatctttctaactttaaaacgagcattattgtgtctttcaaaaaaaaaaaaaaaacaagaaatgctgtgtgtaaaaatatcttctccctcaaattttatcaagaactttttatttatctatgtacatggtaattctttattttattatctatattttttcaccaaatattacatagatttgcaaaataataataataataataaaaaactacaggaagtggaaaaaatgggtcaagtaaattctaaatattcttttaataacaaataaaatgtaaattaatttaatattgtttacaaaatttaaaatatatctatatttaataaatgtagcttttttaaaatattacaactcaaatttaaattcactatacattatacatatttatcttatcttctatttattatattaaatgtgatcatataacataaattatttttttaatataataatccaaatttaaatttattgcacatatttattattgtttaattttcaaacaataaaatagaaaatatatttatatttcttaaagaatcagttaccaaaataatatttttctattattatttttattaaaaaatagaaaaagtatataatatttcttaaaaaaaagaaatattataaaattaaaagtattatggttaaactttgtaattgtcaataatgtttgaatatttgatgtttctaaaaaaaaattaaaagtattataaacttaaatgtattacggttaaattttataattaataataatttttgaatattattatatttttttataaataatattaaaaatataattaagtataagtaaattgtaaataatgttagttaacctgtaaaaaaaaatgcacaacaaacattattataaaattttacaaataaatcagttgaaaaaaaaaaggaataaacagggcaagtgggtttggcacgtggtaacgtggcgcgtgaggtggtgtggcattaaattccgttaaagagccaaacaaagggtagtaaagaaactatgattatatatggagagagagagagaaagagagaggggttgataatatggaggtgttggtaactccgacaaatgaatggtggagatgtgttgaagaagaatggacggttgagattaaattagtgtcagcatcggggcagtgtcgaaactcggagactcgtagtgagtcgacggtgagaagagggagtaggtaaggtgtgttataaatgcataataataataataataataataataataatttaattttagtaaaaaaatctaatatggatgaaagttcagaagccataatttagtacatgtcaaagttcgaagtgtatgatttggtagatatctaagtcagggaagcatggtttagtacataaacaatcactgaaatagtaaaattaaataaaattagacaaaagtctttaaatacaacaatttagttcaggctgtatttttaatgaacttaacataatttgatacatgtaaaaattcacaagacaaagagcctaataataatagagtaattccttgcagcgggtaaaaccggtaattgggtatagcctgtgatagcagccttggtgaccattgattgggcaaccggggtagccggtaagcaagtagaaagtggttttgtttgacttggacaacatttggccacaagtggaactttttaagatttggtactattgctctttctctggactgtagcaaccgtatctttatcatccaaatgtcggcgaccctttctttttttttttcttttataaaaaataataataattattattattaaaaaaataaagttggtgaatgggttggtttttgcaaatcttttgttgcatttattgaaaagtattgggttcagcactgggctataatgggcccactatattattgggccttcatggacctacaatacaaaacacccgtttaggagtttac

SEQ ID NO: 202531 - DNA, 903 bp, Cannabis indica
tgagtgttttagctcttatttcgaaaaatttcactttgtttagagatacttgaaggggaaggaccgaaagccagtgaagggaatcgagttgaaataaattatgtttgtagacgatcgaacggttactttgttcataggtaaattttcatacaataattttattcttagttacatattccttaatttttgttaaccttaatttctctgaacttgtaacattggacttgaaatccatgtagcactgtggatcaattcagtggagaaagttcacctgttattcttcctttagatgagaatgaggtgaactatagtttctactattttactctctttttgcaaagtgacattaaaaatagtgtcacttttattatatttatagatgtatctatctgtttacatgtcaaaaatttaatctttgatgacagattataaagggtttgaaggatgtgattgttgggatgagggttggaggtagattgaattaattgttttctttggctaattacatgattaaagcctttaatgacttattttgattttgaatcatatttttttatggcaaagtttcatactttgtttggatttgttttttcattcataggaaagagaagagcattgatacctccttcagttggatacataaatgaaaacttacagccaatacctcaagaggtatttttgatttttatttttacagaagatttcttgcaaattttcaaaatacttgagataatttaggatgttgaaatttaaacaaaattacaatataaatggagcgagctgacccctcgttaccacccctttaggagcggccactcgtgaggcttttacctctcgagttggcctaggccaagccaattaggggcattgggccaaaatttataattgggcaatttttaataa

SEQ ID NO: 202532 - DNA, 924 bp, Cannabis indica
tcttaatgacgaaaaagcatagagttagtggagtgatgcatagaaaagagagtgatacataagttaattcatatgtatgtatatatatatagtacggcatggaacatgtatatgttgtcaattgatcccttcctacctaacaaaaactagtactttcctccaccttatcatgtgatttggacaaagctcccaaatattattattatgtactttttttttttccaaatgaactattattgtgattataaatacatgcatatagttcttcctagttgcatgtgatcaaaacctaattaattttgatttttattgctaaaatagagagacaaaaaaaaaacaaaagaaaaaaccccttctaattataggtaagcattgaccacgttaatatatactcatgtgattaatttacaatttttggagaccttggtatttatttttatttttttgacatgagtgctgcatttgcattatttgattggcgttataattaaatattgtaaatgtcgtcggctaatttttcaattgttttagttttatcagttactaactgaatattctttcttttttaaattttattaaattaagttttcaatgtaattttaaaagtttataattcataacaatacaattttctcatgaaaaaaaagatagtataaaaaattaattaaacactgatgaaaaaaaataacaaagaacaagacatcaactttattatgcaaatcaattgaagattaactaaaaataaattataacacaactaattaaaaaccacgtcaaaaaatttattgctattttttgaaatgtataagaaataaactaatatatacaaaacaatcaatatcaatcaatgaatcaatataagggaaagactaaacaaaaatgaggtgacatgttatgaatatttcattgtagtgtatctttttt

SEQ ID NO: 202533 - DNA, 720 bp, Cannabis indica
agataaaatcccaacatccgatccacccattggaaaagttatcaaattagttaattacataaaatttgagatttttttatattccaaaagtatggtagttttattttttttattaatttttacattttcatgtgatttttttcccacatattttgaaagtttagtttttataacatatgtatttttttttcttctagcaactaatttttcaatatttataggtgtatgctagtaactatgttttttagattaatttttttatgttgtttctcagctgatttttgatatacttattttacgggtgtttgatttatagttattttatataattaattttttgtgtgttaatttttaatttggttgctataagtaactggtttctctaggttagattttttaattatctaacaaacatagcaagttttttatggtttagttttgtaagtcatttcttaataattcatatgtggtaagccttattttttaagtaatggatttttgtgtttcagttatcttttgattgttttagctgtgttattatttgttttaattttttagttggttgtattttgtaagtagtttctttgtttaattgttgattttgttgttctacataattaggttatacgttttaatttttctatttggttattttattttatgtgtcacttttaatttttttgattaacgtataactgatttctctatgttagttttttt

SEQ ID NO: 202534 - DNA, 1772 bp, Cannabis indica
gttttacttttctcttgttcaagatcattcgagctgttaatataaggtaattcagatcatcagctacatttgagtgatgatttcacatttcaattttgttattttcttgagtttactattatttatctagtcaacaacttaattacatacgagatatcacaaccattttttggtgataaacgacaacactttaatattattggtattatataatcaacaaacaagcacgtgcatgcccatctcaacattttctaaaattaaatattttaattattacactaatttctcactaaaaaactcatcagataaattggattaaaaatactatataggagtggaaatatatagtgttagaaacactcattttttgtctcaaaaaaaatgatgtgaaactattttaactacccacaacaagagtgcttaacattactcatgttaatattaatagttaatagtggatagtaattaaaaaatgttggcaataaaaaaatatgtataaggataatatgcttattatattccaatcgtgtacatggggttttcctaaaggttagtttggtcctttgctagcatagaaaaactcacatttctatatttgattcaagaagaattttataatctttacaatataccccatttgctagtttaaattattatttattcatgggcttgttcttgaagaaactatgtaaaaataatgaaattggattagtttaatcttgttactattgccaggatcacaggaactgaagccatgtcttttagatgaatgtgtagagtctctatgtgtattaatttatatatatatatatatataaatatagatatatgtgcctcaatccccaaaaatggactttctggctgttcctctttactactgcttcatagtgtgtctacttgttgcccaccataccctatagtttaagatattataaaaacttctcattacgtttatataaatatatacatacaataaaaataattattattgttaaataggggtcgagcgtatactaatatattatttgtgtaccttcttgcatgcttgcatgcgcatttttattaacgcatgtttttagtgtgtttctgagttggcctagcttctatgttttaatttcttatttatactaaaatatattataaaataataattaaaaattagaatatccactagagaagagctatatgtataaatgtatctgtgaagatatagattattaatgagattgttaaacacactaatgacaatgagtacctgggacttctacctagctacataatgaacaattacacaactatattaataagaacatatgttatcattaataggtcaaaaatattatgtaaacatacatgatagttatggacaacacatttatacatatattgatatatttattatataaatacatatggagagagtatagagaggataccctagactataggagtggctattatatagctagttttatacatatattctcatgatattaagtttacttgctaaaattgattcatctgtaatatgtagcctcgatattacttgtatattaattaagtgccaatatgaagctaggaacggggagcaaaaactgaataaaaattggcaatgtcgcaccaagctaattatatataattataaggataactaattaatggttacatgcttttaaactaaaattaatgattatatttttattctaactcttgtgtgatggttacatttattttaaactagctataaataatgtttttaaaaataaaataaa

SEQ ID NO: 202535 - DNA, 1458 bp, Cannabis indica
ccatgtaggtatcatttgtagctgcttcaataactgactccgtcttactttcttcaggtgttacaagtaacaaatcttcaagtttctcccttctttcgtcaaactgtagtgggtgttgatctgtttcaccttttgatgctatatctgtacttctttctgtggttataaatttgtgggtttcctcttcttccaaatctttggtaattagtgtgtcatcaactttagtctcttctttcatggaattcattggatctagctccttgtctatttcatgatgatctttttgcttcattgacaaggcaactacaaacttttcagcatcttcacttgttggcatctcagtttcttcgagccttgcaagtagcaattctgcaagcttcttcattggttcgtctttctgtagagcatgttgttgatctgtgtcagattttgatgctatatctgtacttctgtctgtgtatgattttgttatctttatcttcttctcctgcattgatagataatgattcatcaactttagtctcctcttttagggcttctgctggatttagcttcttatctacttcatgttgatcttcttgcttcactaatgaggcaacatcaaacttttcaggatcttcacttgcaagttctgtctcaatttctttggccgctgcaagtagcaaatcttcaggcttctccctttgttcgtctttttgtagagcatattgttgactgatctcaccttttgatgttatacttgtacttctatctacagtcattattttgctgtcttcatcttcttccactgctttggtagataacgactcatcaacttttagtctcctcttttaaggtgtccaatgaatcaatctctgtatctacttcatgttgatcttcttgcttcaatgatttggcaacaacaaacttttttgcatcttcacttgctgacaccgtctcaatttctttcggcattgcgaatagcagttctgcaagcttctcccttggttcgtctttctgcaaagcatgctgttgatctttatcatctttagatgctatatttgtgcttttgtctgtagtgatgattttgttgtcttcattttcttccactgttgtggtagataatgtgtcatcaaccttagtctcttctttcaagatttctgttggatctagctctttaactacttcatgttgatcttcttgcttcattgacaaggcaactacaaacttttcaccatcttcacttgctggctctttctcagtttcttcaagccttgcaagtagcaattctgcaagcttcttcattggttcttcttcctttagagcatgttgttgatctgtatcacattttgatgctacatctgaacttctgtcttcattttcttccattgatttggtagataatgagtcatcgtgtttagtctcctcttccaaggtgtgcactagatctagctctttatctacttcatgttgatcttc

SEQ ID NO: 202536 - DNA, 2563 bp, Cannabis indica
atacatcaaattactcttcagtggctgacatttttcaataccccaaacaactgcaggacttcccaattcaagaagactaaaagattacgaacctattgacaattcaaatttcaaatacttgtcttctcaatagcagagtaaaagattccaaaagacaattcatatttccaatataatttactaacccatttttatttaaacttcttgctaatatcttttttatttaacttttccatcacaaaataattcataaataagattttttttttcatttccttttttcctatttattaagaattttgttggctgaattatgagtgatattatatatagtgaaggattttcacaaccatttctatcttacaaaaaactgaaaaaccatcatctaagtaaaatatttcaatgaagaagaacaagcttatttatcacactgtcgtgtatttatgatcaatgaattatctacacaaacttattaccaattgtactctgtacatatatatattataaggttgtcctagttaaactttgtagtaaaccaaattgtgacattaaaacttaaagaaagaaagaaagcataatacaccagtacatgaaaagttgtctctgcaacacatttcgttaaagaagaaaataaagtcgagaaaatagttaaagaagaaattcactaaccagccatcgagttgtagtcattgttgcaagccgattgtagtggcggaagaggaagaagaaattcagaatcattcacgtcatttaaccctaacgtaagccaccacattgacccaatcttggaacggtatcctctcccccttccatgtcgtaccgtatctcaacacccagatttggtttgtcgatctcttcacccacaaatcgcagagaagtaagaagaattaattacaataaaagaggatcaataatggtagagaatggtatttgaattcatgtctttgatttcattcagggattgaaaatagtttatatatgtcaattcatgaatcaagaacatgataaaattcatgtttatatgactacaacaactttatttataaagaggttagatgaattgtgatgaagttcgtacttaccccaccaccacccaacttaagagattggtaacaaaaatgatgaagtgattgttgctggtcctaagatttctcactgctaacagtcggtgggagtgcgatttagagaaaaaattgggagagagagtgaatgatagctaggtctacgaaaatggggatgaagaatcacaattctaatttgtttatcgcacacccattgttacagttggaaagaatcattcgaatgaagaaaggggatgaagaattttggaatcgcaattaacccaattcatagtccttctggaattgaaattgataagaaattaagagaaaaagtgaaaaatggttatagaatggggaatcacaccttttgatagtccttctgggaagggataagagaaaaatcggaaaatagttatacaatagttaacgtttgccgtaaacttccgttaaaaaaaaaatacaatcgttaaaaaaatcgttaaatcaagaaatgccgttagatagacacttttaatatataaagatatataatgtaaaaaagtgtatactactttgtttgtctatacacatgaaattcttgaagtatctgatatttctaacaaaaaaaaaggatataaccatctttatttatttatttaatcataatttacaattaattaatattcacttaatggtgacagtgcattctgaaggaaggccctgaggaaagcgtttaatgtcagcacaataattataaaccatgtaattattctgaacccatttcagtctctttttgctactcaaatcaagctcttcagaaacccattcattattcttggaactagaactagaattattgcatgaagaaactccattggaccaaacacagccatcaactttaaactctctcaatgttgcaacaaatgggccttcggtccaattagtcttcacaagcccacctcttgtggcccaatcttcagcattccaaaggcttgagtacattctcattggttggctctttgggtacccaacaacacctaaaccctccaacgtttttgaactctctaataggtttaccatcaattgaaaatctaaacacaaaaataaataacatcaattgataagagtagggaaatttacaaaaatattggaatttgaattaatttttacaaaaatactgttgcacggaattttttttaaaaatattgtgtttttataaaacactagtaaaacacaaaatagaataacttaaaacaacagtaaaacaattaaaaaacaccagtagaacaccagtgaaaacgtaacacagtatactgcaatatgaaacttataaaaaaacacagtaaaaaagtaaaaaaaaacgtctgacaatatttttgtaaaaaaataacaaaaattagtatatcatgtaaattttcctaagagtaaataatattatttgagtctttaaagtcacgtggcactaaacgacttacacaacatgagatgggttcaagaatggaatatgtatggaacttagctgt

SEQ ID NO: 202537 - DNA, 1177 bp, Cannabis indica
ataaaccctgttttttagtagtgggatacgaattcgaattatgtagctatgtaagtacgtactaaatatattaaagagagaatacacttaatttattcaatcaaaatgcataaaagctcaaatgaacattataccaaataattggctccttattatttgaatgcaatagtaaaatattgtaacacgtatgaggccaatatataaaactttcttattccataataaagctagtgttgtttttaccggcctctaaatgattttatcagatctggacaggcataaaaatgccagaagcatttggaaagtcagacagataatagtctaagtaatctccatagctgacttctaacatgtcacaatatcttttatagtacccaacagtgtttttgctggcattattggtattaacataagtcgggagtacttgattatgagttcctgaattagcattgataaccatgtcatggagtgaagggttgttgtcatgttgattcatccaataccatatggctgttttaaaggacacaactgagtctgttgctaccaaatcagggtcgtttatcaagtctactcccactgctccaccagcaagcccatagttgtagttgctgcatcgtcaacaaataacatttgaattcaaactcatatataaatggaaatttatatatatatatatattattatgtacttactgagtaagttgaaaaggtcctcgactattatatgttttgttggaagcacatgaccaatgagaagatgtacaataatcatcatcaccggcagttctattgataaaacaaagtccccatgcatatgaatcgattgtactagtccattctcctacatatttatacaaattggacttcattaaaattatataatataatatatattattacactatgtatatgtactaattaattacctgtagttgcttgagatgtatgagcaaagaaagctgcaagttctctcttacgagttgccacatcaccagtagtacaaaaatcagaaaaagaagcagcagcaatgacaaaagactggtaatcatagaaacctcgacttggacaatctttcctatgcttaaacatttcgttgaaaattggttcactaataatgttgctaataacattattattactagtggtagtattgtcatgttggagcaaagcacgaggga

SEQ ID NO: 202538 - DNA, 1168 bp, Cannabis indica
tatgtaattatttcaaaaataaatgtgatatttttttgacatgaatgtgatattaattaaataagaaatttttaaataatatactgtttaattttatataaaagtctacatttataagggggcacgataatttttataaatttacgttttcacattttaattaactataatacgggcaggtaagttacgttttcttatataatgtgagaatatgtgatacagagttgacccaaagtgaatagttgattgtgataagagtgtgtgattgtgagatgtcaattgtgtattaattttttttaactaattttatatttattttggccaaacattttctcattccatactattttttttttcttcttattattatatttaatagaatctcaattaattagtacatcaatatactaattaaaatattaactttcattttaaaaaataaatcatcaaaatataaattttataagctaaaaaaataattttataggtccaattgatcatattattttttgtatttgaaatattactagggccgactctaggcataagcgggttaggctcctacttaaggcccacacttttcgtagacccaaagtaaaaaatgaaaaatttgattaaacttttatttaagtaaaattaagtgtatttgtaaacaacaaatatccatagtttatatagttagggtgtatgacacattacataatggtgtaagttcgagttttataacatttcttatatatacatatatacttaaagattttgtcctttttttgttggtttgtaagttattttaggttggcgcaaatgagattaatgtcatgtggtttttgagttgtttgttggttgtttcatattgaaatgttctaatatcagggttgatgttgtgtcgtttttatattgtttacatattttaaattttgatattggagttgttattcagttgtttgttagttgttcaactaacatatctttatgtattaaaagtgattatgtaacgtcaattcttgatttaatagatttttttatttctatttattttttaaatttatatctgttaactttgacgatactaatagaactgttaattaatattgttttattatttatattaaaatgaaattgttatggtattatttatttgttgatattaagttgtttgaccaagaga

SEQ ID NO: 202539 - DNA, 1223 bp, Cannabis indica
tggtaaaataattccaacagatgatccttcaagacctcttgataaattatagaagaaagaactcctctcccaggtgtgccttaaagattgatattagcaaagcatacaatacagttgactgggattttctcgaggatgtgcttatttccttcaacctgccaagaaagtttgtggatagggtgatgatatgtgtgagaaatacttcctattctttgcttatgaatggtcagattcaaggcaattttgaaggagctaaaggccttcgttagggagaccctatttctcctttactttttgtcttgattatggaatacgtgacccagttgttccagtttactactaaagactccaatttcaggtatcaccctttgtgcaaaggcttaaatcttattaatctgtgcattgctaatgacttgataattttgagtaaagggacaagacaatctcttctagtcgtcaaaactattctagatgagttcagtaatactacagggcttctcattaatcctcaaaagtctcacatttattttggtggagtgagtaatactgagaaggaaggcattattgctgatttgtctcttgttgagggcacctttcctttgaagtaccttggagtacctttaaggcctacaaaatggaaagttgaagactgtgggataatcatctcaaaaatcaagcaaagcttatacacatgggctagtagagacctctctcacgcaggtagaacccaacttattcacactattctacttggcctcagaaactactggatgagtatttttgtccttcctcaaagtgttactaaagaggttaaaagattatgtaggggtttcttgtgcagaactaaggatgagagaagcaagatacatatgacctcttgggagaaagtttgtttttcgaaagcttatggaggccttagtttcaaagaaggcaccaagtggaatcatgctatactggtttcaaagaaggcaccaagtggaatcatgctatgctggccaagtatatctacgctatcatggagaaaaattaccttctttgggttaaatgggtcaacctaatatacctaaaagatgtttctttctggtctcacactctaaaacaagactcgagttggtattggaggatgttatgcaggcttagaaggaaattcacagaagaagacataaagaggggggggggtaaaacaggtaacctcaaaactaccctctttataatagtcttca

SEQ ID NO: 202540 - DNA, 666 bp, Cannabis indica
tttattatatgagccatttttttagtttcagttttttaaccagtttggaactcagatttcagggggaaaacaaatggattaattccaaagcatttcattttcttttgtttggagttttaagaaaaatgagagattatattcttagcaaaatagatttttttttttctaatttaaataaaatcttgtatcaaatcagaaagagaaatgataaaatgaagcttattacaaaattttaggaaaatgttttccccatacttttcactattgtttactctagtaaaatgtttttgtactaaactctcgcatccaaacatagcatcttttttcaatttaactttggctactattttggaacttagggtcaaatattttaatttattggtgggatataattattggatatcttaatcttatcatgtaccctctgcattgtttgtttcaataaaatttggtacagtttttctttcatcatttaagggttgctttcttttcttaattaaaatgatttagcctcaagtggggtcctttcaaaatgggcacaacatcatcataattattgccttatcatgcaatatatgtctctgatttaactttggtcttcctttttgcagaaactctgctaatggtgcatggacaggtatacatacattaattttgaagaatatg

SEQ ID NO: 202541 - DNA, 1263 bp, Cannabis indica
tctagctagtcttttattcaaatagatatttatgttttgagcattgctattggacactagtggtgtccaacactttttataggtggcgtctcatgattaattagcgatattccctaaaaactattttcttaacgagtattgttattgggcaccagtggtgcccaacaccttctataagtgacgctccacgatcggttagcagtattccctaaaagttattttattaagttatatgagaccggatacttaattacactaataacggtatgacaccaagaagggtgctaggcaccaataatgtcttttagcaattcgatctcttattttatgtttgatatgttttctatttacacatcttttcaaattaatttagaataatttcttaaaactttcttctatacgttttcttaaatattttttagacaaaattacccactagtaaataatatcatttaaaattaaattttcaaatttccaaattttagttaaaacaaaattaaaacatctgtagtagtctcaattcaaaataatcatttattattaactaaaaaaaaaaaagcaattgcagttttgatttaaaataagaacaaatacaaacacaaatattttttttttatttaagtattcttattagaatcaaagtcatcaaaggataatatgggctattttgcttatcaaagaatcacaaatattcatttttaagcttttaaaaattaatgtacaaaaacatcttaaaaataataaattaattagaataatccattagttggaaattttcataaaactaaattattttattttctttttaaatatttagagaggacacatttatgttaaattatacaaaataatgaaaagggtgtgaaaagaaagtgatgatgagggggtaactctctaaaattttacaaatatgactaagggcccatttaattggcacagcttttggaaaagctataagctactttttgaaaaagcagctgtaataaaaatgtgtttgctaagcagttaaaaaacagctttttgaagaatttttagagaaactaaagctaaaagtgctccaatccaacttttagaaaaaattgttttgattaaaaggctataatatatatattttgtactaaaatcatatttaattatttattatgtattaaaaaataaaaaaaattataataaataattattaaatctcttatttttttttaaaaaaataatttatatgttcttttaatattaacaaatgacatcaacctagaatttttctta

SEQ ID NO: 202542 - DNA, 622 bp, Cannabis indica
ttattattccggattgtattttttgttgttttattcagtttagcttggacagtttattcgggtggggtgatttgtaaatttttttgaacacccctagagctaaggcagaaacaaaaaatagtaaaatttttctaaaaaaaaatacaaaaaataagcaaacacactaaccaaaaacctacattcaaccataagtcaaaaagagacatttctaaactaaacaatacctaacacaaaaaattccaaaatgaaaaaagggaaaaagaaaaagaaaaaaaactcatctttgacatgtttacagctttggttcgtcgttccactaggtttcaaactagttgtggcaattgggtgtcgctggggtttcaaaccactgtcatggactaagattggaggtgtgggattggggcttcgattgtagcggctatgagatggattcaattggcttcggtcatttgcagtggtggggtcttcaattggcttcaatcgtttgtggtggtggccggtggggacctaatttgcttcggtggtttgcggtggtgaggctttagagttgagagagagagagagagagagagagagagagagagagagagagagagagagagagagagagagagagagagag

SEQ ID NO: 202543 - DNA, 969 bp, Cannabis indica
ggcttgcctccatttttcatattgtatggcagacttgaactttttggtatcttctcagtcaaataaagttttggtttatgtatccctgctttagccctggtggtcattttgtgtgtgtttgttggtggttcaagattggtaaccgtaggaggaatggggttgacaacaggtgggataacagatgactcaatggtgacagaagcaactggttaataaggaggtatagactgagtgtgagtgttgttggatggaatagtgggtggttcgatgaggtcagatgtaggctgaggtgtgataatgggatgctcattttgaggaacatgtataggaggctgaccagaagtcaactgagttggtgggacagagttggtgatagtgtctggtgtgagatgattattggttgtaggtttgagtgagtttgtggagttgtacatattgtcatgacttgcagtaggtattagtgcagatggtagatattcaactggtgggtcagatgagagatttgaaattttggtttaaggaaaaacatactcatcaaacttgacatcactagaaatgtagattctgccagttgaatctagacacttgaagcctttatgattgatgttgtagccaataaatgtgcatgaggaggatctaaattggagcttgtgtttattgtatggtgtaatgttggggaagcattgacatccaaatgctttaaaggtattgcagtcaggttgtatgttgaacaacatttctatgggagatttgtggtttaacactgaagtaggtaacctgttgtgtatgtacagagcagtcctaaaagcctcatcccaaaattttaaaggcatagaggcttgaggtaggagggttagaccatttttaactatatgtctatgtttcctttcagctaggccattttgttcatgggttgtgggacatggatgcctatgcactatgccaaactaattgagataaggggtgaaa

SEQ ID NO: 202544 - DNA, 1388 bp, Cannabis indica
ataaggggtgatctacagtgtagaatctttcttgccacactcatagaggctgcctagcaatggtatttcaaattgcctctaagaaagtttaattattggattgttttctcctcggagttccatgcacaattttcctcctcccatcaacttccctcacacctagaagtcctattagaagtgaagcaaatgccaagagagcctctcaaggcctacattagaaggtttatgaccaaagcaacgaaggttaaagggttgactaaagagggaagattagcacctatactgggggcattgagcctctgggagaattatggaaggacataaaaagattaaatgtgggatcaatggctgaatatttggatcgagcagatggattcattaagctcgaggaagcagtacgtcatgtggacattgtcgagcaaaagaaaaatcaacatcacaccacagcggtcgaaacatccccctagaattcgaaatatcccaacattttaaattcaaatgggaaaaggtctaacaatagcaataggtagggtaatggaaagaaagggaagttcactggaaacgccaaacaacatcccagggaaaatgcctccaaatttactactttctcatttctaatggatgacatatagacaatctatgcaaccgctcagtctatggtttcgtacaagaagcaacctcccatgaaaaaagacataagtaaaagagacacaactaagttttgtcccattcatgcggactacggccatgacacaaacgaatgtaataatttaaagtgagagattgaggtattgatcaaaaggaataacccgcacttatagaagtatgtcaaagttgatcaagacgaatgggccacccaagcagataataatcaaaactaattaatgcccccacaagtggacaggcatttacaagtaattagtggagatccacatctcgctagagactcgggcaaagctagagaaaagtatgcttgggccttatagcataaacaaaataaagcaatcttggctgtggaacaaaagaaacctaaaataccatttttaggggaatcaacaataacatttactgaagcagatgcctaccatgtcatcttcccacataacgaccccctagtcgtagaggtgcagattgcaaacaagattgtaatgccataatctatagggacaccacgtgtgtgatttaactaatttaatactaatagattaattaatttttaaaaactgtgattatcttaaaacttgatcaaagtaaaacactaaaaacagacatcatacgatagtaaaaggtgttttggggatccatgttataaaatatttacccaaaggactatattcaataataattcaaaatacatgttgtgagaattatattgatttataattgcg

SEQ ID NO: 202545 - DNA, 2216 bp, Cannabis indica
taaggagtgttgaaagcaaaaggttgagaatgcacgtagtacagagaggaactaatccacgtgaaccatccgaacagaggagcaacgtaggactaacgatcgttcctgcctataaataggagagcccatcgttaaaaaaagataacgaatcctcgatcacaccagactagtcgaaactctatcagaatacatccttaagaacactttgagctcgagaagtagacgctccaaaaaaattaagataattgagagggaaattgtgtaagctgataaagattgtatttttattaaactgaacctggtgtaaagaattcacgacataatataatttgttgttgagctaattttggcattaacactgggtatgctactgcaaatagatggtgtatcaaaataactcttttagagagtggagtatattttttttttatattatcttcattattattatcattatcattaggaggaaattttgtcatttgggtatacatttagtttattttataatcgtgattaaattgtgttaacctaaatttttttttctagttgatgtagacatcaatgtttgacacgtgataagaaagataacatctcagaattgagtagtcctgagtcatagtagtcgagttggggggtccctagccttacgcccaggttgactttgggtttgataagtcgtttccaactcaccatatttctgttttatgtagcatgaagatatggagcatccaagtccaagacttgggagctaaaaacacacaaaattgcacctcaaaaattgacccgggcacttagggtttcactcaacgcctaggttgacaacccaactaagagtttccaagaccatcttagtgcaaatgggtcaaaatttacattgagacatgaaccagacatactacaaacatatttgaggcattagaattaaattcagagaacttccatttttgaatacccagaacacccgtgcttgggcaccaacgcccaggttgagattttgtcaacctgagccacttccaagcatcaaaccaaaaatctgacttgtgcatcttctttgtcttcttagaaaagaggaaacaagtggtttcggggaagaaacaaactaacctagaggttaaaacaagggaccaacacctaggttgacacctggagctggcccagcgcccaggttgatattttgtcagcctgacccaattttgaagagttttttgaaaaaaatttccgggcatattttccgttctcatcaaagattacgatttaactatttttcgtggagaaaatggaacttccaagtagcctgaaactggacccagcgcccagattcacattttgtcaaccaaagctatttccactcagttttccaaaaaagtatttcatgaatttttttagccattagaaataatgaagatacaagtaaactcggggagaaaacctcaattgcaagggcttcaaaagtgagcccatctcccaggttgacctggtgctgggcccaatgcccaagttgacaattaacctagtgagctggttttgatcacttaaatgcaaattctgctccgagaattctctctgaaatggccaaaaatgggttaagagaccttttcctcaagttcaagaactttggaagtgtcaagatgacatcccagaagctatgaaataagcacccaacatctaggttaacatgttgcttggtgtgctaggttctgcttatccaattttgatttcatctcgatcgttcatatagtttttcatattaactaagagccatgaagtcagaagagtcaaattcacaacttcatattttcacttttttggcaaagtgacttagaaattggatagtttcgagtctcccattttcgcagaataataacatctccgagaactagtgatcagctttgccaaaacacaaaaacatgctaagtgagatctaaatatcacttaggcattaaaaagtacattctcggtacgttttccaacgcatccaatgtccaagttgatgtcacatgtcaacctgggagctggatgtcaacctgggtgttcggatgtcaacttgggcgctgggtccagaataatcttcagtaaaatggtcataactcactcaatattgatttgattgacgcgattcaacttgcattttgaagttatttcaatgctctatcaagtcatgtttcaaactttgatcaattaatttttgagataaaataatatccaattctcataag

SEQ ID NO: 202546 - DNA, 3450 bp, Cannabis indica
ttttttttttttgtagaaaatgttatttttttttaaccaaaaagtcattaatgatgtgggaccatggtagataactttaagtgtaacgtccccgtttcaaactttcattgggtccttacacccatggaataatgactcttatacacgagtacgccactctggctgcttcctgaattgatgactgaccctacataccaacatgaatgtttccagcgtgctttgtcctcactcacacacttcctgggagactttacaaatggtattagagctttgacccagtcagaagtgtgatcgacgaggacgtcggacccctaaaggggggtgattatgatagtcagtagtcctgtgatccataaaaagaaataccgggtaagctgtgtaatcccacatcgcttgtggaaggtcaagtgagatgattctgagactgtgtaggtatgggactacacagttaaagatgacttaaattaattgattggtactacctatatcaacaaggtgcatcttttttttggatagcccatcacgaaagaactccacggttaagcgtgcttgacttggggtaattttaggatgagtgacctcctgggaagttttcccaagaagtgtgcgagtgaggacaaagcatgctgaaaacacttgtgttggtctgtagagtcagacgtcagtcaaggaagcagccagagttgcgtactcgtgtgtaagagtcattattccgtgggtataagagcccaatagaagattgaagcagggacgttacattaagagttgttaactattaaagtattttttgtatgtaaatggatcaaatctaatgtggatcaaagagaaaataaaaaataatattttcggatgatgtgtttacttttgataactatagataatgccctcattggatatgctcactatctctaatggatagtgcaaaatttgactcaaaaaatgaatcaatgttatagttaactcaaattttaataaaaaaattaacaaatacattaaattttgattgaaagtatacataaatcctattaaatgtataaataaaatgtaaaaaaattattaaatgtattaataagtaacaaaaaaaaagaaaaaaaaagtaatatttattatggtgtaaatttggcacaagctgcacaatttttagcacgtgctaatcacattaaaatatttccaatggagtactataaatatgtggtataatgtatatgcattttttagctcatatttataaaattaaattttaatggtaatgtataatgtggtttaaatctagcacacactaaaaattatgtcaaattttataccacaataaatatcacttttagatttactattttatcgttcattaatataactagctttttatattgttatttatatacttaggacatgtctatggtaaataccttactttcgtcggagccatagatatttaatctaagggtcataaattgatgagtgcatataaataggtaatacttacaatgtattagattattcttaaaattattttcttaataatatttttaaattaaataataattatttaaatatataattaattttttttaaccctcctccaattaattaatctctctctctctttctctctctctcattagaaacctcgtccaattgttcattgatcatcatcaccatccaccaaaacttcccttctcaatctcttcgtcttcatcttgcaaccgaagaatgatggaggtggttttgaatttaaatctttcattcttctcaatgcgttgagtgatcttttaatagtttcaaaagatatgcttatggaccgatcaatgaaaaaagaggttgatatatagttaaacttatcttcataccatttgcattgagattacaaaactgttatgcttgtttggtaatacaatcctcaataatagacctggttttggttcgacccttggtagctttgggagtttggacaagtcaagttcttgagcttggccattaattttaaagctccagcccagaacatagtgattactaataacagggcctgttgatgaagaaaaaccaatatatatggtatcctttataaatggcgaaagatcttccgtcaaagacaaaagaggtttctagggtttaagagcttgaggcggagctaaagtcacattcatctgcttcttaacagtgtcatagtcgacccatactctcagcgtcaaagacaagcaagttatggtaccagggaatgcactctcgttctccgatactgatggtgggcaacttacggatcagttgtacggtccgattacaatggagttaggcaactgttgcagtctccaaatattcacggccgcaaacaatgacgtcaaaggatcgatccctgtagagttgggtcatctccagtcagtagcttcttttctagtttggctgtggctggttcgaaattaaaaggaaaagtgggaatggaataatggtttgttgtggctgtgggtggttcgaaaggtagaaggaatgaagaatgggaatggattatgggtgaaatggggctcatgggaaatgataaataacatttaaaattggttttttaaaagataaaaaaaaaatattggttgttaatttttttaattggatgttaatttattttaattgagtgtcagattcttttttgagtgtcagattcttttttttttttaaaaaaaaaaaaatttgataatctacaaacatatacattttttataatcttgactttaaaagtcatataaatcaatcgctaaaaagatgtgtgcatagtataagaacaaaactatagtcactcgctatcatagaatttctctttatatttaatactaaataaaaatttaatatttcaactataaaaattaaatcaaatataatatttgactcatttttaaaccaagtttaacacaaaatttatattgattacactagattaaagtgttatttgaaaaataactgagtcttgaagttgggagcacccagccatcgttggtttaggccacacaacaacctctccaatcattgtacagtagaatctttatctaaaattatatttgaccaagtaaattatattctaattaatagattataattaattaatagattagtagtattaaaaaaattataattaattaatagattagtaatattaaaaaaaaatcaaaacaccaagtaatatcaatgtagcaataataataaaaaatgcttaatactatatcataaaagaattatttttgagtaaatttaatatttatacatgtattataatttggaataaaattattgactttacatgaataaatttataaaatatgtatatatttttatgatgtattttatacgaatattgctattagacactataaatttagagataattattgattttaagcagggccggctctagcataggtggggtaggcccgcgcttatggcacactaaatttaagaatccaaataaaa

SEQ ID NO: 202547 - DNA, 1524 bp, Cannabis indica
gatgtctgcatctttgtgaagtcaccgttatagacatcatataacgagctggtagaaacaaaacatgcgagttatatccgtttgtcgaggttgttgggtcattggaaccagctcgcaacatagagaatcgatctctatattttcgtaggagaattgcgggagtactcgcgtatatcttgatatatgcgggctaagaccgttccttagtcctacatactgcgaatgcgattagagtcggtcatgttcgcatcatctcgctgagtctgttttaggcgaggtttgtactcgagggggtctctcattgatatctcaactttctttgaggaaagttcatacacgtgtcctttaaatagaagtctagtctcgtgtttctaggtgagaaaaatctcactaaaacacatgcccctagttttgagacttgacagatgcggtcatgagggaaactatgatcgagaggcgaggcgtaaagatgtcacgaggtggtgacctttggttgtcccatcgagggtttcaaaaaatgacggctgtaattattacattttatcctatttatggtgccacgtcacgaaactcttcgttttctgtgtaggcgtgcccatagttaaccgttggatgggtgaccttaggcattctcattgccacgtgtcttgatctcaattaatgtgtgctacggatatttaagcccccttgatatgaaatgattccctcattttccctctcattttcattttcttctcctcatttgaaacttcagagaaaaaatctttttcccatattgaattatgattcctcttcttgaatcctcagagtttccgaacaatcagagctaattttagggagaatcgtcacatccaaggttagcttttgaaattttttcgaatttggttttttgactttaaggaacagtctgtattttgaatttttgaggaatagaaatgcatgttattcatagagaacgtacataaggatttatttttctgctagaactgggtaattctcagaaagaggtaggcctgaaatttgtatgatcgtgaattctaagaagaacaacttgaatactcgcatctttttccttgttaattctaatactcgcgagtattgagatgaatatcttgaatactcgcatctttatttccttagaaattccaaggatttagacatttcaacccattatttagaacttagggttttctttgtattttctgtgtattttatgcaggaatggtggttaggtctttcaaatggtgggtgtgtcaccgtagcccaatgctcatgcgtgtgatcgcatgtcccttgaggtactgtgatacacccagccatttgcgacgtatgccagctttctcttttctcatcaactgcgtacttcgaatggtaggtttctcgagacagtgaggagtttctgttagcccaatggtcatgcgaaaaaggcatgccccttgagaacagagactcctcagctgtttcttgagatgtaccactagttggatatgcgagatatgttcgcaggttgtgactggttagatt

SEQ ID NO: 202548 - DNA, 542 bp, Cannabis indica
ttcacttttttgctagtttattaggccatttggtaggtcatttttaggttgcttagagtttctcgttccaatggccagaactttgagccttaaacttttccttagggccaattcaaagtcgtctgttgagctttggaaatttttgggaagcgagtcctacttctagacatcaatgttttgaatcattaaagacattttcatggcacatataaacttaagccattcaatttttaagtaacgcaaaaggactttaagtttgttcccaaattgttgaaggatcgcgaagcttaactcctttttaatactttttagaataattgcttaagcaaactattaaatttacataccttaataaagtgaaattctcacgaaatactaagcttccatgttccagtcatatctttttttttttttgtcactcaaacgtaatatagatttgcacacaccaaggtttgttaatttaaactatttaagcaaaaaagttgaatatgcaacgaaattcaggcaatgttttttgagaagaaaaaaggctgaaagtgcgt

SEQ ID NO: 202549 - DNA, 583 bp, Cannabis indica
agtatatagagtgattcctataataataatttcttcttcttcttctttcaagtctaccatttcaccaccactattgcaccagtaccgcccaactattaccaccaccaccatcgctgccgccaccaccaacaccaccccacaattatactaaatcagaaaaaaaaataggaaaataagagaatcagataactatatcaatcgattccgaatatgaatttgcaaatctaaaaccctaaataaaaacaaaaacgcacaattagttttggatctgaaatcacaaatgccacaaacttaaatacgaaattgattgagaaaacataaacaaataaatattaggcccaatgtcggggttcgtgagggggaaagagcctttgggttccgtgagttctcaagttacgtcacctgagctagcggtggtggtgacaccgtgataacgagagcatcgagagggattgagggaagttcagttcgaggttttttcagggttttagtttcgagaaaaaggactagaggtctacctaaggtgagaggggaggccgacagtgctccttcccaagaccccgcaagagagagagagagagag

SEQ ID NO: 202550 - DNA, 2172 bp, Cannabis indica
aaaattggtacaacaatctgtctatttatttccctgcattggagtgtatgtacaagttcattcaaacaccatttggaagatacataattttgtgataaaacaataattgccatctttgatgattgaatcactctcatgagttgagatccaatttcgtcactactacttctttcatgtgattccttatcaaagtaggatttgatgtgttcacggcataaaccagcatgaagatctcctgtaatggtatcatttccgcctccaaaactaagaaagacatcgtttgtttcgatcaaattagagggattagaacaggaagtggaagaggaactgaaagtgggattattcaccatattcatttcctgcataaatgattgatgagaataacaatgtataagaatttacaacaacatcaacaatagcagcagcaacaacaaaaatcaacatgtatcattcatacacacattgcacgtacccctttcctcaacggcgcgcatccacagattgcaaatcaaccaatactactaatattaatttactaaactaattttgtgatagaggaactggaggctgaggctgaggctgatgcaattgtttctttagcaatatactaaaattagggagtcagatgaaatgtttaataatgcttcacaaaaaactatgccacgtgtcacagttagttatgttggttacatagttagacttgtgtagcttttacttattttcattgaacaatcactgcatgataaataaaatacttgcaggaaaattgtgattaatagtgcagaattaaattattaaaacattaaataattaaataattagcaatgacaaaattaatatatcaagaacaacaattgaatgaaaaataggagagaacagtatggaaaaccagaatcagtaaatgtagaaaagtaaaaaaattaacaccaagatatatactagttcaagtcttatagatcgatgtgatctatgaactctactctagttctagaacactaccgaaatattctattgattgagcaagaacgagtacaaaacagtcgagacaaattctctgatgagttctcacaagtgtttcaactctcacacttacacccaagaatcttcttcatctacagaagattcttcttacaaaacctaaatccaatctctctcttttctctaccactcaatctttcctctctctaactctcaatctcaatttgaactgtgtttaaaaattcgtaacttgaaataagaagtcaaggttgtatttataggcttaagatcaagatcttaaagtcggtggctgcaagaaacgaggttgttaagttagttagaaataactaacttaaccaactcctctttgagcgaagtctccacgttagcttcagtcttagtgcatccgggaacatatacgagcttctgacacggaccaaaggcactcgctgacgaagcttccggaaggattgaaccagctagacttgactatctagaattgccttctcgggagaataactagctgcccataactccttttcgaaggagggctagctatcccaaagactgaacctagagtggatatgatagtcatctgtgaactctctttcagactcaactatcattccacaagactccttccgggatggacaagttagttgtcttggaacaacatcttggagacgcctaactttctaggaatgacttttggagaccttttcatttgaaggaactataccacaaattctacctagttacttcaaattaaaagaatgacgatgatgaagaaagaatgcagtcatcattggttagtgttccaggaatctcagtatactaacttctgagattgatcaagttcaagcaatgcttgaacttgtttaaatttaagaccttagttccaacattagcaagattatcttctatcctgaccttctttaaatcaatcagcccttcttctatcttctctctgatcctgtaaagccgtatatctatatgtttgctatttttatgataaccgagttcttacaaagataaattgatgattggctatcttgaaatataagcagtgattgtacgcggatcgtttgaacccaatttgatacataatcgtaatcaaatttctcattccattgtattggggactgtttcaagccatataagatctattaagcttgcatactagctcatctcctt

SEQ ID NO: 202551 - DNA, 966 bp, Cannabis indica
cggatgaacacccctagtgacaagtgagatcattttgttattgatataattttatattgacctagtatattttaatttaacataaaaaaattgttaatcaatcatacgtaaagatgcactggatactttatataaatacatcaaataaaatttttttgtctatatatttgtatcagtacttactttgacacaacaggacagctgaagctttggcataatttgacaatcttggacgttttcatatatagtatttccttgtgtatatataatatataaattaaacttattaattaattagtgcgagtatgtaaagtgattggtgatattaataatatacagtacttctgttgttgaagatataagtaaatacatatatttataattaagaaaggatttgttattacgtataataatccaaactcaaatcaaacatatatggctgtaaagttaaaaggactggtgagtgggttttgtggtcctaatggaatgcgttatccccatgaatttacgacattgatcaatgacacatgagccatgaacctataataataatagtttattatttatattgtctagtcatcgaaactacgaaaacactatcgtaatcatgaacaaaaaaatatcactaaaaaaggtccacgaaaacgaacaaacctataaaagtgactatatcaacccccgtgaatcgtgtgattttgtgctcaactgaccgaaagctctacctctctaattaacctcccttgccccagatttaaaatcataaatatatattatgcatatatagaaataaaatataaaatttaggaaaattattctataaattaattttaacttttttttaaaaaaaatttatagtttgattgttacggtagtttctatgtgagttaaaatgtgaattttaattacgaattaagttgttccgttgattattatatgtagattttttttgtgaattttcgtaaaaat

SEQ ID NO: 202552 - DNA, 851 bp, Cannabis indica
gtttcaattctttcaaactcaacgtatcattaagcataaaaatattacaacctctcttatatcaataaatcacaagtggattcagctaatgatttataattttaaaatataaaacaattgaacaatgttcaaatatagtattttttttttctatagcaaatgtcatttagttaatgatgaagaaaagtgtaaaatagaagtatcttagaagctcaacatttgattcgggaaggagtgcgttggtgtgtgggtaatggtcaagacatcaatattctcgacgaaccttggttgcctatcaaggagaacccgtatgtttcttccctacatcttggattatttaatgctagagtttctattttattatgtattgatggttctcgttgggataaggaaatcattcttgatttgtttgaggaaacagatcaaagaatcatctttaatatccctattcaaattttcaatagcaacgaccactatgtatggtctttaaaaatttctggcttgtactcagttaagagtgcatactctcttctccaaaaaaaattgtggccgctggtatgacaatgatgatgttattttttggaaaaaaatgtggggattaaagctccctccaaaagtaaaaaatctattttggtgtgcagctaggggttgtcttcacactaagctccaacttcgaactaagcatgtggatgtaagttcgctttgtcccttctgtctttagtatgagaagtctattttgcatactctgatcacatgcaaagtggtgaaagcttgctggaacagagttggtattggcaccaacgtggctaggaatatggattttctcgactggtgtgtgcattcttttgaga

SEQ ID NO: 202553 - DNA, 886 bp, Cannabis indica
gaattataactctggtatctaaattcattcaagtgagattataaatttgagtttcaatttaacataaactcaatgtattcaaagaatagaagattaccagaaaaattgatgaactatgttcgacttgattcgtaggcaacctaattagtaaaattagatacagacttacaatcacacattctcaaatttctcgcaaggtcatcacctgaacaaaattctaaatgggagatcattcaccttaataaatttttttagtaaagtcatttatctcaaaatatcaaattgagttaattctttacaaagttctggaagataaaaaaaaatccttgaacttcgctcaacttgattgctaaatgataaagaattccataacatgatcatataccggtatttttcagttcaaaatctcaaatgccctattccagattactattagcttgatctaaagaaagtatgtaggaagtccaatatcgtaattataatcaaaaggttttcttttcacaaaaagattagatgggtcaaacttaaattaataaactcggcataggtgaaattgtatttgtatttattttaaatatttttgtttgacaatgtctttgattgcttttgtcgtttctgatgctgattttcttcatgtgcttacttcgatgtagtgtctgataatttgttatttccacttcaggtagaggaaggagttgttaaaagggtcttacagggatagacacttcaatgcaggctccatacttttaggattcggagtccttgaggctgtaggtggatgtctcaacacatggttgagaacaggaaagctattcccggggcctcatttgtttgcaggagcaggtaaagtatctgaatgttgtccctaagatcagaaagctaattg

SEQ ID NO: 202554 - DNA, 1436 bp, Cannabis indica
cctttggtgaggagggcttgttaccgacctgtgtgacaattgaaggcatgagctgtttatgcgtgcatgagaaatatgcatgtcataaaaagtagtggaggaatccccaagtatgtccccaagtatgtttgttttataggaaactcgttttgctgctcgcacgtaagggaaaagttatagtgcttttcctagttatgcgttacaaaagttaggaccaaatgcaatagaagggatttgagaggtttcaaccctcccagatgtttcttcatttaaatcttgcttgtattaattccttgagttgacgtggacctctgggatgataccttgctcatagagctgcctaccctctttccccgtgaaaatattgtcattatgtatttaagtaaagtctcattttccacctagctaattctttcagtgtcacgtgtgtagtctgatttttggataacatttacgcccaagtctatgcttgcattctttagagtagggacttgctagtgacgtcatttgagtttccattcaggaggtgaacatatcattgtgagggatttaatgaaatagagatttgtatggtgcaaagcaagtgtctgttgacaacaaaggttcttccaaaggtggaagacatggaaaagggaggtctcattctagaggacacaaagaccgtaatggctgctatcactgtgggaaactagggcatttcaaaaaagattattatttatggtaaagaaataacaaaggaacatcagatgatcaatatagtgactcaaaccatggagaaaattatttctcaaagcaaaaagaaaataagcaagaagctaatctaaatgatggctatgaaaatggagaaatttatattactggaactaagtttaaagatgaatggattttagattcaggatatacattttacctgactaacaataaatccttacttactaattttagggaatccaaaggaaggaagatcatccttacttataggggtagacttgtgatttatccagaaatttaatttctataagtgtgctagatgaccttggtattgtgagtaagattgaaacatatactatgaaactgaaaaaatattctatgaccataatgaaaagctacaaggagggagtctatactacctaaagggagaatcaatttaaaattgctacaacacaacaacagaaattcttaaagattctaaggcaacactttggaagaaggcttggacacataggtgaaagaggtttacaaataatgagtgagcagaatcttttatgcaaagataaagtaagtaaagttaatttttgtgaacattgcatattgggtaagtattataggcttaaatttaaagttgggacacataagtctaaagacattctagaatgcaaacatgtttatttaaggggtcctaaaaaagtactaactcatgggtggagtagggtcct

SEQ ID NO: 202555 - DNA, 712 bp, Cannabis indica
atattctataaaaatctaattagttcctaataaacacaattcaagcataaaacacaagtataactcaaaactctcaaaatcaccattgttgagtcaagtttgagttcttgaactcaaacttgctcaacaccactcacaaccaacaaaaccagcacaatttcaacaacaattaacccataattaactatgaaaacaaccccttaaaacctagggttcgaacaaaaccaatttcccaaaaatacatgcttgaacttcgaaaaaaaaactttaaaaacttaagaaaaataaaactaagtcttaccttaggattacaccaccaaattccccttgattacttgaagaaaaacacacaaaaaaggagaagaagttgttgggtttctctggttctttttagggccgaatagaaggaaagagaaagagcttgaatgatgaatgttttcttggtttcttttgactttctttctaacttagtggataaagaacacttaacttgctattctctctaataatcaacttagaataactaggattattctacaaaatccataaaaacaaatgtaaattcctttaggcaaaattaccattttccccttagttcacctttaagaaaacttttcgcttgagagtaaaatggtctaaaatcataacccctcacaatcccaagattcaaaatatcacatacgatttgtcccattaaaataaaggttctaaa

SEQ ID NO: 202556 - DNA, 1538 bp, Cannabis indica
aaaaaaaaaatcaaataaagtggttcaaatacgaataagtgattaggaatatgaatcctgctgttttaattactcaattattaatacaattttttaatcttctttctttaagtgatgacagattatagaaataacgctaactcttttcagatcattgaagtcttaaaccatatattatctattgcatctctgaattagataaacatatagtttgcattaagcaataatctaatggtcaccaagttatgtgaatactctagtttcacatcaaaaactatgtttattcaattagagcatttttaatattcgcttttcgaattttatattaggattataaatcgttttagaggtggtcaatctaaaacatgtattaacacaaatatgaacaaatcacaaagtttcaaaaataaagattaacaaataacattaacttattggagtaaaaatcaagtaacattcatcgtattcctaaattaaaaaattagttcataacttttaaactcaaatccatgttcaaactatagaaattaacataagaaaataaaaagaaaaaagaaagaactagatagtgaacttgattaaaactgccacgctcgtttcctcaatttccttctttgtttctagggttctatttttgagtaaatggcataaaaatttgacccttttataaaaatcaattttatacttcagaatggccaaattatgaaactatccaaaattctcgtaaggagcctctcgtcgcgaccatgaaaggtttggtcgcgaccatagtgtaaagccaaaatccatcgattatgccaaattggctagttgcaaccacactacatctcgtcgcaacgcgaatatggtctagtcacgaccagtttaaaaatttcacttatacttttctttgctttcaactcgtcctgtcctttcgttacttgatagaatttgcactacttcgagaacctgaaatcaagaaaaataagcgtaaaatcgttctaaaagcaataacaaagaagaaaaacaactctaaagaacgatttgaaacttaggctaaaaatagcctaacaaattttctcaaacacaaactaacacacaaataattaagccttcaaacaatcaaattgctgctgccacctgtgaaactttaattaattaatttagtaattttttcccctgaactgtcccttgaacttttttggccgttaaaaattcctcctgaactattgagattgttaaattttagtaaaaaaattctaacatggatgaaagttcggggtatgatttaatacatatcaaagtttgagggacatgatttggtggatatcaaagtttgggaagcatggtttagtacataaacaatcactgaaacagtaaacttgaatgaaattagacaaaagtccttcaatttaacaatctcaatagttcagggagaatttttaacggccaaaaaattttaaggggcacgatttagtacatgtcaaagttcatggggaaaaattactaattagccattaattaaactacaattacaatctaaaaactctaacaattaa

SEQ ID NO: 202557 - DNA, 664 bp, Cannabis indica
aaaaaatattacaaaacgcactcaatataaaatgaaaactttaataaataattctcattaatcattcttaatatatcaccacatataattccttagagtagctcctagctttctagattagctaattgaaggggtagttggaatattattcttatatataatatcataaaattctacctttaaaaaaaaatatagatatataataatataatgtgttatcaattttagcttttttttttctatatataatataataatataataatataatgctaaacaaatggacgacccaattcatcttgacactgatattctttgacaacttggttagagtccaaatacaaatctcttatacaaaaacttattgatgtatatacaaaccaaaatccccacttgtcatcatctgtctgctgaagtttgattgtactacaagaaagctgtgtaggcacacttttttttttcttgcttaatagtattgttatatacctaataaaatgtagttttaagagataattaagagggtttattatatgggtcaatatttggatcttatacgaaagatatatatcaaaatgtcaatatccatgttattatcgtaagttgaattgaattaattaattgttggggaaaaattgtaattattatgagaatagagagaataaca

SEQ ID NO: 202558 - DNA, 772 bp, Cannabis indica
gctctgagatagattcatcctccaagatagtctcaagaaccatctcttgttgggatacatcagtaggaacctcgacttacgttccttccgcgagcacctcttctgcgaggttactaggtgcatcttcaatagcttccacgtcactcaggtgaaaatcttggttcagatccatcgctaacaacacgaacatgaagggaaaccaagctactttaagtgacaaactaagaacctaaaacaaaaatttgtcaaagttgaattccaattgacaaaccccaaaaatctatatacatgcataaatctatgaaatataaatagccaaaaaaataatccacacggttctaacccccttttcatgacaaagtgtctctcaaacaggtccatcccaaagttgaaaaaaaaaatcacgtagcctacttatctattcaacattcaaatagtcccaaccctagattaaactagaaatctctatcttaaacaagaaataataaaagtgcaaccagggattaaagtacttacttgctgggtgacgacgagatgaggtgctattgtaaaaaatttgcttgaagccttcgagcccacttggttagacggttgcaactggtctggaagtcaaaaccttagtctggcagggggtatattaggtcaatttgaaagggtttcaatatctgggaatagactcacatgaagattatcaaaaatttgggttaaacactcacaatgttcttgcatccactagcaaaggaacaactagagaggaaaagctcgtagaaga

SEQ ID NO: 202559 - DNA, 641 bp, Cannabis indica
atagaggatgttttgcaatattttttccgacctctttctcagaatatagttggagtatttacaacttcataaagagagcaaaaatgtcactattgtcgcaagtgttgaagcatggcttgcacaagctcctaggtttgaataatagggcatgtatgtctatatgataggttgcataggttttagctaggtgttaggtaagataagcccttagccttccttaattaatgtgatagttcattatgcagccgtcataaagctcatagattagagtgtaatcactaaataatagttttaattcctctaacatgtctttttagattcattcacagatgcttccattataccacatttaatgcgcctatataattcacgtccgggacctaatgaccagccctggaggctttacctagctcccaaagatgaacaaaatactttgacatcaggatgtggttgcagctctcggagagacctcccagacatgactatcaaattaagataaattctcttaggatttatcttaagtatttctcgatatttagacgcacttgtcacttggttaatttcgggactgccacgtatattggaacaaaagagggcaacactaatatatatgtacacatactaaccaaattatatacaac
